United States Patent Application Publication US 2005/0228172 A9 - sequence listing, part 143

SEQ ID NO: 672520 - DNA, 2792 bp, Homo sapiens
ctgaattgtaagttcactccaccttttccacaaagccagaatactagaacacacggtcagaaaacaaaagggtgaaattgggtatgacctccctcagtcttacactgatgggatctgtatttttcattcttaattccttatactcagtgtgttgtgaagtcctagggccaagggaakaattttgcatcaagaaacatagtcctggtttcgttcaatgagaacctgagactgttctataatcatgttgggcttttcatgttatgagatagagaattcctattttgaactggcattttacagtgccgaaaggatgttggagtgtttgtatacaatgggagcaaagaagattacatctagaacatgggcaatttactggagctccttaattcactagtgtccaaagataatggttagtgggaaactgtagctgtaaaggatttgcagtctattggaatgaaaattttggtcatactactagtttaaaatttctgatagggaaaggtgttggtagaaggtaaagggagcattgataggtgatttgaaaaaatgaaaaagaggagctgactatcaacatagaacatagaccaacagcagaggcagaacctatatcagatattgtttacttgtgctgattaatgccttccttccctttatcatgctgtctgatctgaagagtactggtggaactaacattacaacctaggttccaggtaggggtatgactgagttgataccagcccaccaccatacagtggcaggtgccctttgtaagtaaggaggatagtaaatgttatcctccttactctaccattgcactgctaagtaggcttttattttgctgtatttgccacctttaaaatttatccttcgcatcgtagtcataacaagtgaggtaattaatgaggcttccttaccttcactatctttcttcacctttgacatggtaaagtttattatttctatgttattggggcatatgacatttccagcctattctgtaaccctaatccacatttggtttcagtctacagtaaaatacattcaatacttacaacttttttttttgctgtattttaccaaagcatcttcctttaattggttgttattgttttccttccttctgtaaccaaatgtattgccctttttctccacatacccatgtttttgttctctcaaaaacattaatgaaaatattttttcctgaattcttgcttgataaaaaccgcaacaaattgtaatatatcatgtctgcatagtaagactagcttggctgcacataaaaatccttggttggcattgagaatcttgttggtcttccctcatgaccatccagcttcagtacagctaggggagccaggacagccttcttcatttctcctgtgagtgacttattctttttttctggctgcccaatagataccttattttttttaagtccaataccttcattaagatgtggttcactttttgcctgtcatgaatggatataccttgcttctgatgtgcccttttgaaaggtagattcaagtcttcatgcattgcatggaagtgttcttgaattataattttgaagtatttgttctgtctcttttggtttgttctttggatgttccagtaatgtatgtgttcaatccatttgtcggtcttccatagttctcattttctctgtaatacttgagttttgcttttcagatgtttgcttagataatttttgtataaatgggtatctatttccttttatttttgtaatatactactaaatggtttgggttttcctagataactacagaggttcagagagagaattaagacaaccttctgggcctcacaccagaatggctctttcctactgggctgtcacagagacagactgcttcctgcaagtatggctcctctggtgattctctgtgtggttgaatctcccttgttcctcccttgaacaaaactgggtccaggaggggactttttctggtagactgtgtaccctggttcccactcctgtggttaaaaaaaaggggtataagttttgaacatggaagtgaactcccaaattttcagggagtacattttgttggtgttttctgagattatcagccattggcctcactacctccatacttcatttactcccatgtggcttgtgcctgattccaactagatttagtcatccctacataagttttgaaatctttggattctaactttttctagtttcactaaggatatatttggttctttttttctccattttccttgttgcttttttatgtgttctggaataacatgaggaaaaatgctgacttttacagcctgtgtatacaactacctctacagaaaattttaagatatatattagttctttatattcacacaataactttgcaaatagtcctagtgtacaaagcttattccgatatcttgctgtgtttttaaacaaacatatatacatatatgctgtgatagctgatgttgagtgtcaacctgattggattgaaggatgcaaagtattgttcctgggcatgtctgtgagggtgttgccaaaggagattaacatttaagtcagtggattgggagaggcagaccctccttctatctgggtgggcaccatctaatcagctgtcagcacagctagaataaagcaggcagaagaagatggaagaacagacttgctgagtcttctggctttcatctttctcctgtgctggaagcatcctggtctcgaacatcagactccaagttcttcagcttttagactcttggacttacaccagtgatttttcaggggctctcgg

SEQ ID NO: 672521 - DNA, 532 bp, Homo sapiens
ccattttatagcacaggagataatgatataaacctgagagggaggattaatcactaaggtcattccaggctgagtgagaactcggagacatcagagactattacaaacttgtttatcttcaataagtttcacatagctaagacacaaactttgaggataaatcatctgtataagagattaatgagtttgaaaatcattagtctataaatggcttcacatattatgtttcaaaagttggatatgaggaataaggatttcacgaaaaatcactacaacagttacaagaagaattttgagttttataaagaacattttagcagcagtatgacaaacagaccttgaggctctgagattaataggaagaaataattgcttgaaaaaaaataaagggatyattttgtaggagattgaaaggatttattaatagtaaagcagtagaatttacaaacagattaatttgaatatcaagtgtaaaggagataaaaagtcaaagagaaacccatggttttggtttgactggcagaggaaataa

SEQ ID NO: 672522 - DNA, 532 bp, Homo sapiens
ccattttatagcacaggagataatgatataaacctgagagggaggattaatcactaaggtcattccaggctgagtgagaactcggagacatcagagactattacaaacttgtttatcttcaataagtttcacatagctaagacacaaactttgaggataaatcatctgtataagagattaatgagtttgaaaatcattagtctataaatggcttcacatattatgtttcaaaagttggatatgaggaataaggatttcacgaaaaatcactacaacagttacaagaagaattttgagttttataaagaacattttagcagcagtatgacaaacagaccttgaggctctgagattaataggaagaaataattgcttgaaaaaaaataaagggattattttgtaggagattgaaaggatttattaatagtaaagcagtagaatttacaaacagattaayttgaatatcaagtgtaaaggagataaaaagtcaaagagaaacccatggttttggtttgactggcagaggaaataa

SEQ ID NO: 672523 - DNA, 656 bp, Homo sapiens
gttccttaatactagagagcttaacatgtgttttctagcattctacgatgcagtttttaaaaatgtaagtatacagtgttatttggcattcaaarcccacagggatttgagcactgaatgtttatggtatatgactcacattagctctagcaggagtttcttcttgtatcaaaaggaaaaaacaactaccagattttaactaaggtattaaaactgctgcagcatttggtgccatcaacaagagcgccattgttagtgaaaaaagagctccccctgcagtgcccttcccccactcccaagaggaaagggtgccccactgggaataccactcacattcgctcaaaggtgtcaaacgtaaaataacttaacagtatattgccacactgaaatatagaattcattagtggatgttattctctattccataagaatgtattctgtttctggggtcatcttcaataaactacatctggttttctggaatccctggtgctgcactatgtgtacaactgcaccgcctaagtctacacttggagccagggagaaacaccttatttcatcaaatctaagacaccattaattgtaagatgcatctaattttggaatacttccactgggctgatagctttatcttcataggaagttataaggagcca

SEQ ID NO: 672524 - DNA, 656 bp, Homo sapiens
gttccttaatactagagagcttaacatgtgttttctagcattctacgatgcagtttttaaaaatgtaagtatacagtgttatttggcattcaaagcccacagggatttgagcactgaatgtttatggtatatgactcacattagctctagcaggagtttcttcttgtatcaaaaggaaaaaacaactaccagattttaactaaggtattaaaactgctgcagcatttggtgccatcaacaagagcgccattgttagtgaaaaaagagctccccctgcagtgcccttcccccactcccaagaggaaagggtgccccactgggaataccactcacattcgctcaaaggtgtcaaacgtaaaataacttaacagtatattgccacactgaaatatagaattcattagtggatgttattctctattccataagaatgtattctgtttctggggtcatcttcaataaactacatctggttttctggaatccctggtgctgcactakgtgtacaactgcaccgcctaagtctacacttggagccagggagaaacaccttatttcatcaaatctaagacaccattaattgtaagatgcatctaattttggaatacttccactgggctgatagctttatcttcataggaagttataaggagcca

SEQ ID NO: 672525 - DNA, 716 bp, Homo sapiens
tctctgcagtgtttagaggtgctgtccacaagtcaggtgttcaatttctatcttctgaaggactgaacaaaacatggctatgaaaagggacaaaatgaatcaagccttaatgcaaagacacagtaaatgcaggtgaaatgacgggaaaggagaaaggaatgtaggaaagtaaatgggggagaggagacggtgcaccgccttcagaggagaaaaattcctattaaattcctgttccgcctgtaatctcagcactttgggaggccgagttgggtggatcacctgaggtcaggagttcgagaccagcctgaccaacatggtgaaaccccatctctactaaaaatacaaaaattagccaggcctggtggcaggcgcttgtaatcccagctactcgggaggctgacgctggagaatcccttgaaccccggaggcggaggttgcagtgagcyaagatctcaccactgcactccaacccggacaacagagcgagactctgtctcaaaaaataaaaaattctcgttcatctcttaacgtggggacttgcccatttatatttggacggtatttttctctggctgtcccacttcccggggccttggagctccctcccccgcagggcggcttctctcctcctcctccctcctccctcccgctcccaggggaagggccgcggccgcagccctgacctcgcctcccacgcgggccagcagccggccagc

SEQ ID NO: 672526 - DNA, 587 bp, Homo sapiens
actgaacttgacacttgaatcttcctcatatctcaacctaggtgactttgagtgccacagggtaatatggggcatctttctgaagcatcagtttcccttgattctcttgagagagaaaaaacgttcatggacttagggatgacagccccatagatttctaagagtataccaaaattcactctgaaaagaggcttgggttgtcctctttctgttcaattcccagatgtaacagaaaggctgccttctgccatgaggactcattgatgtaagagtttgagaggggctgctgcacttcctacactaacagacatgtgatgatgtgtgactctaaaccacacagtacccagttcctgcctacttagtgtctgtttttctacctctgcctctggtattgggccctggcagctgctgatttgtggcaaaaccccagakcttggagtcagaagacagagttcaagttcaattattgccttttttaagccgtggtatcaatccctctcagtcattaagtcattaagacaacaccttgtacagttgtttgtggcaataaatcagatggcataaaagaaagttctgtaaaaactgta

SEQ ID NO: 672527 - DNA, 636 bp, Homo sapiens
ggaagtgctgggttggccagaatagaggaggctgagtgctgagaatccccaggggatctcggagggggcgtggaaagggccataatgggagggcagaggtgagaacagggaatgatgatgtcacagtgctgrgcagcggggctggggacggagtaagtggaggtggagggagtagcctgtttaaacctggagctcatccctatgaacatgaactactggcaaaaaaaaatctttttaaaagaaaaacttaataaacttaggggtcagtaggcccttgataggggagaaacaagcctttaaagtgagcgaaacccaggattgagggtacgaggtctgtgctgaatctcctggattcaggattatatcccctgagggcccagccggaaggctggaacagacctgggcacctggaaagctgacatgggaaacaggtagcaggtgagacaaagtgggtccttgatgccaggaggagaagtgagtgctgggccttgcggccttgggtccatcctaggaagtgctggaggttcacacaagagccctgcctggctggggtttctgggagccagaggaggaaagttaggttgggagggagcagagtgggaagcacagctactagcagcctagagacttggaggg

SEQ ID NO: 672528 - DNA, 636 bp, Homo sapiens
ggaagtgctgggttggccagaatagaggaggctgagtgctgagaatccccaggggatctcggagggggcgtggaaagggccataatgggagggcagaggtgagaacagggaatgatgatgtcacagtgctgagcagcggggctggggacggagtaagtggaggtggagggagtagcctgtttaaacctggagctcatccctatgaacatgaactactggcaaaaaaaaatytttttaaaagaaaaacttaataaacttaggggtcagtaggcccttgataggggagaaacaagcctttaaagtgagcgaaacccaggattgagggtacgaggtctgtgctgaatctcctggattcaggattatatcccctgagggcccagccggaaggctggaacagacctgggcacctggaaagctgacatgggaaacaggtagcaggtgagacaaagtgggtccttgatgccaggaggagaagtgagtgctgggccttgcggccttgggtccatcctaggaagtgctggaggttcacacaagagccctgcctggctggggtttctgggagccagaggaggaaagttaggttgggagggagcagagtgggaagcacagctactagcagcctagagacttggaggg

SEQ ID NO: 672529 - DNA, 636 bp, Homo sapiens
ggaagtgctgggttggccagaatagaggaggctgagtgctgagaatccccaggggatctcggagggggcgtggaaagggccataatgggagggcagaggtgagaacagggaatgatgatgtcacagtgctgagcagcggggctggggacggagtaagtggaggtggagggagtagcctgtttaaacctggagctcatccctatgaacatgaactactggcaaaaaaaaatctttttwaaagaaaaacttaataaacttaggggtcagtaggcccttgataggggagaaacaagcctttaaagtgagcgaaacccaggattgagggtacgaggtctgtgctgaatctcctggattcaggattatatcccctgagggcccagccggaaggctggaacagacctgggcacctggaaagctgacatgggaaacaggtagcaggtgagacaaagtgggtccttgatgccaggaggagaagtgagtgctgggccttgcggccttgggtccatcctaggaagtgctggaggttcacacaagagccctgcctggctggggtttctgggagccagaggaggaaagttaggttgggagggagcagagtgggaagcacagctactagcagcctagagacttggaggg

SEQ ID NO: 672530 - DNA, 651 bp, Homo sapiens
ttgcttctggcttttgctacagagtaaacttgaatcaaaaatcaaggaagctaatgaatatttgagaaagttgtatttacaaaagaattgccagtctgagtaaagttgatgggaaatgtaaaaagtgataaatatctctgccctgccccccaacattctgtaagaagaaaatattttgaaaatgttgattgaagggcatatttttcagtgatctctttgaataaccagcatatcatagggaaggaaatctccccagaaagaaaattcaaactataaagaaaaatggttggagaagcccttcccagggatcaaaagyagaattaagtcaaggaaaattcccagaacctaataacattttctcagcaagatttcacaatattcacagagtatgatatgcacctcctctttgttttcccttttaaaatgagagtgtatttagtttatgctaagattccataattgtaattagtgtatggataaagaagatgtggtacatatacacagtggggtactattcagccacaaaaaatgaatgagatcctgctatttgcaacaacatggatgagactggcgatcattatgttaagtgaaataagccaggcacagaaagacaaacatcacatgttctcacttatttgagggacctgaaaa

SEQ ID NO: 672531 - DNA, 471 bp, Homo sapiens
ccctgcaagtactgatcacacacgtactatgtatgtgtctaggaccatgttctgctttctgaaaaatggtatggacaaggagcttagggtcttggtagctgtgtttgggacatcaaaaataacataaaaaattgaggatgaaggatcaagtatagtgaggtgaaaactgagcatcactgaatcaaaaatgtatgatttgaaagagggctgcagcaactcaaggcagcctgtagggaagtggtctctggactcccggcaggctgggttcaaagtctgactttgccctttactaactcygtgaccgtggatgtttcccttaaccaccccgggcttcatcttcctcatctgtaagatgttgctaataataacatgtatctttaaggctattgtgtggactaggtgagaggtaaggaatttatttagctcagtgcctggcaggtaggaggcactgcataaatgtcagtgaatatt

SEQ ID NO: 672532 - DNA, 436 bp, Homo sapiens
gggggctattcacaccaattattgtctaaatgatgttcttaccacttagaaaagatgtacrtaggacacaatcagtttgttactgtttaaagcaaattactgtcattttattttgctgaaagatttaaggaaaaattaagtaatttaatcccatcaaggtagatggtgtgcctgatgcagtcccttacaaattgttagaaagcttgcttttctttgttattatcatatttaagctttaagaatagtctcagcattaggcaggcatgaccaaattggatcttcctcctaaaggaagccacagaagtcaacacctttaccagatccaatcctacctctctcatctttggcacctttactttcttccactatttaccataggaataatataaaaaattatgtaccttttcctacatagtacattgctactttctcaaca

SEQ ID NO: 672533 - DNA, 613 bp, Homo sapiens
cttgatttaaggttggtttttgatttgtcaggtgactttaagtgattcgcctcttggttcccaatttggcttctattccaagatagaaattctaaaacttgctctttcactcaggttgaagtgcagtggcatggtcatggctcactgcagccttgaccttctgggctcaggagatcctctcatctcagcctcccaagtaactgggactgcaggcacacactattgcacctggctttttaatttatttttatattttgtagagagactgtcttgaactcctgggctcaagcgatccttctctctcagccttccaaagtgctgagattacaggcrtgaggcactgcacctgacctgaaattctaaacgtactcacaaaatacccagaacagatttaattcagagaataccttaatctcaatgtggctgtgtccaggtgaagagtcaaaatgtaatattaaaaaaaaaaaaagagaaatagaaaattaggttccacgatagacaccagggcttacttgaggatggagggtgggaggagggagagatttgaagtaccaattgggtatgatatttactacctgggtgacaaaatgatttgtacaccaaaccccagtga

SEQ ID NO: 672534 - DNA, 656 bp, Homo sapiens
ttctcagagactcagtttgctaaaacagggatcctaggaatatcaatgccacctaaaggcgtcactacgaggagcagatgaaagaggacacagcagagggcttcacgtcaacagcaacgctctggacaaaattattaccctggttataaggatggacttaaattaactgaacaggcaagatttgctctaacaaaccaagtatgtgccaacttggctgcgctgagctataamtaaccatttaccagaacaaggctgtaatgtttcatgaaagagtcaaaatatttaatcaaaaacatccatgacattatccaatccatggacatttctacttaagatggtaacctgccttccacatgcaggtggtggggtggggtgagcaactggccacacacagagggtgcccactcactcccaaagcaaaccctttgagtcgcacggagccactgcagcctcccaccttccaacttcctctcctcagttggacgctgatgaaaaagcggtgctgtgcaactgcactgattctgctcacaaagaaaataaaccatttatttcactcctttctctcaaaaatctcaactgtatcttctgcctgaatacatttgcttcactgaagctgccctcacccttgtcactgtccaatgggacctaggaaatgg

SEQ ID NO: 672535 - DNA, 636 bp, Homo sapiens
cctttaaatctgtatgcatttagctctttagcccgatagacggaaagtgatgtggtgttgacttgtgaatcaatctttcatctcagagactacagttaagaagcgtttgggacggacgattgctttcccgtttctaaagaagtaacgtgtttagggttttggacaggttattaaagtggatttcatcacgaggagtataatgcagctcaacagctgatgtcagttttgccagtttatatttttcaagcagaaatccttggctcgctcccttgaaaagtgaggggaagtctgtagatggcgataacttcctgttactgatctctgagtgtgtggttcaaacttttgcactgcctgtgacatgcatgtgcagattttgtgcgaggcattgattatccaccagtgagttttttttttttttttttttttttttttagtcagtggttgatctgtgaatgtgtccactgggtgatgtattttgagcttaraatataaatatgtgcctatatttatatgtgtccaccaccaaagaagtggattttgcttatatttcaccatgcataaaatagctgtccttggtatttggcaatttgtttaggatgtccggagccagatggtgttcaaatgttatgcatggga

SEQ ID NO: 672536 - DNA, 604 bp, Homo sapiens
tctcgtgatccacccgcctcrgcctcccagtgtgctgggattacaggtgtgagccgctgcgcacggccacaaatgttatttttacaggtacatgggagacttcagaaagtgaaggcctcctgaagcagttagacctgagggcttctatgcccaagaatagcaactgtgaaaaagtaactaaaatccttggggaggctgagggagataagggttggtgtgtgcagctgtctctcagcctcagctcccggtgctggtgatgagcacgtcctcttcctctacgaggagggcgtgtttcacgtggggtttcatctgcttgcaggaagaaaggggaggctagagcacccttctcgcatctgctgctgcccccgtgcctttggggctgcactggggtggcctgttctgtgccgtcgccttcactgctggcccccagcacccagccatctaccagttccgatacgtagccccagccgctgtccaagacacccctttaggctttttcccttaatacagacgtaattacctgttattaaaatattaggaaaatgaacataagaaaaacgttgagatcactctcactcttgatgttgggcgtgggaggggtgcc

SEQ ID NO: 672537 - DNA, 568 bp, Homo sapiens
cgcaggaggctcagcccattcaataattttgtgaacatttaattccctacattaaaccctttggtagataaaatacctggcgtggggtctatttacctgtttcctctctcgaacccagactgagacacttctccattccactttagacaatcgccataatggtaataactactcacggttgtgagcacttcttatgtgtctgagcactgggtttagcggcttcatgcatctcatttagcactggccacacctgtgaggtgtttgccctaacagggtcagacaatatagggtacattatccaaagagtcatcttccggccaggcgtgatggcccaygcctgtaatcccagcactttgggaggccaaggcaggcagatcacctgaggtcaggagttcgaggccagcctggccaacatggtgaaaccccgtctccactaaaaatacaaaaattagccaggtgtggtggtgcacacgtgtaatcccagctactcaggaggctgaggcaggagaattgcttgaacactggaggcggaggttgcagtgagccaagatcgcaccactgcattcca

SEQ ID NO: 672538 - DNA, 1817 bp, Homo sapiens
tagaacttgagaactacttttgtgtatttttttaaactttaagtccagagtttctaatgtccgttttatactactataaaatggtactatgtattctttatttatggtactatttacactttattttatacagactctggctccacaaaaaatgttaaaaattagccaggtgcagtggtgcacatctgcggccccagctactcaggaggctgaggcagaaggattgcttgagctcggatggtcagggctgcaatgagctatgatcacacatcacatcaatgcactccagcctgggcaacagagtgagacgctgtctctaaaagaatagaagaggctgggcgcggtggctcacgcctgtcatcctaccactttgggagaccaaggcgagtggatcatttgaggccaggtgttcaagaccagcctggtcaacatggcgaaaccccatctcttggcaggcgactgtaatcccagctactcaggaggcttagataggagactcccttgaaccgacgaggcrgaggttgcagtgagcgaagatcacaccactgcactccagcctgggcaacagagcaaggctcggtctcccaaaaaaaaaaaaaaaaaagacacatggaagtaatttaaaaacacttaggaagatgtcatttcttcctatcaaggcgtcctccctttacgttttgtcgttatattgggaacgataaaaaaaatccttttttccgacccatgtggaccaggctggcctcgaactcgtgccctggaacccccgcctccgtgagggcccgagggcaggcgcaaccggcctgagccacaatggctccgggtgtcggggctgtcctttagtccctttgatcttacgcagggtgagggagccaatcaccagaggctcccccctgtcgtcacccagtccccagggccagtgagggccctgcgttccatggcgccccctggagggaggaaggggaactgtatctgagagttcagtatctgacaataaggaaaaggcataggagatcagatggtgcctagtgttctggagagaagaaacaacggggttggggaatgcggagttgcagtttataatacaggcctcatgtataaggcagacctcatggggaaggtaacatctgtgcagagaaatggagatgagggctaggagccatgcaaatactggaacatgcttgccagcagaagtcgagaaacatggccggcgcagtggcccacacctgtaatcccaggactttgggaggccgaggcaggtagatcacgaggtcagcagttcgagaccagcctggccaacatggtgaaaccctgtctctactaaaaatacaaaaattagctgggtgtggtggcacacgcctgtaatcccagccacttgggagggtgaggtaggagaatcgcttgaacctgggaggtagaggttgcagtgatgcagtgagccgagaccacgccattgtactctagcctgggcgacagagcgagcctccatctcaaaaaaaaaaaaaaaaaaaaaaaaaagcaaaaacaaacaggcgagattcatttggataaaatagctgatttaacctaatatacctaaaacatcataattttaacataatcaatagaaacatttttgcaagattttatgttattttttaccatacgacgtcttggaaatgttggtttggaccagccatgttcaactgctcagtagccatgtgtggccagaggcggccgtattggacagtgcagatggtgcatgagggtgttcgggcagtgggaacagccagtacagaggcccagtgggggcacatgcctgctgctacgggaacagtgag

SEQ ID NO: 672539 - DNA, 1817 bp, Homo sapiens
tagaacttgagaactacttttgtgtatttttttaaactttaagtccagagtttctaatgtccgttttatactactataaaatggtactatgtattctttatttatggtactatttacactttattttatacagactctggctccacaaaaaatgttaaaaattagccaggtgcagtggtgcacatctgcggccccagctactcaggaggctgaggcagaaggattgcttgagctcggatggtcagggctgcaatgagctatgatcacacatcacatcaatgcactccagcctgggcaacagagtgagacgctgtctctaaaagaatagaagaggctgggcgcggtggctcacgcctgtcatcctaccactttgggagaccaaggcgagtggatcatttgaggccaggtgttcaagaccagcctggtcaacatggcgaaaccccatctcttggcaggcgactgtaatcccagctactcaggaggcttagataggagactcccttgaaccgacgaggcggaggttgcagtgagcsaagatcacaccactgcactccagcctgggcaacagagcaaggctcggtctcccaaaaaaaaaaaaaaaaaagacacatggaagtaatttaaaaacacttaggaagatgtcatttcttcctatcaaggcgtcctccctttacgttttgtcgttatattgggaacgataaaaaaaatccttttttccgacccatgtggaccaggctggcctcgaactcgtgccctggaacccccgcctccgtgagggcccgagggcaggcgcaaccggcctgagccacaatggctccgggtgtcggggctgtcctttagtccctttgatcttacgcagggtgagggagccaatcaccagaggctcccccctgtcgtcacccagtccccagggccagtgagggccctgcgttccatggcgccccctggagggaggaaggggaactgtatctgagagttcagtatctgacaataaggaaaaggcataggagatcagatggtgcctagtgttctggagagaagaaacaacggggttggggaatgcggagttgcagtttataatacaggcctcatgtataaggcagacctcatggggaaggtaacatctgtgcagagaaatggagatgagggctaggagccatgcaaatactggaacatgcttgccagcagaagtcgagaaacatggccggcgcagtggcccacacctgtaatcccaggactttgggaggccgaggcaggtagatcacgaggtcagcagttcgagaccagcctggccaacatggtgaaaccctgtctctactaaaaatacaaaaattagctgggtgtggtggcacacgcctgtaatcccagccacttgggagggtgaggtaggagaatcgcttgaacctgggaggtagaggttgcagtgatgcagtgagccgagaccacgccattgtactctagcctgggcgacagagcgagcctccatctcaaaaaaaaaaaaaaaaaaaaaaaaaagcaaaaacaaacaggcgagattcatttggataaaatagctgatttaacctaatatacctaaaacatcataattttaacataatcaatagaaacatttttgcaagattttatgttattttttaccatacgacgtcttggaaatgttggtttggaccagccatgttcaactgctcagtagccatgtgtggccagaggcggccgtattggacagtgcagatggtgcatgagggtgttcgggcagtgggaacagccagtacagaggcccagtgggggcacatgcctgctgctacgggaacagtgag

SEQ ID NO: 672540 - DNA, 2391 bp, Homo sapiens
  misc_feature 607: n = A,T,C or G
tcgcccaggctagagtgcagtggcacgatctcagctcactgcaacctccgccttctgggttcaagcgattcttgtgcctcagcctcccaagtagctgggattacaggcgtgcgccaccatgcccagctaatttttgtgtttttagtagagacggggtttccccatactggccaggctggtcttgaactcttgacctcatgcaatccacccacctctgcctcctaaagtgttgggattacaggcgtgagccgccgtacccagcccaatttcttgaaatcaatcactttcctgttgattctgtttccctggagagtgctaactgtccccttatcctatgccacagatttactcttctgatcctttcatttatttgatactcggtgaattatacgaacactaactatgggctgggccccatcttgtccaataatttcccctctgcatataagcccagactcaatttaagatccctaaaacatgcaccagtgcccagatgtccttaatggagctarggtttcaggctattgaagatgttaggaagggaggacagaaaccaaacacagtaagttctcaacacagaattcagaatttctctcttattctatantattgttcttctgactacatatataccttttgtgacaaaatacgaacacctttggagattaagtgcttaaccagtgggattgcttcatatatcattatctgtagcctcactccctcaattatttctttctttcttttttttttttttttttgagacagggtgttgctctgtcacccaggctggaatgcagtggcaggatctcggctcactgcaacctctgcctcccgggttcaagcgattctcctgcctcaacctcccgagtagctgggactacgggcatacgccaccatgcccggctaatttttttttttttttgtaaaaagagagggggtttcaccatgttggccaggttggtcttgaactcctgacctcaaatgatctgcctgcctcggcctcccaaagtgctgaggttacaggcgtgagccaccgtgcccagccatctactcttaagtttggttgaagtttgtttatatattgttaggttacagtttgccacataaggaggcagctttaggccaaatttcacttaatttaaacaactggttttctcaatgctgcagtgaggtgagggcagaaaggcttgagcgcttgatgtgttgggagggaaatatcttcactaacatagaacaacctgaaatttcaatggatcacatctgagaaatgaatctgaggttgagttgaaatcaaatatataaagtcaggtaggagtgaggacaaaatgccaatacttgatgtttcataaatgctttcatacataccagggaactattattatctctattttagagttaaaaaagggggtgttcagagtggttaatcattttacgaagtcatgtagctcctaagtggcagagctgggatttgatcccaggcactttcattccaagtctgtgtttgtaatctgtgacttatggtccccaaaagatacgttcacgtcccaacctctggaacctaccaatgtgaccttatttggaaaaagggtctttgcagatggcatcaagtgaagaatctcaagatgagagtatcattaattacctggtgggccttaaatccaataacaagtatccttatgagataaaaaagaggagaagacacaggcacacagagtagaaggccacatgaagttggaggcagagactggagtgttgcagccataagccaccgaaggtctgcagccaccaggcgctggaagagaccaggaaggatccttccccagagcctccagagggaatgtggcctgaccgataccttgattttggacttctggcctccagcactgtgagagaataacccacgatagtgtggtggtttgctctggcaggcacaggaagctaatacagtgctctttagttctacatggccccgcttcctccagagctacgtgggccttccctattagttgatgttcatcagttctattgcacaaagctgaagatgtccaacaacggtactcaaatcccacacatccttggggaccttgagggttctaggctctctaaggtaaggtgcctgttagggaggacagaatccagaaacagtgagttcgtttttttttcttttctttttctgttttttttgagagggagtttcactcttattgcctggctggagtgcaatggcaagatctcggctcactgcaacctccgccttccgggttcaagcaattctcctgcctcagcctcccgagtagctggaattacaggcatgtgtcaccactccaggctaattttgtatttttagtagagatggggtttcaccatgttggccaggctggtctccaactc

SEQ ID NO: 672541 - DNA, 1108 bp, Homo sapiens
atttggagcatgtgggccctgttgagtgctattcacaagtgtagtccactgctcgtctctgttttgatcaccttctcaccttgaagtgacctgagtgatattatacaggaaacaggagttttattaaaatgagagtgatactccatcccctggaaaaccattttattcagtgccaagagaaatagaaatacttgccctccccctgcttcctcccagtgccccatatgggctttacaaggagggaagaaagcctgttattgaggacaatattgaagggaagagaggttggggcaggcagggaaaagggaggttcttgtaagaacaatgcaatctctgtgttgtttaaatagtatgtgactttaattctcagtcaaagcctgttgaaatacatatggatcaacgaaccacttttgcaccccaaaaaaagagaaaggtgctggcaatgaaccatattgaaattttgggttgagagtttgaaggtgaaattgtcggggtggcggggggtgggggtaaaggtcgtaatagcaacaggatgtaccatttgcagactggtaggtcagccttaaatctctaggtagctcaggtttattgctcctataaggtttctcactattatcatgacagccgtctgctaacagtgcaattttctgctgtattcatgtgtttagataaaagaagattgcaaaaaattttcaaataaaggtttacctcattctcttgccaggtaacttttgtcattaatgtgctgagttatggtctcggcatcatgcacagtcaagagagctgatcctctctgctgggtcatatatatgctttccttcctaatacccataagaggcattagggggaaggagaagaatataaacacagaaaccacatcctaacagctgcctctagttagctctgcttccccccccatccccacccccgagcttttaaatcttgcagcggcacctaatttgtcccacatggctttcctcccagtggaaccactggcccttttcttgctgccctttttgatcaaaagcaaacagttatgaagaatcaactagtttaactagtttaggccactgtcwttaggctgctggtgtgcaggtgcctatgaata

SEQ ID NO: 672542 - DNA, 608 bp, Homo sapiens
tcaaatatgtgcaagcaattctgttgattgacacgtgaccaaagctgctttgctgatgttgtaataacattcatataattgtgaagaaaggggttgtgtcaatcctcttgtagcaccagggcttagggcaacaaaaatacttattcactttgtagtggagaaagcaaacagataccatctttttaatggttgaaagttaatattacaaaagatgggaaaaatagacattgtattagtcttttctcacaatactaatgaagacatactcacaactgggtaatctattaaggaaagaggtttaattgactcacagttccacatggctggggaggccttacaatcatagcagaaggtgaataagaagtaaaggcatgccttagatggccacaggcaagagagcgtgtgcaggggaactcctgtttgtaaaaccatygcatcttgtgaaacttattcactatcacaagaacagaactagaaagatctgcccacgtgattcaattacgttccacagggtccctcccacaagtgggaattatgggagttacagttgaagatgagacttgggtgtggacagaatcaaaccatatcatttcaccccagcccctccc

SEQ ID NO: 672543 - DNA, 608 bp, Homo sapiens
tcaaatatgtgcaagcaattctgttgattgacacgtgaccaaagctgctttgctgatgttgtaataacattcatataattgtgaagaaaggggttgtgtcaatcctcttgtagcaccagggcttagggcaacaaaaatacttattcactttgtagtggagaaagcaaacagataccatctttttaatggttgaaagttaatattacaaaagatgggaaaaatagacattgtattagtcttttctcacaatactaatgaagacatactcacaactgggtaatctattaaggaaagaggtttaattgactcacagttccacatggctggggaggccttacaatcatagcagaaggtgaataagaagtaaaggcatgccttagatggccacaggcaagagagcgtgtgcaggggaactcctgtttgtaaaaccattgcatctygtgaaacttattcactatcacaagaacagaactagaaagatctgcccacgtgattcaattacgttccacagggtccctcccacaagtgggaattatgggagttacagttgaagatgagacttgggtgtggacagaatcaaaccatatcatttcaccccagcccctccc

SEQ ID NO: 672544 - DNA, 614 bp, Homo sapiens
taaatgatttcttagttcttctgaatttgagatgtggttatttgaggaaaagtttgcagaggttaagattgaactaagctttgagtgaaattcttggctttctaactttgctgattattcaaaactgaaatgatctgtcttggaaggcaaggagatatctgtacaataatgttgaaggagaggtgggatgaaccactggcatggatatgatttgtaaagcaaaatcaggtatcaagtgtgtagtaccaaacattatttcagacccctttccctgttgccgtgcactggtttgaagaaacaggggaacttaagtggatacataaatggattggagtgagaggtcattgttcaaatcscaattccacaagtgactggctctgtaaggtttgaaaaactgattaacatctctcaaactgcttgtattagtctcctagggctgacatcgcaaggaccacaagaccgctagcaagactaataaagaaaaaaagagagaagaatcaaatagacacaataaaaaatgataaaggggatatcaccaccgatcccacagaaatacaaactaccatcagagaatactacaaacacctctacacaaataaactagaaaatttgga

SEQ ID NO: 672545 - DNA, 3062 bp, Homo sapiens
tcagctttcctctcttctgtttgattcccctctttgttactttatactaattccagacaacgagattcctttccctatccttagccagcatctgactctaccaatacctctgacctcatcagttcctgacacctctgggatcttgttccatcagtgccctaacccctagctcctctgtcttcaacctctctttctctatttaaacagccctctcctcagcttataaatatctgaagccctaaatagctggaatcactgtaccctcaagctattatccttctctcccaagccattctaatgcatgattttcaacagacatctgcagtggctatggtctgttttatcatgtccttcctcaatgaattttcagaatctactaaaattgttgttacacatgtcaccaatagccttaattactgaatattaatgaattttctactattttcttctatcatctttactctttatttaatttgccaaggccctccttttgaaatgcttcatcctttttaattttgtgacatctttctcttctgcctaaagacatttttctgcctcttccatgggcttctcttcctctgctttcactctgtatgctttctcaaacttagacacccaatttcatagttttatgctaatcatccttatgcgtattgctcaagctaccttaaaaacttacttctaattttcctggatcccttcacctgaatgttcatcaattgctatatattgataatgtcccaatctaacttccactaaatcatgtactattcatttgagttggtcacctttaggtaatctctcaaacacttagctatcattctcacctctccatactttcagccaccaaatccaattatttattaagtcctaaatacttatatcaaatttatgtatkaaataagtatttcccgttatttacatatgtgaaatacacacatacacacacataaatgttttttctctgtcttcatatcaatgtatctttccttgtagatgtctctaaactcaaacaggtttattgcactaacttcctaactatcctctctgttttcagttttgactccttagatcatgctgggactaggttccataaatacaaacccaactctgacacttctatttaaaagtttccagtcactccacattttctatgtaataaaaccaagtttttaaatatggctttctaggtattttaaagtttgaaactactcatgcagatttatttcttgctatcctcctcttcaccctttatactccagcagcaatgcattgcttgtattttctttacacccctccagaatatatcacattacttttgctaatgtttatctttgcctcggtgacccttttctacgcataggccttcctcactagtcctctttattcccctgtcacctgcctggaaaacttctacgcctccttattttttaagactcaggtctgaggtcactctttccaatgcatctgctctgacccttctggactggctgatgtgtccctcttctgtatgtagtttgttagatgctatagcatgttttgtccctacctttaccactagactgtgatgtcctttagtgcaagggctatgtctcataaatcgctgtaactccagcatatagcaaagttcctgacacatggccaataaacttttattgcatagggagtcttcaagccataaaatgattcacagtagaattaacggagaagtaacatggtccaagcactcctggaggaatcagtgctctgtgtgatgctggagaggtcacttcacctttctacagctctactcctcagctgacaaacgaccacctatattttaaggttctttcctgttccatatttctataaattacgtctcttcatgctgcatttatgtttttcatgttttctattatagaattttaacaactcccttaagatacttcgcagacattccacacacggtaactacattgaagttgagaacctattgtgaattaagtcatttacacagattaagttccccagcaaagaaagatgagtaagtgtaaattgaataaataaatacattttattaccaacttttaaaaatgtactgaagaaatataaatttatggatagaaacttcagtcaaccaagaataaagcatactcacatagccatagttttttaggggggtatgtgggagtatgaatagtccagataagctatgtgcgctaaaaccttattcattaaggcaacatttttttgagaatctattgagtgttaagatatttattatatgcagttgtcagtccagtcatcaataattatattacaagtatcaatttagttgtatttcaatgctactcattctttttcactcagtgttgagggaactttcttattcatctctctatgtttctggtagaatgtaagttcttgaaactcaccaccagagttaagattctggtcctgctactttctatctgtgtctcccaaggcaagatatttgaccttcctttgccttagatttctctcctatgaaatggagatgaatatacaagtacctacacatagatcaggtcaggtatataaaatgagttaatatgtgcaacataaaaacaaaaacatgtagaattaagtaagttacaatcacatacacattacatatgctactgaacataatgtgtccaacaatatccctgtattagatgtttactatgtatttattgtattaacattaacttgacaataacacaaatctattacataagccatatatacaaaaagtccaatgaaaggttaaactatgtcttaataggaggtaaattgcgttggagtagtaaaagctgagaaatattactgacatttaaatttttctaaagatgcattggtattcattcagcaaacatttattaaatacacattacattgtagatgctgtgctaggtgctgaaataatgcgaacagaacacatgactcatgcctttatggactttcagtagggaagacacacattgaataactttttgtatttatagaatattaagatgaaaaagtttgatgtcctacacttgatcttagccaaaaggtgaaga

SEQ ID NO: 672546 - DNA, 1477 bp, Homo sapiens
gtgagaactggggttcctccacaaccttggtcaagtcacgtaaactgtttgtgtttcagtttctctaccagccaagctytgaagtgctatgattttgtgattaagaactcagcatcagactgatggcttgtggctcctacttatagaggttttctgttccccatgttgcctcttaaaaagaggcctcttccagaggttgcagtgagccaagatcgcaccactgaactccagcctgggcgacaagagtgcgactctgtctcaaaaaaaaaaaaaacaaaaagcaaaacaaaaccaaaaaaaaaaaaaacaaaaacaggcctcttcagagaggagaatgggtaagaggtacctaataaactggaatttactatactgaaagatattttaaataaaaatgagtgtaactagcatttactgagaacttacgtgccaaaatctccactcagcattttaagtgcattaccttaaggaaattaggattggttgctactgcctttagaagctggtgtgtggtgtgtgtgtatgtcttagaatattctccatatggagcagcaacagtcaattcaaacagtgtgttaaattgttttcactgttctaggtcatatgtgccttttctgcatgtgtgcatgcatgtctccagtattcgtttttaatagcaaaaagaatcacactacggtgtattgagtacctgccatgtgccaggcactatgccaagctctctaccttcatatgattgcatttaatcttctaacaacctaacataatgggtattattcctatgttactgtagaagaaactagggatcagagaagctaagtaattcacatgaagtcacacagccaggaagtgacatcctaaattcaaactcaagtctgtttgactcaaaagcaatgttatttctcctacattgagctgcatcccattgcagtgtgcctggaaaaggtcagaatatcctgctgatatgaacatgcccctaaatgcctcagtgctaatcctatgagtgagacctttgtgagcatcttaataggtagatctgtggctacaacccatagccagacatttcaagaatggtattaattgtctacaacacaagagaaagattatttatcgtcaaagctgtgcgggacttggggagcagcactcatgttcttccaggtaaggacactgaacctagagaagtgagctgcttggccaagttcacccggagttagagcttaaatctaggtttctctgtcagctcatctttctactccactgccacttcctcccttgcacttctgccttcctcagaaattttaattgagcatgtgaatgtgagagttggggggtgtgtgtgtgtgtgtgtgtgtgtgtgtgtgtgtatgtgtgggtgacagaaaaaaaaagattgcaggagagtgctgacagggaggagaccaggttgggaaagaaaggcagaaagactagtatattttaaagccagatgttgcatttttaa

SEQ ID NO: 672547 - DNA, 1477 bp, Homo sapiens
gtgagaactggggttcctccacaaccttggtcaagtcacgtaaactgtttgtgtttcagtttctctaccagccaagctttgaagtgctatgattttgtgattaagaactcagcatcagactgatggcttgtggctcctacttatagaggttttctgttccccatgttgcctcttaaaaagaggcctcttccagaggttgcagtgagccaagatcgcaccactgaactccagcctgggcgacaagagtgcgactctgtctcaaaaaaaaaaaaaacaaaaagcaaaacaaaaccaaaaaaaaaaaaaacaaaaacaggcctcttcagagaggagaatgggtaagaggtacctaataaactggaatttactatactgaaagatattttaaataaaaatgagtgtaactagcatttactgagaacttacgtgccaaaatctccactcagcattttaagtgcattaccttaaggaaattaggattggttgctactgcctttagaagctggtgtgtggtgtgtgtgtatgtcttagaatattctccatatggagcagcaacagtcaattcaaacagtgtgttaaattgttttcactgttctaggtcatatgtgccttttctgcatgtgtgcatgcatgtctccagtattcgtttttaatagcaaaaagaatcacactacggtgtattgagtacctgccatgtgccaggcactatgccaagctctctaccttcatatgattgcatttaatcttctaacaacctaacataatgggtattattcctatgttactgtagaagaaactagggatcagagaagctaagtaattcacatgaagtcacacagccaggaagtgacatcctaaattcaaactcaagtctgtttgactcaaaagcaatgttatttctcctacattgagctgcatcccattgcagtgtgcctggaaaaggtcagaatatcctgctgatatgaacatgcccctaaatgcctcagtgctaatcctatgagtgagacctttgtgagcatcttaataggtagatctgtggctacaacccatagccagacatttcaagaatggtattaattgtctacaacacaagagaaagattatttatcgtcaaagctgtgcgggacttggggagcagcactcatgttcttccaggtaaggacactgaacctagagaagtgagctgcttggccaagttcacccggagttagagcttaaatctaggtttctctgtcagctcatctttctactccactgccacttcctcccttgcacttctgccttcctcagaaattttaattgagcatgtgaatgtgagagttgggkggtgtgtgtgtgtgtgtgtgtgtgtgtgtgtgtgtatgtgtgggtgacagaaaaaaaaagattgcaggagagtgctgacagggaggagaccaggttgggaaagaaaggcagaaagactagtatattttaaagccagatgttgcatttttaa

SEQ ID NO: 672548 - DNA, 646 bp, Homo sapiens
ataggaatcagtatcttcattttacaggtaaagaagctgagaattaggacggaaagagcttgccccacattccactgacaattgaaatcgctaggattcaaacccaggtctgtctcaccgtcttaaccactgagatttgtagcctgtcccattagactgaaatcctatttgaatcagctgtgtaggtttacattgcctgagagtaggaaaaaagtattttcatcctgaagacctaatagagcctttcaagaatgtattttacagctcttttcttgctgatagtagcagaatttgatctacagctcaaagtgtaggcccagttgaatgtggaagacttgacgggttagacargcatcttatgtcagaagacgcaaggggccagttctttaagtctggaaagctcaggctaatattagtgatcagagcctgtcatggaagaatttgagaagtcagtaaaatgttgaaggattggggtgactttgaaagtcaaggctagcaaaatgttcagaatttagtggttcaaatggttagggagattagtattatcaaagtgcaattctgaatgagatctggatcagaaattagtcatcatttttctgttctcttattctctcatatttcctcctgaggctggttgcttgagtcc

SEQ ID NO: 672549 - DNA, 589 bp, Homo sapiens
caacaatgaagaaaaactattgtgtctttttatatgataggtcctgtcctggtgttttataagctatgatgcagttattattactctccctattttacagaagaggaagatgaggcacagggagattatttcccttgctcaggttcactcaatcagtggaaaatgagcttgaacccaggtccatctgaccccacgtctgggctcctatccactaagtatactagaaaagagaagagttatgtggaatagagcatgattccatacattttaaatgtcttgaactcccagattagtaaaagcgttctaggatgccacttccagggtagtctgaatgaactgaagacaagattgtataaatagattctactcaattagggctggcaagagaactaatcacaagtctgctctgtgatctaagwcttgagtgcaatacacataaggagaaatattctgttccccaaacacacatctctgtccttgctctagtgtggtgattatgaaggagaacagggcagtggctagaactctgtcaacactggcgatatcaaatggcatagcaggagctgcaggaacaaaaagcccaggcccc

SEQ ID NO: 672550 - DNA, 652 bp, Homo sapiens
tcaaaaaaaaatgaggctgttacacttggagaagatttcagggaagcatacaacagctgtcttcaaattcttgaacagttatcaaaacaaagaggaatgattcattcagtggaactccacaaaacaatgacagagagtggacattttaagaagagttcagcctaatctaaggaagcactttctaaagagggactggactgaaatggaagtgtaagttttcttcactgaatccatgtgacaccaagtcctgggtggtatgagggtttcctgagtaagagggagattagcatcaattatcctaaagatgcttttttactttatgaaattgctttctgtagaggaaatgattgttctggagccaagmaaatagtgtgatgtgatggaatacttaccctacttaatagaagacacttttcaaaggacgtgttcatttataagcaaactgttaacttacccattttttgaagtatgccccttatgaaacttttagcattaatactttttagttgctttagtttaaatatctgtatctttttgaaagtaacatgatggatttttaaaaaaaggattttataatctacatttttcattaattcaagcagatttttccttaatcattctgaatgaatcatacttctctgaacatctgaat

SEQ ID NO: 672551 - DNA, 606 bp, Homo sapiens
acttcttgcttcttcagtctaccacaacagatttttttttccacctctgggcaactgggttcatgattaatcctttgcatctcttggcctttttggatagaagagagtattttaatccggtagtctactgacatttctttttcctgtagttagaaaaactaatttatattgtcttaaagtaatactgatgttgcaagttagaaaaatgcaagaaaaaaagtgaaaattatttgtaacctagtattcagagattatttctattaacacttgaaaagatttgtctagccttttgcatatctatctatctatatatatatagtatataataaggttaacaaggttatactatacatgtggttgtttatactgcttttaaaaataatttaataatatttgcacattttcctgtgttgttaaagaagggaaaatgagtacaacaactttggaaaaagatctggcagttatttattaaactacacatgcacataccctatgactcaacaattccatcctatgtataaagtccaagaggaaataaaacatttattcacaaaatactcrtacaagaatgttatgtcagctttatttgttatagtaaaaaattgg

SEQ ID NO: 672552 - DNA, 1528 bp, Homo sapiens
ctaagcaagcagttaattagataagctggcagagtgcaaggaatgtctagtggaaagggaggaaaaccaagagtttcaaagtgtattttaaggctaagactagacagaattttaaaaaaaggtttaagatgcattttgaagctaaactagtcagttacactatagcctttataggaaagtcaattctcaagtgggaaaagatgagtacatgtttaamacccattatatatatttgtgtgtgtgtatatatattatatatattatattatatataatatatatacacatatataatatattttttaaaaacatatatgctttaaaaatatattgtatatatgcatatataatgcaacatgcttatatcatgtaagcacagaataatacgtttacagtgtagaagcagaagaccaaaatcaaaatgcaagagcaagtccgaataaaaagcaactcttgcatcttgatttcagtcttgtgcttctaaattgtaaaggtattattccgtgcttacatgttataaccactcttagaaaatgccagcaacacatcatcatatctttttccatatcattacttcttaaatgttgcaccataatgatgttgaaaaagacatcattactactacaaaggttgtatgccactaagaacattaaaagattactgagtagatatgatttttattttcgttattatgctggtgtcaactagaaagtttgatcaagaatgtaatattcaaattacatatttcagaattttttcatcaaattatgtcatatgttgcaataatgcgctgttaaaactttcaaatatgtccctgtctctctttataaaaatctggcccaaaacaagggcttctgaaactgtttctgaaaacccgtcaaaataataaaagacatgagaacattaaaaatacattggaataaaaatacctctggaatgaacatgtcatttcttctctaatcttttattgccattaaattgtaacattggttgaatttcaaatacaatatgagatctcctaaattcaactgtcatattatgttattctatgtgattttatgagatgttgtgttagcaaagaatgggaaaacactggatataactcagagtagtataaactagataacatgatttgacaactgaaatttaaaagggaaagtaggtacagtagttttagatcagatatcccccatcaagttgtaaatctagtagaagtgaagtataaaagttgggaaggatatattgccaggaaaactgtagatcaaaatgtgttgtgtagagcagttttagcatacttattatttttgaaaaataatattatctctttaggtgttacagtgtgttatatataaaaaaaagcaaggttaactttaacgatagtattattaaacaacaattagaaaccaaattcttactcttgcacattttattttggagaagaaagcaagataagatctctagctttgaataatagatattttacatagtaaaaactttctccaaatgaatacccttttaaaagtcatga

SEQ ID NO: 672553 - DNA, 615 bp, Homo sapiens
ttgtgcaaaggagttgtattagtctgttctcatgctgctaataaagacatacctgagactggataatttataaagaaaagaggtttaattgactcagttcagcatggcaggggagaccttgggaaatttacaatcacagtggaaggggaagaaaaacatctttcttaacatggcaacagcaaggagatatgccaagcaaaaggcggaaagccccttataaaatcatcagatctcctgaaaactcactccctatcatgagaacagcatgagggtaaccagccccattattaaattacctcccatcgggttcctcccatgacacatggggattatgcaaaccacaattcaagatgagatttgggtggggacacagccaaaccatatcaggagtcatgattctatgacattggcctatgtacattaaaataaattacaaggaagcaartgggcaaattttccaagggctggaagagatagaaatgatcagacaagctccaaagatgtgggggtttttttgttgcctttgagttgaaattcaagcaggtgtttgacatgccaagagaggagcatgccagataaagttaaataattttttgcaattattgtcaatagaac

SEQ ID NO: 672554 - DNA, 646 bp, Homo sapiens
aggttgggacaaagagaaacaacatcaatgcactattacaggcagaattaagtgatacactttatttggcaatttgggagaacctaccaaaatttaacatgtatgtatcttgacccaagattttctcttttattttttacacagcatgtatgtacacactggcagctttatttttaatagtgataagagacaagctgaatatcaatctgtggagaaatatttataacattctccatattaaaaaagagagaatgtgtcaggtaaagtgttaagccccccaaaagagagtgatagtaaaagagcagctacctcacaaaagagtttatcatgtcttggyagagaaacattgcttgtgagagcactgaaagtgtatgcaattggtgcatgtctataaatgaccttcaggaaatcatggaaaatgggatgtgaaacaagagaaaaatgagtaaatgttttcatttacataaaaggggagttgtggatcccagattcattaagcctgagtataaggtctattctacaaaattatgtcatgaatgttctggcatatgttttgttaatgttatgataatatgttactaagaaatacttgttcaaacttatgtgatttgatttattttcttgatagacttgttaagactagtaa

SEQ ID NO: 672555 - DNA, 646 bp, Homo sapiens
aggttgggacaaagagaaacaacatcaatgcactattacaggcagaattaagtgatacactttatttggcaatttgggagaacctaccaaaatttaacatgtatgtatcttgacccaagattttctcttttattttttacacagcatgtatgtacacactggcagctttatttttaatagtgataagagacaagctgaatatcaatctgtggagaaatatttataacattctccatattaaaaaagagagaatgtgtcaggtaaagtgttaagccccccaaaagagagtgatagtaaaagagcagctacctcacaaaagagtttatcatgtcttggcagagaaacattgcttgtgagagcactgaaagtgtatgcaattggtgcatgtctataaatgaccttcaggaaatcatggaaaatgggatgtgaaacaagagaaaaatgagtaaatgttttcatttacataaaaggggagttgtggatcccagattcattaagyctgagtataaggtctattctacaaaattatgtcatgaatgttctggcatatgttttgttaatgttatgataatatgttactaagaaatacttgttcaaacttatgtgatttgatttattttcttgatagacttgttaagactagtaa

SEQ ID NO: 672556 - DNA, 603 bp, Homo sapiens
tttctcaatatattattaatacaaagtcatttgaaaatatatgttaggcattatggttttcacagtagcaagatgccaacgactttcaaatgaggaagaggaacatatttatttctaacrtattgttttaactgacagtgactgtagcaccagggttccttaaataatagctagttttctaccaattcagataaaataatttaaagttactggatactttgctttgttatactgcatattggcttcttcgaataactaaaagagacaagctaaaaaaaaaacctgggataatggtaaataaagcaatttgtttcacagttcacgtagatggtagaaactcataccagaatgcattctagaaactcatcaaaagtaagcatatccgaacttggtaatttcaatgtagcatattttcattttaatagatttttattaaattcataaaagttaatggactagggattaagtcattatgaactctgtcccaactgcctgttattaatagcatcacaattgtgattccattgttaaatactgtgtttctaaatgtctttttttagtcaatcacaatttttcatcttagatttctcactccaacaattc

SEQ ID NO: 672557 - DNA, 1404 bp, Homo sapiens
aaatttttttctgcaaaggaagcatacctatatggtagctcatctgttcaagtataacgtacctgatatattttaatcaattaatttaagctatttgtgactcccagaatgttgcttttgaactgtgcccttgtggaaatactgttttagaaagcttgaattgaaaaggaatgggtcgaagaaaaaagtttattgtttaaaagtaattagtggkttggttatgtacaccaccactgctgcttaaatctcaacagctagacttatttgttcatgagtggaaaatattttgctgcatttcatgggaataactaatctattggtataaatacatctagctacatatgtactttaaagaaaaatttgtcataaatgatctaacatctagaagacacttttggaagcctaatgcagttggaagacctgttttggatgcccacatatattttcttcctctccaagaactcaaagaataagccatgaggcaacttattcacctctagaatttgagaattcatgtcctcttggcaggcttaactttgtccttctgagcagaggcattgtaataacatcttttatgatggaatcacgtaacactatgtgacataccattcatcaaataataaaatagaaaccacatttgtggtataatcttaactgtgcatatagagctttgtattagtctacggtatgtcctgaagctaaatttgattactattcctctagcaagatgtttaaactaagtcgaattatgtagagttgtacttatggcttaaatggcactctcctgtgtaatgcaaatagaatagccacagcagtgtgcaaatatatgcatgtaagaaagaataacatcagattatttggtacccaaaggtttaatgtatctttttctgggaaaaccttgatgcatttaaaaacttttttcattttcatattaatgataattattattgaaacgaagcttgcacattttaaactgaaaataaggccattcgttttagttcatatacagttcagaatgtttcatcccttgacatttaaagaaagcattttagatggaagaataacttaatggtagtatcaatatgtgctttaatgcataaaggatacatgctgaaaaattagtggattaaaagatagatttcttaaatgtatacaaatttatgactaatagatacatgatgggtacttactgggaagttggggatgggatggtgagggtgatcacataaaatgctaagaccatatccttcatgatctatccttaggtcatctcatcaaataggattctattctggatgaatcggttttaacatctcatacatttttccccctcatgagaagcattatttaaaagtatcacaggaataacataaaatttaaagtgacaggaaaaaatattctttc

SEQ ID NO: 672558 - DNA, 608 bp, Homo sapiens
acttgattattccctagttgttattattttttcctcatgataaataatcttgaaatttcacctatgttcgtatcaaaagaacaatcataaaggaatgctccaatagtcacaaccagacacatttccatctcagcgtttttgtatttgccgttctgtctgtttagcactgttttcccagatagtcatgtggctcactcacctctccttcaagtccttgcttacatgaatgttctcagcaatgctttccctgaccatctcaagcaaaattaacctacctcagagctctattccccttatctatatttgttcacttgtgtttgcttatttgttcacgtatatttttctgtcatattttagtgcaagcaagctccttgaaggcaaagatttttatgacatttttcccttaaatctccaaatcctagcatagctgataaatatgaggtgcctaaaaggtgctgagggaatgaataaaagctgttttgtaaagtaataataataacaatgaacaccatcttgtttagaaacatacacwtaaaagttcttgggttatttattcctttgcaaggatttgctcatttatatttctgcctcttgggaattgtcttagc

SEQ ID NO: 672559 - DNA, 2206 bp, Homo sapiens
aagtcatgactgtttgtgttcgttgctatcctccattccttgatatggttgggtcctctgctggcatcctcctctgtaaagctcacgttattgggacaggagaccatctttacattgagggtttccctgcggggtctgcagctacccaaatccaggacatctttcactctgtgctctgtgcatgtgcccccttggagtaggtaaggcaggactgttcttagactaattcattcattcagaaacgtttatgaagcactggccatatcttagacactgtactggtctctggggatggagtggtgaataagccatgtctgtcctaattgatgggaaggtgccatccacatgtgtgtcacttgggaaactcaagagtcactatcgacttatttttcacccttagtccccacattggaatcgaacatcaagtattacaaattttaccttctgaacatccattatactcatctctactctgcatcccagccaacactcccctagtttagtcctttaatgcctcttctgttgattattgtacttcccccataactagtgtgtctgatctggtgtcaccctcagaaatccctctcccatactgtagcacacaatctgcctcacatacacttctaactaagttgctcattcagattttcaagtggctcccttttgcccattttacatggagtacaaagttcttggtgcctggttcctacctgcctctcttgccttgcccctcagtagttgctattccaccaccagccagatycttcagcccttttggactggccggcctcccgttctcctggtgggtgagggatttgattcttccctctgtacatctctcccctgaccccactgcctctctgcctttgttccctgatccacgcagtctggaccctgcctctttcctaacttctgcatctagataacccctttttgttctttagggtttgttttagggcctaattcctccaggaggtttttcttgattccctgtccattccatgagaggcatctttcctcagtgggcccatggcgtcctctgcacagctccatctttgctcctgacccctggcatgggagtcatctccactgagccttggtgcttcactggactctggactccacgagcggaagggcccagtactcagcacacagtgggcccccaataagcttgctgaatggttaagcaaataatcccagtgcaatggaaaacaggcagcttgagggcatgactgactccacctggggagtttggacgtggttctaaagaaaagacatgcaactgcatgttgaaggaagcagagaagtttatgggacgggtgtagggatagggcaggccccagccccctgccatgttccttgtggtcgcctgatttctggtgctgggcaggagctgagctatttcaaagaaaatgtagtcaatagccttcgagaaaagcggattgaaaacccaccagagcaagaagccatgaagcaagatgagtcagccacagatccgactctcagtggtttcatggtctagcagggaagcaaatgcagtctttttttcctccctgttttatagttctatttgtaccagtacaacgttcatgcagggttacaggttacagggagcgcaaatagacctcacacgcacttgtctgtgtggtctgagaacctgtcttgtccctgtgccctgctcatcacccccatgactgcccacggtgtgatggctcaggccactgcttcagggccggcttctttgggagcagagcagcacctaggaagtaggtcccttctgggattggagagttgaggcacgaggtaccagggctccagtgacactgctgctgcccttgccggcccctcttctcttgggtcttttcttggttcctggagtttttcctttttcctggtaatggatgttggaactagggagggtcagaggctatgcagttctggggacagaatggtacaattggaacaaatggaatttcaatcctagcttttcagtggagggggtggtcagctccaaatgtccatgcttttgtgataaagagcctcaagaagcccccacagtctgttttgtagtaggcatcaaaagtgttaaaaatgggtgcactttcctgactatatagtggagtaagactctgcactaaaaaggaataaattagtgatgcaataatatgaatgaatctccaaataattatgctgaagaaaagaaacc

SEQ ID NO: 672560 - DNA, 635 bp, Homo sapiens
acatgttagacctaaaaccataaaaaccctagaagaaaacctaggcaatagcattcaggacataggcacgggcaaggacttcatgtctaaaacaccaaaagcaatggcaacaaaagccaaaattgacaaatgggatctaattaaactaaagagcttctgcacagcaaaagaaactaccatcagagtggtctcgaacttctgacctcaggtgatccgcccacctcagcttcccaaagtgttgggattacaggcgtgagccactacacccagccagaattttaaaggtaacttaatgatgtaactaatgaataaacctgcattttcatcctagctctggtgcttattwggcaagcattttgcttaaactctctatgctctagtttcttcaaccataaaatgggaataaaaacaattaatccctaaaaagggtttctgtgaagatcaaaagaaaaatccattaaaaaaaaaaaaaaaagaaaacagccagttcagcttgcaactcaaacaataatacaagtacttttccttgagacaactgtcatagtttggtaggtggcaaaagacctttatgtatatttttcagagtattaaaagacatactgcaagtgtaagagagaaaggacatatactgcaag

SEQ ID NO: 672561 - DNA, 663 bp, Homo sapiens
ttgcccatgtaggttgtgtaagtatattctacgatgttcacacgatgacaaaattgcctaaggacacatttctcagaacttatcctgttaagcaatgcatgactgtggtcaaacatttagattctcattttttttttttaaataactagagaattggcctttcctactgcacttctggcatcatgtcggcagtgctgctgtttgtatctctgtccttttttttgagatggagtctcactctgttgcccaggctggagtgcagtggcaccatcttggctcactgcaatctccacctcctgagttcaagtgattctcctgcctcagtctmccaagtagctgattacaagcatgcaccaccacacttggctaatttttctattttttagtagagacggggtttcaccatgttggccaggctggtctcaagctcctggcctcaagtgacccccctgcctcagcctctcaaagtgctgggattacaggtgtaagccactgcacctggctttgtatctctgtctttctgaaccttcatccatttctttcttgtcccatttgcttctgtattataattttgaagtgtgtaataaggacaacaggttgtaatacatacttatagcctgtctccccacctcccctttgaagcaaggcctttaatttttcaat

SEQ ID NO: 672562 - DNA, 1406 bp, Homo sapiens
ttggcccattcaagatgtctcttctaaactccatcctctatctgggttttgtattcacattaatgacatcagtatttacttagtcatttagactctcagcttcagtcattgttaattctttgttactccttatatttcatattgttttgattaccaaattatccatttgttaacttactatctatgccacaaatatttaaatgttttctttttgatgggtgctcttctgggttctggcagtgtaataacacataacaaaaagttcctagactcatgcagcattcattctagcaggaaaaagacagacaacgaactaataaattttatttatatatatatatgaagctaattttggataattaaagtcactgtgaagaaattaagatgggtaaatatatttgagagttactgccatgataattttgttaatcagaaaacatttcattaagtagatgacttcatagcgaagatccaaagggttccaaaaaggcaggcttatgaagatcagaggcaagagtattctagggagagaatacaaagtgaaaagcccctaaggtggaaccagattttttgtcttgttggggcaaaaggagagtaagtgtgacaaaagcctagcaagctgggggtatgttagtaaaagaagttgagttgtagacttggctgaattcatgtaaaatcttttattccttgtttagaagagttctaggtaaagaggtagcatgatctccttcatgtttctaaaagataactctggcttctgatgtaaagaatggactacaagctaacaaagcagctaagaggcttttgaagcagcctagttgatagttgatggtggctaggcttagagtggtcacattggagatgaattttggatatgttttggagctggagttgacatgctttaatgataggcaggtgatgaagaatgacttgtgtcatggggtcagcattggtgagttttactgaaatgaggaaaactaggaaagcaaaggatatgggtattaattaagagttcactttatagatagttattagaaatgaaaatggtaatgctaagtaagtagttgactctttgaatcagggggctcagctgaatgttctaggcatagggaagagggaagtgtcatatcatgaaaaccaagaggatagtgtttcatgtgagtccaatgctgttaataaatctagtgaagtggattggagcagatctctgatcattgtattggggtgcatagacatgatgtactttcctgtttcrgaaggctgatggccatagatgcttaattagaacgggtaaagaaaagctataggtgtaaaatggagactgaaaatttttataccaaaaaaatggctctgcattaaatttctgcttatcgtttcctgtttcctttgcattacctctttctgca

SEQ ID NO: 672563 - DNA, 658 bp, Homo sapiens
tatagtgtaccagagtatatgctagggataaaggttctagtgataaagttgtggaaaagtctgataaagtccttgcttttatagcactatttgtagtagagaagacaagatgtacaagtaaataaataaatgaatacatttaaaagttaacatgactaatttcatataatgtcaaagttgtgaaggaaataaaacataaattcagtgaagaaagatttaacagggattagtgtaacattagaaaatacagccagataagctttctttattaaatgatattgaaacatagcctttaactatgagaaggatcctgccatgttaaaatcatgtggaagagakttccagacaggcaaaagtaaaagtaaatctcaggacactaagaggctagcacatttaccacgagggaagagaggagggagtgatggtaggtgtttaatgaacatgtttgtttcttctgtagttgttaatctatttttgtctaattttgttaatttatacattcctacagattttcccttttgcctaggttttcaaaagcactgatataagatgacatggtacattttaatattttagatctgctcttatcctattttgtgttcctaatattgtctttttctgtccttttttatattcagtcatactcatcaaggttttt

SEQ ID NO: 672564 - DNA, 682 bp, Homo sapiens
acctggaaaagaccaatctatgttgtcaacatattcaccatgatattaatatgtgttttctacagacaaggtgtcaaagcaaaattgcacttgagaaaattaaacaggcaaggaagaacatttttgaggctactgcaataggtcagagaggccagaactaagtttgaactcaattccattgcaacaaagggcaggaggatttttaaaggctgggctgagagggagctcacagrctgcctgtgtttgcttgctaattggctttagagaaaaaataaatcttaaaatttatgacaggaggtaggttttacaatttggagcaagaagactaccagttggtctccttccctcccacagagactgggtgataagggtgttatcttagatgacattgcagttatgtttcctagatgcttgatacatttctgggatgtggaactggcaaacgactttttaaaaaatacacatctcaaatgagcagaaaaggcctttacaatgacaaggtttctaaaataaatgctctaggaaaaggtaggtcagggtaccagacacaggaaaaagcttttgtaaagtttagtcaaactgagaggatcattacggccatcttggttatggaaatataaacataaaaacatgtaagtcacaaaataaagcagaaaggcttagaaattcaactttcttcacc

SEQ ID NO: 672565 - DNA, 563 bp, Homo sapiens
tggagctgggagctaataaatgagtgttgctttaagccactaagtttgcggtaatttgttacacagcaataggaaactaacaaagtttttgaacaacagttgaaagttacaggtagtatagaccattatataaactcacaaatttaagacagtgggaatatgggactagaaagaagttaaatggttggtaagaaattctaccacttagcccrcattgccacccttcccatggccagcccactccactcctttcatagcacttagtggagtgtgtccataacccgcccaagtcttgctcagtgttgtagcagcagcattgtagcagatacttggttttcagcctgaatgtattcagtgaacgaacgtaggaaggaattgtgaaatgctagttggagaaaataagcagctggaggaaagaaggcaagctggagattataggaacagtgattcaaagccaaattagaaattgtaggacgatgcttgttatcctagtccactggggctgctgtaccaaagtaccacagatcgagtggcgtataaacaatggaaatgcatttctcaca

SEQ ID NO: 672566 - DNA, 662 bp, Homo sapiens
atagactttgccactcagatcataagcaatcatacattgcatttattttgtactcaacccttagctaagcacatgctcaataaagatctgttaaacgaattaataaataaatggatgtgtgaaaaagttcatatttactaattctgaaaccaaatgaggcttactgctctattaaaaagtacaataaacctctgtcttcattctgtgtatgaattgtgagcaagtatgtgtgaatgtatttgtaactgtgtgtgggggtgtgtgcaagtatatgtgtgtaaatatattgtgtcacttcataataaagtagtggttttataaaattctggagggttactccacagtagtyattttataccctctttgttaattctaaaagtcatcgaaaagcaaaacatttaaataaagtaaatttagttatagactaaacccatagatccacctcattttttaatataaaacaagagatggaaaataatctaatgttttgtctattttgccaaaacccaaaatctttctcctttgggcaaggaaatactcacaccataaggagtaattctttaattgcttctaattaaaataaatgcccatgcactctgggtctctgggaacatgactaacacttgcctcaccttgcagatgaagcgtgggtaaggttgtga

SEQ ID NO: 672567 - DNA, 588 bp, Homo sapiens
gaaaattaaggaaaccttactatgactatttgacttragttactgaaaaacattgctttcctggccacagcatttactcttcctgttcctcattccatgctaagaaatggcagtactttttttaaaaaacaaggttaacacagatttggaaggaacagtagagtgttacatgctttgtctttcacaagtcctggcattgtattgtgtttttaaaagccttctaatttccactttgggataaggaattgcgaatatgaagacaatagaaatatctaaaattttattaggcaatagtgaaataaataaaaaattaacagttcacatggagaggccccacaaatggtttggggacccattaactcctgaatattcccgtgatactcaagatggaattatttactctcttgttatagattattcttggtaaaatgagggagctggattttgtctttaaggctaaaattctagcaacaacctgcttattaggcataacgagaaatcatatcaacaaagttaaaagcagaatttgcctaatcacgtagactttcatgatttctttctcttcactgggagaactagcacattcaa

SEQ ID NO: 672568 - DNA, 1617 bp, Homo sapiens
ccaaaccaaccaagaattactaagttatactgtctgattgaaaggctcagcaatctacactctaaaactgtcccaggtgattttaakgcaggaggtcctgagtttgaaaatttctggtttagtcaacctccaagatgtttcagcatctctgactctcactgatatttattaacgtactaacttcatgttctagaactgcatgcaaatgacagtgcactaaaatgaagaaaacctgtccttaagaatcacaatttcaaaaaatggcgcaggcatgtattacacaaaatctgtaaatgaatccactcaatcatgaagctcctcatatagacatgattaaaactcatgcagttcttacaaaaatggaaaataacttcatggagtgcaaaacaaatcaaattcatattgttttgtcaagatcccaatgtaaaaagtcttgtaatttagaatgcattggagatgttcagacacgacaaaaaaaaaatcagcgagtaattgttaagtgcaacagacttacttggtgtgactccaggacactaagtgcgatcatattccagaattgcagaagaaaaacaacttcccctgctcttttcacacattcttttacatgaaatgcgggagacaaaagttggctaatcatcaagaaacgatgatgcttcttaatgcgatttctctttgattgagatgtatcccacagggcaaatttgggcttctaggtggttcatgacatcatacaaaacatgcactaaaatgcaagaagaaccaaaaaattgaacaaacaaacaaaaatggcaacaacaaaaccagctaaagaatcaaaataaaggcaagggaaatatttatgaataaatcatccatcgtctttgatctcagcaacatgaccattggcaggcactcaagaaagtatttcttttatttgtaaaagttgaaatgattcctcatcacatgatttttggtgccaaagctgaggttattttctctggctcaacatttgtggctacccctaggaaataattgggcaataaacgttttcaggctcatgaaaatcaagcattaaaaagatgaccgataaatattagttttataaatgtaacaatagggtttggtaactgatctctacccgttttgcacagaacagatttcaaaatgctggaagtgaaaccgatgtagccatgtgtcagagttgaggatgtttgcctttgtctgcacttgaaacaactttgatgtggcttaagatgtgtttttgtatttcaaacagcctgcagaagggaaacgagcaaggcacagaattatttacccttcccaggaaaatattttaaaagctctatgagggctccatttcctaaagccacctgtcacctaaagcacatgtaataagccccagatgctggatcccaacctgctaaccctgtgactcgcagagaaaatatttcactcattcctgggcacatccttaattcgttcgaagctaaactttcaggccatattttctgcttaaacttaataactcagctctgacattccttcccagtgaccctaaagttccgtttggccacctcgacacctgctcctaaatgcattagaaacactcagaattttttttttcaagtatcaattttg

SEQ ID NO: 672569 - DNA, 1617 bp, Homo sapiens
ccaaaccaaccaagaattactaagttatactgtctgattgaaaggctcagcaatctacactctaaaactgtcccaggtgattttaaggcaggaggtcctgagtttgaaaatytctggtttagtcaacctccaagatgtttcagcatctctgactctcactgatatttattaacgtactaacttcatgttctagaactgcatgcaaatgacagtgcactaaaatgaagaaaacctgtccttaagaatcacaatttcaaaaaatggcgcaggcatgtattacacaaaatctgtaaatgaatccactcaatcatgaagctcctcatatagacatgattaaaactcatgcagttcttacaaaaatggaaaataacttcatggagtgcaaaacaaatcaaattcatattgttttgtcaagatcccaatgtaaaaagtcttgtaatttagaatgcattggagatgttcagacacgacaaaaaaaaaatcagcgagtaattgttaagtgcaacagacttacttggtgtgactccaggacactaagtgcgatcatattccagaattgcagaagaaaaacaacttcccctgctcttttcacacattcttttacatgaaatgcgggagacaaaagttggctaatcatcaagaaacgatgatgcttcttaatgcgatttctctttgattgagatgtatcccacagggcaaatttgggcttctaggtggttcatgacatcatacaaaacatgcactaaaatgcaagaagaaccaaaaaattgaacaaacaaacaaaaatggcaacaacaaaaccagctaaagaatcaaaataaaggcaagggaaatatttatgaataaatcatccatcgtctttgatctcagcaacatgaccattggcaggcactcaagaaagtatttcttttatttgtaaaagttgaaatgattcctcatcacatgatttttggtgccaaagctgaggttattttctctggctcaacatttgtggctacccctaggaaataattgggcaataaacgttttcaggctcatgaaaatcaagcattaaaaagatgaccgataaatattagttttataaatgtaacaatagggtttggtaactgatctctacccgttttgcacagaacagatttcaaaatgctggaagtgaaaccgatgtagccatgtgtcagagttgaggatgtttgcctttgtctgcacttgaaacaactttgatgtggcttaagatgtgtttttgtatttcaaacagcctgcagaagggaaacgagcaaggcacagaattatttacccttcccaggaaaatattttaaaagctctatgagggctccatttcctaaagccacctgtcacctaaagcacatgtaataagccccagatgctggatcccaacctgctaaccctgtgactcgcagagaaaatatttcactcattcctgggcacatccttaattcgttcgaagctaaactttcaggccatattttctgcttaaacttaataactcagctctgacattccttcccagtgaccctaaagttccgtttggccacctcgacacctgctcctaaatgcattagaaacactcagaattttttttttcaagtatcaattttg

SEQ ID NO: 672570 - DNA, 1617 bp, Homo sapiens
ccaaaccaaccaagaattactaagttatactgtctgattgaaaggctcagcaatctacactctaaaactgtcccaggtgattttaaggcaggaggtcctgagtttgaaaatttctggtttagtcaacctccaagatgtttcagcatctctgactctcrctgatatttattaacgtactaacttcatgttctagaactgcatgcaaatgacagtgcactaaaatgaagaaaacctgtccttaagaatcacaatttcaaaaaatggcgcaggcatgtattacacaaaatctgtaaatgaatccactcaatcatgaagctcctcatatagacatgattaaaactcatgcagttcttacaaaaatggaaaataacttcatggagtgcaaaacaaatcaaattcatattgttttgtcaagatcccaatgtaaaaagtcttgtaatttagaatgcattggagatgttcagacacgacaaaaaaaaaatcagcgagtaattgttaagtgcaacagacttacttggtgtgactccaggacactaagtgcgatcatattccagaattgcagaagaaaaacaacttcccctgctcttttcacacattcttttacatgaaatgcgggagacaaaagttggctaatcatcaagaaacgatgatgcttcttaatgcgatttctctttgattgagatgtatcccacagggcaaatttgggcttctaggtggttcatgacatcatacaaaacatgcactaaaatgcaagaagaaccaaaaaattgaacaaacaaacaaaaatggcaacaacaaaaccagctaaagaatcaaaataaaggcaagggaaatatttatgaataaatcatccatcgtctttgatctcagcaacatgaccattggcaggcactcaagaaagtatttcttttatttgtaaaagttgaaatgattcctcatcacatgatttttggtgccaaagctgaggttattttctctggctcaacatttgtggctacccctaggaaataattgggcaataaacgttttcaggctcatgaaaatcaagcattaaaaagatgaccgataaatattagttttataaatgtaacaatagggtttggtaactgatctctacccgttttgcacagaacagatttcaaaatgctggaagtgaaaccgatgtagccatgtgtcagagttgaggatgtttgcctttgtctgcacttgaaacaactttgatgtggcttaagatgtgtttttgtatttcaaacagcctgcagaagggaaacgagcaaggcacagaattatttacccttcccaggaaaatattttaaaagctctatgagggctccatttcctaaagccacctgtcacctaaagcacatgtaataagccccagatgctggatcccaacctgctaaccctgtgactcgcagagaaaatatttcactcattcctgggcacatccttaattcgttcgaagctaaactttcaggccatattttctgcttaaacttaataactcagctctgacattccttcccagtgaccctaaagttccgtttggccacctcgacacctgctcctaaatgcattagaaacactcagaattttttttttcaagtatcaattttg

SEQ ID NO: 672571 - DNA, 1617 bp, Homo sapiens
ccaaaccaaccaagaattactaagttatactgtctgattgaaaggctcagcaatctacactctaaaactgtcccaggtgattttaaggcaggaggtcctgagtttgaaaatttctggtttagtcaacctccaagatgtttcagcatctctgactctcactgatatttattaacgtactaacttcatgttctagaactgcatgcaaatgacagtgcactaaaatgaagaaaacctgtccttaagaatcacaatttcaaaaaatggcgcaggcatgtattacacaaaatctgtaaatgaatccactcaatcatgaagctcctcatatagacatgattaaaactcatgcagttcttacaaaaatggaaaataacttcrtggagtgcaaaacaaatcaaattcatattgttttgtcaagatcccaatgtaaaaagtcttgtaatttagaatgcattggagatgttcagacacgacaaaaaaaaaatcagcgagtaattgttaagtgcaacagacttacttggtgtgactccaggacactaagtgcgatcatattccagaattgcagaagaaaaacaacttcccctgctcttttcacacattcttttacatgaaatgcgggagacaaaagttggctaatcatcaagaaacgatgatgcttcttaatgcgatttctctttgattgagatgtatcccacagggcaaatttgggcttctaggtggttcatgacatcatacaaaacatgcactaaaatgcaagaagaaccaaaaaattgaacaaacaaacaaaaatggcaacaacaaaaccagctaaagaatcaaaataaaggcaagggaaatatttatgaataaatcatccatcgtctttgatctcagcaacatgaccattggcaggcactcaagaaagtatttcttttatttgtaaaagttgaaatgattcctcatcacatgatttttggtgccaaagctgaggttattttctctggctcaacatttgtggctacccctaggaaataattgggcaataaacgttttcaggctcatgaaaatcaagcattaaaaagatgaccgataaatattagttttataaatgtaacaatagggtttggtaactgatctctacccgttttgcacagaacagatttcaaaatgctggaagtgaaaccgatgtagccatgtgtcagagttgaggatgtttgcctttgtctgcacttgaaacaactttgatgtggcttaagatgtgtttttgtatttcaaacagcctgcagaagggaaacgagcaaggcacagaattatttacccttcccaggaaaatattttaaaagctctatgagggctccatttcctaaagccacctgtcacctaaagcacatgtaataagccccagatgctggatcccaacctgctaaccctgtgactcgcagagaaaatatttcactcattcctgggcacatccttaattcgttcgaagctaaactttcaggccatattttctgcttaaacttaataactcagctctgacattccttcccagtgaccctaaagttccgtttggccacctcgacacctgctcctaaatgcattagaaacactcagaattttttttttcaagtatcaattttg

SEQ ID NO: 672572 - DNA, 1617 bp, Homo sapiens
ccaaaccaaccaagaattactaagttatactgtctgattgaaaggctcagcaatctacactctaaaactgtcccaggtgattttaaggcaggaggtcctgagtttgaaaatttctggtttagtcaacctccaagatgtttcagcatctctgactctcactgatatttattaacgtactaacttcatgttctagaactgcatgcaaatgacagtgcactaaaatgaagaaaacctgtccttaagaatcacaatttcaaaaaatggcgcaggcatgtattacacaaaatctgtaaatgaatccactcaatcatgaagctcctcatatagacatgattaaaactcatgcagttcttacaaaaatggaaaataacttcatggagtgcaaaacaaatcaaattcatattgttttgtcaagatcccaatgtaaaaagtcttgtaatttagaatgcattggagatgttcagacacgacaaaaaaaaaatcagcgagtaattgttaagtgcaacagacttacttggtgtgactccaggacactaagtgcgatcatattccagaattgcagaagaaaaacaacttcccctgctcttttcacacattcttttacatgaaatgcgggagacaaaagttggctaatcatcaagaaacgatgatgcttcttaatgcgatttctctttgattgagatgtatcccacagggcaaatttgggcttctaggtggttcatgacatcatacaaaacatgcactaaaatgcaagaagaaccaaaaaattgaacaaacaaacaaaaatggcaacaacaaaaccagctaaagaatcaaaataaaggcaagggaaatatttatgaataaatcatccatcgtctttgatctcagcaacatgaccattggcaggcactcaagaaagtatttcttttatttgtaaaagttgaaatgattcctcatcacatgatttttggtgccaaagctgaggttattttctctggctcaacatttgtggctacccctaggaaataattgggcaataaacgttttcaggctcatgaaaatcaagcattaaaaagatgaccgataaatattagttttataaatgtaacaatagggtttggtaactgatctctacccgttttgcacagaacagatttcaaaatgctggaagtgaaaccgatgtagccatgtgtcagagttgaggatgtttgcctttgtctgcacttgaaacaactttgatgtggcttaagatgtgtttttgtatttcaaacagcctgcagaagggaaacgagcaaggcacagaattatttacccttcccaggaaaatattttaaaagctctatgagggctccatttcctaaagccacctgtcacctaaagcacatgtaataagccccagatgctggatcccaacctgctaaccctgtgactcgcagagaaaatatttcactcattcctgggcacatccttaattcgttcgaagctaaactttcaggccatattttctgcttaaacttaataactcagctctgacattccttcccagtgaccctaaagttccrtttggccacctcgacacctgctcctaaatgcattagaaacactcagaattttttttttcaagtatcaattttg

SEQ ID NO: 672573 - DNA, 649 bp, Homo sapiens
acactcacacatctgaatgtgtattcggggggagcgtccatgatgcacacactcacacatctgaatgtgtattcggggggagcgtccatgatgcacacactcacacatctgaatgtgtattcggggggagcgtccatgatgcacacactcacacctgaatgtgcatttgggggagcttccacgttgcacacacacacttgaatgtgcatttggggggagcttccacgttrcacacactcacacctgaatgtgtattcggggggagtgtccatgatgcacacactcacacctgaatgtgtattcggggggagcgtccatgatgcacacactcacacatctgaatgtgcacttggggaagatttttttgaaaatcactgaacacctgaggagcaggtactgttcaggcaaacctgaggtcacccaccggaatctgtaacgcgctgaaaggttttatcagttgttattcatgagaattgttggtatctgaatcaaaaatacgttccagaagttgagattgtgttgttactgtttgaaaccgcggagaaaaggcacttcttctaagaagcaaaatagcccagcaagggcctgtctggggttaagggaggacacgctgtgggggtcctatattcagaccacagtgccgggaccg

SEQ ID NO: 672574 - DNA, 1026 bp, Homo sapiens
gagttttaagggaaacatttcaaccacagcacctgtcaaatccctgatgagaccacgacctcagacaatattagctcacactctggggagacccagaagcaggaaacagagctgcacctgacaaggccacgacctcaatgttagctcacattctggtgagaccccgaagcagggaacagagctgcaccatgcctggacttccgrtttacagaaactgagatcatcacataactgcccaaggggttcaccttacccgctgcctagacagccaattatcaagacaggggagctgcaggagacagagtagttcacgcacagccggctgtgaaggagaccatttcattacgactcagatccatctcagagagacgcattgctgttcttcaaccacctgattcgtggtcacctgtcctggcagccccagaataccagcatgcctgagtgagcatgagggcttcacgtggccgtccccgcacacacaaccaaagccggcacacctgggcgagtgtgagggcttcacgtggctgtcccggcacacacacctgatgctgacgcacctgggctagtctgagggcttcacgtggccatccccacacacacaactgatgctgacgcacctgggcgagtgtgagggcttcacatggccgtccccacacacacaactgatgctgacgcacctgggcgagtgtgagggcttcacatggccgtccctgcacacacaaccaaagccagcacacctgggctagtctgagggcttcacgtggccatccctgcacacactcacaactgacatcaacgcacctgggtgagtgtgagggcttcacgtggccatccctgcacacacaactaatatcaacgcacctgggcaagtgtgagggcttcacgtggccatccccgcacacacaactgacaccgatacacctgggtgagtgtgagggcttcagatggccgtccccccacacacaactgatgtcgacacacctgggtgagtgtgagggcttcacatggccgtccccacacacacaa

SEQ ID NO: 672575 - DNA, 1026 bp, Homo sapiens
gagttttaagggaaacatttcaaccacagcacctgtcaaatccctgatgagaccacgacctcagacaatattagctcacactctggggagacccagaagcaggaaacagagctgcacctgacaaggccacgacctcaatgttagctcacattctggtgagaccccgaagcagggaacagagctgcaccatgcctggacttccgatttacagaaactgagatcatcacataactgcccaaggggttcaccttacccgctgcctagacagccaattatcaagacaggggagctgcaggagacagagtagttcacgcacagccggctgtgaaggagaccatttcattacgactcagatccatctcagagagacgcattgctgttcttcaaccacctgattcgtggtcacctgtcctggcagccccagaataccagcatgcctgagtgagcatgagggcttcacgtggccgtccccgcacacacaaccaaagccggcacacctgggcgagtgtgagggcttcacgtggctgtcccggcacacacacctgatgcygacgcacctgggctagtctgagggcttcacgtggccatccccacacacacaactgatgctgacgcacctgggcgagtgtgagggcttcacatggccgtccccacacacacaactgatgctgacgcacctgggcgagtgtgagggcttcacatggccgtccctgcacacacaaccaaagccagcacacctgggctagtctgagggcttcacgtggccatccctgcacacactcacaactgacatcaacgcacctgggtgagtgtgagggcttcacgtggccatccctgcacacacaactaatatcaacgcacctgggcaagtgtgagggcttcacgtggccatccccgcacacacaactgacaccgatacacctgggtgagtgtgagggcttcagatggccgtccccccacacacaactgatgtcgacacacctgggtgagtgtgagggcttcacatggccgtccccacacacacaa

SEQ ID NO: 672576 - DNA, 632 bp, Homo sapiens
ggggaaaaaagctaattggagagaagggagatgctcactgggacagcacagtaacgtctcgcgtctcatttactgggcaaaaatacactcggacggacattgtcgcaattcctctaccacagagcagggygcacagtgcacctgccgggctgtgggtgaggggccctctgcttcccatgggtgtggggttggtggtccagggctgggagtggggactagggcacaaaagccccttgctggctgcaagtttaggtagtagctctttcctgacacccttcaaactcacgctggagactgcacactcggagcagacgcggtgggagaggatcccgagaggatgacagccgcctcgcttcagaggagccctgtgagctggcggcctcggcccaaagtccccgctccgtaacctcccccaagggagcctgcaaaggcatcgctctcctctcctcacttgactgaacatgctcaagaaggcattgcttctggtgctccagcggggacaggtttctgctcacaggtttccccacccctgggttagctgcagggttgggtgacagccctccacgagcatctggggctgacagctctgcctggtgcaacgtgacgcttggggccaattgactcacacgttt

SEQ ID NO: 672577 - DNA, 632 bp, Homo sapiens
ggggaaaaaagctaattggagagaagggagatgctcactgggacagcacagtaacgtctcgcgtctcatttactgggcaaaaatacactcggacggacattgtcgcaattcctctaccacagagcagggcgcacagtgcacctgccgggctgtgggtgaggggccctctgcttcccatgggtgtggggttggtggtccagggctgggagtggggactagggcacaaaagccccttgctggctgcaagtttaggtagtagctctttcctgacacccttcaaactcacgctggagactgcacactcggagcagacgcggtgggagaggatccygagaggatgacagccgcctcgcttcagaggagccctgtgagctggcggcctcggcccaaagtccccgctccgtaacctcccccaagggagcctgcaaaggcatcgctctcctctcctcacttgactgaacatgctcaagaaggcattgcttctggtgctccagcggggacaggtttctgctcacaggtttccccacccctgggttagctgcagggttgggtgacagccctccacgagcatctggggctgacagctctgcctggtgcaacgtgacgcttggggccaattgactcacacgttt

SEQ ID NO: 672578 - DNA, 841 bp, Homo sapiens
cacacacacacacacacacacacacgctaccccactaggagaccttactcaaaactgaatttacctgagtcttcatgggtctcatgggtcttgtctgaaaacaagggttctacaagtacacttcaaagattatcatgacgactaaatacgacataatgtatatggtatattaaatcacctaacagtgcctaaaatatttcagaaagttcaataaatcttagttcttattgtcatcattccatctactctttgatagagattgtgggaaggcacacatggtccaaagaccaacaaaaccaaaagtataggtctgtctttaaaaatactccctttaattccaaggaaaataacttaccctaattaataggaccacacattttaccttatatatcttaatttaaatgcaagctgtccctatttacttttttttaaaagcagaagtcttgtacacctaaaagctatggaaattcaaataccaagaaagttgctgaatatcagggaaaracatcttaacataaagtagcaattcaatgctattttttaaaagataaattttaagtcataaggctaaacactaaagaaataatgtcttaagcatgtattttaacctaaatttctataaaagtactaagttgacaaggcactcaaaaaataagtgcgcacttcattcagactctaaaaaaatcagtttaactaccttaactttaaattatataagcaacttttccacatgaaaaagacaaaggaatgtaacatgtagcacagaggctactggagtaaacagctaaagaaatgaccataaaaatctgacatcctactaaaaaaaaagtcaaaacagtca

SEQ ID NO: 672579 - DNA, 616 bp, Homo sapiens
atttttgtatttttagtaaagacagggtttcaccatgttggccaggctgatctcgaactcctgacctcaggtgatccgcctgctgggtttacaggtgtgagccatcacaccyagtctgctaatctaaataagctttatttgtgtggcagtcctttcaggttaaaatgctgttctatgaaaaatagctagttcagctggcagcggtctaaataaaggtattgttctttgagaatctcatacctctttgatatgcagcataatttttttaatacctgtttctcattttgttacacagaatatgtaaaagatgtattcaagggttgggatttaatgaaattagtaatttttatatcttttacactttaagtggaacagatttttaaaattacgagtttgtgaaaattctggcttctgctacagctagtaatacagtttggtgctgctgtcctgactcttgctacatggattatcagttttatccaccttgcttttataccatcagtgcacacattaacagtgaactagtcagcccttattcttttgacaatagctttgacctcttggaccacaatttgaaaactgctaccctagtttatagggttgctgcatgggatgg

SEQ ID NO: 672580 - DNA, 616 bp, Homo sapiens
atttttgtatttttagtaaagacagggtttcaccatgttggccaggctgatctcgaactcctgacctcaggtgatccgcctgctgggtttacaggtgtgagccatcacacccagtctgctaatctaaataagctttatttgtgtggcagtcctttcaggttaaaatgctgttctatgaaaaatagctagttcagctggcarcggtctaaataaaggtattgttctttgagaatctcatacctctttgatatgcagcataatttttttaatacctgtttctcattttgttacacagaatatgtaaaagatgtattcaagggttgggatttaatgaaattagtaatttttatatcttttacactttaagtggaacagatttttaaaattacgagtttgtgaaaattctggcttctgctacagctagtaatacagtttggtgctgctgtcctgactcttgctacatggattatcagttttatccaccttgcttttataccatcagtgcacacattaacagtgaactagtcagcccttattcttttgacaatagctttgacctcttggaccacaatttgaaaactgctaccctagtttatagggttgctgcatgggatgg

SEQ ID NO: 672581 - DNA, 616 bp, Homo sapiens
atttttgtatttttagtaaagacagggtttcaccatgttggccaggctgatctcgaactcctgacctcaggtgatccgcctgctgggtttacaggtgtgagccatcacacccagtctgctaatctaaataagctttatttgtgtggcagtcctttcaggttaaaatgctgttctatgaaaaatagctagttcagctggcagcggtctaaataaaggtattgttctttgagaatcycatacctctttgatatgcagcataatttttttaatacctgtttctcattttgttacacagaatatgtaaaagatgtattcaagggttgggatttaatgaaattagtaatttttatatcttttacactttaagtggaacagatttttaaaattacgagtttgtgaaaattctggcttctgctacagctagtaatacagtttggtgctgctgtcctgactcttgctacatggattatcagttttatccaccttgcttttataccatcagtgcacacattaacagtgaactagtcagcccttattcttttgacaatagctttgacctcttggaccacaatttgaaaactgctaccctagtttatagggttgctgcatgggatgg

SEQ ID NO: 672582 - DNA, 616 bp, Homo sapiens
atttttgtatttttagtaaagacagggtttcaccatgttggccaggctgatctcgaactcctgacctcaggtgatccgcctgctgggtttacaggtgtgagccatcacacccagtctgctaatctaaataagctttatttgtgtggcagtcctttcaggttaaaatgctgttctatgaaaaatagctagttcagctggcagcggtctaaataaaggtattgttctttgagaatctcatacctctttgatatgcagcataatttttttaatacctgtttctcattttgttacacagaatatgtaaaagatgtattcaagggttgggatttaatgaaattagtaatttttatatcttttacactttaagtggaacagatttttaaaattacgagtttgtgaaaattctggcttctgctrcagctagtaatacagtttggtgctgctgtcctgactcttgctacatggattatcagttttatccaccttgcttttataccatcagtgcacacattaacagtgaactagtcagcccttattcttttgacaatagctttgacctcttggaccacaatttgaaaactgctaccctagtttatagggttgctgcatgggatgg

SEQ ID NO: 672583 - DNA, 1566 bp, Homo sapiens
ggaacccctacaggaaaactctagttatatattctagtcatcaaaaatctttggctttttgagcccgggatggtaaaacttctaaaaatagttgtcatactaattaacacatgtatgtaaatattacatactacccctatataagcacaccagacaatgtgacatgtgcttagtagtttatacttttaaaaaatgatatacttgtactattttgatcataacaaaaaactagtgaattaagcttagataactagaagacataatacttattgagtttatattgtgcaagcactgtactaaaaattttatgtgtctaatctctaagttcttcatctgtaaaatgaagccaaagtagtatttacctcaggattgttgggaggattaaattatgttatctctgtaaaacattcagaagagtgcttgacatatagtaagtgattgataaatattagctgttactaatactaccacctcatttaatccactgaacatctctgtcagtttaatattaatattcccctgtacatgctaggaaacagacgcagatayacctagtcatttgttcaaggtcatatagctggtaaatggtaaatggcattgctgggattgaaacctaggtttttctgactctggagtccatggtttcttaattatagtgatgtttctcaaagtgttttccatgttaacactagtcttacaaaatgctttaagaaaagggattttcaagatcatgtgttttagaaaatattcaaaacttaccagaatattatctgattaaagatactgaaaagttctgcaacagagaaattaacaaggtttcatccagttttgcaaactcagttgctcacagaatcttttcctttttgcatacctgttaacttcctgcaaattacaggatacaacatataggctttttgggaaatgttacattccaccaccctgcctctcactagcctacaataaatagaaagaattattatccctattttacagatgttgaaagtgaggctcagagaagctaaatataaaagacttccttggccatgtgcggtggctcacgcctgtaatcccagcactttgggaggccgaggcgggtggatcacctgaggtcaggagtttgagaccagcctgaccaacatggaaaaaccccatctctactaaaaatacagaattagccgggtgtggtggcacatgcctgtaatcccagctattcgggaggctgaggcaggataattgcttgaaccctgaagtggaggttgtggtgagccaagattgcgccattgcactccagcctgggcaacaagagcgaaacactgtctaaaaaaaaaaaaaaaaaaaaaaaaaaaaaacttccttgaaggatatactgtggtgggaggtcaaaattaaaactaaattttccaattttagttcatcttagtatcctttctattacactacactacatgtgtgttgcatgttatatggttcaatattgtataaataatctgatttagaaaatacatcatgcagtcctccaaattattgctgccttaagatttttaggatacagataatgctaataag

SEQ ID NO: 672584 - DNA, 1566 bp, Homo sapiens
ggaacccctacaggaaaactctagttatatattctagtcatcaaaaatctttggctttttgagcccgggatggtaaaacttctaaaaatagttgtcatactaattaacacatgtatgtaaatattacatactacccctatataagcacaccagacaatgtgacatgtgcttagtagtttatacttttaaaaaatgatatacttgtactattttgatcataacaaaaaactagtgaattaagcttagataactagaagacataatacttattgagtttatattgtgcaagcactgtactaaaaattttatgtgtctaatctctaagttcttcatctgtaaaatgaagccaaagtagtatttacctcaggattgttgggaggattaaattatgttatctctgtaaaacattcagaagagtgcttgacatatagtaagtgattgataaatattagctgttactaatactaccacctcatttaatccactgaacatctctgtcagtttaatattaatattcccctgtacatgctaggaaacagacgcagatatacctagtcatttgttcaaggtcatatagctggtaaatggtaaatggcattgctgggattgaaacctaggtttttctgactctggagtccatggtttcttaattatagtgatgtttctcaaagtgttttccatgttaacactagtcttacaaaatgctttaagaaaagggattttcaagatcatgtgttttagaaaatattcaaaacttaccagaatattatctgattaaagatactgaaaagttctgcaacagagaaattaacaaggtttcatccagttttgcaaactcagttgctcacagaatcttttcctttttgcatacctgttaacttcctgcaaattacaggatacaacatataggctttttgggaaatgttacattccaccaccctgcctctcactagcctacaataaatagaaagaattattatccctattttacagatgttgaaagtgaggctcagagaagctaaatataaaagacttccttggccatgtgcggtggctcacgcctgtaatcccagcactttgggaggccgaggcgggtggatcacctgaggtcaggagtttgagaccagcctgaccaacatggaaaaaccccatctctactaaaaatacagaattagccgggtgtggtggcacatgcctgtaatcccagctaytcgggaggctgaggcaggataattgcttgaaccctgaagtggaggttgtggtgagccaagattgcgccattgcactccagcctgggcaacaagagcgaaacactgtctaaaaaaaaaaaaaaaaaaaaaaaaaaaaaacttccttgaaggatatactgtggtgggaggtcaaaattaaaactaaattttccaattttagttcatcttagtatcctttctattacactacactacatgtgtgttgcatgttatatggttcaatattgtataaataatctgatttagaaaatacatcatgcagtcctccaaattattgctgccttaagatttttaggatacagataatgctaataag

SEQ ID NO: 672585 - DNA, 1425 bp, Homo sapiens
tgtctccctttcccatctgaggctctcatatttacattttaaaagagagtccattaaaatacttagatacatattcattgcacatcttcttttttccatgcccactcatcttccctacataagtgggcataactctagttttgtctacaaatcattaagttgtaaacgtgacagttatctgattacgttgattaatgctgacgagtgaaagatgcctcaagttataccatggattcttttttaggcctgaaatgctgctccaattaactggataattaccagatttccatttctggttttggctttgtgttgattaaattaaccacgtggctgctgagtcagacctttattttgtattgtttccgggcattgatttgctctctaaatcagcatggctcttgtacacacactgaactgccacaagaaatgtgacaccttgaaagtccttctgaaatttgttgtatatttctttacttgtttgttctccagtgtgtcatttcctagccatgctctgtcttagatagatatcaaagataaaattactaatctttgtttgctgggattctttttattatttttattgtttggccacttaatggaatttagtctcctcttattcttaaaataaatataaaggaaggtgtggagaaaggcatcttcttcctaaggaaaaaacaatatgaatgatgcctacctatttcaagaggaaactggcccctcatatttggctggaagaggcactgtaccaccttcccagccattttacccagtctccctctagctgtggtttccttgggttaaagacttcgtttgtaaccaggtcatacctgctgctgctctttggaagctctgagtactgtaaatttagataagaacctgtgctcttggatgttcagaactaatttcattgctgaatgaagtaatcaactttatggcctgagtataataaaacttactcagttcctgttgtgaaataataaatttaagattattgctgtgacagccatgtggcttgaaatgcaaaattctgatttcagattattattttttaaatgattacaaggcagctcaattctaacagttttgacatttagctggtatggatatcagtactatcttcactttggatctcatcagtctacactaaagaaacagaatttaggccctagaagtagcagtcatataaaagaaaaagagatgtgttcatttttctagttctggggaagcaataaaaactaatagaaaggattaaaaaaacttttttcattgtgtytcacagtttatatctatcattcagcctgccaggagggaaaaaaggctctaacaccattttctaagggatccagaggtcaagatcaaaacttgatccattgcagtgggtcagtaacagataagcactgaaccttatgcacagtccaaagatta

SEQ ID NO: 672586 - DNA, 1425 bp, Homo sapiens
tgtctccctttcccatctgaggctctcatatttacattttaaaagagagtccattaaaatacttagatacatattcattgcacatcttcttttttccatgcccactcatcttccctacataagtgggcataactctagttttgtctacaaatcattaagttgtaaacgtgacagttatctgattacgttgattaatgctgacgagtgaaagatgcctcaagttataccatggattcttttttaggcctgaaatgctgctccaattaactggataattaccagatttccatttctggttttggctttgtgttgattaaattaaccacgtggctgctgagtcagacctttattttgtattgtttccgggcattgatttgctctctaaatcagcatggctcttgtacacacactgaactgccacaagaaatgtgacaccttgaaagtccttctgaaatttgttgtatatttctttacttgtttgttctccagtgtgtcatttcctagccatgctctgtcttagatagatatcaaagataaaattactaatctttgtttgctgggattctttttattatttttattgtttggccacttaatggaatttagtctcctcttattcttaaaataaatataaaggaaggtgtggagaaaggcatcttcttcctaaggaaaaaacaatatgaatgatgcctacctatttcaagaggaaactggcccctcatatttggctggaagaggcactgtaccaccttcccagccattttacccagtctccctctagctgtggtttccttgggttaaagacttcgtttgtaaccaggtcatacctgctgctgctctttggaagctctgagtactgtaaatttagataagaacctgtgctcttggatgttcagaactaatttcattgctgaatgaagtaatcaactttatggcctgagtataataaaacttactcagttcctgttgtgaaataataaatttaagattattgctgtgacagccatgtggcttgaaatgcaaaattctgatttcagattattattttttaaatgattacaaggcagctcaattctaacagttttgacatttagctggtatggatatcagtactatcttcactttggatctcatcagtctacactaaagaaacagaatttaggccctagaagtagcagtcatataaaagaaaaagagatgtgttcatttttctagttctggggaagcaataaaaactaatagaaaggattaaaaaaacttttttcattgtgtttcacagtttatrtctatcattcagcctgccaggagggaaaaaaggctctaacaccattttctaagggatccagaggtcaagatcaaaacttgatccattgcagtgggtcagtaacagataagcactgaaccttatgcacagtccaaagatta

SEQ ID NO: 672587 - DNA, 596 bp, Homo sapiens
ttatccttaactcggcacggtcttttttattttttttggtggtgggggacggagtctcgctctgtcgcccaggctggagtgcagtggcgcgatcccggctcactgcaagctccacctcccaggttcaagcgattctcctgcctcagcctctcgagtagctgggactacaggtgcaagccaccacgcccagctaattttttttttttttttttttttttgtattgktagtagagacggggtttcaccgtgttagctaggatggtcttggtctcctgacctcgtgatccacccacctcggcctcccaaactgctgggattacaggcgtgagccaccgcacccggccaatatggcaaaagtcgtaattttttttgaatgattctgtttcaaataaaggtcaaagtgtgaacaaagtaggccatatcaccaaatataagctgacttcacttttcgactcgaaatttgatattgacagttacaggtacaaagaaattcaaattccaaatgttcatagatttgctgacagtcggtgtttccagctgactatttatcctctggtaagtattggatatctgagtttggttaatattcacttccg

SEQ ID NO: 672588 - DNA, 1454 bp, Homo sapiens
tgaaaaagcttaggaaggtaaataatataaagcaactacttaaatacttttgacaggcaccatcgggatatagtcacactttaataaacagggtttacaactgccagacttcagtctccttgaccgtttttagtgttttggtaattcagttgggaagaaggtaggggtgtggataggggagaataagcattactaatgtcgttatatttaatgtgcccattgacgtaaacgtgaacatttgatttaagggtgaaatggtctcttagggacatagaaacagtcatcagtgcagtcctcaagactctctgatattttttcctaaatagaatataagaatatatggatagtttacttaaaatgaaagttattttaccgaaaatcttatttaatgagttggtcttaaatttaaatgtttaggtccactcctataaaaatctgtagaggaaaacagccaaaataaaatggtgattactggtattaaaaggtgtactrtttatttaacacatactttaaaatgacaatttagcatattttactgatgaagtttaacatttttaacatgatatatggaaattttgtttttaagtatgtagagtgtgttgtttttaagaagactctttaaatgtgtaaagcagaatcttcacgtatctcttccatggcctaaaggtattaagttttcggtagcttaacatttgggtgaggttcactttccacttaaactaatgcgagaagagagcctgcgtggtcaggaaggcgcgcaggggtgcagctgtttctttcttagccatgcccggccccctgactctctccctgtagagatgggaggtgctgcctcacctccttacagccctgttgttggaatgaagatctgctgtgtatgtgtcatcgtgccctgcaaaatgcagagctttacacacatgcggagtagcatgaggaagaagatgctcactttttatatagtatatcttaacatgttaatctgttaactttaaaaaaacaggttactgtgacagacaatggtagtccccccaaatcaaccattgcaagagtcattgtgaaaatccttgatgaaaatgacaacaaacctcagtttctgcaaaagttctacaaaatcagactccctgagcgggaaaagccagaccgagaaagaaatgccagacgggagccgctctatcgcgtcatagccaccgacaaggatgagggccccaatgcagaaatctcctacagcatcgaagacgggaatgagcatggcaaatttttcatcgaaccgaaaactggagtggtttcgtccaagaggttttcagcagctggagaatatgatattctttcagtgagttaagattgtagtactgtaatttttcatatgttgtgactataaaccttattttgtattttttctttagtaactttatttctattttgtaaacggctgaagtgtttgtgacctgctggcc

SEQ ID NO: 672589 - DNA, 1454 bp, Homo sapiens
tgaaaaagcttaggaaggtaaataatataaagcaactacttaaatacttttgacaggcaccatcgggatatagtcacactttaataaacagggtttacaactgccagacttcagtctccttgaccgtttttagtgttttggtaattcagttgggaagaaggtaggggtgtggataggggagaataagcattactaatgtcgttatatttaatgtgcccattgacgtaaacgtgaacatttgatttaagggtgaaatggtctcttagggacatagaaacagtcatcagtgcagtcctcaagactctctgatattttttcctaaatagaatataagaatatatggatagtttacttaaaatgaaagttattttaccgaaaatcttatttaatgagttggtcttaaatttaaatgtttaggtccactcctataaaaatctgtagaggaaaacagccaaaataaaatggtgattactggtattaaaaggtgtactatttatttaacacatactttaaaatgacaatttagcatattttactgatgaagtttaacatttttaacatgatatatggaaattttgtttttaagtatgtagagtgtgttgtttttaagaagactctttaaatgtgtaaagcagaatcttcacgtatctcttccatggcctaaaggtattaagttttcggtagcttaacatttgggtgaggttcactttccacttaaactaatgcgagaagagagcctgcgtggtcaggaaggcgcgcaggggtgcagctgtttctttcttagccatgcccggccccctgactctctccctgtagagatgggaggtgctgcctcacctccttacagccctgttgttggaatgaagatctgctgtgtatgtgtcatcgtgccctgcaaaatgcagagctttacacacatgcggagtagcatgaggaagaagatgctcactttttatatagtatatcttaacatgttaatctgttaactttaaaaaaacaggttactgtgacagacaatggtagtccccccaaatcaaccattgcaagagtcattgtgaaaatccttgatgaaaatgacaacaaacctcagtttctgcaaaagttctacaaaatyagactccctgagcgggaaaagccagaccgagaaagaaatgccagacgggagccgctctatcgcgtcatagccaccgacaaggatgagggccccaatgcagaaatctcctacagcatcgaagacgggaatgagcatggcaaatttttcatcgaaccgaaaactggagtggtttcgtccaagaggttttcagcagctggagaatatgatattctttcagtgagttaagattgtagtactgtaatttttcatatgttgtgactataaaccttattttgtattttttctttagtaactttatttctattttgtaaacggctgaagtgtttgtgacctgctggcc

SEQ ID NO: 672590 - DNA, 644 bp, Homo sapiens
gggatagagttaaggaatgaagaaccaagggttgttgagatttagtaacttaccaagcttgctcagacagacaactttggagctgggactcagaaacaaatcttccaactacaaaatcccatgctcttgctactataccacactgtttctcaggatatagccatcagaatatacaaataatgcttgacaggatgcttcagaggcattattatgtaaaatgctttaccatctgacgtaatctctccttcttccatgctatcagacrttacaacttcctcctcagtatcttcttcaaaagatgaaaggtcactggtatgaacagagctaactgtgatgtctgtaagtccatccacatcagaatctatcaaagagaaatcttcaagcggaaaataaaacacagaaaaaaaaatcatcttattataagaacatactcagagctcaattactaaattacacttaaaattttctgctttaaatacgtgtcaaactatcaaacaaggcagagtggtttccagaaaatacaaaggcaaagtagacttctgtaaaaataactaaactattaatttataatgtatgatataataataaaatgaattttaagtaactgaagtatttactacctaataaaaattaggatatccaac

SEQ ID NO: 672591 - DNA, 1325 bp, Homo sapiens
tgaaactacaataaagcacaagcaaaaagaaaatcttgaaataagctagatgaaaaacatcttatctttccagaaacaagggtacagattacatcaggcaagaggagagcatagtgaactttttcaagtgttgaaagaaaaattcaccatctgtaatactgtgcatacatccaatgatattatttttcaaaactgaatgaaatgtaggttacacagacaaacaaaaatgaaaaaaaaaaaatcattcccagaacttccctgtaaaagacacattagaagtttttcaggcagatggaagcttatatgggtgggaaacttgaaaatacttataaaaaagaaagaaagtgttggagaaagaataaataaagttattattttttacttttctaatttgatttaaaggtaaattaagtaactacatattgattattacatgcgggtaagtgtaaagaatgaaaaatatgacaaacgttataaagtaacaatatataggttgattataatgtgaataagtgaaaagaatgaaaaatatgaccatagttttgattaacagtaatatatcatgttgacagaatgtatccttgataccatatgataaaattagcattttagttttgcgtctgtgtccctcaaacccctatttccagggtattcatgaaggaaaaacttcaaataaattatagttgaggsgacattctacaaaatttccaactggtactctataaatcctccaagttcatcaaaaacaaggaacatctgagatattgccacacccaagaggaatctgaggagacatgatgaaagtagtatcccagatggaatgctggtatagaaaaatgatattgggtaaacgctaataaaatcttaatactgtgtgaagtaatgcatcattatcagtttattagttgtgacaattatgccatactaatgtaagatgttaacaatagagataaataagtgcttggtatatgggaactctgaactatcttgataatttttctgtaaatttaaaactattctacactaaacacataaaaataaaaatatgtggtgtgccatttattatgcttttacatattttattagtgttaccattgtatttagaaatgcatacacaatattagaaatctaattttaaacttctatgtaatatggaataatacatatgttattttatgttaaaacaatttacagaaaaatctcattcaattcacaattctcagttaaagaatctgaaaattaaatttgcgaggtatctatgaaaattaagccaatcaccaccatagcccactgacttaatgaaaccagagagaaagtttcacaca

SEQ ID NO: 672592 - DNA, 1325 bp, Homo sapiens
tgaaactacaataaagcacaagcaaaaagaaaatcttgaaataagctagatgaaaaacatcttatctttccagaaacaagggtacagattacatcaggcaagaggagagcatagtgaactttttcaagtgttgaaagaaaaattcaccatctgtaatactgtgcatacatccaatgatattatttttcaaaactgaatgaaatgtaggttacacagacaaacaaaaatgaaaaaaaaaaaatcattcccagaacttccctgtaaaagacacattagaagtttttcaggcagatggaagcttatatgggtgggaaacttgaaaatacttataaaaaagaaagaaagtgttggagaaagaataaataaagttattattttttacttttctaatttgatttaaaggtaaattaagtaactacatattgattattacatgcgggtaagtgtaaagaatgaaaaatatgacaaacgttataaagtaacaatatataggttgattataatgtgaataagtgaaaagaatgaaaaatatgaccatagttttgattaacagtaatatatcatgttgacagaatgtatccttgataccatatgataaaattagcattttagttttgcgtctgtgtccctcaaacccctatttccagggtattcatgaaggaaaaacttcaaataaattatagttgaggggacattctacaaaatttccaactggtactctataaatcctccaagttcatcaaaaacaaggaacatctgagatattgccacacccaagaggaatctgaggagacatgatgaaagtagtatcccagatggaatgctggtatagaaaaatgatattgggtaaacgctaataaaatcttaatactgtgtgaagtaatgcatcattatcagtttattagttgtgacaattatgccatactaatgtaagatgttaacaatagagataaataagtgcttggtatatgggaactctgaactatcttgataatttttctgtaaatttaaaactattctacactaaacacataaaaataaaaatatgtggtgtgccatttattatgcttttacatattttattagtgttaccattgtatttagaaatgcatacacaatattagaaatctaattttaaacttctatgtaatatggaataatacatatgttattttatgttaaaacaatttacagaaaaatctcattcaattcacaattctcagttaaagaatctgaaaattaaatttgcgaggtatctatgaaaattaagccaatcaccamcatagcccactgacttaatgaaaccagagagaaagtttcacaca

SEQ ID NO: 672593 - DNA, 3216 bp, Homo sapiens
tcactgggtagcctgagatgggatctgaagctggttctaaaggatgccctctagggattaaagacaggtaaaaatttccaccacttcagcttggctttgtgggtcgactgtgctgttagctgatacctgtgactgtgtgccactattgtcaggtatacaaagctaccaccatgatttgcacacttgttggtgtaggctacttgctttgtttctacctcaccccagatggtctagctacactgtcacccctgtgtttcctgtgaggtgagatgggagtgggcttcttgagaagtaactcaaaatgctagggaagctgtatgtccacctccagttctctgtttccactgtagaaaccatgggccctggggaatcctctctgtgtgctactgtgccaacttcaggaagaggtagggatgacacaaagtaagataatttctttcactgttttaatcagtttttaatcagtttagtgggccatgcaggagtctcagacttattctcaagattagaagttttcaacaaggtgtccttgcctggggatagttgctagatgaaatttatgtgaaatgtagtgaagtctgagattccctcttctgaaatcttgctgacatcacttatctatatagtatgtttttaagctaagtgtatagggaagtgtttaagacttctcaagcccaaataataaaaaataaggctaaattattcaaatagttgaaatttaaaaacactgttaaaacactttaaaaagaataaaaaattcagatgctcagagaagatctttgcagcatatatgtaatctctataattttcagcatctaaaatgttagtacagcacacagagattattattagactttaacaagtcaataaataaaataaaaccaaatgaaaaaaatgatatatgacatgattgagaatgttacaaagagaaccagggtgagtactcacatgcaaaaaagttcattagtcatcacagaaatgcaaatttagataacataatacatccaatatactcgtcaaaacttatgtctaattatgaaaagtattgttgaagatatggaacaacttgtatacattgctagtgaaaatattaatttgaataacatttaaaaatttggtaatttaaaccatgtttcaataattttgtttctacctatataatctggagaaacctatgaatacttgctttaggagacatttataataatgcatatagcagcaatgtatttaaacattttatttattagtgaatgaatacattaaaatcatatatagataaaaatgtgtaggccatatatatatgtacatatatatcacagaagcaaaacgtcccaagaaaaaatgcaagctgtaaaatacttcataaattgtgttaacatttgaaacattttaaaaagaagtcaaaccatatattgcacaatgatatataacattattttataagctattatagaaaagcaaaagaatagaaaacataaaattcagtatattctcaatcccaaaatgtcaggaaaattgaataagggatgagagggggttcaaggttatttgtagcattaagtttttaattttagatgttaattaacgtgttccccttttttttgtcctggatgttaaagttcataacttaaaaatatattatcattttctgtcttgaatgtgtcagtagtataaaataaatgcataattttatttttaaataaatacaaatcaagttttaaatttcagtgtgtatgatatctttaaagatctttatgcatatttcaaaagataaagacaaatatctaaaagcctacagtgcatagcaaaaaatgataaataccacagaaaggggcaaatatttgcctataaaatcttaggaaaggagaagtttatatcagccaaaatatttttttgaaagtggcatggacatcacagttggtctttaatatgtgtgatttatgtatttgaatacatgcatgccaaatatgtgtgttgcaggaatgtctggagtatttttatggtgtagtcctacattacttattggactatgctatagattctgttgtaacttagagggtgcagaattactgaaataggaaattgattggatattttttatgagaccatattaccttgaaaaaatatctatttcattttagtttatatttatgtaaaatattatagtaaagatattgggaatcatctaggcacatgagtgaattagtgaaacgtggctgggtttaaaaatattaaatcagaaatgcaagttttattatcccaattgatccttttcttcctacaatgcatcctgtataagaactaaaccccatttttttactattgccatttttgggtctcatatttgtgatgccttgtgaaggacaacctttgctgtctttaccactagtacagtgtagcacaaacatcttatcatcattgaaataaacttcttatgtctcaaatctactcacatttggttagtatgacgtaatgaaagtatgctgattttgaaatttatgtaaagtgttttggagaacttttgagaaaaacatacagtttattcatagtttggcatagacaaagactcagattctatctgacctactctcatcaatcagctttttaaaatttaaaaatattcatactacactttaaaatcattgttatctgttatgattttaaacataacagataataatcaatgttgattaattacaccgttaacaatttcacagaatttaaaaagttctacaatggtgttttatatgttaaatattcttttgataaatacattaaattaacaaaataaatctggaaggcaagacaaattctgcacacatgctatatttattttttgtaaatagtacaaatttccagcaragaaattacttcactatcttcagacaagcttatattacagtcatataacttcttttattttatgcaaattttatccagtcattctgtttctttttgcttacatccataggcacttgatttctggcatttgctagaggataattttgcaaaccactacaaaaatgatttcatcatcactggtgaaatcttcttaggggctaaaatgtttttataaatgactccttgaaaaactcaaaagtgctattttaaaattcaagatgagatttttcctctcattgacttaacaccgtttaatgttatgtcatttttgaaatggcaaagtggatattcaaacaaaggatacctcagtaagct

SEQ ID NO: 672594 - DNA, 3216 bp, Homo sapiens
tcactgggtagcctgagatgggatctgaagctggttctaaaggatgccctctagggattaaagacaggtaaaaatttccaccacttcagcttggctttgtgggtcgactgtgctgttagctgatacctgtgactgtgtgccactattgtcaggtatacaaagctaccaccatgatttgcacacttgttggtgtaggctacttgctttgtttctacctcaccccagatggtctagctacactgtcacccctgtgtttcctgtgaggtgagatgggagtgggcttcttgagaagtaactcaaaatgctagggaagctgtatgtccacctccagttctctgtttccactgtagaaaccatgggccctggggaatcctctctgtgtgctactgtgccaacttcaggaagaggtagggatgacacaaagtaagataatttctttcactgttttaatcagtttttaatcagtttagtgggccatgcaggagtctcagacttattctcaagattagaagttttcaacaaggtgtccttgcctggggatagttgctagatgaaatttatgtgaaatgtagtgaagtctgagattccctcttctgaaatcttgctgacatcacttatctatatagtatgtttttaagctaagtgtatagggaagtgtttaagacttctcaagcccaaataataaaaaataaggctaaattattcaaatagttgaaatttaaaaacactgttaaaacactttaaaaagaataaaaaattcagatgctcagagaagatctttgcagcatatatgtaatctctataattttcagcatctaaaatgttagtacagcacacagagattattattagactttaacaagtcaataaataaaataaaaccaaatgaaaaaaatgatatatgacatgattgagaatgttacaaagagaaccagggtgagtactcacatgcaaaaaagttcattagtcatcacagaaatgcaaatttagataacataatacatccaatatactcgtcaaaacttatgtctaattatgaaaagtattgttgaagatatggaacaacttgtatacattgctagtgaaaatattaatttgaataacatttaaaaatttggtaatttaaaccatgtttcaataattttgtttctacctatataatctggagaaacctatgaatacttgctttaggagacatttataataatgcatatagcagcaatgtatttaaacattttatttattagtgaatgaatacattaaaatcatatatagataaaaatgtgtaggccatatatatatgtacatatatatcacagaagcaaaacgtcccaagaaaaaatgcaagctgtaaaatacttcataaattgtgttaacatttgaaacattttaaaaagaagtcaaaccatatattgcacaatgatatataacattattttataagctattatagaaaagcaaaagaatagaaaacataaaattcagtatattctcaatcccaaaatgtcaggaaaattgaataagggatgagagggggttcaaggttatttgtagcattaagtttttaattttagatgttaattaacgtgttccccttttttttgtcctggatgttaaagttcataacttaaaaatatattatcattttctgtcttgaatgtgtcagtagtataaaataaatgcataattttatttttaaataaatacaaatcaagttttaaatttcagtgtgtatgatatctttaaagatctttatgcatatttcaaaagataaagacaaatatctaaaagcctacagtgcatagcaaaaaatgataaataccacagaaaggggcaaatatttgcctataaaatcttaggaaaggagaagtttatatcagccaaaatatttttttgaaagtggcatggacatcacagttggtctttaatatgtgtgatttatgtatttgaatacatgcatgccaaatatgtgtgttgcaggaatgtctggagtatttttatggtgtagtcctacattacttattggactatgctatagattctgttgtaacttagagggtgcagaattactgaaataggaaattgattggatattttttatgagaccatattaccttgaaaaaatatctatttcattttagtttatatttatgtaaaatattatagtaaagatattgggaatcatctaggcacatgagtgaattagtgaaacgtggctgggtttaaaaatattaaatcagaaatgcaagttttattatcccaattgatccttttcttcctacaatgcatcctgtataagaactaaaccccatttttttactattgccatttttgggtctcatatttgtgatgccttgtgaaggacaacctttgctgtctttaccactagtacagtgtagcacaaacatcttatcatcattgaaataaacttcttatgtctcaaatctactcacatttggttagtatgacgtaatgaaagtatgctgattttgaaatttatgtaaagtgttttggagaacttttgagaaaaacatacagtttattcatagtttggcatagacaaagactcagattctatctgacctactctcatcaatcagctttttaaaatttaaaaatattcatactacactttaaaatcattgttatctgttatgattttaaacataacagataataatcaatgttgattaattacaccgttaacaatttcacagaatttaaaaagttctacaatggtgttttatatgttaaatattcttttgataaatacattaaattaacaaaataaatctggaaggcaagacaaattctgcacacatgctatatttattttttgtaaatagtacaaatttccagcagagaaattacttcactatcttcagacaagcttatattacagtcatataacttcttttattttatgcaaattttatccagtcattctgtttctttttgcttacatccataggcacttgatttctggcatttgctagaggataattttgcaaaccactacaaaaatgatttcatcatcactggtgaaatcttcttaggggctaaaatgtttttataaatgactccttgaaaaactcaaaagtgctattttaaaattcaagatgagatttttcctctcattgacttaacaccgtttaatgttatgtcatttytgaaatggcaaagtggatattcaaacaaaggatacctcagtaagct

SEQ ID NO: 672595 - DNA, 3443 bp, Homo sapiens
ttgggactacaatatggaaggtgaaataatcatctttttttttcttatttcttgctattttcactgcatttggcattctatatggctatataaacatctattatccttttggttctcagtttttttgttttgttctgttttgttttgttttgttttttgccaagtatattatcccacagggaaacattgcaattcctttgtttcatttttgtttctattatgcactacttatcttaagctaagtttgtcaattagcattcagtaccacatatcataagaagaagaacataggcattaagtagccatatttgccactttttcaagcagctttcattccaggaatagtttttttttcctagagttgtaatcaagttgctgtttttttcaagtcacgttttcattaaaattatttattaaatagcactgtgtagtggcctggaaatcagtggaccaaactggaaatcagtaccaaagttgtcattttgccactatcttgctaaggtagtagacaaattcattaacctaggtaaacttctaatttcttagccataaaattaaatggctgatttagagaaaaaaagcaaatatttatattttggtttacatagtgtttttactgaagaaaatgcatttcattttcatttacaaaaattgtagatgtcttggcttgaatattgtataaatatcaattacttaaacttatatttaaccaaatattttgtgttcagagtggtattaatgaggctccaggagcagaacaagctatatcttgaatagcttaaaaaaatatataaaatttaatggatacggccaggtgtggtgactcatgtttgtaatcccagcactttgggaggctgaggtgggaagatcatctgaagtcaggagttcaagaccagcttggccaacatggtgaaaccctgtctctactaaaaatacaaaaattagccaggcctagggcatgtgcctatagtcccagctactcaggatgctgcggcaggagaatctcttgaagctgggaggcaggggttgcggtcagccaagatcatgccactgcattctagcctgggcaacagatcaagactctgtctcaaaaaagcaaaacaaaatgaagtaaaaaagaaacattgatggataagcaagagcaacctaattgcaatacagaacgatagtgcatattaattgacaaaacaaatcatgctaaaattgaaagcaccaagtgttcatatgaaagagtgaatattgtgggctgcaataatctgagaaataagtcatagagaatatagcaccttaaggcagaatcaaatcatataaagtaattgaataaatgacacagatagacgttatcatttacctatatatttagggtttgtgtgttgatattgaagttttaatagaaaacattcatttgccagaataatatctgtttcattctttccatttttaattttaaaagattgtgccattctagtatcttattgcagttgcattttccagattaatgagataaattaagattaactgttcatagtgatttgtacattttcttttgtaaagtgtttattcaaattcttggtcatttttctgtggagtaatctatctacaatcagataacattgttatttttgtaataatccttctaaatttgctgtataaattgttgaaatgactacctgaattaaagttatgagcaattttaaatttacctagactccataaaggtgattattgcttaccattttgctttactttcactcatcatgtcaggaattatacccaaagtgtttgaaacagtagtgagtgcttcattttactgagttcagtatacctaaaacatgtatttgagggcataatatgttatgttaacttacgaagaaaacatattttttagttaaatgtatggaaatggtgagtaaagaaaagtttttagtctttctataattattaataaagcaataatacaactgaataatgcatgttataaaatgtcaaacgggatttgaggccagatttcagtacatctgtcatactgcgaaaataactattctaaagctttttgatcccctataaaaagatatcattattgcaggattaaattctgtaatataagtaaatcatattgctctgaaaaccattcgtatttttgaaataacatcactgcaaactttatgtcaataaataaatgaaaatattaataggatgtagtataaaagatgctttttcaaaagtgatgactagaactagaattgtataaattttagaatggagagagataaaataaatttgtttaaaacttatttccctagtaatacaagaaaataaacaaaaagttggatactgagcataaatatggcctaggatctcttccaaatctcaatttttatatttaattagtattcaaacatttacactacaaagctttttgtaagttaaaacaagtgataaaatgaaatgcattaggagaaaatctgtatttggtatacattcatagaaaaaataccatttaaatgataatttgaaaatcaatgaaagtagagtagatattttgtttagggaaggctgaaacacactttgtgatgtgaaaaatattcaggtgaaactgattttaaaaaaaggtaatggaaggacattgtctttaggtggactgaatgggcacgaagaaagagaggggtgattcaaagattttgccagagatggtgggtgaaaagggcattaaaattcagggaaggatttaraagtgcaaatctcaccacaggttaaattaactaatggtactgtatataaatttcaaaaaaataaaaacattggcccatgaaatttaattgaaatactaggttgtatataataatgcttaaatattattttgtaaagacacagttgaaaaattctaaataactgacagttaaaagaagttaagagtattaacaattaaatacatacacattatatggagacatgcttctaacagaatctgaaggtttagccatttcaaaaactaaatatttggaaacatttaaatatataaaagtatgtatatgtttcaatatatagtctgcatatattttaaccataatgttattcatcgagatagcacttgagaaaaagcgtgctgtgtggtttaaaatgatacagcttgcctttcactccacttcactagactatctataattttaagaaataatgtcaaattgattaatcatttggaatacaattttcttaatataatagctttcacctattattgtgatgattctaattataaatctatagacaagtgtgcaatagagcagacgttatttttttacttaagggtgatgtgataaaatgcaatatttcatgttaattatattataaaattgttcttaacataataaatgacataagaaatacattaaatttagaaatgctttaattacagtcacggcatatggggatactgaaatgca

SEQ ID NO: 672596 - DNA, 1459 bp, Homo sapiens
ttttttatttgtccattaaagaaaatcttttttattgataagttttatttccaccccatcatactattttataattaaacttgtgtgaatacgttacattttttgacaaaatgtgtattatcatcttttaagaataaatttatatttcacatggttcatatttttgttccagttagctttggaattataccttaagatcctaagttcactgtttagattttaactagtttgtcatttttaaatggtacactttaactctcacctattgcctaatatgaaaaatcaatgagactgttctccttccctgttttcctttccgtcaccctttttttaggttgcattattttgtcaaacagatctatttgtgcattagtcttctaccctcatcatcatctatttttagtctgaggcatattaatatataaatgtttcatgctcacctacagktcttttactaaggtttgctcagtcctgtcttggttgaataaagattaacttgtagtaaatccaagaaattcttatcagtacagaattccctaacctcttgtatgtttaagactttttcatggccttaacatctgaagttcaggttagttagctatacaatatttaggcttcattttcttttgttgggtcttgaaactgctgctccactgatgacttgctttatatgttgcgttggaaaagtctgatgtcactttaaatattttactcttgtacttcatttgatgttttgtctaaaagtttaatgaattttttcatttgatgtaatgtatttttctagaatatatattgaagattattgtttggcgataatatcctcaggtgacttttggatcctttcaatatttagatttctaagttgagtctatttctggaaattttttttgaatgatagtttcaaacattagctttgtttcactgtttaatttttgcttcccactaccctccaagggccatctattatacaaatgttattctttttttatttttttgcctatatttatgaccattttaactctttatctcattccactcactctgttttacctttacccaatactcctcataaaatatcaattatttatttatcttcctatgatttagtttttatttctaaattattcattattctctttctttatatcctgagtttaataaactttcaatattttgtgctttgttcatgtcttttttaagtttaaaataattcttgtttcagtgtgtttttcatatccataaatacttgtttcaatattttatttaaaaggtcgtcccacatagtttttctactttgctgtagactttggcaagaaattttcttcagatgtatgttaagcacatattataatatttgcaagaaatatgtgtaaatattttcaattttccatgcactatgagaatttgtgatgatttataatatttttagttaaatatctttttatcagtgtagcaaatt

SEQ ID NO: 672597 - DNA, 668 bp, Homo sapiens
tattatagaagtgattctgttgttcaataatttctttgagctattaacatttttttaaattttaatgatattgttattacatatattgacaacttttttattgcttgtattaatctaaagatagattaaaactctaagtcaataagtggcaaaggaaaaattcttctgcaaaacaaatttacttttttcatttcttacaaaaattattgcataagtattggtttctttcagagaaaaggggaaataaaatgtaacctcaaactctactcaacatttagttagcatcattgctctggtaacatctttcgaatgtgacagaattttattcttctttcattaaaagtttctttctaacactcactggttaattttagactaatgagatttcttttggctgtaggttttcttaatataagcagtttattaaattttactctctaagttatatttcaattttaatttmagtgttttcaactttttctgagaacttctctgccttctcgaagagaaataattagtggaaaataataacccccccaaatcacaattcactaatttcaggatgtatttactaaatataaaactattgaataaattaacttttagcttagactggatacagaaattgacactttctgaaatgaaacctaagaaaatgaaaacatgac

SEQ ID NO: 672598 - DNA, 668 bp, Homo sapiens
tattatagaagtgattctgttgttcaataatttctttgagctattaacatttttttaaattttaatgatattgttattacatatattgacaacttttttattgcttgtattaatctaaagatagattaaaactctaagtcaataagtggcaaaggaaaaattcttctgcaaaacaaatttacttttttcatttcttacaaaaattattgcataagtattggtttctttcagagaaaaggggaaataaaatgtaacctcaaactctactcaacatttagttagcatcattgctctggtaacatctttcgaatgtgacagaattttattcttctttcattaaaagtttctttctaacactcactggttaattttagactaatgagatttcttttggctgtaggttttcttaatataagcagtttattaaattttactctctaagttatatttcaattttaatttaagtgttttcaactttttctgagaacttctctgccttctcraagagaaataattagtggaaaataataacccccccaaatcacaattcactaatttcaggatgtatttactaaatataaaactattgaataaattaacttttagcttagactggatacagaaattgacactttctgaaatgaaacctaagaaaatgaaaacatgac

SEQ ID NO: 672599 - DNA, 661 bp, Homo sapiens
tgaaccttgaaaaatcatgaacaattatccaggtagagaaggttggaagtgtttagggagcttcacatagttcattgtggggaagggataaaaagggaactagaaggtagctaggaagcagttcaaatggagtttgtatgccatgtgagctgcttaaatttccttttgttgttatcaggagcagtatcaaacatgcaccagaagagacaaaaccagtggcaaggagctcagttaggagatttgcagractccagctgtgatttgacaagggcctcatgtcatctgtggttgtcactctatatatttccttctcgagtgatcaacagatttctagacaacaacccttccacccacttgcagtttgcagattgggtgagatgatttcatcctcagctccaagggtgattcttaattagcttaagtcaatcagcaaagtccacagctaagccatagtaattggattgggaataaacatgagactcaagtggtacaaaggaggctggagagtagctgagctgggcttttgggagagaatctcctttgttctctgggagaactactgagagggttattctttcttcctgaaggaggaaatgcataggctggatgctgctggttaccatattgtaacaagaagaaaatcagtgaacactacacagaa

SEQ ID NO: 672600 - DNA, 605 bp, Homo sapiens
aaaccgcatctctaaaaaatatataaaaatcagccaaacgtggtcacctgcacctgtagtcccaggtactcaggaggctgaggtgggagattgaggctgtggtgagctgagatttcactactgcactccatcctgggtaacagaataaaaccttgtctcaaaataacaaacaaacaataagggtatgggagtcaatggaaaggggattataaggaaagacattctagaagaagggacacccataatrggagctaaattttgcatggacggccatgcagatgataagtattagggtatgaaatactctctgcctgactttcatgaaaacgtgctgctggttgtccttctgcctcttttcttgcaatttttcatgatttttcttagctggattttcctcttctattcactggctaattctgaaatgtttccagggctttgtcctcaaccctctttgttggttcttggaattcctcaaaagtgaactcctccattcccatgactttaaatgctacctttatgtaggtaactttcaaatttatattatcaactgtagcagaccctctaagctccaggcctatatacccaattccatactcgtcttcttc

SEQ ID NO: 672601 - DNA, 605 bp, Homo sapiens
aaaccgcatctctaaaaaatatataaaaatcagccaaacgtggtcacctgcacctgtagtcccaggtactcaggaggctgaggtgggagattgaggctgtggtgagctgagatttcactactgcactccatcctgggtaacagaataaaaccttgtctcaaaataacaaacaaacaataagggtatgggagtcaatggaaaggggattataaggaaagacattctagaagaagggacacccataatgggagctaaattttgcatggacggccatgcagatgataagtattagggtatgaaatactctctgcctgactttcatgaaaacgtgctgctggttgtccttctgcctcttttcttgcaatttttcatgatttttcttagctggattttcctcttctattcactggctaattctgaaatgtttccagggctttgtcctcaaccctctttgttggttcttgkaattcctcaaaagtgaactcctccattcccatgactttaaatgctacctttatgtaggtaactttcaaatttatattatcaactgtagcagaccctctaagctccaggcctatatacccaattccatactcgtcttcttc

SEQ ID NO: 672602 - DNA, 902 bp, Homo sapiens
atatacgcatgtaactatatataagttcaaaatatattaaagcagaaaatgacgagattaatgtagcaattaatcttatagttggagattttaacacatcactctcagaaattgatagaacaagtagacaaaaataagcaagacatagagttgtatgtagtgataaatgactatcatccagagatacatagagaactttctgtaacaaataaaatagtcacaaaaatgtatcatgtactaggctacaaatgtagctttaagcaaatatcaacatagtaccattaaaaaaaagattcaacattgtaccatacagtttctcttggacacacaaaaatataaagttagaaatgaaactccaaaaaataggttgttaaattacttatggatttaagccaaaaaatgtacttatggaaaatgtctgtgttaaaaaacacatacagtaaatgacaaaatactttgaactaaatgacaatgaaagcaatgtataacaaaatatgtgtgaatwaaacaattcttagagaagtatatatagcttttaatccactgatcagaaaaaaatagactgaaacatgagctaagcattcaacacaaatagctaggaaaaaagcaaaacactttatacttccaggaatatggcaatccacgtgttctaaaaatagctcatctgccttaaacatccacattctgaataatttacaacagatttattttaaatacattgctgagtgcattaacaaaatatatgggaaatcctcagcagagagagagaggtctgaaactatatagattataccctatgacctaagccactatcagaaactcagaatttgaggtattagtccaacgtgaaagaataggaataaggttttaagatcatgccaagtcaatatgttgtttagaag

SEQ ID NO: 672603 - DNA, 749 bp, Homo sapiens
gtgagcatgagatcatgccactacactccagcctgggtgacagagagagactctgtcttaaaaaaaaaaaaaggagaaaaaataattccatttgaggctgagtcacttcaccatcatttataggaatggatcaagttcacagaatccctaaagctccctttcctcatctgtcaggcagaaaaccacatccctgggccgcaggagcccagtggagattcaggcataaaggacaaacccagacaggatcctgcaacatcagctggggtgggcgggctgtaggcatccctgacatgcctgtatcatcagcaaaccatctatcactttcaccattctttgtgcctgctccctgaccctctgtttcagaatcatgcattgcctagataattaatttacctggagctcaaaagaaacttttaccacagggaattagagatgggatcattcatgttcacaaaactgtggggcacaaagctgattttctgacatgtgcaggtttgctgarcattcccctcttcagtgcccacttcacttccctacttcccatcatcttcttaaaaattatcttgttggctgggcgtggtagctctcgcctataatcccagcactttgggagtccatggtgggcggatcacctgaagtcaggagttggagaataacctggccaacatggtgaaaccctgtctctacttaaaatataaaaattagccaggtgtggtggctcacgcctgtaatcccaggcactcaggagg

SEQ ID NO: 672604 - DNA, 749 bp, Homo sapiens
gtgagcatgagatcatgccactacactccagcctgggtgacagagagagactctgtcttaaaaaaaaaaaaaggagaaaaaataattccatttgaggctgagtcacttcaccatcatttataggaatggatcaagttcacagaatccctaaagctccctttcctcatctgtcaggcagaaaaccacatccctgggccgcaggagcccagtggagattcaggcataaaggacaaacccagacaggatcctgcaacatcagctggggtgggcgggctgtaggcatccctgacatgcctgtatcatcagcaaaccatctatcactttcaccattctttgtgcctgctccctgaccctctgtttcagaatcatgcattgcctagataattaatttacctggagctcaaaagaaacttttaccacagggaattagagatgggatcattcatgttcacaaaactgtggggcacaaagctgattttctgacatgtgcaggtttgctgagcattcccctcttcagtgcccacttcacttccctacttcccatcatcttcttaaamattatcttgttggctgggcgtggtagctctcgcctataatcccagcactttgggagtccatggtgggcggatcacctgaagtcaggagttggagaataacctggccaacatggtgaaaccctgtctctacttaaaatataaaaattagccaggtgtggtggctcacgcctgtaatcccaggcactcaggagg

SEQ ID NO: 672605 - DNA, 595 bp, Homo sapiens
tctttaacggcttccgttattcctgtaatacctatgtaaaattcggcagaaaagaataactaaaattaaactgtaaacaccctatttacttattaaagcaatataaaaatgctgaaaattctcacaatttctctgaaataaggaggcaaataatagtagtatctttacaaatgaactctaatgagaatagtcacaatggcacctcctcaaattttgaaaaactcattaatattttaccatgaattactttccttgtttgaatctctatcacaacactttctgagaaacagaacagtttggccaggtgcggtggatcacgcctgtaatcccaatgctttgggaagctggggcgggtggatcatctgaggtcggaagttcaagaccagcctagccaacatggtgaaaccgtttctactaaaaawacaaaagttagctcagcgtggtggcgtgtgcctgtagtccccgctacttgggaggctgagacaggagaatcgcttggacccggaaggtggaggttgcaatgagccgaaatcgcaccattgcactccagcctgggcgacaagagcgaaactccgtctcagggaaaaaaaaaaaa

SEQ ID NO: 672606 - DNA, 1303 bp, Homo sapiens
taatcatgttctctcttggcccagaaataaaccaaaattcactattccatgcctactctatgattctctctaagtaataaaaaagaataaggctataaagtctgttgaaataaccacaatcaaatattagcatatagttgccagagcgttgccaacttaaaaactggtttgagtagccacaggttactcaaaggtcatgtgtaatgataaatgtaaccttaaattattccatattgtggagagaaactctacgtaagaataactatcatgaaatgttgctatatgaaatcaggttgacctgtaactctgggatatcacatttttaaaatccttacataaactctcttaaaaatcatattttctgtttcaaacataagctatttctatgtcaattctgaaatcctcaccagttgaggaagtaagacatgggccagtcatgtgtgtattcctatggaaaggtcaagacaacagacagaagctgtgacctctaagtgaactcacctccttttaatggatcctatccaggaggagtggaaaaactatgaggtctggaaaaagtaaagaaaaagtattcaagctaaaagaagttaggagtatgggatgtggcagagtgcgggaaactaaattttcttcaaggtttcttgaaaaagtgtgagtactgatttggataatcaaataacattccgtcaagggctatctgtgtagggaaccaaattttggatgccaagcaaagtactaataataaaatccacatcagaagatccaatagtcagttttaatactaacttgccattaaaatggcttaaatataaaagctgtattttagacaagcaaaatgtgtctgaagtctcaatatatacagtgtaatgttgtgagacaaatggctctgactctgacacagcaactgcagtacgtcytttcaattcagctcagatttcttgaagggcagtgcagtgattctcagagcaaatcaataaaattcaacagcattttaaggcctgttctcgaaaaagaaattaagtgttctgtgtaaattcagatcatttcccaataaagtttccaaaatgaaattatcaaatcaggatgtcttgagtaccacaaagagagatattactattttatacttcagttttgcaaaatataatcctttatcattttgtatgcaatcttagaaataaggatcatacataccgaagtcttacatacagaatatgcataccctgaataagcaaaataagaaatactctttagtggcagctaacaaatggaataaactccaaaatgggattgtaaacagatttaa

SEQ ID NO: 672607 - DNA, 600 bp, Homo sapiens
cacaattgggagagaattttctcgactggattttctctttttcaggatcttttattcagtatccaaatttttaagacacctgttgaacacaagtacttatctttctctgaaataaaggtgcatttgccacactaaaggagctaagagctaaacagctaaagagaaaaaagggcatgttttgctatagtacctatacattctatcaatactaacattgtaaaacataatttttcagtatataaatatacatattttatattatatacatctgtttgtgtgtacattttgtgggacaggtgttagcagtacaaatatctatcttttaaccaggcttgttsgtattttgggaacgtctaaattttgtatagctcattggtatttaccttgccttctttataagaatgaaagattttaactttggttagcaccaactgatattcaaaataagtattatttccgtaataatttggtttattgtccctttctgtaacaatagagccaatgaccagttgcctaaaatctctccttcccatgcttaatattaaacatttggtccagtaaaaagtccacagctctgcctttcaaagcttacttcagcac

SEQ ID NO: 672608 - DNA, 600 bp, Homo sapiens
cacctcataataatcccaggaagcaggccatatttatcccctattcgagagaaaaagatactcaagtaaagacagagtaattgacttgacataacacagttggcaagaggtagatcrgcgatttcaaccctgacagtccagccttgaagcccattctgtaatatagtctgtgtggcccccaatgtatatgaaaagtggaaacgtctactctgttctgctggaggagatattagggctagaccatgcccagcgcctccttagcaccttctctctttgtcccattgggaagagggagtctatctgactgcagaccaggggagaaggaggtaagcaggagcactgctttggctccctctggggtgcagcctattctcagggtgcatgctttctcaaattcctgccttgtttcacaatctagagtttgagatgagaataagaagaatctttggaacatggttttcatcaggaaactggctacagaggtgacagaagagctttgaagccaaagaagagatgggtattagcagtaacagggagccacctctggccctgggtcacagggagagcccaggcaggtaagtttactgggactaagtacca

SEQ ID NO: 672609 - DNA, 600 bp, Homo sapiens
cacctcataataatcccaggaagcaggccatatttatcccctattcgagagaaaaagatactcaagtaaagacagagtaattgacttgacataacacagttggcaagaggtagatcggcgatttcaaccctgacagtccagccttgaagcccattctgtaatatagtctgtgtggcccccaatgtatatgaaaagtggaawcgtctactctgttctgctggaggagatattagggctagaccatgcccagcgcctccttagcaccttctctctttgtcccattgggaagagggagtctatctgactgcagaccaggggagaaggaggtaagcaggagcactgctttggctccctctggggtgcagcctattctcagggtgcatgctttctcaaattcctgccttgtttcacaatctagagtttgagatgagaataagaagaatctttggaacatggttttcatcaggaaactggctacagaggtgacagaagagctttgaagccaaagaagagatgggtattagcagtaacagggagccacctctggccctgggtcacagggagagcccaggcaggtaagtttactgggactaagtacca

SEQ ID NO: 672610 - DNA, 627 bp, Homo sapiens
ggaatgaacattctatgttatattgattctgcactaccttaacgtgtggatcgttttttggccttcgctcccttttttatacaatgactcgttttcacaagattctgtcaacagtagtatgtagagtagttaagagtataagttctggatgtagacagtcttaggtcaaaatctccctccaccacttaatagctctttggtcttgggtaagtctagacctaatatattgttgtaaatgggatctgcaatactactcaccttgttttggggattaactgagatcattcctgtaaagggtttaacaaagcactgggcatgtaaaaaaaatatgtaaatactataacattattttcttaagtgccttctagatccatcaattgttcacagttgcactgccaattgtgtttgggcctagacaacatcttacagtccgagactctagctctaartatctcttattctattaacgtaataaaggaaactttaatgtgagctgaagttatttcgattcaacacctatatattgagtccatgttgctgtcagatccaaaaatcttcataactgaggtgcatagaactaacatttcttgaatattttctatgggtcagatcctgttctaatccttt

SEQ ID NO: 672611 - DNA, 995 bp, Homo sapiens
tgtttggattacaggcgtgagccaccacgcctggcctgtgtgttctttcacagcagacaccagaaccctttcctgttccccagtgctgtgtcgataactgtgcggctgatttaactgagagaaaaggtaggaattgttttctgaagcattctgaatgagaagggaagcctaatgagttctgatttttattgtgactaatacatgaggtgcattattaaggtttgacaacatggtgactgcctataaagacgtctgcaaccagtgcctgcagccttcattccaaatgaacattcttgtgatggctccaatgttatagacaagcattaacagccaaaaagaaaaacagaaatctccttatggtgtgaaagtcctctcagctgcagctgcccggacgcccagaagagccctcccagctgcagagggtgatttcagtccatgtcgaccctcctgcttgtctttacagcagaatgaattctcttttgtctcagcctttcccgattcatgttttctatcctgaaaacaaaaagactgcaattagccccagatgcccaatcagtgcttttcaaagtggtgagaggagttgggagctcaacgggaagccgagcagttacaccagcaggcactagccygcaggcctcggtcccaggtcagcatcctctcctcttcctagagtttctcccaaggccggccttggactctcccctgccccttccttacctgtgtagactcttgtccacacaaatcagtttatagcatcttagggcatttcctggtacctgattctatgaagtttaacatcttcttttgttggctccttcggtgtctggctggcctcagtgatcatgtctcgaattttctgcaggcaatctgccagattccggaactgatagcggctgctctcagaggtgaggatcaactctcctaacctgttgatcttgtttttatgctgcagagaacaaatgaaaaactggagtcctacagagtaaaggtttaaa

SEQ ID NO: 672612 - DNA, 993 bp, Homo sapiens
aaaaaaaaaaaaaaaaaaagattatatgtatatgccacctggagataaagggaagaggaagatggcagtttgggaactccagttacccaccctgtagctagtctgtcatttggattttgctcacacactgcaaaacttgagacctgaaaatctccaggggcccttcccgctctgactcccaagatcctctcctgtgaccacctcagacgggacaacagagacaaacagtggggatgggggcaaatcacaggtttattggtttccagctccgggcagtacactggccaggccacagcaggggattagagatggaaccagagccggcacctccagatcttgttgggtcctagaaatgctgccaggagaggtctcccttccccagtcacctcatgccccacggtcatactggggtggatgggcctgtcctgactgtgatttaaaaattgaacctggaaaaataacttttgtgaaaattccactctgggaccagaaggaaatgggctgtcatatggcaccagctgggattcattcccagagggtgtctgagtgggcacatgagctgagccccctcttcctgccccccatgcctctgttggaggcctcaggacagcacgtagacctccagcaggctggacacagcgtgcatgcggtagaagatgccgaaagggaggcagatgttgacgatgaccgcccagagggagtagccgtagaaatccacctccactgtgttgctgaaatgagggcgggcccgatagcaggcatgatccacagctgtgtggagagaggagcatttcaggagctggcctggatggatgcctgtgggtcatttctgtgggttttgctgggccgyggctagatggcggcccatccttctagcttggtggacacggagggctgggtgtcagtgaatgggcagctctagcattttggacaggacctagcacactctaaggggctcaggaagtgagccaactgaattcgccatccctaggc

SEQ ID NO: 672613 - DNA, 993 bp, Homo sapiens
aaaaaaaaaaaaaaaaaaagattatatgtatatgccacctggagataaagggaagaggaagatggcagtttgggaactccagttacccaccctgtagctagtctgtcatttggattttgctcacacactgcaaaacttgagacctgaaaatctccaggggcccttcccgctctgactcccaagatcctctcctgtgaccacctcagacgggacaacagagacaaacagtggggatgggggcaaatcacaggtttattggtttccagctccgggcagtacactggccaggccacagcaggggattagagatggaaccagagccggcacctccagatcttgttgggtcctagaaatgctgccaggagaggtctcccttccccagtcacctcatgccccacggtcatactggggtggatgggcctgtcctgactgtgatttaaaaattgaacctggaaaaataacttttgtgaaaattccactctgggaccagaaggaaatgggctgtcatatggcaccagctgggattcattcccagagggtgtctgagtgggcacatgagctgagccccctcttcctgccccccatgcctctgttggaggcctcaggacagcacgtagacctccagcaggctggacacagcgtgcatgcggtagaagatgccgaaagggaggcagatgttgacgatgaccgcccagagggagtagccgtagaaatccacctccactgtgttgctgaaatgagggcgggcccgatagcaggcatgatccacagctgtgtggagagaggagcatttcaggagctggcctggatggatgcctgtgggtcatttctgtgggttttgctgggccgtggctagatggsggcccatccttctagcttggtggacacggagggctgggtgtcagtgaatgggcagctctagcattttggacaggacctagcacactctaaggggctcaggaagtgagccaactgaattcgccatccctaggc

SEQ ID NO: 672614 - DNA, 1148 bp, Homo sapiens
ggtggggccagagggcagggggccaggtaccaaagacgttccaagacatgctgaggtctggaccttaatgattctgctggtagggtcagagattgatgaccacattttttttaagtgaaattgattgtgttggaaggctcctgcgtggcatcatcccacatctatggggaccatgacctggtggatggcccttcacagtgggacctcactaagaatgactcttagttagggccactggtgtacctcatgcaggtaggatttcatggggtagaattcactctggggctcttgctctgtcctgggatatacccacattaagtaattttctatattagggatatttttctattggaggttctagctggaaggattgtttttctattgagtgaaacttcattagaattgtttttttctctttgagatgtacccacataggtacatgtttctatatcagaggtaataataagcccccactgggccatttctgtcttgggttgtactagaaacaccaggagtgttttcctattggtatgcactttcattaccagtgtttctgccctggggtacttctatacagagaatatatttgtattgggtgaagtctattgctttttttttttttttttttttgacagagtgtcactctgttgcacaggctggagtgcaatggtgcaatctcagctcactgcaacctccgcctcctgggttcaaacaattcccttgcctcaacctcccaagtagctgagattatagggtgcgcacactaccacgcctggctaatttttgtatttttagtggagacagggtttcaccctkttggccaggctggtctcgaactcctgaccttgtgatctgcctgcctcggcctcccaaagtgctgggattacaggcgtgagccactgcacccggccaagtctgttgttcttaatctttgctgagtcactagggagggggtggctgttgtagatgccctccttcccagttcactctgctaacagaccgctcacacttaacactggtctccgctacttcctgacactgttccaattattctgagaagcaggcagatcacaagttcccaggagcagtcacacctcccactggggggtgaggaccccgccttccacatcagctctcagctccctctc

SEQ ID NO: 672615 - DNA, 2834 bp, Homo sapiens
atgtgatctctgcatactgcaactatcttgttttccagctgcagtggccctgtacatggttagggctcaactaatattagctgcttgcttttcctattctttttccaatccgtagtaaaaccatggttttaaataagtagtaactgaacaatactatgggccaagctgtgcttatgacttacatgctacatctcaattaaatttcacaaaaagcttatcagatatttacttttagtatctccatttgaaaatgaagaaagtaagtcctagaatgattgaaaaaagttttctgaaatggcacatgtagtaggcatgttctgagtaaaggaaaaaaatacatacatgaatgcacaagttcatattctagtcagcctgatagccattgcctgcgtattaggtttttagaagagctaaaagtaaaagaacactgaaaatgagcttaagaagttttcttaagtcctaggttcttcttagaacatcatctacctgctttctattttgctcytgttttctgttagtattctttgcatacttagcctattgattccataatagtcaatacccaccttgtttatatttttgaaactatacaaaaatagatgcatctttcttttctacttaaatgtggaacagctatagacagttcttaagtgattcagagaagagtctttatatgtctctctctatgatgcatcccttcatgcagttcctattagtttgctatctggcaccttccattagctaaggatattcattatcacaaaactgtttaatagcactaatttaatacatcaagaaacatgctaacatagcaagtaggtctttgtgtaaaagctacttaattatgccctggagtcatactacctcaattagaacactagctatacaatatatttaatactttgtgaatttaggcaaatttcttatcttctctatgcctcagtttccttacctataaaatgaagatagaaataatattgatctccgcattgtttgtataatgattgaatgagttattataaataaattgcttagaaaggcacacaggaactgtggtatataaatgttaactggtttttaaaatgattttcccaactttattgccctacaaaatgatgatgtacccacttttccccctaagacccttggaaaatatgtctttggagaggaagatggagaatgacagaggaggaacaagaacttgaaaccaataagagaggttaagtccccccactctgagggatagacttaacatctgacccatctttcagctgagaaaggcttgacactggaattagatttcccagggaactaaatgtacaattctctctctgaaagtaaagtcccaactgcaatagggaagctttaagaaacaagtgacataggctcattccccttggtagtaaggcaagacaacagcaatctgtgtggagaatcgaaattcattcagacccatgacttcacactacattgtgttttccctcttggggaggaagtttggaatgcatagcaactctgtgatccaaagcagcttgcttaccccataatgtgatacaaagtgggtaagagtcaggagtcttgagaaatgagtcagaagatattactcttttggttttgagttgcggaagctctgctggcatccactgcctgcaaagctgtttctgtcccagatagaggtgagatacatgaatgtggagaaggacacaaaacaaagcatggcgttggtactaatctgatcaattaatctggtaaagggtgccgtctgactctagagctgtccggcaggaaatgtgtaaaagccccacagtgaaaaacatgatttctgttaatctcctgctttcatcatgctgatcccttgaggcagccatgctggcttatgaaaggcttgtcactggctcaactgctgcctaatgtccttcctgggaggaatctggccctcagatttacctaaagtatgaaacaccattaactgctctcttattaatccagtgtgtgactgggagtcagggttttctaatatttccccttctgttttcagtcagtccttggctactcaacatatgtgtctgtcagtcccctgctctaacaataatcatgtttgaaaatcagaaaaagaatgatgtaaccttgagtgtgggccacattgctattcattacttgctggaaatgaaaaaaaatgcaaacaagaattactcttcataaacttggtttaattcttgtgagcaagtttgtgagtcattttatgaatggctcccgcttcaaattagggctcctgtttccgcttccaatgagcctctagtattacatctaatattgtttcctctcagcaattgaaatgtacatccctgctgggttggtaagaatagaatttctttccggaattctttcttctttctgaattgcttcattttacttcccccaaaactaaaataatttgtacttaagaccagacaaaattaacctcatggcttgttctcctttcactttgcaacctgactgcttggcaaagaaggctgctttcactcatgctccacttcctcacctctgtgaggtggcaaatgaactcaaaggacatgagagctcacctctgtggaagcagatatagatgaagggctaggacagagcaatagggtggcacggatagcatagccctgtgctacaaagcaatagggtggcacatgtggcacaggtaccacagggctatactacctgggccacatgtgctggccacaaagcaccttagggatttgtccctgggagaggcttcactgtccttaggtccatctacagagaccagcagctatgtaagttaggctaatgcatgctccaaaatc

SEQ ID NO: 672616 - DNA, 992 bp, Homo sapiens
tgtgactgagacacccatgtaggagatggggaggaagtagggggaacttgcaaggagaagctaggtagagtccatgcaacatagggtgaagagtgggtgatcaagaagccatctcaaaaaaaaaaaaaaaggtagaaaacagaaatataagttatgtaagtatatcctccattggactatcagagttcacttataaaacataaattaaaaaatgaaattattaagaatttcaaggtaacaattgcaaagaattatatcccaagagtggggccctttgagcatggcagcctatatagttgtgtatataactgtgtggttacaacctatgaagctgactgtggtttttattatctgaatttagtcagrgaggcaatgagaaagggtgattagtttaaaaagcctgtgtaaatcttatgcagatctgttgctttggtggcaacagagtgtaaaggttaaaaatctgagtttagatttatatagacctaagttcaaatcccaactcttcatactagataatttgagaaaagattgtaagctctcaaatttgatgtcttctgttttaaatatgtagtaaaacagattttaaaattttgaacaggttgaaaatgtaattcatgtaaaacattcaacacagaccctgtcacatactttggtagtgaataaatgttctcaattattatcattaatatttgtgatacatttgaatttggagatttaagtaaaattttagtcagcaaaaatacttgtttcctgcttcgtgtattatcttagacatacatctcaaaatcctgaaagatctaatcacatagcaaatatatatatatatatgtgtgtgtgtgtgtgtgtgtgtgtatacatatatacatatatagttatctctcaatgcatatatatatgcatatatatgtatgtgtatatatacatacatatgtgtatatatatacatatatgtatgtatatatatgcatatatatgtatgtatatatattgca

SEQ ID NO: 672617 - DNA, 992 bp, Homo sapiens
tgtgactgagacacccatgtaggagatggggaggaagtagggggaacttgcaaggagaagctaggtagagtccatgcaacatagggtgaagagtgggtgatcaagaagccatctcaaaaaaaaaaaaaaaggtagaaaacagaaatataagttatgtaagtatatcctccattggactatcagagttcacttataaaacataaattaaaaaatgaaattattaagaatttcaaggtaacaattgcaaagaattatatcccaagagtggggccctttgagcatggcagcctatatagttgtgtatataactgtgtggttacaacctatgaagctgactgtggtttttattatctgaatttagtcagggaggcaatgagaaagggtgattagtttaaaaagcctgtgtaaatcttatgcagatctgttgctttggtggcaacagagtgtaaaggttaaaaatctgagtttagatttatatagacctaagttcaaatcccaactcttcataytagataatttgagaaaagattgtaagctctcaaatttgatgtcttctgttttaaatatgtagtaaaacagattttaaaattttgaacaggttgaaaatgtaattcatgtaaaacattcaacacagaccctgtcacatactttggtagtgaataaatgttctcaattattatcattaatatttgtgatacatttgaatttggagatttaagtaaaattttagtcagcaaaaatacttgtttcctgcttcgtgtattatcttagacatacatctcaaaatcctgaaagatctaatcacatagcaaatatatatatatatatgtgtgtgtgtgtgtgtgtgtgtgtatacatatatacatatatagttatctctcaatgcatatatatatgcatatatatgtatgtgtatatatacatacatatgtgtatatatatacatatatgtatgtatatatatgcatatatatgtatgtatatatattgca

SEQ ID NO: 672618 - DNA, 992 bp, Homo sapiens
tgtgactgagacacccatgtaggagatggggaggaagtagggggaacttgcaaggagaagctaggtagagtccatgcaacatagggtgaagagtgggtgatcaagaagccatctcaaaaaaaaaaaaaaaggtagaaaacagaaatataagttatgtaagtatatcctccattggactatcagagttcacttataaaacataaattaaaaaatgaaattattaagaatttcaaggtaacaattgcaaagaattatatcccaagagtggggccctttgagcatggcagcctatatagttgtgtatataactgtgtggttacaacctatgaagctgactgtggtttttattatctgaatttagtcagggaggcaatgagaaagggtgattagtttaaaaagcctgtgtaaatcttatgcagatctgttgctttggtggcaacagagtgtaaaggttaaaaatctgagtttagatttatatagacctaagttcaaatcccaactcttcatactagataatttgagaaaagattgtaagctctcaaatttgatgtcttctgttttaaatatgtagtaaaacagattttaaaattttgaacaggttgaaaatgtaattcatgtaaaacattcaacacagaccctgtcacatactttggtagtgaataaatgttctcaattattatcattaatatttgtgatacatttgaatttggagatttaagtaaaattttagtcagcaaaaatacttgtttcctgcttcgtgtattatcttagacatacatctcaaaatcctgaaagatctaatcacatagcaaatatatatatatatatrtgtgtgtgtgtgtgtgtgtgtgtatacatatatacatatatagttatctctcaatgcatatatatatgcatatatatgtatgtgtatatatacatacatatgtgtatatatatacatatatgtatgtatatatatgcatatatatgtatgtatatatattgca

SEQ ID NO: 672619 - DNA, 992 bp, Homo sapiens
tgtgactgagacacccatgtaggagatggggaggaagtagggggaacttgcaaggagaagctaggtagagtccatgcaacatagggtgaagagtgggtgatcaagaagccatctcaaaaaaaaaaaaaaaggtagaaaacagaaatataagttatgtaagtatatcctccattggactatcagagttcacttataaaacataaattaaaaaatgaaattattaagaatttcaaggtaacaattgcaaagaattatatcccaagagtggggccctttgagcatggcagcctatatagttgtgtatataactgtgtggttacaacctatgaagctgactgtggtttttattatctgaatttagtcagggaggcaatgagaaagggtgattagtttaaaaagcctgtgtaaatcttatgcagatctgttgctttggtggcaacagagtgtaaaggttaaaaatctgagtttagatttatatagacctaagttcaaatcccaactcttcatactagataatttgagaaaagattgtaagctctcaaatttgatgtcttctgttttaaatatgtagtaaaacagattttaaaattttgaacaggttgaaaatgtaattcatgtaaaacattcaacacagaccctgtcacatactttggtagtgaataaatgttctcaattattatcattaatatttgtgatacatttgaatttggagatttaagtaaaattttagtcagcaaaaatacttgtttcctgcttcgtgtattatcttagacatacatctcaaaatcctgaaagatctaatcacatagcaaatatatatatatatatgtgtgtgtgtgtgtgtgtgtgtgtatacatatatacatatatagttatytctcaatgcatatatatatgcatatatatgtatgtgtatatatacatacatatgtgtatatatatacatatatgtatgtatatatatgcatatatatgtatgtatatatattgca

SEQ ID NO: 672620 - DNA, 611 bp, Homo sapiens
tgatgctcattagttatcaaatttagagagactctttctctaagtggcactttctccaaatcatgacttctaatagaagtcatgatttctgccataatcctctctccagcaggcatggcctttagggactctgctgaccttgccagcttgcaaaattacaacttaagggcttcaaaggggccaagtgcacagttacagagtgcatgtatagcctgaaatcatgattktaaatacgttgtcttcctgttgctggtgataaaatttggatgttgtgtcctcagaagttagacatagatatcaaaaatcttcaacttccacttatgattctgtctcactggaaaatttgcttaaatgagaatttccaaaagttatgccacagaatattagttattctgctaaaaagggaattcacagccaaatgcatttgaaaaatataagatagtataaccatttgtgtagactgatgataatatcagaaagctaaagtgtctgagaaggctgaaagttaagaaacttgtttagatttattcaacccattgttttccaaacttttgattgataatcaaatctttactgttattgccattgctgtgcaaaacctaatcattcaa

SEQ ID NO: 672621 - DNA, 611 bp, Homo sapiens
tgatgctcattagttatcaaatttagagagactctttctctaagtggcactttctccaaatcatgacttctaatagaagtcatgatttctgccataatcctctctccagcaggcatggcctttagggactctgctgaccttgccagcttgcaaaattacaacttaagggcttcaaaggggccaagtgcacagttacagagtgcatgtatagcctgaaatcatgattttaaatacgttgtcttcctgttgctggtgataaaatttggatgttgtgtcctcagaagttagacatagatatcaaaaatcttcaayttccacttatgattctgtctcactggaaaatttgcttaaatgagaatttccaaaagttatgccacagaatattagttattctgctaaaaagggaattcacagccaaatgcatttgaaaaatataagatagtataaccatttgtgtagactgatgataatatcagaaagctaaagtgtctgagaaggctgaaagttaagaaacttgtttagatttattcaacccattgttttccaaacttttgattgataatcaaatctttactgttattgccattgctgtgcaaaacctaatcattcaa

SEQ ID NO: 672622 - DNA, 611 bp, Homo sapiens
tgatgctcattagttatcaaatttagagagactctttctctaagtggcactttctccaaatcatgacttctaatagaagtcatgatttctgccataatcctctctccagcaggcatggcctttagggactctgctgaccttgccagcttgcaaaattacaacttaagggcttcaaaggggccaagtgcacagttacagagtgcatgtatagcctgaaatcatgattttaaatacgttgtcttcctgttgctggtgataaaatttggatgttgtgtcctcagaagttagacatagatatcaaaaatcttcaacttccacttatgattctgtctcactggaaaatttgcttaaatgagaatytccaaaagttatgccacagaatattagttattctgctaaaaagggaattcacagccaaatgcatttgaaaaatataagatagtataaccatttgtgtagactgatgataatatcagaaagctaaagtgtctgagaaggctgaaagttaagaaacttgtttagatttattcaacccattgttttccaaacttttgattgataatcaaatctttactgttattgccattgctgtgcaaaacctaatcattcaa

SEQ ID NO: 672623 - DNA, 644 bp, Homo sapiens
tcagactcagaggtcactgcctatgagagaagcactttctcccaactagtttcctgagagcccctttgacatctttgttcctcaagctataaattatggggttcaacattggagtcaccgctgtatagaacacagatatcattttatccagttcttttgtagtcttggagtttggtcgcatgtaggtgaatattcctgacccatagaagaggacaacaacaataagatgggagccacaggtggaaaaagccttgagtctcccttccccagactgcatctggataacrgtggagataatattccaataagaaccaagaatcagggagacaggggccaggaggattaccacgcccattgaaaagatggccatttctgtgctgtaagtgtctatggaagccagcttcaggagggcaggaggttcacaaaagtagtgattgattatattctgtccccagtagggaagatggaaagtaaagctggtatctactaaagacactagtgccccactggcccaggacctgaaggacagccagagacacacccgttgtgtcatgatggtagagtagtacaggggcttgcagacagccacataccggtcataggacatcactgccagcagcgcacactctgtacacccaaccaga

SEQ ID NO: 672624 - DNA, 658 bp, Homo sapiens
tcgttgactctttatattccttctttgatgaattgccttttgatatacatcactgttttcctactgaattttttgtttccacttgatattagatattcttgtgtggaaaacatataaatcatttstcatatgctgtaaatatttctcctagtttatcatttgccttttactttaaggacttgtttatataagttttaaatttgcataaaatgaaatctcatttcttttacttatatagttctgtgctttgaaatctcttcttcacttccaaatttaatatgtaattgctttcattttcctgtttcttaattgtgttattttaaacatttaatttttaaatctatcaagaatttattttgatgtgagaaatgacagaatttaaacattctttttacttcctacttaggttatttaatttttctactaacatttatcttctctactgactgtggtgctaccttttcatatacaaattacacatacacatatgtatacaaagattacttttgaggctgtcttgttttgtggagcctcttctcaattcttacactggtatcagaatgtttttattgttgtccctttatatgtagtgcatttaatacgcaatgaagaagaatgtagcatttctttttcactcagtgaagataaaaatgagaga

SEQ ID NO: 672625 - DNA, 629 bp, Homo sapiens
tgttcaggcttttttttttttcaagtttctctttgttcttggttttaaatagttttctattgctactgcttacaatttaggggttttttttttttcttctgtggtatctaacctggtgatcatctagagaattttttttttttttaatctctggaaattttatctgggtgtcttataatctttaatttctcttatcatcatgttcatggttttccttatagccttgagcatttggaatacatttatcttagcagttttcatgtgtttttctgctaattcccttatctttgttatcaggagttctgtttctatcaactgatatttctcctcattaggagtcacatttccctgctcctttgcatatatcatgttttatttttaaattaacaccagatatttttaattctctcttgttgaatttaggactttttgttttccttcaaagaataytggactttttatgacaggcaattaattatttgtggattaacctgacttattcaaggtttttaaaaaagatgttttaagggttattccatagtggccattagtcatgcatcacttaacaatatatctgatatgttctgagaaatgtaccattgggcgattctgccattgtgcaaacatca

SEQ ID NO: 672626 - DNA, 1087 bp, Homo sapiens
tgagccatctaggtacagagaggccagcagtgagtttcttaaggagacagagctaattaaggacagagtcatgtcctggcttgaatggagcaattttgatagcatatatcataatgcctccaccacatactttccctatatagaagtcttaagtgttttaaaaatayctttaaaaaacaaataaaattacagtttttaaaataaaatacatgtatagaaagaaagattttcagaaagtgaatacattgccttttcatcttttatttccaacgtttgtttaaatggcagtcttacatgttttttcttatgaggcacatagataccttaagttgcatggctagaatcattcttgaatagtgaagtttaatcagataaaatgtaaatttcaacatgattattattttctgaccacgtacttaagaatgtctcaggaagttttagacttcttaattgcaagatcagagtgtaactttattagattaatgtctagtaatttttaaaattctcatttattgtcgtgtatatggaagtgtgtcatgtttgaagccatgtgccttttcctgaggctgcttcagccacacctagaaagctcctagagcgaagaaagaacttggtttggtttaatgcactatgttcagcgcccgggatagctccatatacagtcatgtttcacaataaggccaccttgagtcacagcattctgtaattttcaaaagactgctacacacagtaaccctatttgatattcaagagatcagtcaatgcacaaaggaatacatgacttttctgacaatttcagtaatttgtcaacaaccagacccaaaaggaagaaaccaaaagtgacgtaataaaacccatgcaatgcactggggtcctagaagctttgaaaattttatttagagattatttattcctatttgtttatgtaatcctaacagaatttctttctgtttttctaacctgccacagagtttaaaacacaaaattaaaagaggcaaatggttctgtcaaggtcaagaacaacagtccaaaaagcgtaacagccagaaattgaaacaagaaacagacataccaccagacattgaaa

SEQ ID NO: 672627 - DNA, 1087 bp, Homo sapiens
tgagccatctaggtacagagaggccagcagtgagtttcttaaggagacagagctaattaaggacagagtcatgtcctggcttgaatggagcaattttgatagcatatatcataatgcctccaccacatactttccctatatagaagtcttaagtgttttaaaaatacctttaaaaaacaaataaaattacagtttttaaaataaaatacatgtatagaaagaaagattttcagaaagtgaatacattgccttttcatcttttatttccaacgtttgtttaaatggcagtcttacatgttttttcttatgaggcacatasataccttaagttgcatggctagaatcattcttgaatagtgaagtttaatcagataaaatgtaaatttcaacatgattattattttctgaccacgtacttaagaatgtctcaggaagttttagacttcttaattgcaagatcagagtgtaactttattagattaatgtctagtaatttttaaaattctcatttattgtcgtgtatatggaagtgtgtcatgtttgaagccatgtgccttttcctgaggctgcttcagccacacctagaaagctcctagagcgaagaaagaacttggtttggtttaatgcactatgttcagcgcccgggatagctccatatacagtcatgtttcacaataaggccaccttgagtcacagcattctgtaattttcaaaagactgctacacacagtaaccctatttgatattcaagagatcagtcaatgcacaaaggaatacatgacttttctgacaatttcagtaatttgtcaacaaccagacccaaaaggaagaaaccaaaagtgacgtaataaaacccatgcaatgcactggggtcctagaagctttgaaaattttatttagagattatttattcctatttgtttatgtaatcctaacagaatttctttctgtttttctaacctgccacagagtttaaaacacaaaattaaaagaggcaaatggttctgtcaaggtcaagaacaacagtccaaaaagcgtaacagccagaaattgaaacaagaaacagacataccaccagacattgaaa

SEQ ID NO: 672628 - DNA, 605 bp, Homo sapiens
ctatatgactcagcagttctaggtgtgtacctaagacaactgaaaacatattcacgtaaaytcttatacataaatattcatagcagcattatgatatgaccaaaaggtggaaacaacccagatttttatcacataatatgtagataaataaaatgtactatattcatgcaatagaatattattcaaccataaatcaaattgaaatactgatccatgctacattcactaagtccaagaagccagacacaaaaggacacttattgtatgattctatttatataaaatgcccagcataaaccaatctatagagacagaaagtagattactagttgccgggggctagacataggaatagagagtgactgctaatcattatggggtttcattttgtagtgatgaaaatgttctgaaaatagatagtggtgatgattgtacaaccttgtgaatatactgagaatctctgaattgggcactttaaaagggtgaatattatggtaagtgattatatcttaatatttaaaaatcagaccatttagacaggcataatactgtaattaaaaattttcaattcatgcatgtggtaacttatgcctgtaatctcgatg

SEQ ID NO: 672629 - DNA, 652 bp, Homo sapiens
taattctggcaaacctaagctgttcacgctggaggaaataagttctttggcttatttctttgaaatttattgatttattttttcataataaatggtcatcatgtgcaattttttaaatacagaaatgctaaaggaaaccaagccaactctaatcttgccactcagaatgaaataattctaatactttttctaagtcaagtttgtgcttcatatkgtagtaaatatactctacgtaaatttacatcttatttttggtttttacttatacacaaaatattttcccatattataaaactttcctgatctgcttttaatggctatgcatattgtgattttagcacaccatcatttacttaatcattttactacttaacaatatttgagataaaagatttaaaagcataaatcaactctagacaaaagaagttttgaaatgttctgattataacctggatagatacttacatttttttatttatataaaataaggaaagctgatatgcttacatattttcctttgattaaaattaatcattttacaaagtctataaattttcttttaaaatgaccatttaaattgcatatttaaattattttaacaaggttatctgagtaagagagatagagtttcctttttaaaaggaagttaata

SEQ ID NO: 672630 - DNA, 652 bp, Homo sapiens
taattctggcaaacctaagctgttcacgctggaggaaataagttctttggcttatttctttgaaatttattgatttattttttcataataaatggtcatcatgtgcaattttttaaatacagaaatgctaaaggaaaccaagccaactctaatcttgccactcagaatgaaataattctaatactttttctaagtcaagtttgtgcttcatatggtagtaaatatactctacgtaaatttacatcttatttttggtttttacttatacacaaaatattttcccatattataaaactttcctgatctgcttttaatggctatgcatattgtgaktttagcacaccatcatttacttaatcattttactacttaacaatatttgagataaaagatttaaaagcataaatcaactctagacaaaagaagttttgaaatgttctgattataacctggatagatacttacatttttttatttatataaaataaggaaagctgatatgcttacatattttcctttgattaaaattaatcattttacaaagtctataaattttcttttaaaatgaccatttaaattgcatatttaaattattttaacaaggttatctgagtaagagagatagagtttcctttttaaaaggaagttaata

SEQ ID NO: 672631 - DNA, 628 bp, Homo sapiens
ttgccataggttggacagttctgtgggtcacagtaaccctgtcttagacaatgctatgtgttgctggaagtcagggacttcgaacggagggactggctgaagcatggcagaagaacatggattgtgaagatttcatggacatttattagttccttaaattaatacttttataatttcttatgcctgtctttactgcaatctctgaacataaattgtgaagatttcatggacmcttatcacttccttaatcaatacccttgtgatttcctatgcctgtctttactttaatcttttagtcttattatctgtaagctgaggaggatgtatgtcgcctcaggaccctgtgataattgcattaactgcacaaattgtttgtagggcatgtgtgtttgaacaatatgaaatctgggcaccttgaaaaaagaacaggataacagcaatgttcagggaacaagagagataaccttaaactctgaccgccgctgagccaggcggaacagagccatatttctcttctttcaaaagcaaataggagaaatactgctaaattctttttctcagcaaggaacattcctgagaaagggaatgcgtccctgaaggtagacctctaaaatggccgcttcagggg

SEQ ID NO: 672632 - DNA, 1174 bp, Homo sapiens
ggaaattcccgcctaataaatttttagtcagactggttgtctgctctcaaaccctgtctcctgataagatgttatcaatgaaaatacttgcccgaaacttcattagcaattttaattttgccctggtactgtagtcctgtaatctcgccctgcctccatttgccttgtgatattctattaccttgtgaagcatgtgatctctgtgacccacaccctatttgtacacaccctccccttttgaaaatgactaataaaaacttgctggttttacggctcaaggggcatcacggaacctgccgacatgtgatgtctcccctagacacccagctttacaatttctctcttttgtactctgtccctttatttctcagaccggccgacacttaaggaatatagaaaagaacgtatgtgaaatatcgggggtgaatttcgtccaacatctggctgaatttcccccaatagctatggaattgctcccagttctgctcctatgactttgccatagtctgtgttcccaggcaaaatatatccctactgacttcttctccctttgtctcctctgactcacttgtctctgttagtccttaaaatttagattatttcctctgaaacagatatttcaggaaartctgactttgatcactttgtctctccttgccagaatattttttccttatgttaataaaacatttttatactcaaattttgtaacttgataaatgttttgatttaaaattttataatttcatgaatataaatattcagtttacagcttggatctcagactttcattgcaatcttgttaacaatactaccattatggataaattgctatgggaacgcagaagactgaaagcccctttcattttaatttgtggaatgtacaggaaacattccatgatggcagtggtgctggaactaggtctattaaaataactagcgttcttcatgaaagctaagagtgaggaggtagaggtttcaagtaaaagaaaatcttaagcattgacccagacgtgaaaatacaaggaaaacgtggagaagaagcaatatttcgttttgatttaaaaagttcataaaagggataagtgtgaggaatgagtcaggagagtagattgagctgtgtcatagagaagatggaatgtcatgtagtaaagtctgcttgcagcttaccaat

SEQ ID NO: 672633 - DNA, 1174 bp, Homo sapiens
ggaaattcccgcctaataaatttttagtcagactggttgtctgctctcaaaccctgtctcctgataagatgttatcaatgaaaatacttgcccgaaacttcattagcaattttaattttgccctggtactgtagtcctgtaatctcgccctgcctccatttgccttgtgatattctattaccttgtgaagcatgtgatctctgtgacccacaccctatttgtacacaccctccccttttgaaaatgactaataaaaacttgctggttttacggctcaaggggcatcacggaacctgccgacatgtgatgtctcccctagacacccagctttacaatttctctcttttgtactctgtccctttatttctcagaccggccgacacttaaggaatatagaaaagaacgtatgtgaaatatcgggggtgaatttcgtccaacatctggctgaatttcccccaatagctatggaattgctcccagttctgctcctatgactttgccatagtctgtgttcccaggcaaaatatatccctactgacttcttctccctttgtctcctctgactcacttgtctctgttagtccttaaaatttagattatttcctctgaaacagatatttcaggaaaatctgactttgatcactttgtctctccttgccagaatattttttccttatgttaataaaacatttttatactcaaattttgtaacttgataaatgttttgatttaaaattttataatttcatgaatataaatattcagtttacagcttggatctcagactttcattgcaatcttgttaacaatactaccattatggataaattgctatgggaacgcagaagactgaaagcccctttcattttaatttgtggaatgtacaggaaacattccatgatggcagtggtgctggaactaggtctattaaaataactagcgttcttcatgaaagctaagagtgaggaggtagaggtttcaagtaamagaaaatcttaagcattgacccagacgtgaaaatacaaggaaaacgtggagaagaagcaatatttcgttttgatttaaaaagttcataaaagggataagtgtgaggaatgagtcaggagagtagattgagctgtgtcatagagaagatggaatgtcatgtagtaaagtctgcttgcagcttaccaat

SEQ ID NO: 672634 - DNA, 1174 bp, Homo sapiens
ggaaattcccgcctaataaatttttagtcagactggttgtctgctctcaaaccctgtctcctgataagatgttatcaatgaaaatacttgcccgaaacttcattagcaattttaattttgccctggtactgtagtcctgtaatctcgccctgcctccatttgccttgtgatattctattaccttgtgaagcatgtgatctctgtgacccacaccctatttgtacacaccctccccttttgaaaatgactaataaaaacttgctggttttacggctcaaggggcatcacggaacctgccgacatgtgatgtctcccctagacacccagctttacaatttctctcttttgtactctgtccctttatttctcagaccggccgacacttaaggaatatagaaaagaacgtatgtgaaatatcgggggtgaatttcgtccaacatctggctgaatttcccccaatagctatggaattgctcccagttctgctcctatgactttgccatagtctgtgttcccaggcaaaatatatccctactgacttcttctccctttgtctcctctgactcacttgtctctgttagtccttaaaatttagattatttcctctgaaacagatatttcaggaaaatctgactttgatcactttgtctctccttgccagaatattttttccttatgttaataaaacatttttatactcaaattttgtaacttgataaatgttttgatttaaaattttataatttcatgaatataaatattcagtttacagcttggatctcagactttcattgcaatcttgttaacaatactaccattatggataaattgctatgggaacgcagaagactgaaagcccctttcattttaatttgtggaatgtacaggaaacattccatgatggcagtggtgctggaactaggtctattaaaataactagcgttcttcatgaaagctaagagtgaggaggtagaggtttcaagtaaaagaaaatcttaagcattgacccagaygtgaaaatacaaggaaaacgtggagaagaagcaatatttcgttttgatttaaaaagttcataaaagggataagtgtgaggaatgagtcaggagagtagattgagctgtgtcatagagaagatggaatgtcatgtagtaaagtctgcttgcagcttaccaat

SEQ ID NO: 672635 - DNA, 633 bp, Homo sapiens
tatggggttagatatacttcattatttagaattttgtcttatgttagaaaggtgagagattatatcacttatatcatgtgatatcttctggaatggtctcgagtagaatcatattattaaaaacagtaatatttttgctgcaaatggtataaatgtccacattcatttggatagagactatacataggttcatatcagttcaggttatatatcaggctaacatgtaatgtcaaataattaaattttaaaaattgatattcagttctcaggattttagaattgcacataaagaatggtagacctgcatgatctttttccccacagagtttactaggtctactctcagtgtaatgtcatgctctatctagcacagttgtsgatctgatcttatcctctattactgtacaaggtctcaagggaaggaaatgtgtctttatctttgtatgctgtgcaggacctagaatgttcttaaatcttactgggtgtgtttggcatactttaaaaacatgaaaaaaatcacaccaacgtttcaaatatgtggatggtgctaaaaataactgtcaatatagcaacatgacaatattacttttcatcatgattaatatgcattcagtcactgtcgaagcatgtttc

SEQ ID NO: 672636 - DNA, 633 bp, Homo sapiens
tatggggttagatatacttcattatttagaattttgtcttatgttagaaaggtgagagattatatcacttatatcatgtgatatcttctggaatggtctcgagtagaatcatattattaaaaacagtaatatttttgctgcaaatggtataaatgtccacattcatttggatagagactatacataggttcatatcagttcaggttatatatcaggctaacatgtaatgtcaaataattaaattttaaaaattgatattcagttctcaggattttagaattgcacataaagaatggtagacctgcatgatctttttccccacagagtttactaggtctactctcagtgtaatgtcatgctctatctagcacagttgtcsatctgatcttatcctctattactgtacaaggtctcaagggaaggaaatgtgtctttatctttgtatgctgtgcaggacctagaatgttcttaaatcttactgggtgtgtttggcatactttaaaaacatgaaaaaaatcacaccaacgtttcaaatatgtggatggtgctaaaaataactgtcaatatagcaacatgacaatattacttttcatcatgattaatatgcattcagtcactgtcgaagcatgtttc

SEQ ID NO: 672637 - DNA, 1690 bp, Homo sapiens
ttttcagaagaattgtcatttcaggacagcaccgtgagaaaaataataatttacatgtatacaaacaaatttcagtttttagattcaagcacattacaacctgtaaatgtcttttcaagtgaatagaaattaggtagtatttatttcagaatactgatattataagtgaatctacagaattttacaaagactcacaaatgaaataagagtttcagtgaaacttgatttttaatactaattttcattagcagaattccaaaggaataaaaatgcatgcaaaatgtgaatggcccttcacgttttatttattattacttttgataactcaaactagaaacacagaaggacattaattcaatattgttatagagtttctgaaatactgggcaagtggtacaatcttttcaaaartatttattttgtttaaaattattacctgagcttgctaagaggattgatgcatcaatggagcacactggatttgctagtagtattcactgttgttcagtttgaaaagggaaattcataaaaatttccctcttcagcatgctgtgaacatcctgtgaacatactttaagtaaaaagtggacttctattgagaattctgaaatagactttcacagaaataaaaagttttcattgaaagaggggaagcaatatttgttctgtatttgtatctaaaaatatattgaaaagtttggagattttattgtaattacctttgttataacatattatccacaagcatgcatttctttcattttctctttaagaattttaaagaatttaaagagcattacatttttttctaaaggcagaactttaaaaaacaactaataaacgttgtcacttagatacttgcacacctgtttaccacataaactccatagagatgacaaagacctggacaggtagattaacaggccaattcactccttgataaacatatcctataatactccttctttgagttttgttataaaattacttttaatgagtcattttgtgaccttcctacttaatatagtaaccctacctcaatttcactttccgtcagaatttcatattcttttaactctgttctttttttcttgagcacttattaacacagaggctacaatataatttattcatttaaaatatttaacttgcctctccttccactaaaatataagctcctgtgagcaagaatttttaattttattactttttagtttttattttcccagcactaagaacagtgcctgttcatagtagcatttaataaacataaatgaataaatcccacagatgaatgttggaacaagtcatggcaactgaagttcttattttccatttcatgattctcaggctattggtgacagctttggatgaaattgatgctactggagaacagaatctacattttataaaatctcttgcatataaataaccaatacgtaagtaatactggaatagagccaattctttatatcatgttaaaattattgttggtatgcatatcagaaattaaaacaatagctagtgaattaattgccctgatgaaatttttgactctttttaagctatgtttgcacaatgtaataaaataattcttaccattatttaccatattttcaaaccgataaaattagagcacactttaaaaactctttatattaaaatttttaaccaaagcaaaatttgaagg

SEQ ID NO: 672638 - DNA, 1690 bp, Homo sapiens
ttttcagaagaattgtcatttcaggacagcaccgtgagaaaaataataatttacatgtatacaaacaaatttcagtttttagattcaagcacattacaacctgtaaatgtcttttcaagtgaatagaaattaggtagtatttatttcagaatactgatattataagtgaatctacagaattttacaaagactcacaaatgaaataagagtttcagtgaaacttgatttttaatactaattttcattagcagaattccaaaggaataaaaatgcatgcaaaatgtgaatggcccttcacgttttatttattattacttttgataactcaaactagaaacacagaaggacattaattcaatattgttatagagtttctgaaatactgggcaagtggtacaatcttttcaaaagtatttattttgtttaaaattattacctgagcttgctaagaggattgatgcatcaatggagcacactggatttgctagtagtattcactgttgttcagtttgaaaagggaaattcataaaaatttccctcttcagcatgctgtgaacatcctgtgaacatactttaagtaaaaagtggacttctattgagaattctgaaatagactttcacagaaataaaaagttttcattgaaagaggggaagcaatatttgttctgtatttgtatctaaaaatatattgaaaagtttggagattttattgtaattaccyttgttataacatattatccacaagcatgcatttctttcattttctctttaagaattttaaagaatttaaagagcattacatttttttctaaaggcagaactttaaaaaacaactaataaacgttgtcacttagatacttgcacacctgtttaccacataaactccatagagatgacaaagacctggacaggtagattaacaggccaattcactccttgataaacatatcctataatactccttctttgagttttgttataaaattacttttaatgagtcattttgtgaccttcctacttaatatagtaaccctacctcaatttcactttccgtcagaatttcatattcttttaactctgttctttttttcttgagcacttattaacacagaggctacaatataatttattcatttaaaatatttaacttgcctctccttccactaaaatataagctcctgtgagcaagaatttttaattttattactttttagtttttattttcccagcactaagaacagtgcctgttcatagtagcatttaataaacataaatgaataaatcccacagatgaatgttggaacaagtcatggcaactgaagttcttattttccatttcatgattctcaggctattggtgacagctttggatgaaattgatgctactggagaacagaatctacattttataaaatctcttgcatataaataaccaatacgtaagtaatactggaatagagccaattctttatatcatgttaaaattattgttggtatgcatatcagaaattaaaacaatagctagtgaattaattgccctgatgaaatttttgactctttttaagctatgtttgcacaatgtaataaaataattcttaccattatttaccatattttcaaaccgataaaattagagcacactttaaaaactctttatattaaaatttttaaccaaagcaaaatttgaagg

SEQ ID NO: 672639 - DNA, 1690 bp, Homo sapiens
ttttcagaagaattgtcatttcaggacagcaccgtgagaaaaataataatttacatgtatacaaacaaatttcagtttttagattcaagcacattacaacctgtaaatgtcttttcaagtgaatagaaattaggtagtatttatttcagaatactgatattataagtgaatctacagaattttacaaagactcacaaatgaaataagagtttcagtgaaacttgatttttaatactaattttcattagcagaattccaaaggaataaaaatgcatgcaaaatgtgaatggcccttcacgttttatttattattacttttgataactcaaactagaaacacagaaggacattaattcaatattgttatagagtttctgaaatactgggcaagtggtacaatcttttcaaaagtatttattttgtttaaaattattacctgagcttgctaagaggattgatgcatcaatggagcacactggatttgctagtagtattcactgttgttcagtttgaaaagggaaattcataaaaatttccctcttcagcatgctgtgaacatcctgtgaacatactttaagtaaaaagtggacttctattgagaattctgaaatagactttcacagaaataaaaagttttcattgaaagaggggaagcaatatttgttctgtatttgtatctaaaaatatattgaaaagtttggagattttattgtaattacctttgttataacatattatccacaagcatgcatttctttcattttctctttaagaattttaaagaatttaaagagcattacatttttttctaaaggcagaactttaaaaaacaactaataarcgttgtcacttagatacttgcacacctgtttaccacataaactccatagagatgacaaagacctggacaggtagattaacaggccaattcactccttgataaacatatcctataatactccttctttgagttttgttataaaattacttttaatgagtcattttgtgaccttcctacttaatatagtaaccctacctcaatttcactttccgtcagaatttcatattcttttaactctgttctttttttcttgagcacttattaacacagaggctacaatataatttattcatttaaaatatttaacttgcctctccttccactaaaatataagctcctgtgagcaagaatttttaattttattactttttagtttttattttcccagcactaagaacagtgcctgttcatagtagcatttaataaacataaatgaataaatcccacagatgaatgttggaacaagtcatggcaactgaagttcttattttccatttcatgattctcaggctattggtgacagctttggatgaaattgatgctactggagaacagaatctacattttataaaatctcttgcatataaataaccaatacgtaagtaatactggaatagagccaattctttatatcatgttaaaattattgttggtatgcatatcagaaattaaaacaatagctagtgaattaattgccctgatgaaatttttgactctttttaagctatgtttgcacaatgtaataaaataattcttaccattatttaccatattttcaaaccgataaaattagagcacactttaaaaactctttatattaaaatttttaaccaaagcaaaatttgaagg

SEQ ID NO: 672640 - DNA, 1690 bp, Homo sapiens
ttttcagaagaattgtcatttcaggacagcaccgtgagaaaaataataatttacatgtatacaaacaaatttcagtttttagattcaagcacattacaacctgtaaatgtcttttcaagtgaatagaaattaggtagtatttatttcagaatactgatattataagtgaatctacagaattttacaaagactcacaaatgaaataagagtttcagtgaaacttgatttttaatactaattttcattagcagaattccaaaggaataaaaatgcatgcaaaatgtgaatggcccttcacgttttatttattattacttttgataactcaaactagaaacacagaaggacattaattcaatattgttatagagtttctgaaatactgggcaagtggtacaatcttttcaaaagtatttattttgtttaaaattattacctgagcttgctaagaggattgatgcatcaatggagcacactggatttgctagtagtattcactgttgttcagtttgaaaagggaaattcataaaaatttccctcttcagcatgctgtgaacatcctgtgaacatactttaagtaaaaagtggacttctattgagaattctgaaatagactttcacagaaataaaaagttttcattgaaagaggggaagcaatatttgttctgtatttgtatctaaaaatatattgaaaagtttggagattttattgtaattacctttgttataacatattatccacaagcatgcatttctttcattttctctttaagaattttaaagaatttaaagagcattacatttttttctaaaggcagaactttaaaaaacaactaataaacgttgtcacttagatacttgcacacctgtttaccacataaactccatagagatgacaaagacctggacaggtagattaacaggccaattcactccttgataaacatatcctataatactccttctttgagttttgttataaaattacttttaatgagtcattttgtgaccttcctacttaatatagtaaccctacctcaatttcactttccgtcagaatttcatattcttttaactctgttctttttttcttgagcacttattaacacagaggctacaatataatttattcatttaaaatatttaacttgcctctccttccactaaaatataagctcctgtgagcaagaatttttaattttattactttttagtttttattttcccagcactaagaacagtgcctgttcatagtagcatttaataaacataaatgaataaatcccacagatgaatgttggaacaagtcatggcaactgaagttcttattttccatttcatgattctcaggctattggtgacagctttggatgaaattgatgctactggagaacagaatctacattttataaaatctcttgcatataaataaccaatacgtaagtaatactggaatagagccaattctttatatcatgttaaaattaytgttggtatgcatatcagaaattaaaacaatagctagtgaattaattgccctgatgaaatttttgactctttttaagctatgtttgcacaatgtaataaaataattcttaccattatttaccatattttcaaaccgataaaattagagcacactttaaaaactctttatattaaaatttttaaccaaagcaaaatttgaagg

SEQ ID NO: 672641 - DNA, 2961 bp, Homo sapiens
tttctagatttggcctagaaaataaagctttaggcattctacaagggaagtataatacagtaaggagaaccacgtctgcctagtgaagtcctagggatgtgctgggatactgaaaacaggataattatcaaaggcaaatattacttaatggcgcacattggcagaggaaatcaagtaggttgaagagtcaaaatatgctctacttggtgaagatacttaattcaaagtttaggctgggaatattagttggaagaaaagaaaaaatcttgattgtgagttcatgaaaactataatatatgtattaatgattggtaacaatgatgagtttaaatgccagaagaaacatgcagaatttctgtgttggaatataatggacatgtgctttaagacttttcccacttttatcccttctttccagtacactaattatttgttgatcttagttatagtctctcaactgtatttatttgttctggaaaatagtgcactgcatatgaaagtaatcgccgtcacagtgaatgcatttcttttcatctgtctggcctggctagccctgttgatttgggcatgtggtaatgaggccagtgctgtagactcaaaccccatactaattagctgtacatggagagacgaactccatggacaaacctgctactctcaaccaaacatcagaccaatgcttattatcagtcagaaatgggactaagattatgcagctaaattgatggttttcattacctttattgaataaaaatgttaaaactttgtttttcactcgtgtattaataccctatgcttctctagtattcctcttgtatggaatggcagcaacagtcactaaaatttaagccagaaaactgggaatcaaccttgatacctccacattcttcactccctctattcaatcaatcaccacacctatttgttttgcctcctgaatatatttcaaatctatcttgtcatgtctaatgtccctaccccagactaggttaccatgtactcttgctaggatactgcaataacttcttcttgtagacctttacatccaatcctgctgtctctagtcattctctatgttatagcttatgtgattgtcttaaaatgcaagtactatacacattctccttcttgcagccttttaaaatctcccagttgctcaccaaataaagacagaattccttaaagtaggacataaagcctgcatgacctggtttcttctcaccaatccagccttacagctcctgtttgatgggcactggtactccccaagacatatcatatttcataatctatcatcagatttaaataaagaaatgaatgattatcctaccaccttcactcacattgcttcagaactttttttttttcatttccccagtgccatctccatactcagggttgtgtctgcttttgttttgtctcttaatgctctaagcccctcttcctttgtccagttcattcctgatcttagcttatacatacactcctctgaaaatcctttctttatcatttaggccaaataggttttctctattatatttacccttttccttagaacattcctcaaaagtttaattgaatatttgtgtgttttattattgtcagttaattaccagcctattacactgtaagctctaggaagccaggggaaatatgcttgttttggttacctttaaaaaaaattcataggagggtctcaaatatttgctaaatgacaatgaatgactatatttcccctctattgatcccttagaagccaagtcaaaagatttccccgaagattcattctcttcagccattttgtattgttcatcacactttttaattttgaaattaaaatgtgttggtgttactgtgtttgctggtttttcctaattgttttgaatactatctatctattgcttcacataccacctatttcttcttttatctttaactgtagttgttttccataggtctatgttcatcccacccattataagaactacatctcaatggatgatatcaaactgacttcaatctcccagactatatttgttatatagattcaaaatgtatgatgaatcatacactctacagtccaaatcagaaatcagtttccacttcatcactaaaaaacattttttctcctgaattatgatattcttctgaattctctatcttggttaatttggtcaccattatgctcccatttttctggtcaactatgttcaaatatattcaaaacccatagaatcatctttgcctccatgtgttgtatccaaaacttaatcagtattgcttccttattctgtcatctctaagccttttaagatttcattctgctttcaaagaaattcagacagaacctgtcttgacattgtaatacatactaactcatgtcattacccttgtacccgagattcatcatcataaccatgtcaaatttgtcttcctaaagataactgtactcctttacaagaatgtggagcctcaaatattttggtcccctgctcagggatccttagtatctacctattgtatgctgacaaaggtacaaaatcctaagtgtgtacccaaatattttttaaaatgtttataatatatcttgccagattactatgcattgcaattttactgaaaagcatactctccctagaacgtattcacactttctaaattmtttaagctttaccttactattccacttgacttaagtgacttctagcttataatcttgaggtaggagtcctactcattcttgaacattcgtgtcaagtgctactttttattctgataaacttcttggactccataacaccttttggcaccccttttatggatattttgctttatatcataactattaggtccttgtcttacttccttaatggagactgtaagctccttaagagcaggtattattccttgttagttttatgttcccagtcatgcaatttcaaagattggcatataccaata

SEQ ID NO: 672642 - DNA, 2961 bp, Homo sapiens
  misc_feature 571: n = A,T,C or G
taaattccattgaattacagcaaaaacaaagatccaaatggcaagaatgttaacttggggctaagccccaaaattttgagtcagggttccttacatctttctgtctaatattagcttcagatggggctgagtttagaattagttgttttctgttgtagaaaaaggggacactccagagcaggtattctaaaaaatatgagaagctacaaagttgggaaaaatattgatggtaacagaaagagaaaaagcagttcataacgtctgagagaagagaagatgtggggagacatgctatgtcatatagatgatagaaccccacatatttctcaggaatggtgggctgcaggtcccgagccctgccccgcggggtggcagctgagacccggcgagaaatcgagcgcagcgccggtgggccagcactgctgcgggacctggcgcaccctccacatctgctggcccgggtgctaagcccctcactgtccgggccaacaaggctggccggccgctccgagtgcgacgcgaaggcccacgccacccggaactctagttggcccgcaagcgccgccagttngcccggttcccgccggtgcctctcccgctacacctcccggcaagccgagggagccgctccggctccgccagctcagagaagggctcccacagcgcagcggcgggctgaagggctcctcaagcacggccagaatgggcgcctggacgaggccggggaggcaccgagaacgagtgagggctgcgagggctgccaggtccgccagcacgctgtcacctctcagtttgagaaccatgaactgaaggtattgttcacagctcttattgatgaataaatagggccaggtacgtggcttatacctgtaattcagcaattagggaggctgagttgggaggattgcttgggcccaggagtttgaggctgcagtgagccactattgggctactgcactccagccagggggacagagcaagactctgtctcttaaaaaaacaaacaaatacacagaccagaagagtgaatagttaaaaagtttagaagcatcaatcaaccagagaagcacacacctgagggctgtgaggtgtcatttcagccaggataacttaataatactgtgagactgactaactgaagactgtctctgcagcgtaggtttctgaaaggtagtgaagatagatctctggtgtttgtagccccccagatgtgggacataagaagtaggtgaagtttctagagcaagtttgcctcacttattgcaacatagagcaataggatccacacagtggaatgcaatgtaaagcccccaagctggggaggcgactgaaagatgcagcccaagccaaaatgaattccccatgcctagagagactatttaaaatagtgtcttctcaatgaagtttttgcctttcttctcattgatcctataaactacacaagagattgctgtaggacgactttcttcttgcttctgctaaaagctgggttcttgtcacacaaccaggaaagattaggctcacggacacatagaagggtgggagaaacggaattttttgggcgaaaaggaaaaaaaaaaaaaaacaacacagcaaagccagagaggggttcctgttaacaggacctcatctcacagactgaatcccaggttcccatcctggaaaaggagcggccaggctcctccccactccaaagggcacgaacttcccgcagctccacccggttcacccagtgcacaggccggtggaggattccccagggacccctttatacttgactgtctcaagataatgaccaccatagaaaggaccacaaccttatcatctccagtgtgtggctgcttgtgttacgtatgattgatcataagatttagataaattgccacaggcattaaaaaacagttatctttccctcttcctttttgtcccaccctctgagagcaaggacagtggaaaggccagtatgagagaagcagaccaagtttacccaccctacaatgcaagctactgggctttactgaccctggtagggggggaagggtaagaacattaagtaaacatgaatctacgtttttaaatctgtaggatagaatctcagtaactgaattacawtgttgtaataacccaaggtgagtaacaagtcatggaatcagactaaaatattcaaaagtgatcttgatactcagcaaaaataatggtaacagaacagagtgggtaagagttacaggtaaaataaagccatttgatgtttatacttgacagagatgaaactcttcacagagtacagcagaaaatttacagaagcaaagcataaacaaagtggtttcattatctggctaataagctgacttgatcaatatcagctcattgaatgacaccagcatgatggagggacaccatatatttaaggataacagcaatttgcgagtgattttaaacgtccaattaaaccctgcccttacatcaattcctctcaggattatagagcttggtttacctctcactaactaattaagaagtgaatgccaagaaattaggatgcctgaaaacacatggtgaattctgctgaacttttagaattgaaacatggagggtgaattagatcttctgtaacatgtgcttatgctttggaaagtgcatcatcttagagatgctgcttctctgattgttacattgacaaaggtgagcggcaccatagtgagagataatgggtggctttaaatgagccataaaggaagtctattgactaaagctaattgcttgtcacccatggttgcctttgaaaactaagtagtcatttcatgcaacatagaaaattagaaatatgtgattatgccttcaatttggataaaaactagccattgtttttttcaataaaaaattttgatgcttacaagaaaaaaaaaatccctgtagagttttaaatgtgggattctgcattatggttgggaagctatactc

SEQ ID NO: 672643 - DNA, 792 bp, Homo sapiens
tacacaggtatgtcatcaaaataatatttagactatgtcgttcccacaaaaatcaacttatatgccatgttttactcactaccaaggtcttgttgaatactacttgtttcattcctctagccaggagacaacctagcaggtatactgcctgagcaccaagaagttatcatataatttatgtttcattgacctctcttaccttgtcaaattacccacaataattttggtaaagttgcatctaacttggtatggactaaaaatacttgcgtcgcccccaaaatttgtatgttaaaaccctaattccactgagatgatatttggaaacagggcctttgggaaataattaggtcatgagtctctctctytctttctctctctctctctctctctctctgtctggtctctctctctgtctctttatgaggacatgacaaggattggaggttttacctgtaaccattgactggcacctttatcttggactctcagcctccagaactccgagaagtaaatttctattgtttaaaccagtcagtgtatattgtttttgttgttgttatagcagcttgaattaagacacaattttcctaaaacttaaaaatgtcagattggtggataaaattgtatttcattgtgcttttttcttcaagccttatacctctgactccaaactcatagtaaccagtgtaagacatggtagaatctttccactagtgcttgggacactatttatagtatctacccaatctaattttaatgaaaaagttgaaggttggtataaaaaaatgttta

SEQ ID NO: 672644 - DNA, 792 bp, Homo sapiens
tacacaggtatgtcatcaaaataatatttagactatgtcgttcccacaaaaatcaacttatatgccatgttttactcactaccaaggtcttgttgaatactacttgtttcattcctctagccaggagacaacctagcaggtatactgcctgagcaccaagaagttatcatataatttatgtttcattgacctctcttaccttgtcaaattacccacaataattttggtaaagttgcatctaacttggtatggactaaaaatacttgcgtcgcccccaaaatttgtatgttaaaaccctaattccactgagatgatatttggaaacagggcctttgggaaataattaggtcatgagtctctctctttctttctctctctctctctctctctctctgtctggtctctctctctgtctctttatgaggacatgacaaggawtggaggttttacctgtaaccattgactggcacctttatcttggactctcagcctccagaactccgagaagtaaatttctattgtttaaaccagtcagtgtatattgtttttgttgttgttatagcagcttgaattaagacacaattttcctaaaacttaaaaatgtcagattggtggataaaattgtatttcattgtgcttttttcttcaagccttatacctctgactccaaactcatagtaaccagtgtaagacatggtagaatctttccactagtgcttgggacactatttatagtatctacccaatctaattttaatgaaaaagttgaaggttggtataaaaaaatgttta

SEQ ID NO: 672645 - DNA, 792 bp, Homo sapiens
tacacaggtatgtcatcaaaataatatttagactatgtcgttcccacaaaaatcaacttatatgccatgttttactcactaccaaggtcttgttgaatactacttgtttcattcctctagccaggagacaacctagcaggtatactgcctgagcaccaagaagttatcatataatttatgtttcattgacctctcttaccttgtcaaattacccacaataattttggtaaagttgcatctaacttggtatggactaaaaatacttgcgtcgcccccaaaatttgtatgttaaaaccctaattccactgagatgatatttggaaacagggcctttgggaaataattaggtcatgagtctctctctttctttctctctctctctctctctctctctgtctggtctctctctctgtctctttatgaggacatgacaaggattggaggttttacctgtaaccattgactggcacctttatcttggactctcagcctccagaactccgagaagtaaatttctattgtttaaaccagtcagtgtatrttgtttttgttgttgttatagcagcttgaattaagacacaattttcctaaaacttaaaaatgtcagattggtggataaaattgtatttcattgtgcttttttcttcaagccttatacctctgactccaaactcatagtaaccagtgtaagacatggtagaatctttccactagtgcttgggacactatttatagtatctacccaatctaattttaatgaaaaagttgaaggttggtataaaaaaatgttta

SEQ ID NO: 672646 - DNA, 2196 bp, Homo sapiens
tcatccttactcattttatcacaaagatcacagttaccaccagtagtatatactatatgcagtgtacattgagaacagctggctttgcagaagatgtcacaatctagtgagactatcttttgtgcagttgggaaaaaagctaatgttcactatgtcagagcctgtgctgcatatttatcaataatctggctattaattagtaaattaaggattcaaaatcaggttgaccttgataaaaatcaggtccttcctcttgcatttgataacacaatttttattaaattatactaaaattgtgggcagtatcatgatttcagaaattgccatcatatgcgtatactagattgtatctaatgctgtgtatttgatgaaagctatggcctagcagatgtgagatataaaataaaacaaacatggatactgaatagataaaacatttatcaagaccaactcttataaaaatatttatttcatttttgttttccatattatagtcataggttaactatccagttgctgatttgtttgatttgttttattctatagcactttgcattcaatcgtttgtaagcaagaatgccttattactatacaatgacgtctttgaaattaggaattggccattttaagtcgggatttctaccttgtaattagcacattcattgtgtttatctgaatgcctgcaactcataaggcatttgttcaacaacaaatatttctgaaagtacaaatcatgtttagatctccattagatatcaaaatttcttggataaaagttataatttttgccttcaaggaacccacacccctgtattcagaccctcttataatgatttatgaagtacaaagtgtgcgtgacagtcatgagaaataaaactactgtgttctttatgtccgatgcctgagtggtctttcttatagtgagttaggtactatagcttcccaatgtaagccctttcaatggcttctaccacttactgaaaacaattatccatgaccctcattcattgatgcattattcattcagcaagcattcaagctctgttatgccccaagaaatgttcctaatgataaacacggttaataaattgttttaactttccagcttatggtacatggggcataaatagaaagacaagcaaatgtttgaacaagaaaataaataaatacacatactttgaaatataattgcatataaatattacaaactcaataaatatgtgtatatagaaattaatttctatatattatacatacataataaattagtgctaagtactctgaagaaaattaaaagttgataggtaagaaagttggaagaaggagttgttagtttggctactctggactggaaaacagggaagatcattctgagaaaagtatcctttaagctaagatgtgatcccaacattcaaacttctagtagaataaagtttcatatacattacatggttccatataatgaaagcaacatccttagcagaaaatgggcttattttcatgacaagaatcgatgaacattaagttttccttaaaaggcagtgcccacagagggcagtggcctgagttaaaggcaaaaatatgtttttgtatttgtttatatattcattcctctggaatgagaagttcatgcaagcaaggattttgtctttttcacttactgtttcacacagctaggacagagtagaaacatgcatattataaaaactaagtagacatttgttgacataataaatgagtggattatagtttggggcagttaaatttgccaacacattagaaaaaatagaaacaaaatattagtgttggctatgttttcggatagtattgaacacttagtccctaagagacaaaattccatctcrccaaactctgcctgaaagtaaacataaaaactcagtaggctgggcacagtggctaacgtctggaatcccagcactttaggaggccaaggcgggcagatcaggaggtcaggaaatagagaccatcctggccaacatggtgaaaccccgtctctactaaaaatacaaaaattagccgggtgggatggtgcattcaggtaatcccagctactcaggaggctgaggcaggagaatggtgtgaacccgggaggcagaggttgcagtgagccaagatcacgccattgcactccagcctggacgacagagcgagactgcagtcctattgaaatcatta

SEQ ID NO: 672647 - DNA, 384 bp, Homo sapiens
catagaaagcttactcatcattctcttgacatcataataatggtttattgtctttaaagactgtgatcatatctacttagacatggtcatgagcactttttacaatgcaaacaactggtaatttgaagttcctgggttgtgatggaggtgtgtagtctattctttactcatttggcacaatgaagtaatcagcccagagcaataaattatgtaattaatctcatgaagccaacagttttatgtaaatgctagtgatttatttctttgcacatttgaaaagtttaatttccatttttgctctgaaaatagttttgaagtaarttgatatattaaaatatatatctagcttaataaattattataaatatagtagatatgctaatg

SEQ ID NO: 672648 - DNA, 602 bp, Homo sapiens
acactcacttccagacacaggactacctacattctatctaattttcttgtttttacaaggtatcattttactcagtgttttagaaattgaatagaaactacagtacttatattttggtctaattttgataggcttgtatttattataaaatatcttgaaaacaaatatgtcttgagaatgtatttttatatataatgttgtaagttttcaaaaataattatgagttttttcacagaagcttctattatgaaatatggaatatgattcacttgttaacattaaatatatgtgtacaaacaaggctaacgactttagtattaagaatatattatttgtgagatattgatttaatagctcattaaatawacaaattattctgactacatatatcactgaaacttatctccttctcaggccaaataaataaaatattgcccaaaacagctaaatagtaaacttgaatcttttaaaaacttgacacattgtgtatgagtctagcttagacttaagaaatacagaatatttattaaggtatttataaatttcttctctacggctaaaattcacaggcatttttaaatattttacccagtgggctatcc

SEQ ID NO: 672649 - DNA, 971 bp, Homo sapiens
ttacctatactttaaagtaaaagtacctcaaaataacatgcaaaacatcagcacagctctgatcatgccttttcactgctaaaaatcttccatagtttccctactactgatcgaatttttttaattaattcgtccatttacaattggccccaacttttcagaattattttttgctacatctttatgaatagctcaagcttcagtcttaattccataaacttagtctgactgctctccaaaataaaatttccagtcaatgctggcgsatctggtcaataagatgctcaggatattccacacacattcctgacattaagttttgctcatttatgtgcttcctgtcagaactacatgcccctgtcctactacctacctagatcctgtatgttcttcaaagtcccactcctctcacaactctaatccataatcgatttcttttttcctataatttccatgacattttttgcttctacctctcactttggctcttaaccatatgacacactaccttgacgttttactttgctcttttccatgtgcacgccttgtctactcacatagagtataacctcttgatgaacaaggcctttgtattacataagacagtatagatcttcctcagcccctggcacagcactatttatacacatagtaatgcttaagacagtgtttctcacctctctgaatctacaatctctgtgggagctttaataaatactgccacctaggcttcaacccacagagattctgattaagttggttctgattatattgtgttagcaaagttcccaaatagttacaaatctacctactttgttgctacccagttcagaatccctgcggaattctcaatccatggttgagagccatgacttaaaagatatatggatgaatgtaaggaaataaaactaaattgtacaaaatagacaattgttttactagcacctctctttttaaccaaggtagattca

SEQ ID NO: 672650 - DNA, 1379 bp, Homo sapiens
aaagctttttgaaagacaaggtgtggtgggctgaataacggcaccccaagatatccacaccctcatccctggaacctctgaatgttatattatatggcaaagggactttgcaaatatgattaaggattttttgatagggagattatcctgggatcatctgggcaggcctggatgtaatcacaaaaggtcaaaagagttttggctactgtacagaaagccatgtaaccccagaagcataggttcgagtgaggtagccagaagccaaggaatgctggcagcttccagatgtggaagagcaagaaacagattctcccctggagcctccagaagaaacccagctctgctagcaacttgattttaaccccataagactcatttcagacttctgmcatccagaactgtaagagaataccattatgttgttttaagccactaaatttgtggcaatttgctacagtggcaacagaaaactaatacccagggcatacaaaaagaacctgatttgctaaaaggtttatcaagttatctccatattgaggaccaaccaagagaccaagtcccactctggctttggtttgaggcttccagccttgccagaatccgggctcttcctttgctggtgctcatacagttcctaggttgtccttgttggaggaacagtcatccaagaatttgacaacattccaattttaaaaagtagtaacatttagcttgacttacgagtcactttttggattgttaaatgaacatagcgctttaagatgagctgtgattctgtttatggcttacagaaaagaaagtgtacttattttaaaacattaatatattacaagatttccaaaatatatagcttgtgatttttccatttcagcattttcattacccagtaaactactgctctggagttgccacttagcattcgataaatgccttcagtgagttaaggatttgcaaggcaaattttagacccagtttttgaaataattatgtattcaatttgcaataatttgaagaaaaaaagacacttgtaataagctatcggagtgatacatacaatggttttatctggggtcactgaacagaaatttcctattccaagtgtgttaggagaatatttcattccactttctttgctcctgcaccagaagatatcttctaagtgcttttgtaactgtttccatctctctctccaccctaccaccggatctgtaaaagccaccatggacttaagttttattacaaatcttggcaatgagccaaaaaaaagaagccagggaaaagaattaagacatggtctaacatcattaatttcactgcaaggtgagattatggtcttcttgccagcatcattctattcattcattcattcattcaacaaa

SEQ ID NO: 672651 - DNA, 979 bp, Homo sapiens
taacctatttgaggttagtcacatctcctagactatctctctagtaattcaattttagcacatatttttctccaagctcttaaaccattaattgcatttattcacaaaaatagaatccacctgtttctaattcatttacaccttttgtaacaaactgctgttttgtaccaagttgatgtccaaaaagccaaagatatccttatgagtgttaagatggttagaagtttttcttagggtaaacctggtgaaatgtactaaatgaattataaaatatttaagatccaagtagcaggcatattaaataatatatggacatttgaaatattagagagtaacatttacttcaggcaaagagtgaaattcaaattttcatctaaaaattaatagaaaagagataacctgttgtattaccttatgattcaccaaaggtataaatatatgggtggccaggygcagtggttcactcctgtaatcccagcacactgggaggctgaggcaggtagatcacttgaggtcaggagtttgaaaccagcctggccaacatggtgaaaccccatctttagtaaaatacaaaaattagctgggcatggtggtgggcacatataatcccagctactcaggaggctgaggagaagaatcacttgagcctgggtggtggaggttgcagttagccaagattgcaccactgcactccggcctggatgacagaaggagactgtctcaaaaaaaagatgtgggtgatttaaattttatttttgagaaaaatctggacaactagacaatatcttagacttttcaacacttgagattaatttttaagttggttatgctcaatataattacaactttaggaaaaaatgagtaactcttggattacaatagatgaatacattagtgagtggatgaaaggataagtagttcaacagaagaaatacccttagagtttaaaaaattcaatatatttttttcattgctccta

SEQ ID NO: 672652 - DNA, 1177 bp, Homo sapiens
caagcagttcctagtgctcaccccctcccatcatattttggtgaaaaacaccctgtaacttaacacttagaaaacagaacttaacactgattcctaattgcgtcaaaaactgacatgggctagaagaatttaaaatcaatgcattgttccatgatctttccattttccacttgtgtaaatcctgcctttccttccagatccagcatccaatccatgccatacagggaacctttcccaagtcccagccctcagctaacaaatcctcctcttaattcttattgcatgtatttttgtaacaatagaaatgaagcacttgtttcttaaacattgtccatggatagttcctcagaaaaggcactaactagtctttcctttaggattcccttgcccctagcagtgtccaggaccagacagcactcaatccactcaataactacttgttacatttaacgaactgcctttgtgtttcaagccacagcttagttccctttttggaataaacgtttggtgatgcttctgagaacatttcatgagaaatagatgttagtaccacacacaaaagttgcttcttaccatataattttgactcaaattctggtcctcgctagagagccaagtggtctgtgttttctcatcttgctgtgtaagacatccccattactcttcatctaagaagccttcatgcactcccaggagcccagtacattagaaggcaacctccaggtaagcaaagactctgcctctcatgctgtctgcccaagtccctcactgcacacttctctgcaggaaaaaagcagccctgagccagcagggagggagagagggagggccagggtgaagcgctgtggtggagccctccctccatccatccactgtgctgcgtgggagccaagtgcaggtgcacragggctggtgcctgccagcctgattaccctcatcatggaagctgccagacgacttcagcacattctgtggcatggaaactgccgagaaagaacactgtcagcagtggcatttctaacgcagggaaacaaagtatgaagcagaagaaaaagacaaaagcccacccacccacccactgaggctgtacccaaaacatcttggcaagaatataactcctgactccctgtgaaaggaagatgtcccagaggggccctgatactagcactgttttaca

SEQ ID NO: 672653 - DNA, 1358 bp, Homo sapiens
aacttctggcccacttccagatcatatattatttagaagaacttagtttgtatgtttttctgcctgaaaactgaaccagaaaaccgcactgttccattccattttaggttctctctctctctctctctgtgtgtgtgtgtgtgtgtgtgtgtgtgtatgcacatgcttgtgtctgcatttttccttattttttaaatgtttatttgaatggcttactctctgcactgaagatttttatcctcagtctgacaatagatgagagaagtccttccacatccatcattatttactgggaagcaatctaccctcccccaaggatgcttgatgtcatttttccccaaaaaacttgaggaagcccctttagagaaaaagaggaagaaatttgcttacaacatgaaactcattcacacagagactctctgctctgtaaagtgctttcctgttgaattttccattcaaattccgcagtctttaagatagagcaaaaaatattattgccattttaaaaatgtataaactgaggtctagataaattaaatgactaaccaaaaatgatatgcaattaggtaactgaaaagagactaatagtttattaaattatattactctatttgacacacatattgaatttatcagccttttacctaccaaatgtctagtttatatgtgagtgaatgaatgtaatgattcctttgccagtaaaaatgcatttttaaaagggattttccattaagccagacttgctaacaagattcataccaggctggactgggtagcttatgcctgatatcccaacactttggkaggccaagacaggtggactacttgagctcaggagttcgagaccagcctggggaatgtggtgaaaccctgtctctataaaaactaccaccctgggtgtggtggcgcatgcctgtagtcccagctactcgaggggctgagctgagaggatcacttgagcctgggagtttgaggctacagtgagctgtgatcatgccacagcactccagcctgggaaacagagcatgaccctgtctcagcaacaacaaccacaaaaaaaaaaaaaagattcataccaggtgcttctgtctgtagtaggaccataaagggaaataaccttcaaaagaagtccgagtagaccctaagccaattaaagtatctgatctgaaatgttcatttttcccagctcagtactatttaacagattacattttgtattatgtctacataatatgacccaggaaagaaatactgaaaaaggcaaacttgttgtaaacttgtactttaaggaaaatgattagactcttgcaccagcctttgtaacactgggagttcttttttacaacgtattggtagtt

SEQ ID NO: 672654 - DNA, 1302 bp, Homo sapiens
tatttccctttttatttcctttcccttcctcccacaacccctttttccccccatttcttttctttctttttaattgttaattacataactaatacatgcttatcagaacaattgatatagcacaaaaggatataaagtacgggtgagtgatagctcatccctgtaatcctagcactttggaaggccaaggcaggcagatcacttgagtccagagttcgagaccagcctgggcaacatggtgaaaccctgtctctacaaaaaaatacaaaaatttagccgggcgtgctggcacacacctgtagtctcagctactctgagggctgaggtgggaagattgattgagcccaggaggtggaagctgcagcagtgcgctgagattgcgccattgcactccagcctgggtgagagagagagaccctgtctcaaaaaaaaaaaaaaaaaaaaaaaagtgaaagtagcctgtatttaggctattaacatataccattcggttacctgccttttaggtatatatctatgagatatatatatatacacatacatacaaaaataatgtatgtatatcatagatatcttccatggcagtgcacacacttctacctattatttttgacagctgcatgatgtgttccatactacagatgaacttcaatttgtgaagccattctctattgactattctgtttactttggcatctttctctttgttgcaattaaataactttgtttaatgagcatctggtgtttgccttacctacactaattgagatgattgaagtgtatctagtttcaattttcaaaaagcaatagttatgtttttttccatgacattgaacagtattttattgagtctgatttcttgaataatattttatttctacaatgtgagmtctcatgagtcttttctaaactttttgaaaaatctatcatcttcctttctcagttgtcaacaaagattatattttatatgtcagtactgattaagcattttttaaggattaactatttcaatcaaatgttttcaattaacacataaagacaatttaatagtagatttttcataggtctttagactgtaaaatcttgtatattgttaaatgcatatagtgaaaaaatttgaaccacaaactgtcaacaagtaatttgtaatttttccaatagagcattaaggtaactaacataattcctggtgttataaagaataaaaaatatcatatctagctagcaagagtgtctcttacaaagcaagaagaaaacctacccctatgtgatctcttgttctgagcaggtgtgaataaaaga

SEQ ID NO: 672655 - DNA, 669 bp, Homo sapiens
ttgggaagaaatctgtaagccaattctctccccagcatcatctccagttcatgaggatgctggggagagaaaaaggccctgccaagaggaacccagaggacactcaggccacacagccttccctcccttcctcctggtcacacgcacgcatggatcgtgacatcccctctttggccatgaaaaccagaattcatgtggaaatctgattaggtaaacaagtaacacaggagaaatgcccagactttcagtgatggagccactaagctaggagagaaaaccactctcatcaaatgagatacactctccatccagggtaaagcttttcaaatccttttaataaaaatgcccytcccaaaatgactttgtgactatggttctgctttgatgagaaaattaaaaggaagcttttccattttttcttgcacaaagcagctgactctcccatctcaaaatgcctttaacaatcgaagcctcggctattaatgagagcagagcaggccacacggcatggcttctgaaacgcttaatttatatttttaaattattctgataagccacaattgtaaaatgacaacactcagccatttccatttcgtatgtcaaattatcgcattttttaaaaggcaagcatcttctattcaaccccacagtgtgctgacacagaaagaa

SEQ ID NO: 672656 - DNA, 616 bp, Homo sapiens
tgtcacctctacaaagttgggctactactgagcagcaggaaggcactatccatgttcttactgctggattgtgtggcagctacctctgggtctgctcagctgccctggggtgggaaggtgggaacctgcatctgttccagaactgctttgaggtctgatatccacctccatagttgctgttgggttaagttttattaagatagtctttagcaacctagacagaaatgttttaatattcaaacaattggtacagatgcatgcatatayacagtatccttgcttggactatgaaggaagtggtggagtaaagagaattggtcatattctggatatattttgaaggcagagccgagaggtaattgctaatggatggcatgtagggtatgaaagaggcagcaagaatgacttccaggtcatggcttgatgcctgagtgattggaagaaagactgggaggagggcagcttttgtgagtgagaatgaagtatttggttttagacctagtaagtttgaaatgcttgttcaatctccaagtggagcctcaggtgcctgtttgatctgtgagtctggagttcagaggaacagttagaaccctttcaggaatgattaactcaatga

SEQ ID NO: 672657 - DNA, 1298 bp, Homo sapiens
caactcatttagtttatgggcacataatattttatgccaacatatgtaccccatatattacaaaatgtcaatatttttaatattttttattggactgtaagtgatacatgactataaaatacctgccttatgtagtatagtatcttcaatataaaaagaaggactgccatgtaacaggyatggagtaggtagttgctgagtaatcaacgagtaaagttttatatttatggaatgtagttaatgggcaatggttctgatacaatatttattggtaaataattacaactgaatgtaattagagatatatctagttttggaagcatttacttttcatacattttaacattatgaattctttatttgtagtacataatccacatatatactgaaatctatgtatttagtaagtgttacatactactaaaatcaaacctaaagtttttgtacgatggacatctttatgtgtacagatgtatagaaagattgtagatggtctactagaactgttgcttgtcaacctgtttagctgtgtctccagttaattcctttatcttacattaagttctagcgtagtaagcattgtgcagtgatgcgtatgtattcttttcttttgtccctgtgtacttacatgcttggttctctctctccatttatccacttctcaatcttttattgtcttctcacaagtgacatcaatctgagctgcttattatgacacagaatcagggaattaataagataaatcatacaactttaaattgtttttacttttttcttgtgccatttttctagcagtggttaacaattccaagtgtcactgaatcagtaaataatttcaaaataaaataactggaatcaaaattatataaaaatgaatgaagcaggattgatcctctagctaagttttgccacaaagatgattgtcaattttcagtaacaaaagtatatgatctaagaagtgttaaatattgcctgtcaggttctttgttgtttttttctctggcaacaatttcaaattgtgaaatgttgatgttttttatgtgactaatattatttaccagcctttctcgttaaatgtagaagggatggaaaatatgatagcctagagcagtggcaactacagttgaccttgaaaagtgtgagtttaaattgtgtaggtacacttatatatgattttttaaaataaatttattggagaatttttgggtatttgcaacaatttgaaaaatctcacaggtaaactgtgtggcctagaaatattgaaaaggaatgtgaaagttaagtatgtcatgaatgca

SEQ ID NO: 672658 - DNA, 1271 bp, Homo sapiens
ggaatggggaagggttggaaacaggagtatttacacaaatttagaattatataagcattcagatggacaaaattaagctgtacgtttgtagggcacggtgagagtggggggctgaattattttatgactttcatttgagaacttccttttttaaattatacaaagaaaattatataactgttaagttcaacaagactcacaaagctttagccacatgtcaattaaattgcacagggaattgtgtaaggaacccagccagaaataaaaaggtatgtaagcaactttcatcaagctttttttttccaaaacagaattttttaaataaagaaatgaaataagttatagtgattctcatcttttatgtttttgtcagcttaccttgaaccttatacccagataattaattatgtagggccctcattagttcagtaaaatactatagctatgagtttttgtctgcccatcataacgaagataaacctgccttcctataactgagataaacctaccttctttttgtttttttaggaactgtttcaaatccatatacataacagtgctttctactcacccggccaatgtggaggtgcctgacattgcactggcctatcaacatagcctattcctctgtccaggaagagatgcatagcctaatctaggtctataaaagcagaattttttaaagaattactctgatacaaaagacactcaatccatattggttaaatcaatatttaatgaatgaatgaacaagctagtgggaataagttaggactacttctttccttgaggtagatataaccctggctccagttttcattaacttactaaaagaagctcatcatctgcagatgataacaatgccaaaatgcttaaaagagagagagagacaagcataagtaagagatgaagaaatagagatataacttcatgaaattttcctggaatttctggtttggggaactaataaatttctgttttcctgaagttaacttgagtttccaccacttgttcaaggaaggtcatgacaaataaaataatcattagtagtgctttaacacaccccagaatacctagtggaaacaaggggtgattaatcgtcaattattatatgtttamatgaaagtacatcattatagatatgaataaaattcaacactgctgttggaataagcagaaaatcttgttcagagtgcactttcaattcatagttgcttccacgttaagcctaagaacattactttaggaacaaggagatagtagtaagttca

SEQ ID NO: 672659 - DNA, 1271 bp, Homo sapiens
ggaatggggaagggttggaaacaggagtatttacacaaatttagaattatataagcattcagatggacaaaattaagctgtacgtttgtagggcacggtgagagtggggggctgaattattttatgactttcatttgagaacttccttttttaaattatacaaagaaaattatataactgttaagttcaacaagactcacaaagctttagccacatgtcaattaaattgcacagggaattgtgtaaggaacccagccagaaataaaaaggtatgtaagcaactttcatcaagctttttttttccaaaacagaattttttaaataaagaaatgaaataagttatagtgattctcatcttttatgtttttgtcagcttaccttgaaccttatacccagataattaattatgtagggccctcattagttcagtaaaatactatagctatgagtttttgtctgcccatcataacgaagataaacctgccttcctataactgagataaacctaccttctttttgtttttttaggaactgtttcaaatccatatacataacagtgctttctactcacccggccaatgtggaggtgcctgacattgcactggcctatcaacatagcctattcctctgtccaggaagagatgcatagcctaatctaggtctataaaagcagaattttttaaagaattactctgatacaaaagacactcaatccatattggttaaatcaatatttaatgaatgaatgaacaagctagtgggaataagttaggactacttctttccttgaggtagatataaccctggctccagttttcattaacttactaaaagaagctcatcatctgcagatgataacaatgccaaaatgcttaaaagagagagagagacaagcataagtaagagatgaagaaatagagatataacttcatgaaattttcctggaatttctggtttggggaactaataaatttctgttttcctgaagttaacttgagtttccaccacttgttcaaggaaggtcatgacaaataaaataatcattagtagtgctttaacacaccccagaatacctagtggaaacaaggggtgattaatcgtcaattattatatgtttacatgaaagtacatcattatagatatgaataaaattcaacactgctgttggaataagcagaaaatcttgttcagagtgcactttcaattcatagttgcttccacrttaagcctaagaacattactttaggaacaaggagatagtagtaagttca

SEQ ID NO: 672660 - DNA, 1838 bp, Homo sapiens
tttttttttttttgagacggagtcttcgctctgtcacccaggctggagtgcagtgacatgatctcggctcactgccagctccagctccacctcctgggttcacgccattctcctgcctcagcctcccgagtagctgggactacaggcatctgccaccacacttggctaattttttttattttttagtagagacggggtttcaccatgttagccaggaggcctcggcctcccaaagtgctgggattacaggtgtgagccaccacatccggcctttatacataattcaaaagtacaagaggacccttccccagtcagccagtttctgttccagagggcaattaatgctaccagtttcctgtgattcattccaagtagaagttattatatatagttacatagggacatacatgcatacatttctatctatccttcatgaagggtattgtactatatgtgttgtcacatgccttgctttaacattcacccaatacctgttccttccatatcagtatacaagttgcttctccactctttttcacagctgcataatattccactttgggatgtgccacaatttacttaaccagtcctctattggtatttgctatgacaatggtgaggatatcttaataattcctacaagtggaattgctgaagcaaaatgtgtgcacatttaaattttagtagactttttgtttttaaagcttgatttcctatgggactgaattttagttttttagaaaatttacatgtgtagaagaaggttcctgtttgactattccagatgagccagccattatcccccacttccctccaccctgcctttcccgacccaaccacccaggattaaaatgatgagtcttccaagcatttgtggactcttctgaagatattttaattccaaggttttgctctgcctgcccgctgatctgggctaaggtggtctaggagctcccctgtagtagggggatctgaaggtgggctaaggaccgagggccaggctgactggagtgtaaggtggtgggaatggaggagtgaatgttaaagcaaggcatgtgacaatgcggacagtacatacccttcatgaaggatagatagaaatgtgtgcatgcatgtccctacgtaattatatatcatagattcacctgttgggaaaggaagagtaagcaccactgcaaggaaaggaaggcagggaaggataccagcatggtgggtggccccctagttcactctccgcgctgcccttttacacattgtggtgggcatagttgctttgtctagccaggaccccttccccctcttctagtaatgcaaagctcccccacctccactcctgccacgccccacttcttttcaggaactgttcctcctaagatcacaggacctctgtccaggcacacagggttcacaatgggccagccttggccaatcacaagtccctttgtttcctccttgctgaggcatattgtacatacaataaaatgcaaaatgtgctttaatggggaatgtacaacctgatgagtttttttatttttatttttatttattttttttgagatggagtttcactcttgttgcccaggctgaagtgcaatggcacgatctcggctcactgcaacctccgctgcccaggttcaagcgaktctcccgcctcagcctcctgagtagctgggactacaggcatgcgccaccacgccgggctaattttgtatttttagtagagacggggtttctccgtgttggtcaggcaactcccgacctcaggtgatccacccgcctcagcctcccaaagtgctgggattacaggcgtgagccaccgtgcccggcgcctgatgagt

SEQ ID NO: 672661 - DNA, 2752 bp, Homo sapiens
cccatcactttggggaggccaaggcgggccaatcacaaggtcaggagttcgagaccatcctgcctaagacggtgaaaccctgtctctactaaaaatacaaaaaaattagtggggcgtggtggcaggcaggtgcctgtagccccagctactcgggaggctgaggcaggggcaggagaatggcatgaacttgggaggcggagcttgcagtgagctgagatcttgccactgcactccagcctgggcgccggagactcccaaagaaagcttggctatttttattgatgtgtaatatacaacctatgtaaatgaagttaggcctattggtttgcaaatgcagctttaacataattaccttacctgtctccttcccctacccaatgctgagggacattgctccccacctcaccatcatgccatgctttctccccctggtcataggtgatctttccagaacagctaaccaggtgcctggggtctggagaccttactgcttgaggagtgaattaagagaaaagactgcttgcttycctccagactttgagccctggcctgatgtagacctttttgctctctcctccttcgtataggtacggttcctggagcagcagaacaagatgctggagaccaagtggagcctcctgcagcagcagaagacggctcgaagcaacatggacaacatgttcgagagctacatcaacaaccttaggcggcagctggagactctgggccaggagaagctgaagctggaggcggagcttggcaacatgcaggggctggtggaggacttcaagaacaagtgagcaactcccaccctccacccaactgaagtcaccgtgctctcctccaccccttgggaccttgggactaagtccccatggccctctgttgtgggaagtgcagtcctatctaattagggtgaccacctgatgaggtttgctcggaacagtctgtgtttatgcccaggttcctagcacaattgttgatagtacccaccccctttcaatctcaactgtctggatttgaagaacaaattatgtgtcaatgttgacatggtaaacctgagacgggagagataggcagcctgtgggcctcacttttgtacttaacattctggcccctctttagtcttgacccttgacctctagcaaactctagaaagttctgtctgaggtctcatgtcaggccctgctgttaacactctcaaggtgtccaatccgatgtgtattcatggatttggagagagatttcctgcttcccacgggctaagggaggggtgagggtggagagggcagctggggaaggcagaaggaccagccttctcatatcctgcatctctgtgaactgaattttcctgattttcacaacgcccctgtctcccaaaagaccaagggcaacctcccttttgccttcatcctctaattgtaagtcttttcctcacaggtatgaggatgagatcaataagcgtacagagatggagaacgaatttgtcctcatcaagaaggtgagggagtctcccttctcctatctggacactggaggctggggctcagagactcagaccaagaagctttctgggttttgtccctaaatattcctaagtagtgggacaaactcatttatgtaaacatttgggtgcacagaaaggtagacaaggatggagtggtaggtgcatttggacagaactcttgacatcggtgttgggacatggttcagaaaacagagcagtagaactggagatctggctctagaaggctccctagagaaggaggtggaagagggtgtgttgcaggaagcagaggtgaaggtgtgtgggctgagaatgcacatgtgatgggcagaggctgggctggaagatcaatccacaaagtgggcaactagaaagtcctgtgaccaggccattgggtggaccttgggagccccttggttggggttgggtgtggaaacccagctcaggctcccctctcctcatcccccaggatgtggatgaagcttacatgaacaaggtagagctggagtctcgcctggaagggctgaccgacgagatcaacttcctcaggcagctatatgaagaggtatgttcctggtcgcaggagagtgagggtcccccagccttgtcagcgcctccaccctgagactcaaccagaggctcctcccagcccccagcacactaataagacaaaggcccactgctgactaattacagccaccaatatttgctcggctagtatttattgggtctatatgttctgtccctcgcatgagggatgagtcattaccccatttcacagacgagaaagtgggctcagagaagtgaaataacgtatccaaggtcatcatagggtgtggtgattcagcagcaactctgtccccaaagcccttgttcctaatctttgagctgcattggatccctctgtgcacctagtattggtgcacccagttcctttttcaggaactttgccctctccctgaccctgactcccacctgctcctctcctctgctgcccctgtcttataccctaagaaaggctgttgtggaaaagggggctccctgtgtgcagagacagggcctcaccacttgccctcttcccccacaggagatccgggagctgcagtcccagatctcggacacatctgtggtgctgtccatggacaacagccgctccctggacatggacagcatcattgctgaggtcaaggcacagtacgaggatattgccaaccgcagccgggctgaggctgagagcatgtacca

SEQ ID NO: 672662 - DNA, 2752 bp, Homo sapiens
cccatcactttggggaggccaaggcgggccaatcacaaggtcaggagttcgagaccatcctgcctaagacggtgaaaccctgtctctactaaaaatacaaaaaaattagtggggcgtggtggcaggcaggtgcctgtagccccagctactcgggaggctgaggcaggggcaggagaatggcatgaacttgggaggcggagcttgcagtgagctgagatcttgccactgcactccagcctgggcgccggagactcccaaagaaagcttggctatttttattgatgtgtaatatacaacctatgtaaatgaagttaggcctattggtttgcaaatgcagctttaacataattaccttacctgtctccttcccctacccaatgctgagggacattgctccccacctcaccatcatgccatgctttctccccctggtcataggtgatctttccagaacagctaaccaggtgcctggggtctggagaccttactgcttgaggagtgaattaagagaaaagactgcttgctttcctccagactttgagccctggcctgatgtagacctttttgctctctcctccttcgtataggtacggttcctggagcagcagaacaagatgctggagaccaagtggagcctcctgcagcagcagaagacggctcgaagcaacatggacaacatgttcgagagctacatcaacaaccttaggcggcagctggagactctgggccaggagaagctgaagctggaggcggagcttggcaacatgcaggggctggtggaggacttcaagaacaagtgagcaactcccaccctccacccaactgaagtcaccgtgctctcctccaccccttgggaccttgggactaagtccccatggccctctgttgtgggmagtgcagtcctatctaattagggtgaccacctgatgaggtttgctcggaacagtctgtgtttatgcccaggttcctagcacaattgttgatagtacccaccccctttcaatctcaactgtctggatttgaagaacaaattatgtgtcaatgttgacatggtaaacctgagacgggagagataggcagcctgtgggcctcacttttgtacttaacattctggcccctctttagtcttgacccttgacctctagcaaactctagaaagttctgtctgaggtctcatgtcaggccctgctgttaacactctcaaggtgtccaatccgatgtgtattcatggatttggagagagatttcctgcttcccacgggctaagggaggggtgagggtggagagggcagctggggaaggcagaaggaccagccttctcatatcctgcatctctgtgaactgaattttcctgattttcacaacgcccctgtctcccaaaagaccaagggcaacctcccttttgccttcatcctctaattgtaagtcttttcctcacaggtatgaggatgagatcaataagcgtacagagatggagaacgaatttgtcctcatcaagaaggtgagggagtctcccttctcctatctggacactggaggctggggctcagagactcagaccaagaagctttctgggttttgtccctaaatattcctaagtagtgggacaaactcatttatgtaaacatttgggtgcacagaaaggtagacaaggatggagtggtaggtgcatttggacagaactcttgacatcggtgttgggacatggttcagaaaacagagcagtagaactggagatctggctctagaaggctccctagagaaggaggtggaagagggtgtgttgcaggaagcagaggtgaaggtgtgtgggctgagaatgcacatgtgatgggcagaggctgggctggaagatcaatccacaaagtgggcaactagaaagtcctgtgaccaggccattgggtggaccttgggagccccttggttggggttgggtgtggaaacccagctcaggctcccctctcctcatcccccaggatgtggatgaagcttacatgaacaaggtagagctggagtctcgcctggaagggctgaccgacgagatcaacttcctcaggcagctatatgaagaggtatgttcctggtcgcaggagagtgagggtcccccagccttgtcagcgcctccaccctgagactcaaccagaggctcctcccagcccccagcacactaataagacaaaggcccactgctgactaattacagccaccaatatttgctcggctagtatttattgggtctatatgttctgtccctcgcatgagggatgagtcattaccccatttcacagacgagaaagtgggctcagagaagtgaaataacgtatccaaggtcatcatagggtgtggtgattcagcagcaactctgtccccaaagcccttgttcctaatctttgagctgcattggatccctctgtgcacctagtattggtgcacccagttcctttttcaggaactttgccctctccctgaccctgactcccacctgctcctctcctctgctgcccctgtcttataccctaagaaaggctgttgtggaaaagggggctccctgtgtgcagagacagggcctcaccacttgccctcttcccccacaggagatccgggagctgcagtcccagatctcggacacatctgtggtgctgtccatggacaacagccgctccctggacatggacagcatcattgctgaggtcaaggcacagtacgaggatattgccaaccgcagccgggctgaggctgagagcatgtacca

SEQ ID NO: 672663 - DNA, 2752 bp, Homo sapiens
cccatcactttggggaggccaaggcgggccaatcacaaggtcaggagttcgagaccatcctgcctaagacggtgaaaccctgtctctactaaaaatacaaaaaaattagtggggcgtggtggcaggcaggtgcctgtagccccagctactcgggaggctgaggcaggggcaggagaatggcatgaacttgggaggcggagcttgcagtgagctgagatcttgccactgcactccagcctgggcgccggagactcccaaagaaagcttggctatttttattgatgtgtaatatacaacctatgtaaatgaagttaggcctattggtttgcaaatgcagctttaacataattaccttacctgtctccttcccctacccaatgctgagggacattgctccccacctcaccatcatgccatgctttctccccctggtcataggtgatctttccagaacagctaaccaggtgcctggggtctggagaccttactgcttgaggagtgaattaagagaaaagactgcttgctttcctccagactttgagccctggcctgatgtagacctttttgctctctcctccttcgtataggtacggttcctggagcagcagaacaagatgctggagaccaagtggagcctcctgcagcagcagaagacggctcgaagcaacatggacaacatgttcgagagctacatcaacaaccttaggcggcagctggagactctgggccaggagaagctgaagctggaggcggagcttggcaacatgcaggggctggtggaggacttcaagaacaagtgagcaactcccaccctccacccaactgaagtcaccgtgctctcctccaccccttgggaccttgggactaagtccccatggccctctgttgtgggaagtgcagtcctatctaattagggtgaccacctgatgaggtttgctcggaacagtctgtgtttatgcccaggttcctagcacaattgttgatagtacccaccccctttcaatctcaactgtctggatttgaagaacaaattatgtgtcaatgttgacrtggtaaacctgagacgggagagataggcagcctgtgggcctcacttttgtacttaacattctggcccctctttagtcttgacccttgacctctagcaaactctagaaagttctgtctgaggtctcatgtcaggccctgctgttaacactctcaaggtgtccaatccgatgtgtattcatggatttggagagagatttcctgcttcccacgggctaagggaggggtgagggtggagagggcagctggggaaggcagaaggaccagccttctcatatcctgcatctctgtgaactgaattttcctgattttcacaacgcccctgtctcccaaaagaccaagggcaacctcccttttgccttcatcctctaattgtaagtcttttcctcacaggtatgaggatgagatcaataagcgtacagagatggagaacgaatttgtcctcatcaagaaggtgagggagtctcccttctcctatctggacactggaggctggggctcagagactcagaccaagaagctttctgggttttgtccctaaatattcctaagtagtgggacaaactcatttatgtaaacatttgggtgcacagaaaggtagacaaggatggagtggtaggtgcatttggacagaactcttgacatcggtgttgggacatggttcagaaaacagagcagtagaactggagatctggctctagaaggctccctagagaaggaggtggaagagggtgtgttgcaggaagcagaggtgaaggtgtgtgggctgagaatgcacatgtgatgggcagaggctgggctggaagatcaatccacaaagtgggcaactagaaagtcctgtgaccaggccattgggtggaccttgggagccccttggttggggttgggtgtggaaacccagctcaggctcccctctcctcatcccccaggatgtggatgaagcttacatgaacaaggtagagctggagtctcgcctggaagggctgaccgacgagatcaacttcctcaggcagctatatgaagaggtatgttcctggtcgcaggagagtgagggtcccccagccttgtcagcgcctccaccctgagactcaaccagaggctcctcccagcccccagcacactaataagacaaaggcccactgctgactaattacagccaccaatatttgctcggctagtatttattgggtctatatgttctgtccctcgcatgagggatgagtcattaccccatttcacagacgagaaagtgggctcagagaagtgaaataacgtatccaaggtcatcatagggtgtggtgattcagcagcaactctgtccccaaagcccttgttcctaatctttgagctgcattggatccctctgtgcacctagtattggtgcacccagttcctttttcaggaactttgccctctccctgaccctgactcccacctgctcctctcctctgctgcccctgtcttataccctaagaaaggctgttgtggaaaagggggctccctgtgtgcagagacagggcctcaccacttgccctcttcccccacaggagatccgggagctgcagtcccagatctcggacacatctgtggtgctgtccatggacaacagccgctccctggacatggacagcatcattgctgaggtcaaggcacagtacgaggatattgccaaccgcagccgggctgaggctgagagcatgtacca

SEQ ID NO: 672664 - DNA, 2752 bp, Homo sapiens
cccatcactttggggaggccaaggcgggccaatcacaaggtcaggagttcgagaccatcctgcctaagacggtgaaaccctgtctctactaaaaatacaaaaaaattagtggggcgtggtggcaggcaggtgcctgtagccccagctactcgggaggctgaggcaggggcaggagaatggcatgaacttgggaggcggagcttgcagtgagctgagatcttgccactgcactccagcctgggcgccggagactcccaaagaaagcttggctatttttattgatgtgtaatatacaacctatgtaaatgaagttaggcctattggtttgcaaatgcagctttaacataattaccttacctgtctccttcccctacccaatgctgagggacattgctccccacctcaccatcatgccatgctttctccccctggtcataggtgatctttccagaacagctaaccaggtgcctggggtctggagaccttactgcttgaggagtgaattaagagaaaagactgcttgctttcctccagactttgagccctggcctgatgtagacctttttgctctctcctccttcgtataggtacggttcctggagcagcagaacaagatgctggagaccaagtggagcctcctgcagcagcagaagacggctcgaagcaacatggacaacatgttcgagagctacatcaacaaccttaggcggcagctggagactctgggccaggagaagctgaagctggaggcggagcttggcaacatgcaggggctggtggaggacttcaagaacaagtgagcaactcccaccctccacccaactgaagtcaccgtgctctcctccaccccttgggaccttgggactaagtccccatggccctctgttgtgggaagtgcagtcctatctaattagggtgaccacctgatgaggtttgctcggaacagtctgtgtttatgcccaggttcctagcacaattgttgatagtacccaccccctttcaatctcaactgtctggatttgaagaacaaattatgtgtcaatgttgacatggtaaacctgagacgggagagataggcagcctgtgggcctcacttttgtacttaacattctggcccctctttagtcttgacccttgacctctagcaaactctagaaagttctgtctgaggtctcatgtcaggccctgctgttaacactctcaaggtgtccaatccgatgtgtattcatggatttggagagagatttcctgcttcccacgggctaagggaggggtgagggtggagagggcagctggggaaggcagaaggaccagccttctcatatcctgcatctctgtgaactgaattttcctgattttcacaacgcccctgtctcccaaaagaccaagggcaacctcccttttgccttcatcctctaattgtaagtcttttcctcacaggtatgaggatgagatcaataagcgtacagagatggagaacgaatttgtcctcatcaagaaggtgagggagtctcccttctcctatctggacactggaggctggggctcagagactcagaccaagaagctttctgggttttgtccctaaatattcctaagtagtgggacaaactcatttatgtaaacatttgggtgcacagaaaggtagacaaggatggagtggtaggtgcatttggacagaactcttgacatcggtgttgggacatggttcagaaaacagagcagtagaactggagatctggctctagaaggctccctagagaaggaggtggaagagggtgtgttgcaggaagcagaggtgaaggtgtgtgggctgagaatgcacatgtgatgggcagaggctgggctggaagatcaatccacaaagtgggcaactagaaagtcctgtgaccaggccattgggtggaccttgggagccccttggttggggttgggtgtggaaacccagctcaggctcccctctcctcatcccccaggatgtggatgaagcttacatgaacaaggtagagctggagtctcgcctggaagggctgaccgacgagatcaacttcctcaggcagctrtatgaagaggtatgttcctggtcgcaggagagtgagggtcccccagccttgtcagcgcctccaccctgagactcaaccagaggctcctcccagcccccagcacactaataagacaaaggcccactgctgactaattacagccaccaatatttgctcggctagtatttattgggtctatatgttctgtccctcgcatgagggatgagtcattaccccatttcacagacgagaaagtgggctcagagaagtgaaataacgtatccaaggtcatcatagggtgtggtgattcagcagcaactctgtccccaaagcccttgttcctaatctttgagctgcattggatccctctgtgcacctagtattggtgcacccagttcctttttcaggaactttgccctctccctgaccctgactcccacctgctcctctcctctgctgcccctgtcttataccctaagaaaggctgttgtggaaaagggggctccctgtgtgcagagacagggcctcaccacttgccctcttcccccacaggagatccgggagctgcagtcccagatctcggacacatctgtggtgctgtccatggacaacagccgctccctggacatggacagcatcattgctgaggtcaaggcacagtacgaggatattgccaaccgcagccgggctgaggctgagagcatgtacca

SEQ ID NO: 672665 - DNA, 2786 bp, Homo sapiens
acttagaagtagagacctgagaaactagtcgatgacccagatctgtataaacagatccttcacacccgcaagcatacaccttcaccaaaattatctagttatacaggattctagagacctctccccagggaaaaaagaccattgctcagaatgaatgacaaaagcattttattgaagattcacctgcagatggataagagggaatgagaggagtagaatgggacactaagtggttctcatcctaagcttgcagggccaagtgctgccgggtgttggagaagtagtttggttctgatgtagatggataatacaggatctagtgggagatggcattggactgggaagggacatatgtgaccccaataattctggagatgacactcctggtcattttcttctctgyccatgggaggtgagaggtcagctgacatccttcccattccaggtgggtcaccaggcccaaatcaagaagtagctaccaaactccaagaggcagagtccctgtcccagcacagaagatcatcctggggcagagagagcccatgggatagtggaggggatactagtaagatgagccccagagacagaggatggaggtgaagtgaaggaagcacagagacaccagtgctgggcccagctggacacagtgagctgcagggacctcgtctcctctatcgtctcttgttcagggtggtggtagagatgatcttgctgctggaactgccagagacactgccaccaaacccaaagccacttccagagccggagccaaagccactactcaggccaaacccggagccacttcctaatcctccgctgatgcctccagtgctggtgctaccgctgaccacagctgcagaaaagacacaaaagacacagttattccaatgctgccagcaccccaggggtctggcaagacccgggtgaatgaacaactacagcaggcgtggaaggtacttacagatgctcacggcactctggcattctccagacattctgtaggggaaagaaaaggcggtgagcctcagggagcacagaattttgttcaataagcatgcctcactcacctctcttatccttgagcagcctctgagtttgagggcccagtgtgaacctattagctgagctgtcctggttcgtaatgcaccggcacaacactgatgcttgcagcccggcagaggcataaataagctcatggccctggacctctctggccctcatgttcacaccctgcctaacccctcacctgtactcctcgccctccagcagtttgcggtaggtggcgatctcgatgtccaaggccagcttcacactcatgagctcctggtactcacgcagcattcgtgccagctcctccttggcctgctgcagggcagcctccagctctacgcgcttgctgtgggcatctttaagggcattctcacctcgctgctctgcatcagccacggatacctgaagagtctggcactattgacaaaggcattagataggtggtcagcagtgccctgccttcaaggcctctacacctgtcccctcccctggtccagctttccttgggttaggatgtcaagattctatctgttctgcccactttccctgagacttatgcatctcattcactccagccatagcccaccaatgcctccaccagactgattaaataaaaatgagcaaaaacccatgaagaagagccaagaaacctatgcacaggagcgtcatggtgtgccaactaggatattgctgaaaaaatctgggtatgccttgcacaaagagctatgaattcccagcaacaagctcagggtcttctggcctgatgctttatctgcttgtccactctggagatgtctgcctgaggcccctggccttgtgctccatctggaagggagtgacacccacctgcttcttgatgttctcgatctctgcccgcagcctctggatcatcctgttgagctctgcaatttcactcttggtgttcttcaggttgtcaccatgttggtcaaccgagatctggagctgctggacctaagactcaagaagacacagagaaccaggtgttaggggcatttgggtagggtccattctcaagtgaactcagtgagaattgccacaggtggcaagaatagcaccaaatgtcaagtagtttcaaatcagaccaggaccaacgatgcctgggagagtctgttcatatctgacttctattgggcttgagctaatgatcacctgttcacagacatcaaaagcagagccccagagccagccccatctcctgagagatccataccacccaccttggtctggtacagggcttcagcctcagccttgctcctctgggcaatctcctcgtactgggcacggacctcggcaataatgctgtccaggtccaggttgcggttgttgtccatggaaaggaccacggacgtgtcgctgacatgggtctgcatctgggacagctcctgcagggcaaatgtctcacatcagcccccccaggaaagccttcactgacctgatacaggctcaagtaggagcagagctggcattcacaatgtgtaggaaggggagagacaggtaaagttctaaggagaaatcaagtggttgtgacagttcaggatggaagagcaatgcttctagtctttactggtccccaggaaccataagccactctaatgcagtgagtgccggtgtgttggaatggaagggaagggaatggatccatttcaccagaaaaaaaatgctagacagcaatgaattctattccaagcactctttagatctaatcaccccgtcta

SEQ ID NO: 672666 - DNA, 2410 bp, Homo sapiens
gaatagaatctagtatttgatagcacaacagggtgacgatagtcaacattaatttatcgtacattttaaaataactaaaaaggtagaattaaattgtttataaaacaaagaatggataaatacttgatatgatggatacaccatttatccttctgggattattatgcattatatggctgtatcacaatgtttcatttactccattaatacatacacctactatctacccacaaaaattttaaaataaaaacaattattaaaaagtgaccttcaagactagggtcataggaggcaatgtagattttgcctggtcctttggaaatctcactcttagaacccagccaccatgctttaaggaagcacaatagccatgtggagaagtcctgtgtactgttctggctaacaacccaagtaaagtctcatttgaaagccagcattaaccaccaaacatgtgagtgagaaaacctttgcattgaccccagtcccatccactgtcttactgaaactgcatttttaagatactattttatgtaacaatagaggactagaacaaattttaatacctggaaatatgatgctattatcatgtcatattatagtatcctataacatatggtgtaggttttgaaccaagtagcaggcagaaactaaaagggcattgaaaaagtgttagtgaaagtgcttcatgaagaatgttggggaaagactaaaaaggcaggtgttagcagaagcgctgggtagatcgtccctgggagcttaaaggaaagtatggaaaatgtgattggaagctggaggaaaggagacttttgtaatatggtggcagaatgtctggcaattctgttggttgcaataacatggaaaatagtaaaagtatctaatgacaatctaagatttccaggcagattattgaaagtgccacctgtcttcttcttgttagatgacaaaatgtgagaaaacagagataagtaaaagaacagactgttcattacaaagggggcaagattatttgtacaaaaaaaaagtggtttttgttcttagtctctccagatgtcaaatgaaactaaaattaataaatagctctgggtcagagttcaaatccagagcgctatcagggaagtaaagtctaaggtgtaatccctgggtatgcttacaaaactccttattaagccctcaaaagatcaaatatagtgactcatagaaactttcagatgacagaagacctaagaccttaagggcatgccttgagtctcctccgccctaaaaaataagggttctgagaatctaagggyattgcagagcagcaatgtccaatcttttggcttccctgggacacattggacaaagaattgtctcaggccatgcataaaatacactaacaatagctgattagctttaaaaaaatcacaaaaaaggccgggtgccgtggcttacacctgtaatcccagcactttgggaggccgaggcaggtggattatgaggtcaggagttcaagaccagcctggccaagatggtgaaactccgtctctactaaaaatacaaaaaatacaaaaaattagccgggtgtggtggcacgcgcctgtaatcccagctactccggaggctcaggcagagaattgcttaaacctggaggggtggaggttccagtgagccgagattgtgccactgcactccagcctgggtgtcagagcaagactccgtctcaaaaaaaaaaaaaaaaaaaatcgcaaaaaaaaaaaaagaatctgataatgttttaagaacgtttgcaaatttgtgttgggtcacattcaaagcatgcagcccatgggccgtgggttggacaggattgtagagagtcatacaacagtcttacagggaactcaaggtagacaaagacttatgtcagaaagatttgtggatatgacatttatctaattgtgcgaattgtcaattagtaaacacaaatcccacaatgtttttagataattattctggtggaagcatccctagcttggaatagaagggacagagaaagtacaatatattaagagacctttgggcccctgagcttttatgaacagaaagcaggcataagaatgtttcttatatgaaaagtaggatcattcagagggaggaaacaaaaacccagaaagtagaactaagaacaatagtgaacaactccaataagatggagccctactcaagaaatgcaatctgcacccaactggatttcagaatgtctacagaccagtaacttgctcaacttccattttccctccttttgattgcaactatctgtagaggttatcctatgcctgtcccaccactgcatgttggatatatgggagaatattattctccaaatgtagcatgatccagagatattggtagggtcagtaatagcactgcacaataatcagtggaatagcaa

SEQ ID NO: 672667 - DNA, 641 bp, Homo sapiens
cactggaaagcaaggatcatgacttgcttactcttcacttacactgaggggaacattgtcacagttggttcttaatgaggacaactgtgagaagcgaagaatgaggacactgccccagttaactcctagcagctcacctcaaatatagaaaagaaacactggaatagagaaaaaagtcccttttgtgactgctgttagttctgatcctctcctaactcgtgatcagtagagcagtggttctcatctcttaatgtgcatcagaatcacatggaggatctgctaaaacagagattgctgggcccaccccaagatgttctagagcagggcctaagaatgtgcattaatggtaagaatcaagtggagagtttgtaaaaatatagattgctgggcccatccccagrtattctgaagtgaggcctaagaatatgcatttctagtgagaatcaagtggacagtttgtaaaagtataggtttctggggcccacccccagatattctagagcaaggcctaagaattttcatttctaataagtgttcaggagatgctaatgctgctgttctggggtccacactatgagaaccactgctatagacctgtactgtcctttacagtagccactactacatgtgactatttaaag

SEQ ID NO: 672668 - DNA, 1647 bp, Homo sapiens
aaacacagcatcgtaggtggagcctggaagcctgcaactatttgttgttgctcttcttcaacagctgatgcaggtattctggtgatggtactatgcggattagctaacctgaacacattattttttcctgtattaatggtatgtcctattttttactatgaagtacttgtgttgagtaagtataaaaaaagattgcttatcagtagcatataatttcagaatcaggaattatgatgatgccaaacaaccacagattgtccacatgggcagctgagatagtgacacctttgctttctgatggctcaagatatacaaacttatttaaatgcacaaaattatttaaaatattgtgttaaattaccttcagactatgtgtacaagatgtatatgaaacacaaatgaattccatgtttagacttgggtctctttcccaagatgtcttattatgtatatgcaaatattccaaaatttgaaacacttctggtctcaagcatttggataaggaatacttaacttgtaacacaaccacggtagaatctgggaaactttgctcaatgtccatggaaacttaaagatgttatttggctttgagtagaattcagcatagaatgaagggttctgtggacacagtagaaagcaacatgttggaaattttgtctctatattattttaaaaaacaaaatgcatgtgactatacaattcaaatccatgtcaatgttcttatatccaacatcagctagctatgtaaatgctactgagctgatttttagcactttatttttaaaaatttatcttagactccacaggtactgaagtagagaattccttcattgagcatcagttttcttaactctattaacaattaatcactgttttatagagagaataaaatattatttgcaagacaaaagcaagaagaggaattcaatgactatttcatgatgtagtatattagttcataactcaaattgttttaagcaaaaacatatcccttgaaaatataatttttttatatttgtaaaatataaaggggcatatccaaaaatccaagggaaattcaagtttcagttgcagcttgattctggattctcaaaaaaggttattaggaaccagcctctttccatttttctactctattatgctctatgttggcttccttttcagactccaaatggttcaartaagacttccaataccaccaagattaagtctttgcaatcttatgccctgtgtgtacagcagagggagagagaccctaacttttattgtactgagttggatcatgtggtcaactctgaatgaaacattttggccaggggagcataaaaagcacccagatgcatttcttgtctattgttgtataacaaatcaccacaaaatttagcagcttaaaacagcatacattttataatctcgcaatttctgtgggtcaggaatctagacatggcttaactgggtccttgcttcaggccctttcacaaagcttcagtcaatgtgtaggccagggcaaggggctcatctgaaggctcatcctgagatacacttcaaagttcatttacatggctgttgataggattcagttccttttgatgctgttggactgagggcctccttcttagatggctgttggccatagattttcttcaa

SEQ ID NO: 672669 - DNA, 664 bp, Homo sapiens
ttagttagacaatccaactattttggacataagcataacatattgcctgttgtcaataaatatatttatcgctgtctcatctataggtttttttctaagatttgtgagcaaaaattattcttcaaaaacacagccatctttgggtactgctttcaaactaaaaagacctggtccttgggcaaggtaggtctaccaaattcataaactcctgtaaataccttgttaaagtataattctcaaaaatgtaaaaccrtccaaattggaaaagagggtatcaattgtctctttctacagacagcatgaccttacatttagaaaaaccaaaagacttcaccaaagaactgttagaactggtaaataaattcagtagttgtaggatacaacgtcaatgtatacaaatcagtagcatttctatagaccaataatgaaatagtcaaaaaagaattcaaagtgacaattacatttagaatagctacaaaaaaaatgactaggaatacatttaaccatgaaggtaaaagacttctacgaggaaaactataagacattgatgaaagaaattcaagaggtcacaaatgcaaagacatcccatgctcaggggttggaataattaatattgttagatgaacatgccaatcaaagcaatctacagattcaattcaatccc

SEQ ID NO: 672670 - DNA, 595 bp, Homo sapiens
tgggttcaatgtggaatgggagcagtggagaagatgctcctaagtttacctggggacactgaagacaacctacttaaagtgaaagaaagttcctagtgctacattttaaatctctcccctcttgttctggcttaaaacattgttctcatcctcgagtgaaagctttcatgtacttgaaataaatacaattccgttttcctccattttcctttccatgcaaagtgagtataattcttttcatttccatgagcccattttcttttgtggcccttttgaattataccttgctcctagccaggatgtggaaaaagtagtaagagaacagggagtacggcacatttagtcaaaggctaggctggctgaaaaacacccttgactacttcaagagaaaacaggaaatttaagtgtaattttctttttyctcttaataggtggggaaaaagaaagtggaggccgggcgtggtggctcatgcctgtaatcccagcactctggaaggccgaggcaggtggatctcctgaggtcaggagttcaacacaagcctgaccaacatggtgaaaccccatctctactaaaaatacaaagtttaactgggca

SEQ ID NO: 672671 - DNA, 595 bp, Homo sapiens
tgggttcaatgtggaatgggagcagtggagaagatgctcctaagtttacctggggacactgaagacaacctacttaaagtgaaagaaagttcctagtgctacattttaaatctctcccctcttgttctggcttaaaacattgttctcatcctcgagtgaaagctttcatgtacttgaaataaatacaattccgttttcctccattttcctttccatgcaaagtgagtataattcttttcatttccatgagcccattttcttttgtggcccttttgaattataccttgctcctagccaggatgtggaaaaagtagtaagagaacagggagtacggcacatttagtcaaaggctaggctggctgaaaaacacccttgactacttcaagagaaaacaggaaatttaagtgtaattttcttttttctcttaataggtggggaaaaagaaagyggaggccgggcgtggtggctcatgcctgtaatcccagcactctggaaggccgaggcaggtggatctcctgaggtcaggagttcaacacaagcctgaccaacatggtgaaaccccatctctactaaaaatacaaagtttaactgggca

SEQ ID NO: 672672 - DNA, 589 bp, Homo sapiens
aaatgttatcagctcatcagtaggatgacattttcttgttgatgacagcagtgatagcagccacatcttatgatccctcatctgtaaaatgaagaccagaaggcttccgaggtctcttcctaccctcaccttcccasttcagccatgacggctggccactacttgtagatgaaatgacatggacactgccttcggcatgggggattttgatgagcttgtgtgactcaatacactcaggccagagcgagtccccaaataaaggctctgtataaaataccttcgccttggtaactgaatcttctccttatgtaattgtgtatttctatcattttccatgaagaaattttaggacacggaggcacctaaaaaatgcctcgccttgcatttttcatcacaaaattctggctggaacttttcaagcaaactggaattattcttctcaaaattaggccattaacttgctctaagtgaaagtttgctgaagttattcagtagacaaggaagggaactaactgcccaactctgggtgtttacatctttttgttttcttttctcaattggaaacatttgcagctgaggggcctgtgtt

SEQ ID NO: 672673 - DNA, 589 bp, Homo sapiens
aaatgttatcagctcatcagtaggatgacattttcttgttgatgacagcagtgatagcagccacatcttatgatccctcatctgtaaaatgaagaccagaaggcttccgaggtctcttcctaccctcaccttcccacttcagccatgacggctggccactacttgtagatgaaatgacatggacactgccttyggcatgggggattttgatgagcttgtgtgactcaatacactcaggccagagcgagtccccaaataaaggctctgtataaaataccttcgccttggtaactgaatcttctccttatgtaattgtgtatttctatcattttccatgaagaaattttaggacacggaggcacctaaaaaatgcctcgccttgcatttttcatcacaaaattctggctggaacttttcaagcaaactggaattattcttctcaaaattaggccattaacttgctctaagtgaaagtttgctgaagttattcagtagacaaggaagggaactaactgcccaactctgggtgtttacatctttttgttttcttttctcaattggaaacatttgcagctgaggggcctgtgtt

SEQ ID NO: 672674 - DNA, 589 bp, Homo sapiens
aaatgttatcagctcatcagtaggatgacattttcttgttgatgacagcagtgatagcagccacatcttatgatccctcatctgtaaaatgaagaccagaaggcttccgaggtctcttcctaccctcaccttcccacttcagccatgacggctggccactacttgtagatgaaatgacatggacactgccttcggcatgggggattttgatgagcttgtgtgactcaatacactcaggccagagcgagtccscaaataaaggctctgtataaaataccttcgccttggtaactgaatcttctccttatgtaattgtgtatttctatcattttccatgaagaaattttaggacacggaggcacctaaaaaatgcctcgccttgcatttttcatcacaaaattctggctggaacttttcaagcaaactggaattattcttctcaaaattaggccattaacttgctctaagtgaaagtttgctgaagttattcagtagacaaggaagggaactaactgcccaactctgggtgtttacatctttttgttttcttttctcaattggaaacatttgcagctgaggggcctgtgtt

SEQ ID NO: 672675 - DNA, 589 bp, Homo sapiens
aaatgttatcagctcatcagtaggatgacattttcttgttgatgacagcagtgatagcagccacatcttatgatccctcatctgtaaaatgaagaccagaaggcttccgaggtctcttcctaccctcaccttcccacttcagccatgacggctggccactacttgtagatgaaatgacatggacactgccttcggcatgggggattttgatgagcttgtgtgactcaatacactcaggccagagcgagtccccaaataaaggctctgtataaaataccttcgccttggtaactgaatcttctccttatgtaattgtgtatttctatcattttccatgaagaaattttaggacacggaggcacctaaaaaatgcctcgccttgcatttttcatcacaaaaytctggctggaacttttcaagcaaactggaattattcttctcaaaattaggccattaacttgctctaagtgaaagtttgctgaagttattcagtagacaaggaagggaactaactgcccaactctgggtgtttacatctttttgttttcttttctcaattggaaacatttgcagctgaggggcctgtgtt

SEQ ID NO: 672676 - DNA, 625 bp, Homo sapiens
tctgcactttttgccacatgaggacagagcaagaaggcggccatgtgcaacctggaagagagccctcactagaacccaatgatgctgctgccctgatctgggatttccggactccagaactgtgaggaagaagtttctgctgtttatcgtagacccagtctagatattctgttagagccgcccacgctgactaacacgatgggcaagtgggygtgactccagtgctcattccatcaccttgcctctggcttggctctcagagattcttgcttgggccctaagaagaagggactctaataaaaaagcacaataaaaggagtgttttacaaaatttccttggctcattagggggcccaggtgacatttcaggggagggatattccagggcagctggaccctgggaggaatattgtgggtaccaggctgtagatgaaagaggataagacatgggggagtggtgccatttggggagggctggagtttctgtaattccaagtgacgtggcttgtggagatatgggttgcacatatcctagtatgcacatctgtacacacacatttatacatacaggactttaaaaggtgaggcagcagaatgctattctggatgctttttttcttctgta

SEQ ID NO: 672677 - DNA, 625 bp, Homo sapiens
tctgcactttttgccacatgaggacagagcaagaaggcggccatgtgcaacctggaagagagccctcactagaacccaatgatgctgctgccctgatctgggatttccggactccagaactgtgaggaagaagtttctgctgtttatcgtagacccagtctagatattctgttagagccgcccacgctgactaacacgatgggcaagtgggcgtgactccagtgctcattccatcaccttgcctctggcttggctctcagagattcttgcttgggccctaagaagaagggactctaataaaaaagcacaataaaaggagtgttttacaaaatttccttggctcattagggggcccaggtgacatttcaggggagggatattccagggcagctggaccctgggaggaatattgtgggtaccaggctgtagatgaaagaggataagacatgggggagtggtgccatttggggagggctggagtttctgtaattccaagtgacgtggcttgtggagatatgggttgcacatatcctagtatgcacatctgyacacacacatttatacatacaggactttaaaaggtgaggcagcagaatgctattctggatgctttttttcttctgta

SEQ ID NO: 672678 - DNA, 623 bp, Homo sapiens
tgagctatgattgtggtactccactcaagcctaggcaacagagggagattctgtctcttaaaaaataacatagatgatatacaccatgtggccatcagtcagccaatggatatgacacattggaatctccagaaccttgaacagtggtgctctttatcacaaggagacaaactgagaattcaggttggagttcaggttttcaggtagccggaagatggaractgtgtcatccattcattcatttaacatttttgagcactataccatattccagatcagcattctgggcactgagggattcaacaatgaatcagaaaaagtctccgccagaaggagctcatgttctgacagaacacacccatgcacacacacatcatccagtggtaaaacaggctatgaaggtcagggaaggcgtctttgcagaggtgacattgaatggagacttgaaagaagtagaggacagccatgtggaaatctggaggaagagtgttgcaggcaagaggaggcgccagtgcaaagctcaggaggcaggggtgtgattggcagatcggaggacttgaaagagagcagctgctgaagcagagggaagaggaagagtgccaggaatgagtcagacaaggtaa

SEQ ID NO: 672679 - DNA, 546 bp, Homo sapiens
  misc_feature 2, 3, 4, 5, 6, 7, 8, 9, 10, 11, 12, 13, 14, 15, 16, 17, 18,19, 20, 21, 22, 23, 24, 25, 26, 27, 28, 29, 30, 31, 32,33, 34, 35, 36, 37, 38, 39, 40, 41, 42, 43, 44, 45, 46,47, 48, 49, 50, 51, 52, 53, 54, 55, 56, 57, 58, 59, 60,61: n = A,T,C or G
  misc_feature 62, 63, 64, 65, 66, 67, 68, 69, 70, 71, 72, 73, 74, 75, 76,77, 78, 79, 80, 81, 82, 83, 84, 85, 86, 87, 88, 89, 90,91, 92, 93, 94, 95, 96, 97, 98, 99, 100, 101: n = A,T,C or G
cnnnnnnnnnnnnnnnnnnnnnnnnnnnnnnnnnnnnnnnnnnnnnnnnnnnnnnnnnnnnnnnnnnnnnnnnnnnnnnnnnnnnnnnnnnnnnnnnnnnncaatgtcttggagagtatttagttctcatgcttgagcacgtgtgcatgcatatgtgtttttgtgtacatggagcaagtggtggggagagaactggcagtcattgggtgcctgctatttgcctgtcacgatgcaacctctgctagttttgataaaatctcacatcattgtgaggaggtttggttatcacagatttatagatgaggacattaaagttccacgaggttaagtaagttgccccaggtcatacagccaactagcagtagaactgcagtttgacatgtgctgtcacactgtgatttttttttttaactgtattgccccagtgagaggcttctgcatagggtyatcaggagttccacagatacttggttaacatagttgtcttacatttatctatctaaaatattattaaaaaatcatccaccccaaatatgctacattcca

SEQ ID NO: 672680 - DNA, 623 bp, Homo sapiens
tttaaaaataacttaacgagtataattgtattgtttataactcaaaggataaatgcttgaggggatggatactccattctccatgatgtgcttatttcacattgcatgcctgtatcagaacatctcatgtgtcccataaatacatacacctactatgtacccacaaatatwaaaaaaaaattttggccgggcgcggtggctcacgcctgtaatcccagcacgttgggaggccaaggcggacggatcacaaggtcaggagattgagaccttcctggctaacacggtgagaccccatctctactaaaaatacaggaaaaaattgctgggcgtggtggctggcgcctgcagtcctagctactggggaggctgaggcaggagaatggcgtgaacccaggaggcagagcttgcagtgagccgagatcgcaccactgcactccagcctgggcaacagagcaagactccatctcaaaaaaaaaatgtaaaagatgtaaggtaaaatactaaaggtaaccactaaaataaaagaaatacggtagataacttctgaacccatgaacaaggtaaggaagaaaaagaaaattcaatttagaaaaatcaagaacagcaacaattcagtctgacaa

SEQ ID NO: 672681 - DNA, 623 bp, Homo sapiens
tttaaaaataacttaacgagtataattgtattgtttataactcaaaggataaatgcttgaggggatggatactccattctccatgatgtgcttatttcacattgcatgcctgtatcagaacatctcatgtgtcccataaatacatacacctactatgtacccacaaatattaaaaaaaaattttggccgggcgcggtggctcacgcctgtaatcccagcacgttgggaggccaaggcggacggatcacaaggtcaggagattgagaccwtcctggctaacacggtgagaccccatctctactaaaaatacaggaaaaaattgctgggcgtggtggctggcgcctgcagtcctagctactggggaggctgaggcaggagaatggcgtgaacccaggaggcagagcttgcagtgagccgagatcgcaccactgcactccagcctgggcaacagagcaagactccatctcaaaaaaaaaatgtaaaagatgtaaggtaaaatactaaaggtaaccactaaaataaaagaaatacggtagataacttctgaacccatgaacaaggtaaggaagaaaaagaaaattcaatttagaaaaatcaagaacagcaacaattcagtctgacaa

SEQ ID NO: 672682 - DNA, 623 bp, Homo sapiens
tttaaaaataacttaacgagtataattgtattgtttataactcaaaggataaatgcttgaggggatggatactccattctccatgatgtgcttatttcacattgcatgcctgtatcagaacatctcatgtgtcccataaatacatacacctactatgtacccacaaatattaaaaaaaaattttggccgggcgcggtggctcacgcctgtaatcccagcacgttgggaggccaaggcggacggatcacaaggtcaggagattgagaccttcctggctaacacggtgagaccccatctctactaaaaatacaggaaaaaattgctgggcgtggtggctggcgcctgcagtcctagctactggggaggctgaggcaggagaatggcgtgaacccaggaggcagagcttgcagtgagccgagatcgcaccactgcactccagcctgggcaacagagcaagactccatctcaaaaaaaaaatstaaaagatgtaaggtaaaatactaaaggtaaccactaaaataaaagaaatacggtagataacttctgaacccatgaacaaggtaaggaagaaaaagaaaattcaatttagaaaaatcaagaacagcaacaattcagtctgacaa

SEQ ID NO: 672683 - DNA, 471 bp, Homo sapiens
tgttttaccaagagaaaatgaacttagttctcccatagttttagtaccaatctcaacaatgatgggactctgctgaaactatacttcttgctgctctaaactgatcatctacagctccaggtgtaattaactcatcccttattccttttctcaaggctcctagtgagatattgcttatctcataaatgggatgatggttaagtyacattaccaaatacgtatctcacaatttagcctacatccacaccagagagactcttgcagctgagttgaataactgattccataaagcattaagatcaatcgctatagaaaagctcaagatttttttctttaccaaataagattatttctctattgacaatctggcttctactctcaggtctataatttactagttgtatgaccttgaacaagccacttactgtctttgagccaccatccccttaaattataattccaatgttatag

SEQ ID NO: 672684 - DNA, 590 bp, Homo sapiens
ggatcagctcctgcctggatcttaggtactggtcaatgaccacatgtgttgggcacggccctgggcagtcactcagagctgacccagctccttttggtcctgtctgtccagttctggcctcctcactgtagattcacagagctctgcccaggtcagactctccacttcctagcctgggcagctctcctctgctgtccatatcacactctccggtctttgtctatttttttttttgacaatccactyattcgagcagtttctcaaagaggatgctattggcattgtgataattaaatagtcataattaaatccctgcccccagatttccagcttaaccctacttcccaactccaccatccttgagaaagagggggaggtaccacttctctcgcagatcccaatgacagggtcatggtcacaaactctaagccttgtttccttcaaagttcagcttttgattctcaaaaactttttttcctctcaaaaaggctggtttctataacacaaaaatgtttggatttccccaattatcttgtttctgttatgtatttttaatatccatgtacaagcttagaaactgaatattaaaa

SEQ ID NO: 672685 - DNA, 590 bp, Homo sapiens
ggatcagctcctgcctggatcttaggtactggtcaatgaccacatgtgttgggcacggccctgggcagtcactcagagctgacccagctccttttggtcctgtctgtccagttctggcctcctcactgtagattcacagagctctgcccaggtcagactctccacttcctagcctgggcagctctcctctgctgtccatatcacactctccggtctttgtctatttttttttttgacaatccactcattcgagcagtttctcaaagaggatgctattggcattgtgataattaaatagtcataattaaatccctgcccccagatttccagcttaaccctacttcccaactccaccatccttgagaaagagggggaggtaccacttytctcgcagatcccaatgacagggtcatggtcacaaactctaagccttgtttccttcaaagttcagcttttgattctcaaaaactttttttcctctcaaaaaggctggtttctataacacaaaaatgtttggatttccccaattatcttgtttctgttatgtatttttaatatccatgtacaagcttagaaactgaatattaaaa

SEQ ID NO: 672686 - DNA, 648 bp, Homo sapiens
atttttaaaaattcatttgaattaattacaaaatatcatttttttgtgtcatccatactgaaacttattaaaaatatgcgtgttaaaaatttttaaataaaaggaagagaagaaattgagcaaagtttatgcaaggaaaggataaattaaaagtatccagaaataaacctggttttaaaaaggtatattataaggtcctacaggcttgtagaccacagatctggtttttcctaatagctacaagcaaattagaaaactcaaatcagtacatatacataaaaattcaccgattgttttgaacatgcattgagattcctggcactgagtcattagattagctcaaatcttttgaaaagagaatgttctgagatagtgacagacattgctctggttatacccacaatgaacattggtcggtgcttcaaaggcttttctatataaaaatcagctcgtgtaagccagtgcaataatggaaaaaatcagttctgttaaaaacccttctatgaagggtcacaattatgtggttcargatttgaactctcttttccaagggggattggtggactatagttatgtgtatctggttagaaatgtgtattcttacctgtaattattatttcacaggtgcaagttgttagctttgctaca

SEQ ID NO: 672687 - DNA, 852 bp, Homo sapiens
ctgtcttacagcctcctgattagctgggattgtaatcccatgattattacatgagccaccatacccatctgtaatacttttaaaataataatgtaatgataatatgagtgataaataacagctgttgattactaagtgctagctctgtgtgacatttgccatgcatttccttatttgatctttctagcagacctggtaggtaattgaggcttagagagattaagttgcctgaggttgtacaactaatgttagaatgagattgggacccacctggtgtgactccagaattagagctcttaatcaataacatcctgtaagagacttaaggcaggtgaaatgaccttttaagtttctgtttatccctgtcttcagtggttgctgttatcacactatggccagaaaagaagcaagtgtgtgctstgtaataaattctttctgttcttccatagaagacatcaggggtgaggtccacaaagttgcgcaaagcaaatgtaaagaaagtagttacttataaagaaatgtttgtaatgacctcaactcatatgcttgttgaactatgtcttaagatgtagaattagcgcttgtttattttcatgcttgccatttgaaactgctagaggtggagtcaaagatcttaaactctttgctcaatagcaaagtcaagaaataattgattcaagcagatactttatattttcaagctcaataacttaataaaataaatttgatctccttcagaagtccagaaaaatatcattataatgcatttgctgaaagacaagagtaacagtagttcataattggaatttttttgaaagctgactaccagctttgctgtcagggtataagaaa

SEQ ID NO: 672688 - DNA, 618 bp, Homo sapiens
ggtataaatgccaactctgcctcgtaaattgtataaaaacaaatgtgattatgaacttatgccaggcattatgccaggggtttgcattatcttatttaatatttatatcaattgaataaggtagtcttatttcattaacttgtccaaagttactttgttagggaatcttagtggtgagtttgcagctcacatctgtcagattttactcccaagtaccacttcacactgtcyggaataacttttcaaaaatgcttgggcacaggtaaacacctccaagtttgttttggaagcaaatgaatgtgttctggagttagtatatttgaaaacctacccaattccttgacaacttaaacccacatatcccactgaaaaaacaaaatagctattataccatatgcacacactaatggaattttgcaaataaattcaacaataaccataaaggagattcatacaataaataaaagaagtaattgattctaacaaaaaaaaacttagcactaaaatagatggctttctatgctttttaactcactaaatacaaaagttaataattattagcttgattaaaaagtctgctgtagtcatttgtaaagcaaacagttatgattatttttc

SEQ ID NO: 672689 - DNA, 649 bp, Homo sapiens
tcaatatgctatattgtaggcatacacctccastttcaagtggattataattacatttttaaaggaaatcataacatttttaaaagagaacttataaatattaattcaaactgatggccaattttttttctagtcaacacagcagttcaaccatgccagtctgcaggatggaaaatttcttcagctgaaaatagatatttcacaattgattgcctctgaatttccaaaacgttttcattctagaatttcatgtagaatcttaaatattccttcagatttttacaaacagtggcgtttaatcaaaattcgcgctgtacatatacagtgtttggaaaattgggcatataacatttgattgaattgaaccattcaaccagacaatggctttgtaaatcttggaatattcacagttctgttttgtaagtgttgagaaaaactgagttttatttgtttgttgatcattttactattttaaaaaaatgtagtggggaggggggaaccagcctgtcctaactagagttaaaacacatcccacaacttatgaataaatgacatctctgtcaggtgagatattcagctgcattcttaatttttaagcagttttctggccttttaaggttataaatttataatttcaaactcagatttt

SEQ ID NO: 672690 - DNA, 649 bp, Homo sapiens
tcaatatgctatattgtaggcatacacctccactttcaagtggattataattacatttttaaaggaaatcataacatttttaaaagagaacttataaatattaattcaaactgatggccaattttttttctagtcaacacagcagttcaaccatgccagtctgcaggatggaaaatttcttcagctgaaaatagatatttcacaattgattgcctctgaatttccaaaacgttttcattctagaatttcatgtagaatcttaaatattccttcagatttttacaaacagtggcgtttaatcaaaattcgcgctgtacatatacrgtgtttggaaaattgggcatataacatttgattgaattgaaccattcaaccagacaatggctttgtaaatcttggaatattcacagttctgttttgtaagtgttgagaaaaactgagttttatttgtttgttgatcattttactattttaaaaaaatgtagtggggaggggggaaccagcctgtcctaactagagttaaaacacatcccacaacttatgaataaatgacatctctgtcaggtgagatattcagctgcattcttaatttttaagcagttttctggccttttaaggttataaatttataatttcaaactcagatttt

SEQ ID NO: 672691 - DNA, 546 bp, Homo sapiens
tgcctgcattgtttaataatttatttwggaatttacatatgtagacataatgttactggcatttaattttttctcttaatgctcttacaagttttgataatgagttcacactagtctgacaaaatcaattgtgaactgaccgtacttgtcctccttaggagaatttatgtacaatagatataatttcttttttaaacattcagttgaatttgctagaaaagatatctggacctagggtgcttgttctgggaaagtaatctgcttacttgtttgtttcaagtttcaaattttatctttcatattagctattaaatgtgttattgaagtaaaatatacataatagaagctaaacatagatagcataaatgtacagcctattgtatcaaaagaatgtattcatacagcaagcttctccatcaagaaacagtgttttcagcacccctggagacctttctgtgcttccttccagtcacttgacccctaggaataccttcatccttctaacagaataggttatttttgcccactttttaaattttatataaa

SEQ ID NO: 672692 - DNA, 579 bp, Homo sapiens
gcaaagaattggaatcmgttcagatgtccttcaacaggtgacatgattaagccatctttgttacatatatattatgaaatactaaacaataacaaggagcacaggaacacatgcagagatctaaatatatatttgtatttgtgcattatatatgtaatttaactttgccaataaattaaatttataataaaaataaaaatataataaaaatagttgagaaagaaaagtaagtgacatgcaattagtataaaaagttaaatgtgatctaatggaaaaatggcttcaactagattaatcacaaaagtcattataatagaattaggtgttgagataggacttaaaaaatggaaacaaaaatcagagaacagacattgagtcttaatgaatttgttttcccaggatcactttgcccagtaattgaaggcttacaattttctccttttttaattgaaatctgtattaaaaataatctgaaaagtcatattctgaatggtatagaggaaagtaactgtagctgatgcatccatgaaagactacattacaaacctttacggccaatagcaatgattgtgcacctac

SEQ ID NO: 672693 - DNA, 625 bp, Homo sapiens
acacacacacacacacacacacacacacacacatatatacacacatgcacacgcacacacacacacagagatggggtggagagagagagagagagaaagagagagagagagatctcccttacagagaaaagaaaacaatttaatatatgccgatttcagaaaacaatatgaatccaaaatacgtttgtgctggttaattaccaaccataagaaaaattattctgatttattgggtttatcttctttaggttgtggtttgagactgcagctgagcctttggagctaaaattggagacatttttctatgatttctgtaatcaccttgggaaagagaaacaagtgggaagcgatattacttggctggaaatgaaattgagagaaggaaaaactttgaaagatctgaatctggatacacttggggattttgtggttagaattttgcctgttggttaggatctcacctgcttgtttgattctccttaagatgaamaagagtgttgcctccaaagctgagatagagcaagggactgacaagcactgagaatgtgatgtgtcagaggccatgcaaactgcaatagtagacatgcctgaaaaaacacttcacgtctttccacccaggatggtg

SEQ ID NO: 672694 - DNA, 1112 bp, Homo sapiens
atttgaaagtatgagataatatagtgcaaagataattccataaattatgtggtaagtacagtaaactttctgcgattatggaagataggatcttgtttcagctacctaattgaaatctattgcatcaaaaggagccacaaaatagtataacagaaaactggaaataattaattcagggcaatggagtttctgaaaaatgtaggtgaggattctaaagagaaagcaaaacataaaaaagtaagagattggatgtcatgccatccaagataaaaatatagtgtcctttactgttacttatgaggtcatagttgacctttagacagttccaatgtccacgctatttcaggtttgttctaaatctataggatttggagtagaattggccactgcaaaatattagactttctttccctctaaatctctaaatttcaggcatacttttaggaacaaacttgttatgattaaatggtgaaagatggcttaatgtgtaatatcaacagcattaaaactttttattatactgctaaatgtggccttaaagagaaacagcattcttcattttacatattgagcaaactaaacttagaaatcataaaggctgcatgtgaaaactctagacacaacaggactctgtttttatactgtagcrtctccattactccataatcgcccctcataagaatacttaccatggcatagtcaagtataccaattttgggagaggttttgaaagaatcaacatacaacaaataaaagcgaagtactgcagatgaaattggaggacctaattacaatcactttgacaatcagctgtatgtgctctttatttgccagtgtacctccacacgtactgtcacagggctttgcctatccagctgttcaacaaaatgcccacagaattgatttgctgtgtttgaaatttccattaatttgtcaacactgcttatacttctttatcccagaacctgcagaggttctcagaatgaaataacattaagcttagaactggtgggaagaaatggtatttgcctcggtttaaattatttgccctaatatcagtgcatctgtgtcttatgaaatcaacaaaagagctctgttttccctgttgctag

SEQ ID NO: 672695 - DNA, 1755 bp, Homo sapiens
  misc_feature 1259: n = A,T,C or G
gaggcatatttttaaaaatgtatgcaaacaattcatgttaaaatacatgtcattagattgtacatataacgaggtgacctacactagtatggagtttaagaatgacttcttgtgaagggatttttaaagagtaaaggtaaagaaaaattagtccatggagagaagagaaaaagcatgcttggcagaggaggatttgaaattctggaaatacgaagcctgtatatgttaggaaatgaaggccttttaaaacagaatgaagtggatttgaagataatttgtagccatttaatacaaggttttgtaatgaaaagaggatgccattgtaaagtttacagcaagaccatactcttmcctaaatcatagttgtaaagattgttccgatattcagtgatgaatcaaacgaaaagttacaagaaaggacagggaagataggtttacagcatattacacaggtttaagtgagaggatagtggctcaaactagtatcatgtcactctatatgaaaaacagacaaatttgaaaaataattcatggatggaataaagaaataaaaggtgattgtgtggagaaagagagatagcagtcactcccaaatatttgttatgagtttccgacagaagactactctttgttgagatttcaactaagttttccaggtatgtgtatcaatgacagaagatcagcagattaaattaatgggtgtcccatgaattaatttaaatattttgtttttgtatttccattgaggcccaagagtctgacagtaagcaaataattgcatatataagaatagaatttattaatagaaaagagaaaggataggagatctaaaattaagtattgttgaagcaaataagtgaatgcaagttctagatgatagagaaatttaaagcagaattttttatttaataatttttggtcctaaatagtaagcctgttaaactgctcaaattttcaaattttctttgacaaattaatcaagaaatatttacttaaaccatacaataagtgcgaagcacttcagaaaacagaatgaagtaagattcattctgttcaaagatgaaaaaggttattctctctggtctccttaattggcaccattccactatgtacatatgcatgtatgtgtatgtttgtatatgatgtctatatatctattattatacatctatacgtaattatccatattgtctacctatgcatctatctgtctaaccatctagttattgatacatcctagtgtgcagaaaatctgatanattcaatgatttcacgggtaatgtgtagaatttaaatgacacaaaaaatgagtgggctgatttcagctgcaaagacttaatgtgttctgtgatatggtttatttctgtggaattggttatttaaaaagtgttcacattgtttttacaaagccattttttttctgtatgctcttttgacaaaaaaggcaaagaaagtaatttaaaacctttaaaatgatgcatctattgcaatataattggtggcatcatactgttaagagcaacatcaaatctcatttcaggtcaccttttcatttagttcaaaatgaccttacagaatggctaccatactgtgcagagtcacatacagtaatatagcttttaaaatgctgtttatgtactatgttttatttttatttgatggaatgtcaattggatagcattgagtttacaaaaaaatgtgattgctaccaaaaatattcatcagaattcatctttacatattcatgagaaaaag

SEQ ID NO: 672696 - DNA, 606 bp, Homo sapiens
tttcttttacatgcatattaggatagacacataattatttaaattatgtagtatttaaatgatggtgagggttatggagaaaaaggggagaatagtaaaagggtcagttatatcacaatatagagtagcaatggtagttaaacttcattaaaaggaaagtatttgagttaggaattggcacygtatatgaaaaataatgtgaacaaaatcaaaagacaaatgaacatctagaaaaaagtcacaaataagatatatatttcgttaatatcatcaaatgacaattcaagaaaacagctctcaaaatatttttataaatgtatattaaaataattattttaacctacgaatttggcaacaatttaaagcttgacaaaatgaacatttaatactgtgacatattttcttactcagttgaaggaaacgcacattatcacacattttctggaagaaaagaagtcagaatatgcccacatatattaaaaatatcaatatactttaccagtaatttaacttataggagttcatcctaagaaatttgtcaaagattggggtttgttaaaggtttatgtacatggagaaatgagaaatctgaaaacaacccaaata

SEQ ID NO: 672697 - DNA, 606 bp, Homo sapiens
tttcttttacatgcatattaggatagacacataattatttaaattatgtagtatttaaatgatggtgagggttatggagaaaaaggggagaatagtaaaagggtcagttatatcacaatatagagtagcaatggtagttaaacttcattaaaaggaaagtatttgagttaggaattggcactgtatatgaaaaataatgtgaacaaaatcaaaagacaaatgaacatctagaaaaaagtcacaaataagatatatatttcgttaatatcatcaaatgacaattcaagaaaacagctctcaaaatatttttataaatgtatattaaaataattattttaacctacgaatttggcaacaatttaaagcttgacaaaatgaacatttaatactgtgacatattttcttactcagttgaaggaaacgcacattatcacacattttctggaagaaaagaagtcagaatatgcccacatatattaaaaatatcaatatactttaccagtaatttaacttataggagttcatcctaagaaatttrtcaaagattggggtttgttaaaggtttatgtacatggagaaatgagaaatctgaaaacaacccaaata

SEQ ID NO: 672698 - DNA, 589 bp, Homo sapiens
ctttgaaaaaaaattcaaggattagaagcacttttccctcccttcttaaatgggtaagcattcacatgaaaactgcctaatagtgttaaacaagtctcttagaggtaaaaagaaaaaaaaaactaaattgttaaatcaaactctttgcacagttttgggctagatcttgttttggaaatatttaccatcaggcaacaaaatctccatgcctatattatgcatgcaggaagactgtcatactatggtcatatttataactggatatgtgagtgagaaatatagttttaaggtgatgtttgccagaagggttacagaaaaatttcaaaatgcaattcaaaagaaatttcaagcttgcttaaaaaaaatgtgtgtttcagcattactgtctactaaccaataccatcttaaggtgaaattaataaacaatgctggtggtcrattccaatttaaagggaattagtaactgggacaaatacgaggaaatgagaagtcattttcaaacggaatatctaaagattaatgaatatatattcataaacttggtggctccagaggtacaatgcctgcttagcaaattaagaaaaaatac

SEQ ID NO: 672699 - DNA, 585 bp, Homo sapiens
ggctgctgagttgcaaaagacagcaagggggaaaaggtaattgcaataatccaaatgagagatgatgggatggtgggttgggtggtagcagtagaggagatggaacgaggtggttagactacagatacattttgaaaccaaagccatcagatttcctggtacattgagcgaggggtgtgaaaaaggggtgagtccaggatgatctggatttttggtctaagaaaatggaaggatagaattgtcattgattaaggaaatagagtaaaatacrgtattacagatttcaaactcgtggtggagaagtacttcttaaataaaactccaagtgcaaagcggaaagccaaactttgattactttgattatatcaatattaaggatttccattacatgaagaacaccatggaaaacgttgacaaactgatgaaggctggagaaattatttaaaatttctaaaattaataagtgattaatatctgaaatatatcagaaagtcttacaaatcaaacaataacaacaaaaacagaccataatttttttaaatggccaaaataagatcctcagaagagataaacaaaagacaatca

SEQ ID NO: 672700 - DNA, 648 bp, Homo sapiens
tagttgaactttgtgtataccttgtcctggtaaatttaatggacatctcatttatacagaagttmagagggccatgaagagttcagtccttctaacatttaaaatgtgttgaagcccaattttatggatttttgtagaacaaaggtttaaaataaaacctgttctattttatatctgctgcatttgatctagttatcccatgtaattcaatactgtgcagaattttatttctgaaatgatccttgaaaatcatatagtctgactataattttacaggtaagtcttggataactgaatgattctggatagttttaactacatgttcagaaaattggactaaataagataaattctgtgaaatatattagtcctcagaattctttgtaaatgcccaacaaatatggatgtgtttatatggatttattatagtagttgcacattgatgacctaattaacctaagaaacaaaatatcagtacataattatttatattataaacatatttgattttttaatatcctctcaacttgagttggcaaattacatctttacaaggaaagaaagggggaattttcttgatttatttatttatttagagatggagtctcattcactcagtcactcaggctggagtgcagtggcacgatc

SEQ ID NO: 672701 - DNA, 1333 bp, Homo sapiens
ctcttgagagggtgaaagagcttcaggtcattttaagctctggttgtagttatatgttctccctcaaataaaattccttgccaaaagsaaaagaaaactcttcctcgggaaaaaataatatataaataatatacagagcattaaattctcactacaatttctcatctacaaatatgacaatcaaaaacaacttggtatttttaagtaaatatataaataaatatatataaatatatatatgtattttatgtaattagaacaagctatatcataagataagtaacaattgacccttgaacaatatgtgtttgaaacgtgtgtccacttctaaggggatttttttttaatcaataaatttatatcaagtgtgcctgcctctcctgccttgcctttcaactcccctacctcttccacctatgaaagaatcaacatgatcaacccctgagtcaacaagaccaacttctttctcctcctcctcagtctgctcagtgtgaagaagatgaagataaagacctttatgatgatccatttccgtttaatgtatagaaactatattttatcttccttataattttcttaacattttaacaacatgaatagcgttaccttgctgtaatctaaacgtggtatataggccaggcgtggtgactcatgcctgtaattccagaactttcggaggccgagacaggtggatctcctgaagtcaggagtttgagaccagcctggccaacatggtgaaaccctgtctctactaaaaatacaaaaaatagccaagcatggtggtgagcttctgtaatccgagctacttgggaggctgaggcaggagaatcatttcaacctgggaggcagagattgcagtgagccaaggtcctgctgcttcacttcaccctgggtgataagagcgtaactttgtctcaaaaaaaaaaaaaaaaagtgatatataatacatacaaatacataacatgcaatatatatgttaattggctttatgttattagtaaaacttctggcagtaggcagtaggcagttagtagttaagttttacggagtgaaaagttatactcagagttttgactgtgcaggtcaaagtttcttaccctgtgttgctgaagagtcaatcgtatgtgtgtttgtgtgtgtgtgtgtgtgtgtgtatatatatatacatatacacataagaagcccattttatttaaaatagacataataatcccattttatttaaaaaacacctcaaaatgtataaaggaatattttaaagaacaagaataaaaaaatagacacacctacaggcatattgtaaaattaagatattcttcaagtaacagatttg

SEQ ID NO: 672702 - DNA, 2195 bp, Homo sapiens
tttagcttttagaggccacctatattccttgatcggccaccccttttttctatcagtccaagtactcgcttctatgtcacttctacaatctctctgttcttcttcctaactcctataagaaagtaatcccttgtaattatgttccaccaccaggataatctaggataatctcccaattataaaattcttaccttattcacatcagcaaagacctttttgccatttaaggtaacattcataggttctggggattagggcatagatttatctttcctatcatacttcctttctttctccctttccttcaagttgtttgtatggaaaaaagacatagcatcctttgtagtcttacgtaatgaataaaaagaaacaaaacttctcacctgcaaagattaaacttcaagattggtttgaagacaactaaggaaatgtgacatagcatcacatcacaacaaagataccagacagcttgctcagtagaagttcagagaagataatatgttttttacttgcctaatgtgttaaatacttgcatagaatttcatgtgctacaaggagactgatatgattatgaactttcctgattagaaaattaaggtccactgaggtcaagtggcttgcagaagcttacaaaatcttagaatgacaagggctgcaagtgaagtaagctgtcttcttactcagtgttttttatcattgtacttagagaatgtcagctgtgaaaagtgtagatgatttattcaccattgtgagaattactgtacaaatgattttaacaatgcaagcttttgaaatatacacttcttttttcaagagtccaagctaatacaaggcttagattttgaagcatatgttaaattgcttcttaaataacttggttttcagtctgcctaacttggattataaggaaaacttactggtaaatatttgataattatacaaatgtttaaaagagaacaaaaataaatcaattgtgacaccacccaccagataagtgcttttctttttttcttggcatgattaattcatatcctatctcccatggatttttttacaaatgcatttgagtttcgcttgttttattttgcaaaactgaaaatgtattgctatttgattttgtgtcattagacacaagattgttataaatatttgcttgttgttaaataattttattaggttagaaattattttattttcatgtgcatataagattatttttaagatataaaataaaaagtgaaattgcacactcagatgattagtgctaagatacaattttcaaagcgccaaccactatccattagaattactccagcagttatctgtgaatgcccatttccttggcatttcatcagtgttggatatatacttttcagtgtttcagttcaatgatctaagacactatttatttgttgttacaattttctgttatttggatgataaccataaagataaactttcttttgtctttttttattggttgttaagacttgtttgctcatatcctttgcacatttcttaacttgttgaatttttaaatcaatatgaatattaattaatattaccaaacctatgcaagttagtgtacagagctctcaaattggacattttgctgacagcagttaaaagcttctatttaattaattatttattattattttttatttttttcattatactttaagttcaggaatatatgtgtagaatgtgcaggtttgttacataggtgtagacgtgccatggtggtttgctgcacacatcaacccgtcatgtacattaggtatctctcttaatgctgtccttcccctagcatgccgccccctgacagkccctggtgtgtgatattcccctccctgtgtccatatgttcttattgttcagctcccacttatgagtgagaacatgcagtgtttggttttctcttcctgtgttagtttgctgagaattattgtttccagcttcatccacgtccctgcaaaagacatgaactcatcaatttttatggctgcatagtatcccatggtgtatatgtgccacattttctttatttagtccataattgatgggcttttggattggttccaagtttttgctattgcgaacaatgctgcaataaacatacatgtgcaaatgtgtttgtagtataatgatttataatcttttggctatatacccagtaatgggatggctggctca

SEQ ID NO: 672703 - DNA, 2195 bp, Homo sapiens
tttagcttttagaggccacctatattccttgatcggccaccccttttttctatcagtccaagtactcgcttctatgtcacttctacaatctctctgttcttcttcctaactcctataagaaagtaatcccttgtaattatgttccaccaccaggataatctaggataatctcccaattataaaattcttaccttattcacatcagcaaagacctttttgccatttaaggtaacattcataggttctggggattagggcatagatttatctttcctatcatacttcctttctttctccctttccttcaagttgtttgtatggaaaaaagacatagcatcctttgtagtcttacgtaatgaataaaaagaaacaaaacttctcacctgcaaagattaaacttcaagattggtttgaagacaactaaggaaatgtgacatagcatcacatcacaacaaagataccagacagcttgctcagtagaagttcagagaagataatatgttttttacttgcctaatgtgttaaatacttgcatagaatttcatgtgctacaaggagactgatatgattatgaactttcctgattagaaaattaaggtccactgaggtcaagtggcttgcagaagcttacaaaatcttagaatgacaagggctgcaagtgaagtaagctgtcttcttactcagtgttttttatcattgtacttagagaatgtcagctgtgaaaagtgtagatgatttattcaccattgtgagaattactgtacaaatgattttaacaatgcaagcttttgaaatatacacttcttttttcaagagtccaagctaatacaaggcttagattttgaagcatatgttaaattgcttcttaaataacttggttttcagtctgcctaacttggattataaggaaaacttactggtaaatatttgataattatacaaatgtttaaaagagaacaaaaataaatcaattgtgacaccacccaccagataagtgcttttctttttttcttggcatgattaattcatatcctatctcccatggatttttttacaaatgcatttgagtttcgcttgttttattttgcaaaactgaaaatgtattgctatttgattttgtgtcattagacacaagattgttataaatatttgcttgttgttaaataattttattaggttagaaattattttattttcatgtgcatataagattatttttaagatataaaataaaaagtgaaattgcacactcagatgattagtgctaagatacaattttcaaagcgccaaccactatccattagaattactccagcagttatctgtgaatgcccatttccttggcatttcatcagtgttggatatatacttttcagtgtttcagttcaatgatctaagacactatttatttgttgttacaattttctgttatttggatgataaccataaagataaactttcttttgtctttttttattggttgttaagacttgtttgctcatatcctttgcacatttcttaacttgttgaatttttaaatcaatatgaatattaattaatattaccaaacctatgcaagttagtgtacagagctctcaaattggacattttgctgacagcagttaaaagcttctatttaattaattatttattattattttttatttttttcattatactttaagttcaggaatatatgtgtagaatgtgcaggtttgttacataggtgtagacgtgccatggtggtttgctgcacacatcaacccgtcatgtacattaggtatctctcttaatgctgtccttcccctagcatgccgccccctgacaggccctggtgtgtgatattcccctccctgtgtccatatgttcttattgttcagctcccacttatgagtgagaacatgsagtgtttggttttctcttcctgtgttagtttgctgagaattattgtttccagcttcatccacgtccctgcaaaagacatgaactcatcaatttttatggctgcatagtatcccatggtgtatatgtgccacattttctttatttagtccataattgatgggcttttggattggttccaagtttttgctattgcgaacaatgctgcaataaacatacatgtgcaaatgtgtttgtagtataatgatttataatcttttggctatatacccagtaatgggatggctggctca

SEQ ID NO: 672704 - DNA, 2195 bp, Homo sapiens
tttagcttttagaggccacctatattccttgatcggccaccccttttttctatcagtccaagtactcgcttctatgtcacttctacaatctctctgttcttcttcctaactcctataagaaagtaatcccttgtaattatgttccaccaccaggataatctaggataatctcccaattataaaattcttaccttattcacatcagcaaagacctttttgccatttaaggtaacattcataggttctggggattagggcatagatttatctttcctatcatacttcctttctttctccctttccttcaagttgtttgtatggaaaaaagacatagcatcctttgtagtcttacgtaatgaataaaaagaaacaaaacttctcacctgcaaagattaaacttcaagattggtttgaagacaactaaggaaatgtgacatagcatcacatcacaacaaagataccagacagcttgctcagtagaagttcagagaagataatatgttttttacttgcctaatgtgttaaatacttgcatagaatttcatgtgctacaaggagactgatatgattatgaactttcctgattagaaaattaaggtccactgaggtcaagtggcttgcagaagcttacaaaatcttagaatgacaagggctgcaagtgaagtaagctgtcttcttactcagtgttttttatcattgtacttagagaatgtcagctgtgaaaagtgtagatgatttattcaccattgtgagaattactgtacaaatgattttaacaatgcaagcttttgaaatatacacttcttttttcaagagtccaagctaatacaaggcttagattttgaagcatatgttaaattgcttcttaaataacttggttttcagtctgcctaacttggattataaggaaaacttactggtaaatatttgataattatacaaatgtttaaaagagaacaaaaataaatcaattgtgacaccacccaccagataagtgcttttctttttttcttggcatgattaattcatatcctatctcccatggatttttttacaaatgcatttgagtttcgcttgttttattttgcaaaactgaaaatgtattgctatttgattttgtgtcattagacacaagattgttataaatatttgcttgttgttaaataattttattaggttagaaattattttattttcatgtgcatataagattatttttaagatataaaataaaaagtgaaattgcacactcagatgattagtgctaagatacaattttcaaagcgccaaccactatccattagaattactccagcagttatctgtgaatgcccatttccttggcatttcatcagtgttggatatatacttttcagtgtttcagttcaatgatctaagacactatttatttgttgttacaattttctgttatttggatgataaccataaagataaactttcttttgtctttttttattggttgttaagacttgtttgctcatatcctttgcacatttcttaacttgttgaatttttaaatcaatatgaatattaattaatattaccaaacctatgcaagttagtgtacagagctctcaaattggacattttgctgacagcagttaaaagcttctatttaattaattatttattattattttttatttttttcattatactttaagttcaggaatatatgtgtagaatgtgcaggtttgttacataggtgtagacgtgccatggtggtttgctgcacacatcaacccgtcatgtacattaggtatctctcttaatgctgtccttcccctagcatgccgccccctgacaggccctggtgtgtgatattcccctccctgtgtccatatgttcttattgttcagctcccacttatgagtgagaacatgcagtgtttggttttctcttcctgtgttagtttgctgagaattattgtttccagcttcatccacgtcyctgcaaaagacatgaactcatcaatttttatggctgcatagtatcccatggtgtatatgtgccacattttctttatttagtccataattgatgggcttttggattggttccaagtttttgctattgcgaacaatgctgcaataaacatacatgtgcaaatgtgtttgtagtataatgatttataatcttttggctatatacccagtaatgggatggctggctca

SEQ ID NO: 672705 - DNA, 639 bp, Homo sapiens
ccatctgattctagtttgcccacttctgccaacctccatttcgatttgttcaaattctaaaagtatggaggtgcactgagcaggatgtcccatgaaaaggaagggttgactatttacaaatgcacataatccttcagtgtctatttgacatcctatttgtggcgtaaatagggataatctgacttattgactttttgtctgcctcgtattgtagaatttacatgtttattctttatttataaaaacattgtttcaaaaatattcagtcaatyatcaggtggtggcaatgccacaataagaaaatcacctgtctctgagaaatgccagctttcatccgcaatttacttcaaataaatgagagaagtggtgagatctttgtatagaaaatatgtgacaaattactcatgttgcttcagcctcaatggacataggttgaaaattcccaagaccgtttctccagaaagtagcagaaaagctggagtagtttgtactaatgcataataatgtctttctaattagaaacgtgaagattcagagacaaacacacacacacacccctcttttacacattgtatggtacatggagaactttgccaattgaattatgtctttattgctacctagcataaacaaattacc

SEQ ID NO: 672706 - DNA, 918 bp, Homo sapiens
caaaaacttcaaaaagaaacaagagtaatctgaaagataacaattattaattcctaagttaagcttatggcataggaagtacaaaggtaggacatatgatcaatatgattcggtaagttatcttatatatgaagcattaatagaaaatttttctaatatttcaagtttaagagtgtgtaagtttgctgacagagaatattgagtggccaagaaggcatatgtggttttagatgattgaacacaataagagataaaatagtccaccaggaaatctgaaacataggattggatctcatgaaagatattatgaatggatgggaggggacataattaatgctatagttacttgcagacaaaaaaaaaggaaaacaaaagaaaaaataaggatgcaaatgggagagcaacgaaatagaaaaatgaaccgcatttcgaagtgccatatcattggaggaaagacattttcaggtaagaaggagaaccaagccaaagatataaaatgaaatcaaaagggtcatgaaggaacgataaagaattttataaaggaaaagtactctgttggatmctgtttacatttaaatatttatttcttcttcaactttcacttagtaacaggtcctgagaaaataaatcattgtttaaaaaattaaagaagattttttctttttttaattttttaaaattgtttatttcaatctttttttgggaacaggtggtgtttggttacatgaataagttctttagtggtgatttctgagattttggtggccccatcaaccgagcagtgtacacagtaaccagtgtgtagtcttttatccctcgtcaccccacagcctttcccccaagtgcccggagtccagtgtatcattgttatgcctttgcgtcctcatagcttagctcccacaaatgagtgagaacata

SEQ ID NO: 672707 - DNA, 918 bp, Homo sapiens
caaaaacttcaaaaagaaacaagagtaatctgaaagataacaattattaattcctaagttaagcttatggcataggaagtacaaaggtaggacatatgatcaatatgattcggtaagttatcttatatatgaagcattaatagaaaatttttctaatatttcaagtttaagagtgtgtaagtttgctgacagagaatattgagtggccaagaaggcatatgtggttttagatgattgaacacaataagagataaaatagtccaccaggaaatctgaaacataggattggatctcatgaaagatattatgaatggatgggaggggacataattaatgctatagttacttgcagacaaaaaaaaaggaaaacaaaagaaaaaataaggatgcaaatgggagagcaacgaaatagaaaaatgaaccgcatttcgaagtgccatatcattggaggaaagacattttcaggtaagaaggagaaccaagccaaagatataaaatgaaatcaaaagggtcatgaaggaacgataaagaattttataaaggaaaagtactctgttggatactktttacatttaaatatttatttcttcttcaactttcacttagtaacaggtcctgagaaaataaatcattgtttaaaaaattaaagaagattttttctttttttaattttttaaaattgtttatttcaatctttttttgggaacaggtggtgtttggttacatgaataagttctttagtggtgatttctgagattttggtggccccatcaaccgagcagtgtacacagtaaccagtgtgtagtcttttatccctcgtcaccccacagcctttcccccaagtgcccggagtccagtgtatcattgttatgcctttgcgtcctcatagcttagctcccacaaatgagtgagaacata

SEQ ID NO: 672708 - DNA, 1432 bp, Homo sapiens
tcctgcgccatttcatttcatatcttgctataacagcagaaaccagcctgaatataaagagatgctgtgtgtatgtgtgtgtgtgtgtgtgtgtgtgtgtgtaaggcttggccttcccttctgaccctctatttgatctgctgtgagggatggggcaaaccactcaagctccctgtgctctgggatgtggggaggatttcccagtcagtgacagagtctgagtgatttgtaggcatttgtgtgctcattgtcttgccctctaggcatctgcagtgktgtatcaggagggcaagagggttccaaatagatttaatattccttgtatgagcttcgaccatctgcccgccagctcacagtgtgagcataatgtatgtttccagaatcaaacacaaagagcttatttttttccctttcttttcattttttttcaaagccttttaatttagatcatttgtgttttctttgtcttttggaataggttactagggtcagcctttctgcaattatatttactctcattttgttttctgatgcccctggcatatttaaattaatggtttcccctttcctaatctccatctagcccccacagagtgtatcccttaaataaacatctataaaatcttgtgatggagcctatgagatgattggaattaaatgacaggtttttcccagtgggtgcagattagaccatggatacctgaaaattattcccaggctaaatctgagtgctgttttcctgagggatgaaactttggcttttcttcctccttcgagagaaatgttgtgactgttgatgggcctattctagtagctgtagctcattgtacgaccagagttatttgggtattgggtctttgaactaaaatccctttctcattttttaaaaggtaattgacatgagggatcttgagctcttaaagagaggaatataagctgagtcagtcaaatggagtttttatcttaaaatctcacttaggttagaaaaatttggtagcagaatttggaaaactctttaatttacatgaaagttgggtggggataccactgctattctcctagcattattcagcaagcaggtgtgggcaggcgtgacaacagtgaagtaaacttggaatactttcttgtgaaggcttaagggcatagggatcaaaattcttcaggtctgcttatttttattctgtcagcaaaattggcatggttttgcattagacagtgcataattaaaactgcttcctctttaaactcattccatatttccctctcaccctatggtgaggctgagagagcctgatcccttgctgctcttctagtctaaggatgatgggatgccaggtgaggatgtgggtatggaggactgcctggatgcctattcaggctccatgtcttcctagctctgtgaccctgggaaggtaatcagcatgtcatgctg

SEQ ID NO: 672709 - DNA, 602 bp, Homo sapiens
tttccccttctcctggagctccttcctcaaccattaggcacccagacccattcctgtcaaaaacagctatcagggaaagtctgatatcagtcatttttccataaatgcaaatgtatgctctcattcattcaacaaatatttaataagcaaattattttaggcttgacagtctgctggatgttgcagacatggaagtataacttgmagtctgcacagcatgatacgtgccagaatggagacatggattggtatcagagtattggggagttgctgctaagaagtgtatcttcaattagtgattgaaagtttttgtctcttgttaaatgcatttcacacatcagtaaataggcaaaaaagataggggaatggaaggaagccccacgcccctaatccataatcttacattgtagctacagagaagtcaagcatttgggccattttctatcccacctacatatagagctggcctgtggccatggcctgcagaacaaatagaaaacaagcagcaaacagcaaagcaagcatctgctcctgaaattcctgctgtgcctaaaggatgtttttgaatttgcttgcatacgccacaaaaaaatgagatttcc

SEQ ID NO: 672710 - DNA, 602 bp, Homo sapiens
tttccccttctcctggagctccttcctcaaccattaggcacccagacccattcctgtcaaaaacagctatcagggaaagtctgatatcagtcatttttccataaatgcaaatgtatgctctcattcattcaacaaatatttaataagcaaattattttaggcttgacagtctgctggatgttgcagacatggaagtataacttgcagtctgcacagcatgatasgtgccagaatggagacatggattggtatcagagtattggggagttgctgctaagaagtgtatcttcaattagtgattgaaagtttttgtctcttgttaaatgcatttcacacatcagtaaataggcaaaaaagataggggaatggaaggaagccccacgcccctaatccataatcttacattgtagctacagagaagtcaagcatttgggccattttctatcccacctacatatagagctggcctgtggccatggcctgcagaacaaatagaaaacaagcagcaaacagcaaagcaagcatctgctcctgaaattcctgctgtgcctaaaggatgtttttgaatttgcttgcatacgccacaaaaaaatgagatttcc

SEQ ID NO: 672711 - DNA, 611 bp, Homo sapiens
aaaagcaacaaaaaaaatacagaaacaaatgaacaaatagagtccttttattagaacatagacaaggaatctgcacattccttgaatttaatcaagagatagtgtgtatcaaataaatatatctgtaagttctttcaattttcactatcacgaatttctgtataatgaggaataactctatcattaaagaataaatggacattaaagcaaggcctattatgaaataatatttaattaagattaaattgagacatcaatgccagccccattattcctgtaagacaactctcaatattcaaaggcaaagagtctttgctgccttgaacaaattatgcaacctgctaagagagcagaactcaatttaaaagcaaagatggagagatgtggtacactcatcatgtttttttgatcagtgtctgcataaaaactgaaggaagggagttgaatcccacagattcctcctttgatgtatttccttgtctaaaggatgccccacctgtagcagagtcttggtactatttctgtacacatccatttgtcactaccagaayagagctgactggattatcaaatagtgatgacaagaattctctgattcaccatcatgaggg

SEQ ID NO: 672712 - DNA, 641 bp, Homo sapiens
agttctgcaacaattcttttctaattgcgcacgtttcctacctgtgttgccaactctaatagttctagcatttacttgcacttctgcattattcttagaattttctaagagccagatactttttaaaaagaaaatagtaattattggcttcactccaagatcataaacatcaagttcaagctcccctgcctggtaccgagactcatttacaagaagatccagacaactttcaaacatcatttccatgacctatccaatacacaccctctaactcaccttgtgtgtcctgtctcyaagcctatgctaaagatgggccttcaccctggaaacacttatgtccatctgttcaaatcttacttgttcttcaagattaaaaccaaatgccatttcctccataaaaacacttctcaaaattaatctctacctctcatgtgttcccagagcactttttatgggaaagctattttattaaaatatttatgactgttttgacttttgttatttatatgtattaagttcttaaaggaaagggaccatgtcttaatcatgtctaaatccagaaatgtgcctagaacagtgtgctacaacctattatatataactttcaaacccgaatttaaaagaaaaaattaattgacatg

SEQ ID NO: 672713 - DNA, 622 bp, Homo sapiens
agttagttcactcctttctactcttcaaatttttcttatcacataattgatgtaatacctatgcgagtgcattcagtagagaattccaaggcagtgcacctcaacatgtatgaacattttggtttataagaatcatctctgggtcttattaaaatgcagtttctggttcagttggcctaggatgggacctgagatactgcacttctagtaagttccagttgaggctaatactgctagttggggaccacactttgagtagcaaggttttaaaggataagagtaatgtagagcctgggtttttccttctttccccaccaggggaaataacattctaccagctggccatctgaagacagaccttggtggagactgaggatgaggatatgcaattatactagaattaaatccccaggagattagggtccttttctgcatgttccccattcctggcacagagtcagagcttaataattattgaaggaagagaatctgttctttcttagaaaagtaaayaatagttcataacaacattctgtcatgtattcccagtcctgtggctacagtggaatccacatatcaaggtaaattccttttttgcacagtaacttgtatgaaggggatg

SEQ ID NO: 672714 - DNA, 679 bp, Homo sapiens
atatcataaatcaaattgtacacattaaaatgtgcaaaatttatgttgagcatgtttcaataattctattttaaaacaaagcaaaacagaaaactccaccataagcaccattatctatgtacctggaccttctgttccaggccacctcataggtgtcactggttgtaagaattggttggcaccaggtcaagggctcactgatgaatttatcagctgtgggtagagtatggtgatgtatccatctrttgtcagcttaaaaacttctattaagtaattgtcttaggctgaagggagctgttggtttgcaggcattctgaggctggacctatgtagtacaccgtctaatataagagaaaatggagatgttaccaagaatagggataaaataagctaggcaactctgagacattccttgccatctgttgccctttaggctggttgatgtgtctggttcagttgtgaccctttcacacttctctagcacatccaatactctggtagtttcaagtttcacaatccacattccaaaaaaattagatgttgcttagactttggattttggtttgaaatatgatgctacattttatcagccacactttaacatctggctaaggctactaattaatactcaaggaaatttataattgttcagtaggggaaaaagaatgtaagttaacca

SEQ ID NO: 672715 - DNA, 990 bp, Homo sapiens
taaagataagaccaagatcctatcaagtttggattttagagaagcctcccttcctggcttgcacatggccaccttctcgctgtgtcttcaatggcctctgctctatgcatgtgtagtgaaacatmtctgatgtatcttcctcttcttaggaggacaccagtcctattggattaggaccccatcctcataacctcatttaatcttaattatctcaccaaagagcctttcttcaaatacactcacattgggggttatgaaataaacacaaaaatttgggaggaaataaatcaatctgtaacaattgcctttataaactaggtaatccctgttacttacactactatcagccacaaaagaaaaaggaaaaagagaaggaacatctctatcaaataacagaaaagaacggttcccaacttctttcatgaggccagcataaacttaatagcaaaacctaacagagtcattaaagtaaaatgatagtacaaaccaatcttatgcataactgtcaaagcaaaattccactccaacaaaaacagcaaactgcattcagcaatacattaaaaacatatactcaaaacactgcaagattagttaacatttaaaaatgtgtaataattcaattcattgaaaataaaaaatatcaacaggtcaatagatggaataaaaacatatgaaaaatttcagcatggatttatgattttaaaactcagcaaactataaatagaaggaaatttcttactctgatagtgattatgttagttgatggagaaatgttgaaagcttttcctttgaaattggaacaaaaggacaataattatttaacattgttttggagatcttggcaaatgcaaagggcaagtaagtgaaacaaaagggatagtcaccagaaataaagaaataaaatgttcattattcgtggagaacttgattatgttgtagaaaatccaaaatagtttactgagaatgatgatttccaatttcatccatgtc

SEQ ID NO: 672716 - DNA, 990 bp, Homo sapiens
taaagataagaccaagatcctatcaagtttggattttagagaagcctcccttcctggcttgcacatggccaccttctcgctgtgtcttcaatggcctctgctctatgcatgtgtagtgaaacatctctgatgtatcttcctcttcttaggaggacaccagtcctattggattaggaccccatcctcataacctcatttaatcttaattatctcaccaaagagcctttcttcaaatacactcacattgggggttatgaaataaacacaaaaatttgggaggaaataaatcaatctgtaacaattgcctttataaactaggtaatccctgttacttacactactatcagccacaaaagaaaaaggaaaaagagaaggaacatctctatcaaataacagaaaagaacggttcccaacttctttcatgaggccagcataaacttaatagcaaaacctaacagagtcattaaagtaaaatgatagtacaaaccaatcttatgcataactgtcaaagcaaaattccactccmacaaaaacagcaaactgcattcagcaatacattaaaaacatatactcaaaacactgcaagattagttaacatttaaaaatgtgtaataattcaattcattgaaaataaaaaatatcaacaggtcaatagatggaataaaaacatatgaaaaatttcagcatggatttatgattttaaaactcagcaaactataaatagaaggaaatttcttactctgatagtgattatgttagttgatggagaaatgttgaaagcttttcctttgaaattggaacaaaaggacaataattatttaacattgttttggagatcttggcaaatgcaaagggcaagtaagtgaaacaaaagggatagtcaccagaaataaagaaataaaatgttcattattcgtggagaacttgattatgttgtagaaaatccaaaatagtttactgagaatgatgatttccaatttcatccatgtc

SEQ ID NO: 672717 - DNA, 990 bp, Homo sapiens
taaagataagaccaagatcctatcaagtttggattttagagaagcctcccttcctggcttgcacatggccaccttctcgctgtgtcttcaatggcctctgctctatgcatgtgtagtgaaacatctctgatgtatcttcctcttcttaggaggacaccagtcctattggattaggaccccatcctcataacctcatttaatcttaattatctcaccaaagagcctttcttcaaatacactcacattgggggttatgaaataaacacaaaaatttgggaggaaataaatcaatctgtaacaattgcctttataaactaggtaatccctgttacttacactactatcagccacaaaagaaaaaggaaaaagagaaggaacatctctatcaaataacagaaaagaacggttcccaacttctttcatgaggccagcataaacttaatagcaaaacctaacagagtcattaaagtaaaatgatagtacaaaccaatcttatgcataactgtcaaagcaaaattccactccaacaaaaacagcaaactgcattcagcaatacattaaaaacatatactcaaaacactgcaagattagttaacatttaaaaatgtgtaataattcaattcattgaaaataaaaaatatcaacaggtcaatagatggaataaaaacatatgaaaaatttcagcatggatttatgattttaaaactcagcaaactataaatagaaggaaatttcttactctgatagtgattatgttagttgatggagaaatgttgaaagcttttcctttgaaattggaacaaaaggacaataattatttaacattgttttggagatcttggcaaatgcaaagggcaagtaagtgaaacaaaagggatagtcaccagaaataaagaaataaaatgttmattattcgtggagaacttgattatgttgtagaaaatccaaaatagtttactgagaatgatgatttccaatttcatccatgtc

SEQ ID NO: 672718 - DNA, 647 bp, Homo sapiens
ttggtcagggtggtcttgaactcccaacctcaggtgatctgcccaccttggcttctcaaagttctgggatcacaggcatgagccaccgcgcccagctcaagtcttttgttttaagccaataaaaatccactatggtggccaggcatgaggaaagatgtgaaagtgtaaattggactactaagcattttaaaacaagatttcakaaaaaaaagaaatgaaaaggcagagtattggatgatcaatgtagatacaggccatgcgatgtaatagaagaaggggaaaaaatgctctaagaacaaaacagtaagtgacaactgttatttggccattctcaggcctgagtattcccatttgtcccctattagggatgtgttgaatgttaactgttgaagaattttgaagaagagggcaaacaggcagtcctaacatttgggtcaatgtggaaaaggacagaggaaaacaaagaaagaaaaaaaaataagaaagaaaatgacaagagaccactcagttatttaaatatacttctataaaacatagcgataaaaaatgacataaagatagacaaatttataatgattttgaaaagaacactttctctatttatcattgataaacttttttaacattcttccattagatattccaaa

SEQ ID NO: 672719 - DNA, 601 bp, Homo sapiens
gattcaaaaatctattacattagtataacctagtctactttttaaagaaatcattcttggtaggcrcagcggctgatgcctgtaatcccagcagtttgggaggctaaggtaggaggattgcttgaggccagacgtttgagaccagcctgagcaacgtagtgagaccccagctctgcaaaaattggaaaagttattcaggtgtagtggtgtgtgtctgtagtcttagctactcaggaggctgagttgggaggattactccaacccaggaggttgaggtcacagtgagcagtgagtgataatggtaccactgcaccccagccagggtgacagttagaccttgtttctaaacaaaacaaacaaaaaagcagggcaggaatcattctttctaaaagagagttggaccaggagagggattaggggtgaatggataggtgtggagggatagaacacatctaaaaaacacttgtatatgtggagttgcttgataaaataaaagcttattctgagaaaaataaatgaaagattagtaattcactgtgcaattctgtatttccagtgatttatatgttccctgtttattttaatagtagtttactatcat

SEQ ID NO: 672720 - DNA, 601 bp, Homo sapiens
gattcaaaaatctattacattagtataacctagtctactttttaaagaaatcattcttggtaggcgcagcggctgatgcctgtaatcccagcagtttgggaggctaaggtaggaggattgcttgaggccagacgtttgagaccagcctgagcaacgtagtgagaccccagctctgcaaaaattggaaaagttattcaggtgtagtggtgtgtgtctgtagtcttagctactcaggaggctgagttgggaggattactccaacccaggaggttgaggtcacagtgagcagtgagtgataatggtaccactgcaccccagccagggtgacagttagaccttgtttctaaacaaaacaaacaaaaaagcagggcaggaatcattctttctaaaagagagttggaccaggagagggattaggggtgaatggataggtgtggagggatagaacacatctaaaaaacacttgtatatgtggagttgcttgataaaataaaagcttattctgagaaaaataaatgaaagattagtaattcactgtgcaattctrtatttccagtgatttatatgttccctgtttattttaatagtagtttactatcat

SEQ ID NO: 672721 - DNA, 1013 bp, Homo sapiens
tttaggcaagaagatatatgtgtatgcatttttggacttgtacacataccaggattcaataaagtatcatctattagtggagttttgaaattaacatcttcatttcattttcctttttctgcaccctgcaatcaggctttctttttcttccaccttgttccctgaagagtaggtttatgttgaatgttggtgttagtagcagcttgatcttctgttttgtgccttcttgtattctttttcctccttccttacccttctcctggttatatccaatacaataaagtcagtgtagatattcatgtcagcattgtgacattttaatattttttaaatttggttttatagctctgatgtttatatggctatatatgtctaacaatttaaaaatataacagctttaaaaaattatgttggctaaccaaaatatgttggctgagctctctttgcctatttaaagtaaatttattttggctagagtaaatgtatgtatgatgcttcataacatactaaaatatcatgaatttgggaaaataaatttaaagttgaaactgcatctgcttaaagatatttatgtttacattggacatttttacaaatgtctttagctttttaaaaataactcatgaattgattttttaaggcatctrtatctaagcttacattgtttattccctgtcagtttcgatctggcttttgtacttgcagtaatctgtaaagagagtgattatttatgcttggacataattctactggaaaaataagtctattctatacattttaaagaggatttatgtatcattttgcatttctagtagtttctaataatgacctagaacaacttgctagattacactagatttgaccatctttaacaatatttagataattgggaaattatactgtctataaaatattatgaaggaggctacatggagagaaggcatatctccttggaaatgatttccttcttaatacatatataaaatatgaccacattgtgctttgaattttta

SEQ ID NO: 672722 - DNA, 889 bp, Homo sapiens
tggcttaaatgaaccagaaaactcaaactcaaaactcatctcacactgccagactttacacttttttttccctgacataataaatcacacttgaacagcccagatttgttcaaaattcaaatttcatgaaatcactaaggttttgaaagtttaatgaaatctgctgtaaacctaaatcagatatggaaattcaaagtcagataaaatatcaataaatttacacagtaaatatggtgtaaactatgagtaaatcatctttgcttatttttatttctgcaaagaaaacttatggatagtataattatcacaggaaatttaaatgacagcattgtaaaaattaaaacttgagttgtccatgaagcctttcaaaattgtcaggatgaaataaaagaggaaaaaaaccagcagagattcttttcttcctctttcttggattaccatgaagttttaaatgatccttttagccactgataattaaaaatctagatttttatgtccacatgaaagtgataaaggagtcaaagtagcaaagaagaaaaamagtatgaaaattcttaatcactttgttggataaagatacaaaaactgcctataaaatattcttaatgcatttattttcagaattttaaacttcaactccagactgtagcagactgagtattccattgaatggagaaggagctggatgaagagataagaaaaaaaagtcttaaaaatatggtagcaaaaaagccatctggtgtgaacagcagttgaatgagtaagaaaactgtgaatcttaaaaagaagctttatttaaatgggggttaggttttgagggtttaacaacagtgagagttaaaaataataaaagaaaccatcaagaactttgatctgttagcactgaaaa

SEQ ID NO: 672723 - DNA, 613 bp, Homo sapiens
gtggtagtggagtgcacctgtaatcccagctactcgggaggctgaggtaggagaattgcttgaatctgggaagcggaggttgcagtgagccgagatcatgccactgcactccagcctgggcaacagagtgagacactgtcccagaaaaaaaaaaaaaagtagaaggtggggaaaaaaaatcaaaggaaagtaagctccttaaggatgcttaagaatggtagtagagatattacatggcagaaaaaaagcagagtctgcaaaaactcatccctattcatcaattggaagttaatgactccttgcaatgtttttctccctttttactcctccctattgctctttattctaaactgccaatactacaattaactccagattattcgtgaaaaagaagatcataaatttagagaatactaagtggatgatccaatgccaactggctttagtctttggatggcatcatattaaaattctctaacagcaagtgtaccttcctatttacattaaatgaccagaaaatgatttgcattctctattggaaggaatggcatgaaaaatggtccagaaacaaactgawaaaggaaagtaagtcctttctatataattaaccata

SEQ ID NO: 672724 - DNA, 622 bp, Homo sapiens
tgtcttaatgacctagctaggaattccagtataatgatgtctaaaaatggttatggacattcttacttcattcctaatcttaggaggaaaatgtcaagtttctcaccattaagtattatatcagttgcaaataatttgtaggcaatatttgtcaagttaaggatgccaatcatatcaagttgattgatggtgcttttcaggttaactgtaacctcattttcggccttcttgatctatcattactgaaagaggggatgtttatgtcttcacttataatagcaaaaattgttttccttcgcagttgtattagtttttgcctcacatatttttattcgctgttgttaggtgcaaaaacatttataattgttatggctacttggagaacccactcttttatgtagtgcgcctctttatccatgakcattttttcttgttttgaagccactttgtctgaaattaacatggttgttccagctctcttttgattagttttagcataacatatctttctccacccttcatgtttttttttgagataaaatttacatagcataaaattagcaattttaaagttatttaaagcaatttagtggcatttagtctatcaacaatgttgtgcaac

SEQ ID NO: 672725 - DNA, 676 bp, Homo sapiens
ttttgcacagagaaaatctcatttccatagaggtttggttcaatgtttctgaatgtgtctgatgactgaattgtgtccttagtaagaaattgrttatgcaaggtaaactttagcttcattaaacagtgtcctaattgtaattgtataatctatcagatgacacacagaagaaaaattaatgaattattaataaaggctaatgattttattctatattttacttcttcaatgctgtacttcaaaatgacaattagaggaattgaaaaggaaattgttagacaagtagaattgaaaattctacaagtaatttatacaaagttgtcaacactttcagaatatggtcatcagagaatccagagtcacccaacaggtgatttgtcttcatcatcatcctcactttttttttcattaacaaattctctcctttagtcatattgaaagcatcattcttgaaaacctattatatgtgaacattatgttagatgctacagttctagctgtgaatagaaagccatagtctcagccttcacagagattgcatttcagcagaagagccatattatcaaagtaataacttgaggacttattcacttaccatcatttctaatgaacaccaccagaagaacatataattggaggatctgattcattcaaggtatcagaatttctttgagaa

SEQ ID NO: 672726 - DNA, 682 bp, Homo sapiens
aggaactactgtagagccagtcttatggatagccatcaggaaccaagagagtttatcagtttatttcatctctctttctctctcttggaccatatgcttgtttttgcttatcagctgcattcttttctctctacgtataccagctggtttcttktgcttacatttatatttcattgtctcctcattagaaaggacatggatgtttgacagcctctctctctctttctctctctctcttttctctgtctcacacacactacaccacacatgtatacatatacatacatcatgatctcttcacattactttctacagataattgaccctgtttttttcttttaccaatcccaaatttctagtctaaaagcataataaatcaaaattatcttttcaagtcaaaccataggcaccgttcgtcatcctgcaaatggacttccctcacactatttaatcggggagttcagggagggagctgtggtccttcctgcggtgcagttcagaaggggttctggaaaacgtcctcaaaatgtgtctaaatcatgtattttacttgtaagactatttaagattaaagtgaaattattaggttatggcaaaatagaggcttcttattgaattcctgcgcatgaaaagaaaggttccttcatgggtatattagatatattctgcagcatagcaaatt

SEQ ID NO: 672727 - DNA, 682 bp, Homo sapiens
aggaactactgtagagccagtcttatggatagccatcaggaaccaagagagtttatcagtttatttcatctctctttctctctcttggaccatatgcttgtttttgcttatcagctgcattcttttctctctacgtataccagctggtttcttttgcttacatttatatttcattgtctcctcattagaaaggacatggatgtttgacagcctctctctctctttctctctctctcttttctctgtctsacacacactacaccacacatgtatacatatacatacatcatgatctcttcacattactttctacagataattgaccctgtttttttcttttaccaatcccaaatttctagtctaaaagcataataaatcaaaattatcttttcaagtcaaaccataggcaccgttcgtcatcctgcaaatggacttccctcacactatttaatcggggagttcagggagggagctgtggtccttcctgcggtgcagttcagaaggggttctggaaaacgtcctcaaaatgtgtctaaatcatgtattttacttgtaagactatttaagattaaagtgaaattattaggttatggcaaaatagaggcttcttattgaattcctgcgcatgaaaagaaaggttccttcatgggtatattagatatattctgcagcatagcaaatt

SEQ ID NO: 672728 - DNA, 682 bp, Homo sapiens
aggaactactgtagagccagtcttatggatagccatcaggaaccaagagagtttatcagtttatttcatctctctttctctctcttggaccatatgcttgtttttgcttatcagctgcattcttttctctctacgtataccagctggtttcttttgcttacatttatatttcattgtctcctcattagaaaggacatggatgtttgacagcctctctctctctttctctctctctcttttctctgtctcacacacactacaccacacatgtatacatatacatacatcatgatctcttcacattactttctacagataattgaccctgtttttttcttttaccaatcccaaatttctagtctaaaagcataataaatcaaaattatcttttcaagtcaaaccataggcaccgttcgtcatcctgcaaatggacttycctcacactatttaatcggggagttcagggagggagctgtggtccttcctgcggtgcagttcagaaggggttctggaaaacgtcctcaaaatgtgtctaaatcatgtattttacttgtaagactatttaagattaaagtgaaattattaggttatggcaaaatagaggcttcttattgaattcctgcgcatgaaaagaaaggttccttcatgggtatattagatatattctgcagcatagcaaatt

SEQ ID NO: 672729 - DNA, 832 bp, Homo sapiens
gagctaatgcagtgtagtgaagctgcacctggagtcacccaggatgctttaaaaaataataaggccagggtcttaatcccctagatattacgttgtaattgagttgggatgttgcctgaacactgagattctttaagtgccccaggtgattgtaatgttgagccaaagctgagaactaccattcacaattgcccatttcttaccctctgcttggccttaaccaaacttcagagaggcttttctcctccccaaaggacattgaactttaccttactctcaattcaagtatgcacccttatcagcttatctcaagaattgtctaaccgcagcaagacacttccagccaaaccaggtcatgcattctgcttactatgcctcatctactcaacctaactttgctgctgaccttccccaccaccatayagaagaaaagccatttttttttctgtttaattttgagttgtttgcagatttctgagatgagagcattctccctattgcaatagtctttttaagtagagtttcttcttatctaacactggatttgtttttatttgacaactggtataaggcaagaaggtcaggacactacaaatcagtttttataaagcagaaagaagggaagaatcagaaaaagaggctgagaattgatgagcagaggggttggaggaagagtacaagaatgagaaatgtggatggaataacctggtatgggattccaaactttacagtaaagttgtttggaatgtacatattgaaattcttctttgtatctcaaatggctacctgagtgtgtgctgttctgatgaggacatgacaagaatggaaggaa

SEQ ID NO: 672730 - DNA, 641 bp, Homo sapiens
aaccagatgattgtagctaattcattctaggaagtaaggttttccatgtacaaatctctgggctgtgtctacgaccattaaacaagcgatcagaaaccaaaccagtaaaataaacaacaaccagaactgtatcaagcagatccaattttgaaagggagatgtagtaatagatataattttatgttaagatcttatttctcagaagccctcatttaaatatacacatagagttccttctctattcccaccgtttcacttgacttcacttttttttctctttaaaaaaaggaaggaaaaaaatatatacacatataaacaygtgtggtcccaggataatggtccacaggagaagtcaggtttttttgatagggaaaaatcagttcaggcagggtatttgctgtgtgagaagcaggtccatggggccctgagtttgagggctccccaggagtactgagttcccactggaggatggagaagcacccgaggtagacctcacacaaggtcagccctcactactgcaccttgtcgtttttaccaaatttgattgcctcctggtggtagtgattagcgtgtattgttgaaatttcataataaatgactcgtttcaacaattcatccaaacatttatgtaatccacataa

SEQ ID NO: 672731 - DNA, 641 bp, Homo sapiens
aaccagatgattgtagctaattcattctaggaagtaaggttttccatgtacaaatctctgggctgtgtctacgaccattaaacaagcgatcagaaaccaaaccagtaaaataaacaacaaccagaactgtatcaagcagatccaattttgaaagggagatgtagtaatagatataattttatgttaagatcttatttctcagaagccctcatttaaatatacacatagagttccttctctattcccaccgtttcacttgacttcacttttttttctctttaaaaaaaggaaggaaaaaaatatatacacatataaacatgtgtggtcccaggataatggtccacaggagaagtcaggtttttttgatagggaaaaatcagttcaggcagggtatttgctgtgtgagaagcaggtccatggggccctgagtttgagggctccccaggagtactgagttcccactggaggatggagaagcacccgaggtagacctcacacaaggtcagccctcactactgcaccttgtcrtttttaccaaatttgattgcctcctggtggtagtgattagcgtgtattgttgaaatttcataataaatgactcgtttcaacaattcatccaaacatttatgtaatccacataa

SEQ ID NO: 672732 - DNA, 1521 bp, Homo sapiens
gactcggttgggtttaagtgaaaaaggggcttgtctttctacttttgaaactgctgtcactgtcaccagcgcactgcctccacgtgatagagagctgcattcttgtaggtaggcatcaccgttttagctggagaagtttgcttcatgacccatatgtgtttcatttatatgctacttctacttcttaaaaatagatttctaccctgccaacagcaggccccttaatttgaggtgattttccggcagtgtgttaggacgaagctgtggctgcgaatcacagcacacctaacctttcgtcttaagtttgaccttcttacttcaaactctacacaatcaaaataagtaaccataaattggagaggaaagagacgaatacacacaattaataaactaatgatttagaagtaataacccagtaataatatcagggtactcttcaccacaattcaattcaactgttgatttgctaatgacagaaatccatcttgaatgaacttaaayaaaagaatgaatttggcagggcacagtggctcatgcctgtaatcccagcactttgggaggcagaggtgggtgaatcatttgaggtcaggagttcgaaaccagcttggccaatatggtgagaccccgtttctactaaaaatacataaattagctgggcatggtggtgggcgcctgtaatcccagctactcgggaggctgagataagagaatcatttgaacctgggaggtagagggttgcagtgagccgagatcgcaccattgcactccagcttgggcaacagagtgagaccctgtctaaaaaaaaaaaaaagaattcatagtaaagatgttggagtatctcaaaatcaaaggtaggttggataacaaaatgatgagagaggaatgtgtgttatggggcctcatgggtagtgatagcctaaacttggtcttcaactcttcctctttctttccttatgcttcagtctgtgttgatttcagtcagtctctctgcaaatgagcatttccacatagtaggaaacataaacactgaaagctcccatatttcatgttgcagtaaggggctaaatcattgcagaaaacagccacctctcctgcaagttcacgcagaaagcatacacccaggggtcatgctttaccaagtgattcctgctccctccaccactctacaattaggtgtttgcaaaatcactgggagagctggagatgcaggaattaggctgagattcctggactgacttccagaacaatagtgcagtttcctgccacagtcagaaagcctctgctgctctctgtgcaagtgaaatggatggcctatgttctgcttcttgatacccacaaagctaagaaccaaccactgggacttcagctgcacctgtcacagaaaaaaaaaaaagtctgtgtatcatacttgccccaaaacagcccacaatgtgaaattctgccttcccgatctctcaagggcattgactggggtcaattaagttatcagaaaaaccaagctattaaagaatctgggtgatg

SEQ ID NO: 672733 - DNA, 578 bp, Homo sapiens
ttctttgttttgaggcggattctcacgctgttattcaggctggagtgcagtggcacaatctcagctcctgcaacctctgcctccccggttaaagtgatcctcccacgtcagcctctcgagtagctgggactacatgcgtgccaccaggcccagctaatttttgtattttttgtagagacggrgtttctccacgttgagatggagtttctcccaggctagtctcgaactcctgggctgaaacgatcctcccgcctcagtctcccaaagtgttgagattacaggcacaagccactgtgcctggccctgattctttttaaaatttgtttttctgggctggacatgggtgctcaaggcgggtggatcacctgcctcagcctcctgagtagctgggactacaggtgcacaccaccatgcccggctaatttttgtattttattagagacggggtttcaccatattggccagactggtctcgaactctttttttttttttttttttttttttttttttgagacggagtctcgctgtctcccaggctggagtgcagtggcgcgatctcggcgcactgcagcctccg

SEQ ID NO: 672734 - DNA, 734 bp, Homo sapiens
tgtagttacaatagtatcaataaaaaagagtaaaaagggagaccgtataaaacagaagttgcctgttgaatgtatgtgttttgccctttattttagactattttatataaattaaatttacttaaagatacaataaacagaattggaaagctaatatactatgctgttaattgagagacagaacatactaaaagaaaaataatatagataaacacaactggaattatttcggaaaaaaaacaaaaacctaccacggctttagcttttattttaaacattaaattagattaaaattatttgaaacaaaactcttaccacatatggtgagcccttcctcgtagtttatagactatcgtcaaccccaatctctccaacaatttgaccactgacccagcctrttaggacatgatagaattaactacatttactaaaatgacagccaattccttatatggtatcacaatggcctgaaaacagtagtggaatttctcttacgacctcatgatagccagtattcaattaaagacttggaagatttgatttattatcatcatatcatttgtacttaaacatatgaaacattctgatagatattttccaatatatatatatgataaaagtggaacccaaactaatctacctttttaaggctgatctcatgtattctctgaacagcaattcagaaactgctgagagttttacctatatttggaatatttggaaccacagcagaa

SEQ ID NO: 672735 - DNA, 734 bp, Homo sapiens
tgtagttacaatagtatcaataaaaaagagtaaaaagggagaccgtataaaacagaagttgcctgttgaatgtatgtgttttgccctttattttagactattttatataaattaaatttacttaaagatacaataaacagaattggaaagctaatatactatgctgttaattgagagacagaacatactaaaagaaaaataatatagataaacacaactggaattatttcggaaaaaaaacaaaaacctaccacggctttagcttttattttaaacattaaattagattaaaattatttgaaacaaaactcttaccacatatggtgagcccttcctcgtagtttatagactatcgtcaaccccaatctctccaacaatttgaccactgacccagcctattaggacatgatagaattaactacatttactaaaatgacagccaattccttatatggtatcacaatggcctgaaaacagtagtggaatttctcttacgacctcatgatagccagtattcaattaaagacttggaagatttgatttattatcatcatatcatttgtacttaaacatatgaaacattctgatagatattttccaatatatatatatgataaaagtggaacccaaactawtctacctttttaaggctgatctcatgtattctctgaacagcaattcagaaactgctgagagttttacctatatttggaatatttggaaccacagcagaa

SEQ ID NO: 672736 - DNA, 600 bp, Homo sapiens
ttttgggaggctgaggcagattgcttgagcccaggagtttgagaccagcctaggcaacatagcaaaatgctgtgtctacaaaaaatacaaaaaattaaccacgtgtggtggtgtgtgcctgtagtcccagctattccggaggctgaggtgggagaatcacctgaacccggggagttgaggctgkagtaagccgtgatggtgctgctgtactccagcctgggtgatggagtgagaccctgtctctaaataaataaataataaataaaaagagatcaaactagtaccagagctagaccttcgatcccatgcctatttctctttccactggctgcaccatgtcatctaccataatttatgttttttaagtagctgctaatccacaaactgttaccttctttatggttgtgcttgatccactatccataaagtttgtgatcaccttgtgagaagactatgggaaacagatttcctattttgttgacaagaaaactgatgctcagtagggtcccaaatcacccacgaatgagtgacaaagccagaaactagagctgagatcttcagactctatcctcagtgcccttctttctatgctaactcttg

SEQ ID NO: 672737 - DNA, 600 bp, Homo sapiens
ttttgggaggctgaggcagattgcttgagcccaggagtttgagaccagcctaggcaacatagcaaaatgctgtgtctacaaaaaatacaaaaaattaaccacgtgtggtggtgtgtgcctgtagtcccagctattccggaggctgaggtgggagaatcacctgaacccggggagttgaggctgtagtaagccgtgatsgtgctgctgtactccagcctgggtgatggagtgagaccctgtctctaaataaataaataataaataaaaagagatcaaactagtaccagagctagaccttcgatcccatgcctatttctctttccactggctgcaccatgtcatctaccataatttatgttttttaagtagctgctaatccacaaactgttaccttctttatggttgtgcttgatccactatccataaagtttgtgatcaccttgtgagaagactatgggaaacagatttcctattttgttgacaagaaaactgatgctcagtagggtcccaaatcacccacgaatgagtgacaaagccagaaactagagctgagatcttcagactctatcctcagtgcccttctttctatgctaactcttg

SEQ ID NO: 672738 - DNA, 600 bp, Homo sapiens
ttttgggaggctgaggcagattgcttgagcccaggagtttgagaccagcctaggcaacatagcaaaatgctgtgtctacaaaaaatacaaaaaattaaccacgtgtggtggtgtgtgcctgtagtcccagctattccggaggctgaggtgggagaatcacctgaacccggggagttgaggctgtagtaagccgtgatggtgcygctgtactccagcctgggtgatggagtgagaccctgtctctaaataaataaataataaataaaaagagatcaaactagtaccagagctagaccttcgatcccatgcctatttctctttccactggctgcaccatgtcatctaccataatttatgttttttaagtagctgctaatccacaaactgttaccttctttatggttgtgcttgatccactatccataaagtttgtgatcaccttgtgagaagactatgggaaacagatttcctattttgttgacaagaaaactgatgctcagtagggtcccaaatcacccacgaatgagtgacaaagccagaaactagagctgagatcttcagactctatcctcagtgcccttctttctatgctaactcttg

SEQ ID NO: 672739 - DNA, 600 bp, Homo sapiens
ttttgggaggctgaggcagattgcttgagcccaggagtttgagaccagcctaggcaacatagcaaaatgctgtgtctacaaaaaatacaaaaaattaaccacgtgtggtggtgtgtgcctgtagtcccagctattccggaggctgaggtgggagaatcacctgaacccggggagttgaggctgtagtaagccgtgatggtgctgctgtactccagcctgggtgatggagtgagaccctgtctctaaataaataaataataaataaaaagagatcaaactagtaccagagctagaccttcgatcccatgcctatttctctttccactggctgcaccatgtcatctaccataatttatgttttttaagtagctgctaatccacaaacygttaccttctttatggttgtgcttgatccactatccataaagtttgtgatcaccttgtgagaagactatgggaaacagatttcctattttgttgacaagaaaactgatgctcagtagggtcccaaatcacccacgaatgagtgacaaagccagaaactagagctgagatcttcagactctatcctcagtgcccttctttctatgctaactcttg

SEQ ID NO: 672740 - DNA, 1408 bp, Homo sapiens
ttgactaattctttaggacatctcttctttgagaggattctctatcagttgataactggcttgaagctgaaaaacaggaatgtattgacttcgtatctgaaaagcttaaggtttcagacatagtctgatccagagactcgtgtaatgtcaataagattattttttcttgctcagctctgctattctctttattggctttattttgagtgggttcttccctcatgataataaagtgggtattagtagttcaggtttatgtcctgttttcccagcaattgaagtggaagagcatgccttttttcccaatagttccaatcaaaatgtaaagattgagttttattgattctggttgttctgccttcggtcacatgctcgtccttggaactagtttagtgtcagtcttacccaaaccatatgaactgagaataaagaaagggaaaaatcagatttctgttactagaaagcgagggactgaaaataaatgttcattacatttcttttattaatgttaacatagagggaggtcctacttgttctctgccttatatcacagatgaggatttcacatttgactgtctctcatcctcgtgtacacattttcccctatattacatatttggatttgctcactagtttctctacaagatcgtggtttataaccagagattttcagaaatatgaaatccttaagtggagaatgcctccgtttatagcagaaaaattgtcctatgctgtttaggcacatgacttgccttggtgtgaaggcatgtattcttacatcatcaaaatcccctgatattgatataaaatcaactttatagagcaggacacatattttgtgttctcttcacaaggaacttctaatactggtgcctcctcaaagaaagagaattatgaagctgtgtgaattatgttagaaatcatttttttatttgaaaattaagcttcattcaattgtgtggttctgtttagtctagtggatttctgagtgttcaaggatggttaatatctgccaagggaggcataagggaattggtacatcataacaatagaacaggatgaaagttttatatatctttcaatgaggatgcaagatcaacatactccatttaagaatatatttggaattattaaatgaagtttcattgtgttgctgactacctttcagtaatttatttctataacagtttttgcattcctaargacgaaaattctttaactttgtcataatatgagatagtcaagatttagaaaaccaaaccataattgaattttaatttaaaaactcttatggggttgatagaaactgagctagattcctaatatatcagcaaaccataaatgtagaggaaaaaaaaactcagactccatcagaaaagccaggcacataaacacataagcatattta

SEQ ID NO: 672741 - DNA, 1330 bp, Homo sapiens
ggagagtacaacttaatataccaggtagcagcacaaaaagaaatgcctaccccgtaaaaattgctcacccacatcaactttatttatttgggaattatttacccatttctcagaatgatacagagctcttcaatttttcttatatatcttttcctactgaataatgcaagtgggccttatatttagacataaatcacgaagtcaacgcaaaatataaatctcgaaacacaaatgtacccaaactctgtgtggttgtcagactatggaactgaacattcacacaagcctttgctatcaaccttaggacaataagtctgtttctttctgcagaaaccagtatcaccccttgccaacttggggccccaacttggaacttatcagtacccaaccatcgcctagtcccctggtcgttcattttgacctatccttccctttgtctgtatccccaatcctcaacctagacatataggacaggcacggttaggaacaacagcgggatgagtcagccttgtggccaggaacacagagctcctggcagagcacatcagtcagagagcgaggcaggctgctgcagaatgaaagcagcccgaggctacaaatgtcagaggaaagacgcctgtgcctgtggagacctttcgcatctccccccagtctcatgccattcttttttctgtaaagttgctgggaaccagcaaattagaacccagttttaattactcttcagtaataatgaacctcacacaaagagcctttataaaccttgccacactagattctcactcagtcttgtgaaagggggattattagccccatttgatagctgaagaaaccgagtcacaaagggcagagcttgtaaaaggcaatgcagggctcgaaccgaggtctgcatctcaccttcttcaaacttcttcattctgcctcaaaatggacagaagggaagggctgcatttcctgggactcagccaccaccctagcctccctggaccttgcaggtctccccaggaggcagatcctctgggaactgawtgagtccctctagaggtgccgcaccctcccctggtgcacttctgttaaaatcataagcccccagcgattcctcatcatgttaccttctgacactccattaaatggattgagtccagcatcaaaaaccagggcgcagggagaaaacaaagccagcaccccactcgagagtgtatgaacaagttggggtcagggaagaacttgagacctgagggagaaagcgcttgttcgatacactttcctctcccactttctcgcttggtctctctgggcttggaggtgatgggtgctcactgctccatgggaa

SEQ ID NO: 672742 - DNA, 1330 bp, Homo sapiens
ggagagtacaacttaatataccaggtagcagcacaaaaagaaatgcctaccccgtaaaaattgctcacccacatcaactttatttatttgggaattatttacccatttctcagaatgatacagagctcttcaatttttcttatatatcttttcctactgaataatgcaagtgggccttatatttagacataaatcacgaagtcaacgcaaaatataaatctcgaaacacaaatgtacccaaactctgtgtggttgtcagactatggaactgaacattcacacaagcctttgctatcaaccttaggacaataagtctgtttctttctgcagaaaccagtatcaccccttgccaacttggggccccaacttggaacttatcagtacccaaccatcgcctagtcccctggtcgttcattttgacctatccttccctttgtctgtatccccaatcctcaacctagacatataggacaggcacggttaggaacaacagcgggatgagtcagccttgtggccaggaacacagagctcctggcagagcacatcagtcagagagcgaggcaggctgctgcagaatgaaagcagcccgaggctacaaatgtcagaggaaagacgcctgtgcctgtggagacctttcgcatctccccccagtctcatgccattcttttttctgtaaagttgctgggaaccagcaaattagaacccagttttaattactcttcagtaataatgaacctcacacaaagagcctttataaaccttgccacactagattctcactcagtcttgtgaaagggggattattagccccatttgatagctgaagaaaccgagtcacaaagggcagagcttgtaaaaggcaatgcagggctcgaaccgaggtctgcatctcaccttcttcaaacttcttcattctgcctcaaaatggacagaagggaagggctgcatttcctgggactcagccaccaccctagcctccctggaccttgcaggtctccccaggaggcagatcctctgggaactgattgagtycctctagaggtgccgcaccctcccctggtgcacttctgttaaaatcataagcccccagcgattcctcatcatgttaccttctgacactccattaaatggattgagtccagcatcaaaaaccagggcgcagggagaaaacaaagccagcaccccactcgagagtgtatgaacaagttggggtcagggaagaacttgagacctgagggagaaagcgcttgttcgatacactttcctctcccactttctcgcttggtctctctgggcttggaggtgatgggtgctcactgctccatgggaa

SEQ ID NO: 672743 - DNA, 615 bp, Homo sapiens
ccggaaagacaacacatgcaggacatgctaagccttgtagctgcgagttggattttaaagaggatgtgtgccatcaaaagggtgccttggctaattgggccagactyttcctatgtggggacacagttccataaataaaagtgtcctattaatgcacaatggcttgcccatgctctagcttctacatgctgctttcctcctcacccccagcacaaaagcagcacagcatcagtgcgtctgccactgacctgtgaagtggggcaggcggcaagtgcagcacaaaagcctcacaacaaagacgtcagaccacatccccatcagccgatgtgctcaggtgcaataacaagctgcggtgtccttttcccctttcacatttgagtgtaaaaacagaccagggccttgcacatactgcgtgcaatttctagacaggcatatagtgttactctctgtaactttctgtgagcctccttgggttaccatacatattaatacacattccagcatttgaagaaaggaaagtatagggtgtgtggtgattacttttaattgaattcatctggaaattttaaagcctgaaaatttagctcctgtgtatagtattttaaggtttacaca

SEQ ID NO: 672744 - DNA, 665 bp, Homo sapiens
tggttttgtttttaacttttttttgtagagatggggtctctctatatgttgcccaagctggccttgaattcctggcttcaagtgatcctcccaccttggcctcccaaagtgatgggattataggtgtgagcaaccatgctcaggtgcagcttctgtacttggagaaaagcctctggattgtgtatgataacaggggttgtcatgaaacaatcatagccataatggccgatatttatattgcttcctagatattattcccagagctgtcctgcatcctaagcattaactcacatgatctccaaaacactccactgagagagggctgttactattcctttctattttacagatgaggaaatggaggcacagaaaggctgagtaacttgccaaagtcacacagctagtgagtgctggagctgggatgtgaagcagcagctggctctcctgctaggtcaggcagcagatggggtccgggatccaaaaagatggccaggctgagtatcccacggtaacaagagcagctacagaggtggggaacaggttcaccgacgcaaggaaaggcatgaatcacaacagcsagaacctcagactctccccagcctgacttttcccatccattcaggggccttggcctttgtttcccaacccgcagggagctccaactg

SEQ ID NO: 672745 - DNA, 643 bp, Homo sapiens
cttttagtagagatggggttttgccatgttggtcaggctggtctcaaactcctgacctcaagtaatcctcccaccttggcctcccaaagtgctaggattacaggcatgagccaccacacctggccttctgtggaaaattaacccaacggaataaactcaaaagtagtttatttaaaggactgtgtcagtctactgaaggataagctttgcctctctgcagctctcaaatcacactgtaggaagatggcttcatttacacaaatagcccacttgtaaaggcaacagagtcttctcacaaggcaaattattaagtcatccaccttggggttagcttagctaagagcctaggatgaatttgacaactgtatagggatcacaatctayggtataactgtgggaatttttggctgatatttcccagcaaaggacagaaatagtctcatttattcgatatggaatcttgctaattttgcctctgagagttaaagaaactcccatgttctaagaggtttagctgttgttctttgataaataacagtatggattactatggatttttagaaaacagagcacactgaaggaacaccattttcagaaactcaagaaatttaatgtgagaaaaacataatatacatggggttac

SEQ ID NO: 672746 - DNA, 2380 bp, Homo sapiens
tgttatttccccatgttatatgaaataaatattaacaattccagaataaaaccatcatacctttttaactgctataatatatccttcttcttgaaacattttgaaaaattcacacatgaatgtctctttgaaacttgactaagaaaaaacaaacacagggtttatatgtgttaaatagagaattaagaatagaatggactgtatttttaagctgaggattaaggcctaaaaggactcaattatatattttcagagagttcagggcttggagtggaagacttctttcaaagctgtcatgtgattatggccgaagcaggcagacagacagactgtcctgcacctccttactaggctctcttgtcttgtttagcagttttcatgaaactgtctgcttttttttttttttaatgttctcattaaactttttttctttttaaaacttctagagacagggtcttgctatgttgctgggactggagtgcagtggctattcataggtgccatcattgtgcaccacagccttgaactcctggcctcaagtcatcttcccgcttcggcttcctgggattaaagacacaagtcactatgcccagcttctgaaactgtcctctttaacaggtgactaagagagtatctacttaaaagacagctattgtgtctgtgtgtgtgtgtgtgtgtgtgtatgttttgtttttaatttggaagaaggtaagtcaaggataagggatcataggatgtaacaacatttagaagtgtaaaaacaaaataaaagatgtaaggacttaccttgcttttggacagactcccccagcttcccaaagtttgtatagtttttgagatgagagttaatgttctaattgtctgtgcatcctaaagaatgtaaaaaagaccaaaactactaagttttcaagaaaatagtttgtataaaaaagtagaatagagtaaatggactacattgctgtaaaacaatgactcaaaaacgttcaaaacacacacagttaaaatctagctaaggctgggtacaactcaccagcctaaggaattaagagactaaagaaaccatatataattaacaattcttcccaaagtaattattaaagatgtggtgcttttaaaagtcatatatatatatatatatatatatatatatatttttttttttttttttcttttttttttcctgagatggagtctcactctgttgcccaggctggagtgtagtggcataaccgcagctcactgtaacctccaccttctgggttcaagcgattctcctgtctcagtctcctaagtagctgggattgcaggtgcctgacaccacacctggctaatttttgtattttcagtagaaacagagttttgccatgttggccaggctggtctcgaactcttgacctcaggtgatctgcctgccttggcctcccgaagtgctgggattacaggcatgagccttttggcaccagccaaaagccataattttatcaatattatatataagttgttttgtacagtatggcaccttggattacctggcaaattatagtcacttctggaatagtcacttctactttactaccttataacttaaaatggcagttttaggtgttccaaattttctgtgctcagctcacctctaaacatattcaatactttaaatggcttttgcaattaactcttttcaccatggaagcaaagacctaaattcagcttaggaaatgtgaagtcacctagttatttttggatcttaccagagggtgattatttgggtctattatccaagaggtttttcaggcctgtctatctgaaagaagtaatatatagtagcatataaaattgactaaacggtgttccctcaggaatctttgctccttcatttttttaaaaattgagatataatttacatatgacaaaatgaataggtattaaatgaataccctgctgaattttcaccaatcmatacatttgtgtaagtttctatcaaaacacagaccatttttatttacggattcaagtaaacagtatcttgcatctaaaaacatatccagaaaaatttagatacagaaaagctttagtttgatttttggctcccattccttgatattttagtatccccccaacccccacattgaaaacaggcaatgaatgtgaaggggaagagatgaccagaatataaggtaatctggaaaggaaggaatatccgaaatatgatccttataatatacttataaagtagatacacacctaaattaagtctattcagaaaacattttagctgtaacatctgggatttcattacatctataaaaggtccctacaattctctgtctttgaagaaaataatattcttaaagatgtcctggcacctgcactcatgtttcct

SEQ ID NO: 672747 - DNA, 2035 bp, Homo sapiens
aaactctaccctctgtgaaggctaatgatgccttggtgtgggcactctcagctggcttctcctccagtctttggcatttgaaagtgtgggtggcttggaacatttttaactctcttgcctggccccttcgttgaatgaaaatcccaagtacctatgggtgacatcctttctctgtctctcccactccacttttgccatatgacattgaagcactaactgatggcttgtgagggagagttggcaggtagttggagacatgctttgtgtctggaactcctaaggattctagcctttcatactactacacatgcaccaattagaaattcattgtttttctccctatctcctcctcttctgcagggataggaacagtcttttctctcttctgaaggttcttcattttttggagtttgagtcatttgagttattttggttccttaggtctctgatgtgtttctaaaatatmcatgattttgtagcctatgtggcttgttacatcattcagatgcgagtaacagtatcttgtcattttctgcatccaaactggaagtgaaatcatccctaggattttaagatactatttacttttcccattagaagtcctttgagatatgaggtctttttatccccatttcataggtaaggaaacataccatgttcaaagttcaataatctttccagtgctaggtagtcaatgagtttcagttttcatttaaaatcagatttttttactttaaattcatttattgattttctcattcactatatcttttggggccaagagagaggaaagaatgattcatacttcagaactgaattgagaaaaccatcatttcgtgttgtattgtcaggtattctattcccaggaaggtagattttaaagaagtctatcttaaaataaattgggaagcattccataaattcttccgttgaaaattctgattgtgacccaattttgctgcttttctcaccagctgaataagtgaacttcagagcttatccaaaccaggtagagagcagctgttctggtgtccatcactctggtgcgtacactctgaagtgacttattagcccattagcagctggcttagtggaattttgaaagaacctgtgcttctcaacccaaatgcctgagacccagagagagaacacttggctactgatacctgaagaataaattacttcaaattctgggggaaaatttctcaaaataaaaatgaacataaatgtaaaaatattcctaaggaatacgcatgcacctgaggtcccccaaattttatattttgagacttctaaggtgataatcctttgttttctaaagaatataattaacacaaattggttccctgtgtcacttttgaattttcaaagtgtggtctgatttttttagtttgagattaatttaaaagaaacaagctgatgtgtagagttaaaggcaccatgtcacccgaaatcatgttttagtgtgtttcccctcaccccagcccttttcatattgccttctttgttgctgcaactgtgcatcttgctttggctttaagcatctctatacgttaactcaaaaggaaacattgttctgtcctgactgactcttagataattctccagtctgtaagttaggaagaaaatctcaagaataaccactaaagaacctactcatgtaaccaaataccacctctttcccaaaatcctatggaaataaaaaatttttaaaaaacaatatgggagtgaagattattttgtttgtgtagtcacagtgatacttttaaagtgcagatagtggagatctgaatagacagttcccctgctagcaaatgcttcaatggctctccactgacctgaggaatcaaccctcctttccatttgatttatatgattcttcatggtctggcatggcttactccttaagtcagactctagactttatcctcactgtgcttctcatccatcatggttttgctaaccatactggtgatagcacaattagggatttgatctgttaccctctttaacttttctccagcaattcataaga

SEQ ID NO: 672748 - DNA, 602 bp, Homo sapiens
attatattcctgtktatcttgttagctagctactacttacttgtccttaaatgatgtacaatcagtaaattattgttaaaaatatgtttataatatatagattcatttatatctaaatttgaaccacatattaaactgcatttttattaagcttaatcatagaactgaatgtcataatctttatgatgtattaaattacatttttaaaattattattctcttttgttatcctctatttagctgttttcctacattaagactaagctgtagcctcgtgtccctcattaattcttttgttcaacctaactaatcattatctactcactctctgcccctctgcagcaatattgtctttgtttaccttctttcaaagtaaactggtgttttattatattttgtgcatattaatgaatgtgtcaatacaagagatgttgttaggaaacaactttgaagaattttgattactgatcaagtatggaaagcatggatttcaggggaaacaaaatgcctcagaggattttaaccataataactgagaacaggaattaggaatcctcagaggaactctgttaccttaagggttcatggagattgtcatcttg

SEQ ID NO: 672749 - DNA, 620 bp, Homo sapiens
gacagtggtattgatgattctgtctgactgagctttcttcataatcgtttagaagctggaaagtatagcatgcctttttaagaagtacttcacattttttttttaagattagtcttaagtttcttgtttcatttatttctagttacctctcattaattttgtgatttcatttaacatttaatacacttkcagcttagtgtggtaaatccaaaaatatatcactaagagttacaacatctgatattcataatacatactcctcaacgaagatactataatgtgccaaaagtattaaaaattataatcctattgtggaatacttaaaattaaaaagataaaaagtagtattttatcccatttctgtgtgtgaagttcactcacaggaaaagctaatactgctactttgaataatttgagcatcagagaaaaaatatatctttaggttttattagtttctattatttgtaaaataagaattttaattgttcccaaatccagacaaattttaaccccaaaatttttaaaatatgaaatgtgatttttatcatcagagaaatgcaagtaaaaactataatgatataatgatcttaccccaattaaaatggattttatccaaaaga

SEQ ID NO: 672750 - DNA, 2184 bp, Homo sapiens
tgtgttaatgtggatgatgcacgttttttcacaacatgcacgcatacaaagatacccacttcatggtttcaattattgcttcatttcctcctttgtgctaagtgatgctgcctatttgttgaaagggtacaagagttctcttgtagtcttctgcctgcccttccccaattttccagtctatgggtttgttaatcatgtggtgattttccaggacaagaacttgaaagtactctacttaagatacgttatagaatagatcagggaaaaccccttcactttctaggaacattaacagctgcgtgaaggcctcagagaactgttccctcatttaatttctggctttgacttatacctagccacatatttcagagtttaaaagtgtggaaatgtgatgtttttctgctgaatattcatgtcttctttagataataggaactcagtttttcctggggaaccacttttcccccagtctcagtccaagggcttgagagtggttacccccgtcctaggcctggccaatcaaggtaatagtcatgatccattctgggctgcaaagcatcagccttggaactttgcttggtcttctttgcagcaaatctagtgagatatgagcttggtactacaggtgcccatcattgccacagttgagtagagtctaccgaaaatgaggctaacacaagcagcctcctgtgtggacagagagaaagcaatgaaaggcattaacaagcctgagcagaaacacactgtattagcctcgttcactgccagaggggcccctgaaggggacacagtgacacagtatctactgatactgcccttattcaagaggtcagtgctgtccttcacccctacctcattccctacaccctggctagaatctcataactcctccaacaacttaaaatcactctctcacctttgtgttagatttctgtttccaactctgcccctgtcccctgccaagacccaccagcctcatggcagagacatctcttcatgtcccagcaagtacatctgtgtggtcagtcaggaaccctctcagggccagttgcagcccttccatcaccaggtgaccctatcttatgaccagagagccttagactttccaccttcccttgaggccccacggtcttcatgccaaagaataaggtgccaggcttctccctggacatccatggcctcaatactagtgctgtctgagactactggctcctcacaccaacccccaatctgcagaaaagcaggttgggatgtctgaatgagtctacatgaaggatattccttcaaatgtgcatcagcgtgcatgaggctgtttgttctgtaagatagcccagccatatcccagagctgattaaacaacaattatgccacaaatattatacccaacattatgatcttctaggataataccctgattgtctctgaacctcactgaatgtcatggttgctggtgacccactgtgatgtttctgggccacattctatgtagctaaattgtttgggatattaacatacctggaaggacctttccccagtccattaaaaatcctctagtctttttaggccacttaaggaagggtcatagctagcatggtatggtctacaaacttcaagtctacattcctgacatgacaccacccttcctggtaggaaccagccacaagaagaaaggccactcaggtttcctagcaatgccttattttggacacattcsaagacagccacagtcaaaccaaagtttcgggcaggtctcaactaagactggtttgtatttccaaagtcacttataagccaagtcctgggacccagaatgtattttcccatggaaacagtgacatagactataacaaagtcatcatgccaagccacaagtgcctacagctatcatggtgccaagagcactatttcaataactcccaatcactttatgtaacattgcttccataggaaagctccaattgagtttcaatctccaatgcaggattctaggaacacatttccaagcccccacattcatcttggcagcatgagagaattacctcttttgatcaaacgttcattcattcccacaaatacttattgaaactctatttttcatgagccactgctctaggtgctggggatacaacagtgaacaaaagtcacccacaaagttctgaagtggaaacacaaagtgatctgata

SEQ ID NO: 672751 - DNA, 2184 bp, Homo sapiens
tgtgttaatgtggatgatgcacgttttttcacaacatgcacgcatacaaagatacccacttcatggtttcaattattgcttcatttcctcctttgtgctaagtgatgctgcctatttgttgaaagggtacaagagttctcttgtagtcttctgcctgcccttccccaattttccagtctatgggtttgttaatcatgtggtgattttccaggacaagaacttgaaagtactctacttaagatacgttatagaatagatcagggaaaaccccttcactttctaggaacattaacagctgcgtgaaggcctcagagaactgttccctcatttaatttctggctttgacttatacctagccacatatttcagagtttaaaagtgtggaaatgtgatgtttttctgctgaatattcatgtcttctttagataataggaactcagtttttcctggggaaccacttttcccccagtctcagtccaagggcttgagagtggttacccccgtcctaggcctggccaatcaaggtaatagtcatgatccattctgggctgcaaagcatcagccttggaactttgcttggtcttctttgcagcaaatctagtgagatatgagcttggtactacaggtgcccatcattgccacagttgagtagagtctaccgaaaatgaggctaacacaagcagcctcctgtgtggacagagagaaagcaatgaaaggcattaacaagcctgagcagaaacacactgtattagcctcgttcactgccagaggggcccctgaaggggacacagtgacacagtatctactgatactgcccttattcaagaggtcagtgctgtccttcacccctacctcattccctacaccctggctagaatctcataactcctccaacaacttaaaatcactctctcacctttgtgttagatttctgtttccaactctgcccctgtcccctgccaagacccaccagcctcatggcagagacatctcttcatgtcccagcaagtacatctgtgtggtcagtcaggaaccctctcagggccagttgcagcccttccatcaccaggtgaccctatcttatgaccagagagccttagactttccaccttcccttgaggccccacggtcttcatgccaaagaataaggtgccaggcttctccctggacatccatggcctcaatactagtgctgtctgagactactggctcctcacaccaacccccaatctgcagaaaagcaggttgggatgtctgaatgagtctacatgaaggatattccttcaaatgtgcatcagcgtgcatgaggctgtttgttctgtaagatagcccagccatatcccagagctgattaaacaacaattatgccacaaatattatacccaacattatgatcttctaggataataccctgattgtctctgaacctcactgaatgtcatggttgctggtgacccactgtgatgtttctgggccacattctatgtagctaaattgtttgggatattaacatacctggaaggacctttccccagtccattaaaaatcctctagtctttttaggccacttaaggaagggtcatagctagcatggtatggtctacaaacttcaagtctacattcctgacatgacaccacccttcctggtaggaaccagccacaagaagaaaggccactcaggtttcctagcaatgccttattttggacacattccaagacagccacagtcaaaccaaagtttcrggcaggtctcaactaagactggtttgtatttccaaagtcacttataagccaagtcctgggacccagaatgtattttcccatggaaacagtgacatagactataacaaagtcatcatgccaagccacaagtgcctacagctatcatggtgccaagagcactatttcaataactcccaatcactttatgtaacattgcttccataggaaagctccaattgagtttcaatctccaatgcaggattctaggaacacatttccaagcccccacattcatcttggcagcatgagagaattacctcttttgatcaaacgttcattcattcccacaaatacttattgaaactctatttttcatgagccactgctctaggtgctggggatacaacagtgaacaaaagtcacccacaaagttctgaagtggaaacacaaagtgatctgata

SEQ ID NO: 672752 - DNA, 608 bp, Homo sapiens
caacagcccacattggcctgctggataatgaaagcctttgaggtggaaaactcaggcaccctaacagacagagtcatgcaactccagctgacagcccatcagacataacagtaaggccatcccataggatccagcctccaggtgagctgtcagcttaccacaaagrcaggagcaaaacaataaaaaaaatccacaaagccagtgtagacggaagaaactttccaaccaacccacagaatcatgaactaaattaggaggtggttgtttgaagccactaaattctggggtagtatgttatgcagcagaagctaactgatacagaagtgatcactgggcatacccattctaactctgctctaaaagcaaaggaaggctttcctttgagttgtgaccataacacgctgtgggccctacattggaccaaacgttcatcctgtttgctcagagatagcctggtatatgcataaactactccttttccaagtttctgggaattgggttgaggttgctgcatctttggaagttggtctccaccactggcaggctgcctgcatcacaagatctcattactcaggagctgtccaagtgtctaatgtacttagttaaga

SEQ ID NO: 672753 - DNA, 608 bp, Homo sapiens
caacagcccacattggcctgctggataatgaaagcctttgaggtggaaaactcaggcaccctaacagacagagtcatgcaactccagctgacagcccatcagacataacagtaaggccatcccataggatccagcctccaggtgagctgtcagcttaccacaaaggcaggagcaaaacaataaaaaaaatccacaaagccagtgtagacggaagaaactttccaaccaacccacagaatcatgaactaaattaggaggtggttgtttgaagccactaaattctggggtagtatgttatgcagcagaagctaactgatacagaagtgatcactgggcatacccattctaactctgctctaaaagcaaaggaaggctttcctttgagttgtgaccataacacgctgtgggccctacattggaccaaacgttcatcctgyttgctcagagatagcctggtatatgcataaactactccttttccaagtttctgggaattgggttgaggttgctgcatctttggaagttggtctccaccactggcaggctgcctgcatcacaagatctcattactcaggagctgtccaagtgtctaatgtacttagttaaga

SEQ ID NO: 672754 - DNA, 1041 bp, Homo sapiens
tcttctgacaaagccaaaaaccctgagtcatcctcaactcccctccttctttcattcctcagatgggcgaatgttgtcagctccatcttccaaaaagatccagaatccaaccacttctttcatttcagtcacgcccacctggcccaagccaccacccattcctgcctctcaactctttcagccccagtggtctcagtccctcctccaccccgaagcttctacctcacccagaaaaggatcctatatcctcacttgctgtgactacaagaactgcggtggtccagcccctgttccctctctgatctcatccacccctcctgactccgctccagcccacagcctcctccttgtcctctgagcacactggcacctttctcctcagcacctccctgctcccgtgagcatggcttctccaccaaagagcctcctgtttcattcaggtctctaagcaagtgtcactgacattggaaagaaaaaggacattccctgtaccctgtgtaaactgcagtcacacaccctctcctgcagccccttggccctctctccccttctcaccctgatagcactgatccctgcttggagcgtttgtgcgtgcactccttctgctgtcctgcctttctctcccactgacacggaagcttcrccagagctcatctgtctgttgactgctcgtgtccagggcctagaacaggacatcgcacacagtaagcattcaataaatgtgggaaggaagtgagaggtgggaaggggcagcctggctggctggttttctcctacagagtcctcatttcagcactgtccattgttaaaagaaaaactttagacaagtcaaatttaagagttcaactgagcaaagaacagttcacaaatcgggcagcccccagaaccagaacaggttcagagcaaccgcagggctgccacagggtcagataacatttacagataggaaacagaaggtgatggacagaaaatggaagtggggtgcagaaacagccagactggttacagttcagtgtttgcgtgatttgagcagggtttgaa

SEQ ID NO: 672755 - DNA, 1041 bp, Homo sapiens
tcttctgacaaagccaaaaaccctgagtcatcctcaactcccctccttctttcattcctcagatgggcgaatgttgtcagctccatcttccaaaaagatccagaatccaaccacttctttcatttcagtcacgcccacctggcccaagccaccacccattcctgcctctcaactctttcagccccagtggtctcagtccctcctccaccccgaagcttctacctcacccagaaaaggatcctatatcctcacttgctgtgactacaagaactgcggtggtccagcccctgttccctctctgatctcatccacccctcctgactccgctccagcccacagcctcctccttgtcctctgagcacactggcacctttctcctcagcacctccctgctcccgtgagcatggcttctccaccaaagagcctcctgtttcattcaggtctctaagcaagtgtcactgacattggaaagaaaaaggacattccctgtaccctgtgtaaactgcagtcacacaccctctcctgcagccccttggccctctctccccttctcaccctgatagcactgatccctgcttggagcgtttgtgcgtgcactccttctgctgtcctgcctttctctcccactgacacggaagcttcgccagagctcatctgtctgttgactgctcgtgtccagggcctagaacaggrcatcgcacacagtaagcattcaataaatgtgggaaggaagtgagaggtgggaaggggcagcctggctggctggttttctcctacagagtcctcatttcagcactgtccattgttaaaagaaaaactttagacaagtcaaatttaagagttcaactgagcaaagaacagttcacaaatcgggcagcccccagaaccagaacaggttcagagcaaccgcagggctgccacagggtcagataacatttacagataggaaacagaaggtgatggacagaaaatggaagtggggtgcagaaacagccagactggttacagttcagtgtttgcgtgatttgagcagggtttgaa

SEQ ID NO: 672756 - DNA, 1041 bp, Homo sapiens
tcttctgacaaagccaaaaaccctgagtcatcctcaactcccctccttctttcattcctcagatgggcgaatgttgtcagctccatcttccaaaaagatccagaatccaaccacttctttcatttcagtcacgcccacctggcccaagccaccacccattcctgcctctcaactctttcagccccagtggtctcagtccctcctccaccccgaagcttctacctcacccagaaaaggatcctatatcctcacttgctgtgactacaagaactgcggtggtccagcccctgttccctctctgatctcatccacccctcctgactccgctccagcccacagcctcctccttgtcctctgagcacactggcacctttctcctcagcacctccctgctcccgtgagcatggcttctccaccaaagagcctcctgtttcattcaggtctctaagcaagtgtcactgacattggaaagaaaaaggacattccctgtaccctgtgtaaactgcagtcacacaccctctcctgcagccccttggccctctctccccttctcaccctgatagcactgatccctgcttggagcgtttgtgcgtgcactccttctgctgtcctgcctttctctcccactgacacggaagcttcgccagagctcatctgtctgttgactgctcgtgtccagggcctagaacaggacatcgcacacagtaagcattcaataaatgtgggaaggaagtgagaggtgggaaggggcagcctggctggctggttttctcctacagagtcctcatttcagcactgtccattgttaaaagaaaaactttagacaagtcaaatttaagagttcaactgagcaaagaacagttcacaaatcrggcagcccccagaaccagaacaggttcagagcaaccgcagggctgccacagggtcagataacatttacagataggaaacagaaggtgatggacagaaaatggaagtggggtgcagaaacagccagactggttacagttcagtgtttgcgtgatttgagcagggtttgaa

SEQ ID NO: 672757 - DNA, 1041 bp, Homo sapiens
tcttctgacaaagccaaaaaccctgagtcatcctcaactcccctccttctttcattcctcagatgggcgaatgttgtcagctccatcttccaaaaagatccagaatccaaccacttctttcatttcagtcacgcccacctggcccaagccaccacccattcctgcctctcaactctttcagccccagtggtctcagtccctcctccaccccgaagcttctacctcacccagaaaaggatcctatatcctcacttgctgtgactacaagaactgcggtggtccagcccctgttccctctctgatctcatccacccctcctgactccgctccagcccacagcctcctccttgtcctctgagcacactggcacctttctcctcagcacctccctgctcccgtgagcatggcttctccaccaaagagcctcctgtttcattcaggtctctaagcaagtgtcactgacattggaaagaaaaaggacattccctgtaccctgtgtaaactgcagtcacacaccctctcctgcagccccttggccctctctccccttctcaccctgatagcactgatccctgcttggagcgtttgtgcgtgcactccttctgctgtcctgcctttctctcccactgacacggaagcttcgccagagctcatctgtctgttgactgctcgtgtccagggcctagaacaggacatcgcacacagtaagcattcaataaatgtgggaaggaagtgagaggtgggaaggggcagcctggctggctggttttctcctacagagtcctcatttcagcactgtccattgttaaaagaaaaactttagacaagtcaaatttaagagttcaactgagcaaagaacagttcacaaatcgggcagcccccagaaccagaacaggttcagagcaaccgcagggctgccacagggtcagataacatttacagataggaaacagaaggtgatggacagaaaatggaagtggggtgcagaaacagccagactggttacagttcagtgtttgcstgatttgagcagggtttgaa

SEQ ID NO: 672758 - DNA, 663 bp, Homo sapiens
aatctgaacgtagctgatgagaaacatctgaatggaggaagccaggacaaacagaaatcactaagtttcccactgcagtgggctggagtggcttccccaagacttctagttgtgcgcatttacctttctatcatgaagaagactcatgctacttcttggaaacctatacagttcacaatgacrgaccctgacctcacgaactccgctttctctccagtccccaagcccttccgccccccagtctgcaggtgattctttggctttgttgctgtgtttgatacattttgatagcagacgggtcagaggtagattttggtcacattgtatggtgtctccttttctccagaatttgagaacatcaggaagcctcacccactgcccagatatgtccttacaacccccaattaaaagcccaagatacctcccaaatgtagttaaggaatttggggtgtgctcctgcagtttcctcagggacacatacccaaagccaagcaagtggtggccttattcattgtgacatgtctcagatgatgttataataatggagcgtgcttggccgactagagctcataaggaaaagagttcaatccaaaaccgggacagtggttacctagcacatttcgagggagagaacactccaattccgactaatacatgctcttg

SEQ ID NO: 672759 - DNA, 580 bp, Homo sapiens
cagaatggctagaccataatgacatgagcatgaaaatgagaaaaaaacaaaaaatagatmgctttctggatctcttccagaaagtgaaaaatacacttctctaaatccgtaacaaatatctgggtccttcaaggaatcaaatatttttaaatagcctacaggacacaagactgtaactcttcctaagtgaaacacttgaggaaggtagctcttgaagtatctgggttggctgaacattgataaacacagtacattgattgtaatcactgggctgcagtgatttataaaaaataattccaaaaattgattttggacatgtcacaaagctcaagaacaagacgtctcattctgccagaaatccccagcagaactgagaataacgctgagctgtattaaaatggtagcataaatattactttgtttgattaaaatttaaacaaattgtaatgaacagatacaacggctcttttagactttatattgaccacatttaaagatcaaacagcccagcaggagtatatgactttcaagcactctcaaaattagtattttgactaagattttttgaactaatatttat

SEQ ID NO: 672760 - DNA, 616 bp, Homo sapiens
tctcaaataagattaagactatgacatcatagttaagagcatagactttgtcatcagccagatctggagtcaaattcttttttcaccagcatttggacaaacttcctgcacttctttgagtctgtttcctcatgaataaagtagggactaatagcagaaagtcacctgccttcaaggttggctgtaaggatggtaagaagctgtgcagaaacagtttggcccccagcctggctcagagcactccataaggtaatggcaactttgaggactgatgcttggatacctgccctccctggggcatgcgactgggggaagcaagtgtctacaccgactgtgtaaaagtgaatgacaaggagagggaggcatgctgagtgtgggctgctctcatggtctcttttcccaggacttatggcgtgtatgtrtatatttattcagttaattttggctttcttcccattaatttataattccacaaagggaaggatcgtgtctgttttgccacgagtccagtgcctaatccaatgtgtggcctgtggttagcccttagcaatagttgattgaatgaatggatgattgggctaggtatagatgtgactaggctctgggtttcagcatg

SEQ ID NO: 672761 - DNA, 2039 bp, Homo sapiens
tttwaaaatgtacttaaaagcattaaatatttgtgtgtgtgtgtgtgtgtgtgtgtgtacatgcacactaggtaaaaataatgttcttctgtagtttagaggactgatagaactaatttggtattttctttccttataagttgtagatttcatatgcatttgtcttataacctgttttttaccttgacctagcttaatgatccttctaaacaagatattctctagttaaaaggaattagaattatgtgaaattgacttgggaggtaaaactttattttcattcatttgcacatatccttattgaaaagtataaacaaagttaagatttggaaggccatgctaaactcttctgtaaatatcacatgtctatatgtctaaggatttggatacatgttgcatttgaagtagcttaggtgtctctaataaatgagtcagcttacaagcttacactcttttttctttacttttttttttttttttttgaagatagggtcttactctgacaccccaggctggagtgcaacggcacaatcatggctcactgcagccttgacttcctgggctcaagtgatcctcccatctgagacttccaagtagttcagattatagattatagattacagacttccaagtagttcagattattagctgtcacgcccacctaatttttaaaatttttttgtagagacagggttctcactatgttgcccaggctggtcttgaacttttggccttaaaaaatcctcctgctttatacttccaaagtgctagaattataggcatgcatcaccatgcccagcaatttactttctttactatgatttcaattttagacatgtcaggggcctccctgaataactgcactttttagaaataaaggccagtggttcattggccaaaaagaatttgtcgttaaaaaaaaagcaaatctgtccgatttattaattatgattgtgtgatttgatccaaccaatgatagatggcaaatttcacttttcaatttgtctaggtattagatgaaggtcacccaaaaactgagttggaaaaaaaacttgaaaaggaatccatctaatccatgtcttttagccccacacacggcagatctgagcaaaaagatgaaagaaaattccattttctttatcacagagcaaataagagtctcaacatgcaaagctgtacagcagaactttctctaatgatggaaatggtatacctctgcactgtctaatacagtagacacataccacatgtgactactgagcagtcaaaatgtggttattatgactgaggaactaaattttaaatagccatatttgtttagtgtctactatattagagagtgccactaaatattttagtcacactttactgaagcaagaattgtaaagtgccacaatccaggcagataaatatgctgcattttaataacctgtgaagtcaggttgttgccttttatgcaggtcccataatatcaggagttcactttcagatttgcacttggagccaggagtggtggctcaggtttgtaatcccagcactttgggagatcaaggtgggtgaatcacttgaggtcaggagtttgagaccagcctggccaacgtggcaaaaccccatctctaccaaaaatacaaaaatgagctgggcgtggtagcatgcacctgtagcctcagctacttaggaggttgaggcaggagaatttcctgaacctgggaggcagatgttgtggtgagccaagatcgcaccaagactgtactccagcctgggcgatagagtgagactccatctcaaaaagagaaaaaaaaagaaagtaagaaagaaagaaagaaagaaaaaatttgcactccttggaagaagtatgcacagctctgcttcattatctctgcatttctcttccttagacttggtcactattgattttctactctcctaagtttggactgctcattcctcctaatataaatgctgtctaagcatgtgttgtggaagaagtatcctctgttatcttttgggaggacaaattatgacagccattagaaaaa

SEQ ID NO: 672762 - DNA, 2039 bp, Homo sapiens
tttaaaaatgtacttaaaagcattaaatatttgtgtgtgtgtgtgtgtgtgtgtgtgtacatgcacactaggtaaaaataatgttcttctgtagtttagaggactgatagaactaatttggtattttctttccttataagttgtagatttcatatgcatttgtcttataacctgttttttaccttgacctagcttaatgatccttctaaacaagatattctctagttaaaaggaattagaattatgtgaaattgacttgggaggtaaaactttattttcattcatttgcacatayccttattgaaaagtataaacaaagttaagatttggaaggccatgctaaactcttctgtaaatatcacatgtctatatgtctaaggatttggatacatgttgcatttgaagtagcttaggtgtctctaataaatgagtcagcttacaagcttacactcttttttctttacttttttttttttttttttgaagatagggtcttactctgacaccccaggctggagtgcaacggcacaatcatggctcactgcagccttgacttcctgggctcaagtgatcctcccatctgagacttccaagtagttcagattatagattatagattacagacttccaagtagttcagattattagctgtcacgcccacctaatttttaaaatttttttgtagagacagggttctcactatgttgcccaggctggtcttgaacttttggccttaaaaaatcctcctgctttatacttccaaagtgctagaattataggcatgcatcaccatgcccagcaatttactttctttactatgatttcaattttagacatgtcaggggcctccctgaataactgcactttttagaaataaaggccagtggttcattggccaaaaagaatttgtcgttaaaaaaaaagcaaatctgtccgatttattaattatgattgtgtgatttgatccaaccaatgatagatggcaaatttcacttttcaatttgtctaggtattagatgaaggtcacccaaaaactgagttggaaaaaaaacttgaaaaggaatccatctaatccatgtcttttagccccacacacggcagatctgagcaaaaagatgaaagaaaattccattttctttatcacagagcaaataagagtctcaacatgcaaagctgtacagcagaactttctctaatgatggaaatggtatacctctgcactgtctaatacagtagacacataccacatgtgactactgagcagtcaaaatgtggttattatgactgaggaactaaattttaaatagccatatttgtttagtgtctactatattagagagtgccactaaatattttagtcacactttactgaagcaagaattgtaaagtgccacaatccaggcagataaatatgctgcattttaataacctgtgaagtcaggttgttgccttttatgcaggtcccataatatcaggagttcactttcagatttgcacttggagccaggagtggtggctcaggtttgtaatcccagcactttgggagatcaaggtgggtgaatcacttgaggtcaggagtttgagaccagcctggccaacgtggcaaaaccccatctctaccaaaaatacaaaaatgagctgggcgtggtagcatgcacctgtagcctcagctacttaggaggttgaggcaggagaatttcctgaacctgggaggcagatgttgtggtgagccaagatcgcaccaagactgtactccagcctgggcgatagagtgagactccatctcaaaaagagaaaaaaaaagaaagtaagaaagaaagaaagaaagaaaaaatttgcactccttggaagaagtatgcacagctctgcttcattatctctgcatttctcttccttagacttggtcactattgattttctactctcctaagtttggactgctcattcctcctaatataaatgctgtctaagcatgtgttgtggaagaagtatcctctgttatcttttgggaggacaaattatgacagccattagaaaaa

SEQ ID NO: 672763 - DNA, 2039 bp, Homo sapiens
tttaaaaatgtacttaaaagcattaaatatttgtgtgtgtgtgtgtgtgtgtgtgtgtacatgcacactaggtaaaaataatgttcttctgtagtttagaggactgatagaactaatttggtattttctttccttataagttgtagatttcatatgcatttgtcttataacctgttttttaccttgacctagcttaatgatccttctaaacaagatattctctagttaaaaggaattagaattatgtgaaattgacttgggaggtaaaactttattttcattcatttgcacatatccttattgaaaagtataaacaaagttaagatttggaaggccatgctaaactcttctgtaaatatcacatgtctatatgtctaaggatttggatacatgttgcatttgaagtagcttaggtgtctctaataaatgagtcagcttacaagcttacactcttttttctttacttttttttttttttttttgaagatagggtcttactctgacaccccaggctggagtgcaacggcacaatcatggctcactgcagccttgacttcctgggctcaagtgatcctcccatctgagacttccaagtagttcagattatagattatagattacagacttccaagtagttcagattattagctgtcacgcccasctaatttttaaaatttttttgtagagacagggttctcactatgttgcccaggctggtcttgaacttttggccttaaaaaatcctcctgctttatacttccaaagtgctagaattataggcatgcatcaccatgcccagcaatttactttctttactatgatttcaattttagacatgtcaggggcctccctgaataactgcactttttagaaataaaggccagtggttcattggccaaaaagaatttgtcgttaaaaaaaaagcaaatctgtccgatttattaattatgattgtgtgatttgatccaaccaatgatagatggcaaatttcacttttcaatttgtctaggtattagatgaaggtcacccaaaaactgagttggaaaaaaaacttgaaaaggaatccatctaatccatgtcttttagccccacacacggcagatctgagcaaaaagatgaaagaaaattccattttctttatcacagagcaaataagagtctcaacatgcaaagctgtacagcagaactttctctaatgatggaaatggtatacctctgcactgtctaatacagtagacacataccacatgtgactactgagcagtcaaaatgtggttattatgactgaggaactaaattttaaatagccatatttgtttagtgtctactatattagagagtgccactaaatattttagtcacactttactgaagcaagaattgtaaagtgccacaatccaggcagataaatatgctgcattttaataacctgtgaagtcaggttgttgccttttatgcaggtcccataatatcaggagttcactttcagatttgcacttggagccaggagtggtggctcaggtttgtaatcccagcactttgggagatcaaggtgggtgaatcacttgaggtcaggagtttgagaccagcctggccaacgtggcaaaaccccatctctaccaaaaatacaaaaatgagctgggcgtggtagcatgcacctgtagcctcagctacttaggaggttgaggcaggagaatttcctgaacctgggaggcagatgttgtggtgagccaagatcgcaccaagactgtactccagcctgggcgatagagtgagactccatctcaaaaagagaaaaaaaaagaaagtaagaaagaaagaaagaaagaaaaaatttgcactccttggaagaagtatgcacagctctgcttcattatctctgcatttctcttccttagacttggtcactattgattttctactctcctaagtttggactgctcattcctcctaatataaatgctgtctaagcatgtgttgtggaagaagtatcctctgttatcttttgggaggacaaattatgacagccattagaaaaa

SEQ ID NO: 672764 - DNA, 2039 bp, Homo sapiens
tttaaaaatgtacttaaaagcattaaatatttgtgtgtgtgtgtgtgtgtgtgtgtgtacatgcacactaggtaaaaataatgttcttctgtagtttagaggactgatagaactaatttggtattttctttccttataagttgtagatttcatatgcatttgtcttataacctgttttttaccttgacctagcttaatgatccttctaaacaagatattctctagttaaaaggaattagaattatgtgaaattgacttgggaggtaaaactttattttcattcatttgcacatatccttattgaaaagtataaacaaagttaagatttggaaggccatgctaaactcttctgtaaatatcacatgtctatatgtctaaggatttggatacatgttgcatttgaagtagcttaggtgtctctaataaatgagtcagcttacaagcttacactcttttttctttacttttttttttttttttttgaagatagggtcttactctgacaccccaggctggagtgcaacggcacaatcatggctcactgcagccttgacttcctgggctcaagtgatcctcccatctgagacttccaagtagttcagattatagattatagattacagacttccaagtagttcagattattagctgtcacgcccacctaatttttaaaatttttttgtagagacagggttctcactatgttgcccaggctggtcttgaacttttggccttaaaaaatcctcctgctttatacttccaaagtgctagaattataggcatgcatcaccatgcccagcaatttactttctttactatgatttcaattttagacatgtcaggggcctccctgaataactgcactttttagaaataaaggccagtggttcattggccaaaaagaatttgtcgttaaaaaaaaagcaaatctgtccgatttattaattatgattgtgtgatttgatccaaccaatgatagatggcaaatttcacttttcaatttgtctaggtattagatgaaggtcacccaaaaactgagttggaaaaaaaacttgaaaaggaatccatctaatccatgtcttttagccccacacayggcagatctgagcaaaaagatgaaagaaaattccattttctttatcacagagcaaataagagtctcaacatgcaaagctgtacagcagaactttctctaatgatggaaatggtatacctctgcactgtctaatacagtagacacataccacatgtgactactgagcagtcaaaatgtggttattatgactgaggaactaaattttaaatagccatatttgtttagtgtctactatattagagagtgccactaaatattttagtcacactttactgaagcaagaattgtaaagtgccacaatccaggcagataaatatgctgcattttaataacctgtgaagtcaggttgttgccttttatgcaggtcccataatatcaggagttcactttcagatttgcacttggagccaggagtggtggctcaggtttgtaatcccagcactttgggagatcaaggtgggtgaatcacttgaggtcaggagtttgagaccagcctggccaacgtggcaaaaccccatctctaccaaaaatacaaaaatgagctgggcgtggtagcatgcacctgtagcctcagctacttaggaggttgaggcaggagaatttcctgaacctgggaggcagatgttgtggtgagccaagatcgcaccaagactgtactccagcctgggcgatagagtgagactccatctcaaaaagagaaaaaaaaagaaagtaagaaagaaagaaagaaagaaaaaatttgcactccttggaagaagtatgcacagctctgcttcattatctctgcatttctcttccttagacttggtcactattgattttctactctcctaagtttggactgctcattcctcctaatataaatgctgtctaagcatgtgttgtggaagaagtatcctctgttatcttttgggaggacaaattatgacagccattagaaaaa

SEQ ID NO: 672765 - DNA, 2050 bp, Homo sapiens
cctgggttcaagcgattctcctgcctcagcctcctgagtagctgggattacaggtgtgcaccaccacgcccagctaatttttgtatttttgatagagacggggcttcaccatattggccaggctggtctcaaactcctgacctcgggtgatccacccgcctcggcctcccaaagtgctgggattacaggcatgagccaccgtgcctggccacaaatattgtcttttattctatgggttacctattagccttctttatggtatcatttgcagcacagttttagatcttttttgttgttgttgtttagcttgtttatttgtttcattttatgtgcagtactcacttctgctttcattcatttatgccttgagtgtccattatgtgtcaggaacttttctagacactggtgatatgtcagtgaataggatagaacaatgtccttgctctcctgaaactaatattccactcaagaaaggcagatgataaacaaataaatcaaagatttcagacaatgataaatatgtttaagaaaatgaagtgagataatgaagtggaaaatttttatgaggcgtgtgtccagggtggggaggcagctttaggtagattcacactgttggcatttggggccagataattctttgttgtgttgtagctgtcctgtgcaaatatcctacaatgcaaggacagctgcctgtgtaaggatatctgtagcaggatctctgacctctacccactaggtaccattagtacctccctcacttgctataatygtacaaaatatctacagacactgccaaatgtcagagagaaaaatcactctcaattgagaaccactcagattaatagttgagaaaggcatctccgagtgatgacctgaagacagagtccaccttatgggaagcagtggagcaaaagcattcaagatagatggtaaataagtgcagaagcaaggtggggatgcacttgatgtgtttgagaatagaaacaaggctttagagtgacagtgtggtgaataagggaaagaatagtaggagataaaaatagagaggtaggctggggtcagattatgaaggatctagtagacagtaataagaaatttggaattattccgagtacagtataattggaagccagtaagtcagggataaatgggtgctctcaaatataggaaataagctgtagatttggggttttgtcccactttattttattttgagtttttgtgggtttttgttgttgtttttgctcaaggatccacaatcagagagtgatagagctaggactaaaacccaagtctccaggctagtaagctataggtctttctattaaacacgggtgacgaagcagtctacatttattaactgtaggattgcaattggccgttactctaactgacctttccctgaatccaccttgtttaagaattcctaatatagtacttagcatttggcatgaaaatcaaagaagatgaactttagcaagaagctaatccaaatctgcttcacagaccagcagcatcagcatcacctggaaacttgttagaaatgcagaatctcaggcccacctcaaacctactgaattaaaatctgtgccttgatagtccctagttaattagtatgcatgttaaagcttgagaagcactgatctagtttatcaaaatatcatcagaaacagtcgagtgattcaaatggttttttttaatgggcttttactgagtcagaagactaatgatggtgtcatcattaagctctcattataacatcttttttattcctttctttctttggctcacagcaattcttcactcacaaagtcctatgtagtcttccttaataacagcatacattctttcctttcatttctgcagccaccacctttgtctttaccctcactaatttgtacctagcttattatagccatatcaaaatttatgccttcctcccttcatgcccttcattgcctagagctctccgaatctcaaacttcatatggctttttcttgtcttcagagtaaaattcacatttccaactctgactttgaaggccttcta

SEQ ID NO: 672766 - DNA, 1392 bp, Homo sapiens
ttttatttgtctgatatatgtagagaccaacagtctctgcttttcaacagtccattgtctcatattggtgatgaagtggtgatagaattgagttaaagtttttcagttcttctttactcatgacgttctgtattcttaacatagtcattagaggcaaagtatgtttttattttaaaaatctctctctctctctctctctctctctctctctctctctctcagtgtgtgtgtgtgtaggttgcttgtttgttttgttttaatgaagcatctaacatgtacttaatactacctcaagagagatacaaatagaaaaggataaaaaatgtaatgtttaaattaggttattcttccccactgtttataatcttgtagaatcaaggcattaatgaatgtgtaaaacattttctaaaaatctattcattccactaaggtattttcccttcacttttaagtgctctgactcattctacaaattatttaaagctcagccactcaactactgagcacttatggcatgccagcagtgaacagagcaccaccactgctctccaggggttcatggtctagtgaccaacacaaagttggaaataaataattacaatccattgtgataagttttacattagagatatgcacagagtgctcaggggacacccacaaggagtgatttattctatgtgtaaaaatctggaaaatctttaaaaataagctgtcacttagctgagttttggaaaattagagactttttcasgtacaggtgggcaaaggatatttcagatagagggacctcattaagaacaaagtcaaaatgagaagagaaagcacagtgtgttcagttaaggtcaagttgcttatcataagcaaaggcaggagtgagggagagctaaaaatttgcaccaaggtatcagaacagattctaattgtaaataaccagtaaggacaactgtcataactgcataactttaatccttggctggatgtttaaattaggttattcaaattttaaatactctagaagggctgtgatgagatggatcactgtggttttgagaaaatgaggaatgcttcctaaaagaggtaagaagcaggattatttggcaccatttaaagcagtctgacacatcaaaggaacaggaatggtcaacacattctacttcattaatttccgctaactttactaggtatatcaatctattaagttattttaaataatggataatgttggatggggtgattaattactcaagaatagaaaggtgggtcacacatgacataattgagaggaataccagagtttgggaaagagtttctgaagtcagtatttattcactatttatgaacttgagcaaacatgaactagggataggaagtgtatgatgctgaatgacaaaa

SEQ ID NO: 672767 - DNA, 1392 bp, Homo sapiens
ttttatttgtctgatatatgtagagaccaacagtctctgcttttcaacagtccattgtctcatattggtgatgaagtggtgatagaattgagttaaagtttttcagttcttctttactcatgacgttctgtattcttaacatagtcattagaggcaaagtatgtttttattttaaaaatctctctctctctctctctctctctctctctctctctctctcagtgtgtgtgtgtgtaggttgcttgtttgttttgttttaatgaagcatctaacatgtacttaatactacctcaagagagatacaaatagaaaaggataaaaaatgtaatgtttaaattaggttattcttccccactgtttataatcttgtagaatcaaggcattaatgaatgtgtaaaacattttctaaaaatctattcattccactaaggtattttcccttcacttttaagtgctctgactcattctacaaattatttaaagctcagccactcaactactgagcacttatggcatgccagcagtgaacagagcaccaccactgctctccaggggttcatggtctagtgaccaacacaaagttggaaataaataattacaatccattgtgataagttttacattagagatatgcacagagtgctcaggggacacccacaaggagtgatttattctatgtgtaaaaatctggaaaatctttaaaaataagctgtcacttagctgagttttggaaaattagagactttttcaggtacaggtgggcaaaggatatttcagatagagggacctcattaagaacaaagtcaaaatgagaagagaaagcacagtgtgttcagttaaggtcaagttgcttatcataagcaaaggcaggagtgagggagagctaaaaatttgcaccaaggtatcagaacagattctaattgtaaataaccagtaaggacaactgtcataactgcataactttaatccttggctggatgtttaaattaggttattcaaattttaaatactctagaagggctgtgatgagatggatcactgtggttttgagaaaatgaggaatgcttcctaaaagaggtaagaagcaggattatttggcacyatttaaagcagtctgacacatcaaaggaacaggaatggtcaacacattctacttcattaatttccgctaactttactaggtatatcaatctattaagttattttaaataatggataatgttggatggggtgattaattactcaagaatagaaaggtgggtcacacatgacataattgagaggaataccagagtttgggaaagagtttctgaagtcagtatttattcactatttatgaacttgagcaaacatgaactagggataggaagtgtatgatgctgaatgacaaaa

SEQ ID NO: 672768 - DNA, 1430 bp, Homo sapiens
tgaagacaggctattctctggagaaaaataaaatggaaattgtacttaatattgcatgttaagtgtatctgtgccagataaggtggggattttgtgtgttagaccaagtgtgaagtgacacacattattttcatggggaagaaagcttattcatgtaatttaatttttttcttttttttttttttttttttggagatggagtctttgtcgcccaagctgaattgcagtggcgtgatctcagctcactgcaacctccgtctcccgggttcaagtgattctcctgcctcagcttcttgagtagctgggattacaggtgtctgccaccatgcctggttaatttttgtatttttggtagagatggggtttcactatgttgtccaggctggtcttgaacttctgacctcagttaatccaccagccttggcctcccaaagtgctgggattacaggcttgagccacctcgcctagctatttatgtaaattaaactttaattgtggtcgtatggttggcctcacaattcgcatagctgtgtgaaatggagattaggcatctgaattttggatttaaccacatcaagtttaagttggcatcctaaaaatgggtaaacattaggagaatgaggaaaagctattagttgagtgaggagcacattgggaagtgacctaaactgaggtgtttatacccctggagggggaacttgaatagtggatgtatgacttggatagcttcagagcataaaaggattaatgttcagatgctcatcttcctaccttggaaaagacactaaaggcatttctagaaacgagacatcccggaaatataaggtagagaaaggctctaccttatttttgtctgtatgacaatagtttaatttgtcctagaattcaggaaaaaaaaaatctatttgggagtaaattgttactgacttcgccagtgaaaggtaacacctgtatagcttggagattttagacacttgggagtcacctgcacccctgccccctttcaagcagttctgcctcaacctcccaaatagctgggattacaagcatgcaccagctagtttatttttttggtagagatggggtttcaccatgttggccaggctggtctcaaactcctgacctcaaatgatccacctgcctcggcctcccaaagtgctgggattataggtgtgagccactgcacccagcctaaggaacgggtagagattttagaatgtggaggttctgttaattggaatgcactccccaacagaaatctgagacaagaactgctgacctgacttgactgtcagtacaccagtgtttgtactggaayatctgtggcaaacccggagtgtgtaagagcactgaatgtaggcgataatctatatccttcagggagtctcaagacatcagtgccccttgcaacctgatcacaccaagggtaa

SEQ ID NO: 672769 - DNA, 597 bp, Homo sapiens
tatctcattttacagatgaggaaatgaatgcacacatatatttagtgacttgctcaaggttcatagctagtaagtagagctgaaaaacaaaygtggagaattggactccagagcctttattcctctgaattgcctcctgtatgattttctgtctttacgatctagtaagtggggttactgaaattttttaaccccagtttaactccagtcccactaattgtggtgacaaaataatgatgtttccccacatatgccatagagtatgatgtctgtgaagtcactaggatctgctttggaaaagcgaaagagtaatttgaacaagcaaagtacaactctcaagcaatgcttaggtttgggagagaggtttttgcatgctctgcctatgctaacttccctttgaatttcatagttcctttccgctcagagtcaggatgatgaaatgtattcagatttagacgattagaatctcaaagtcccaactcttctctctgttccctgccccaccagcagctttcttagccctcttagaagatagaggagctgattcagtctattctttcatcaaatactgattgcttgcagacttaacgccctata

SEQ ID NO: 672770 - DNA, 597 bp, Homo sapiens
tatctcattttacagatgaggaaatgaatgcacacatatatttagtgacttgctcaaggttcatagctagtaagtagagctgaaaaacaaacgtggagaattggactccagagcctttattcctctgaattgcctcctgtatgattttctgtctttacgatctagtaagtggggttactgaaattttttaaccccagtttaactccagtcccactaattgtggtgacaaaataatgatgtttccccacatatgccatagagtatgatgtctgtgaagtcactaggatctgctttggaaaagcgaaagagtaatttgaacaagcaaagtacaactctcaagcaatgcttaggtttgggagagaggtttttgcatgctctgcctatgctaacttccctttgaatttcatagttcctttccgctcagagtcaggatgatgaaatgtattcagatttagacgattagaatctcaaagtcccaactcttctctctgttccctgccccaccagcagctttcttagccctcttagaagatagaggagctgattcagtstattctttcatcaaatactgattgcttgcagacttaacgccctata

SEQ ID NO: 672771 - DNA, 595 bp, Homo sapiens
tatgatggagactcagaggtcccagcatctggtgaagcagagaagggtaaaatgcagggaaactaaggccacggtgaccagaaacagctgggcagttaaaaaatgtatgtaaggctgcgtccagggctcagaactactaactgaccaaaaagtgaacaactagctttaatttgctcccattcaatttctcttagtctaattccattaaatacatatttattgagtaccaactatgtgccaggccctaatctagattctttggatacatcaataagtataacaaagcccccagactcagggaccttgtattgagaggtggtgggagatatgcaagagaaagggtaagtacattacatatcatatgctagatgatgataaagtctatgcaaaatgattaggagtattttttttttttttgcgattttagatagagtgacyagcataggcttcactgagaggacatgtgagcaaagacacgaaagtggtgaggaaagctaggactcacttggcatccaagaaacagcgaagaggccggcaaggccagatgggacggagtgatcgagcaggagaagcagatgaggcgaaaggaatcata

SEQ ID NO: 672772 - DNA, 664 bp, Homo sapiens
actgggctacacagcaggaggtgaatggcaggtgagygagtgatgcttcatctgtatttacagctgctcctcattgctcacgttactgcctgagatctgcctcctgtcaggtcagtggcagcattagattctcacagaagtgtgagcactactgtgaactgtgcatgtgagggatctcggttgaacactttcttatgagaatctaatgcctgatgatctgtccctatctcctatcaccctcagatgggaccatctagttgcaggaaaacaagctcagggctcccactgattctacattatggtgagttgcttaattattgatatttcattatatattacaacataataataatagacataaagtgcacaataaatatactgtgctcgaatcatccccaaaccatccccccaacccttccccagtccatggaaaaattctcttccataaaacaggtccctggtgccaaaaatgttggtgaccgctgctccgtcagatatcactgggtgttttttattctgtttcaccattccatagacccagatcccaacaaccattgctcttcagtaccccttccttcttaaccaatgggaggagaattcagctatttatactctgttaaactactgggtagattcagacaatagtttacacattctgtgattg

SEQ ID NO: 672773 - DNA, 625 bp, Homo sapiens
aatggccccacatgctctctacattttccagcctttcttgtagttagctgggactttgcagctatttctggcaaggaggggatgaaatgaatgtgttacttttggacctacacatgtaagaggtggtgtgccacttccacaccctgtctttacctgctgtggggatcttgaaagccacatgttgagatggcaatatcaaaacatagtgggatcctgggtgtctcagttacatcatggagaaccgccctggaatatcacctgaactgcattggaatttatttgacagagaaataaacttgtgtttgttgagctagcaaactttaagtttcattcctgcagcacaacccggcctacttggctaatgcacatggccaacacagccctgcaggctcaaactccagcccatctctctagcttgtctgactcttcaggcatgcaagacaatttcacttcctccaagttgccatgttttctcctgcctctggttatttcccgcttgctgggcaatgtctgcctcttcccctactacttccracacatgcattttggttcaattttactcatccttaaggtcacaggctaaccatcacttccttaggaaagcctctgtaaccacctcccttcc

SEQ ID NO: 672774 - DNA, 625 bp, Homo sapiens
aatggccccacatgctctctacattttccagcctttcttgtagttagctgggactttgcagctatttctggcaaggaggggatgaaatgaatgtgttacttttggacctacacatgtaagaggtggtgtgccacttccacaccctgtctttacctgctgtggggatcttgaaagccacatgttgagatggcaatatcaaaacatagtgggatcctgggtgtctcagttacatcatggagaaccgccctggaatatcacctgaactgcattggaatttatttgacagagaaataaacttgtgtttgttgagctagcaaactttaagtttcattcctgcagcacaacccggcctacttggctaatgcacatggccaacacagccctgcaggctcaaactccagcccatctctctagcttgtctgactcttcaggcatgcaagacaatttcacttcctccaagttgccatgttttctcctgcctctggttatttcccgcttgctgggcaatgtctgcctcttcccctactacttccgacacatgcattttggttcaattttactcatccttaaggtcacaggctaaccatcacttccttaggraagcctctgtaaccacctcccttcc

SEQ ID NO: 672775 - DNA, 634 bp, Homo sapiens
ctttttacttcattaatttattgttagtattttatgcattactaatatcccatagattttgctagcatctccattatcrtttgttagaaaatatttgatctctatttgcattccttcttttacccaagggttatttaacatagaacttttatgataagaagtttccacattgatgggccttttggtattccatttatttaagtagccttttttttagagttgtattagtttcggagcaaaactgagcagaaagtgtattgttcccgtatactgcctgaccacccacacatagagcttctcccactaccagaatttcacaccagagtggtacattcgttactaccaatgaacctaaatcgacatatcattatcacccaaagttcaacacagtgtacattaaggatcgctcttgatgttgtacaatccatgggttttgacaaatatatacttacatgtatccactattatactttcatgcagaatagtttcactgccctaaaaattatctgtgctccagctattcattcctccctaccccacatcccacgtctacctctggagtccaatgatgttttttactgccttcatagttttgccttcttcagaatgtcatgtacctggaataataaactct

SEQ ID NO: 672776 - DNA, 664 bp, Homo sapiens
atctatcttagcgtcattaatacactgtcatgattaatgtaaatttttagttttttaagtcaaataatttaaacctccaattttgttcttctttatcaaagttgttagatctaggtcttgaggattcaaaaaatgaataaaaaatgstcacactgcttcttcacagctccttagcttcaaatgttttgccttctaagatctggtaccaaccaattcattagcttttccatagattattccttttcacgcaccatacgctttaatcaaagtgggtcattcacagttctgcaaatatgtctcatgctactcaccttcatgtatttaatcaaatggttctctctgcttggaatgaccatcttgtatgattggaacatatttaagtgttctatcaatccttataggcacatttaaataataattatgattatgactattatgtcagattaattatgttatggttaaaattatttaatttcattctggtaacaaatctgagaaaaagatatttttcccattttacagattggcaaactggtgtgctgggcaatttagtaaattatccaaggccatgtaattagtcaatatcaaagctgggatttgagctcgtgtcagcctggctctaaaaccccatcttgatcacagacagtcctgttttcctcagtat

SEQ ID NO: 672777 - DNA, 1345 bp, Homo sapiens
gacctggcaccatgtctgctggcctggtggccacagtagaatctcttttctctttcttctttattccctaaagtcttaaagataactattttcacaagcaatatatgcaaatatattctcactggaaagaatttgaaaaatagagaaatatggctgggtgcagtggctcatgcctgtaatgccagcaccttgggaggctgagctaggaggattgcttgagctcgggagtttgagatcagcctgggcaacatggggagaccccatctcaacaaaaaatacaaaaattagctgggtgtggtggtgtgcacctgtggtcccagctacttgggagactgaggtgggagaattgcttgggaccaggaagtcaaggttgcagtgagctgtgatcacaccactgcactccggcctgggtgacaggtgagtccctgtctttaaataaataaataaataaataaaggaagaatacgtagagtaaattatttaagttccatttcaatcaattctgaatgttaactgttttattccagtcttttttctctgtatttgtatacactttgtattgtttgtgtaaatacaagtgcagctgtatatgtgtgcatccagtaaagagtttaaccttgcctacaagaaggtctggttttgccctcaactcctaggaggtgatctttgtttgtctagggccccaagcttgccagatagtaacgtgatttcaggtggggctgaccacaccagcaagaccaacagtgtgattgagggtgggggctttggatcatgcagtatcagttgactcggagactagatcaaccatgtgggcaatcaatccaccaatcaatcaattacacctatgtaatgaaacctcaataaatactgtgaataccaaggctcagacaaccttccctgttaagcagtgctctgtgtatattgtcacatatgggtaccaggagactaacatgtccatgactccctgggaagaggacaatgacagccctgcctttggcacttctcctacactctgttctatcagcttattctcttggctgattttaatctgtattctttcactgtaatataaactgaactgcaagtataatcgcttttagtgagtttttttaagaaaattattgaagctgagggttttgggaatccctctgagtatacaattggcgtgagaaatgaagatggtcttggggacagtgctctctaactttatggttgcctaaactaattgcagtgtgtggttttacctatgtatacatgtgygtatttaaattacctaatagtgaattccattcatggtcctgggatttgaatttcatctttcatacggttggagaccttctttatg

SEQ ID NO: 672778 - DNA, 599 bp, Homo sapiens
ttgtcttccttgtaccttataactaaaaggacccctgacttagcaaaataaaactgtaaaacaatatgtttcctattccctcttgcagcaaccaaaaggatttaaaatattctctaagtaatactcctcatagttcccagtattagacaaacacagtcttccttctttaacaactaacagaggaaaatcacctgacacgtgaaaagatccaatattccggtaggatctttccgaagaatcagaataaacagtcacttgtaaagcagactctattaagaaggacaaattacaaacaaacaaactcatattgmgattcaaggagatacccacgaaatttcgtatttcaaataaaaaatgataacggaattagaaaactgtatggttatagtgaacaataaagtggacttacaccaaagatcacacaatcaacaactaaatatgcacaaaatatatggtgaaaagaattctggaagcagcataaattttacatttaaaagagaaaaagtaatattttaagtaatcccctaccgattttctaccatttccatataaaaacaaaccttatgaaaacaaataagaaaatgcattatacgccagtg

SEQ ID NO: 672779 - DNA, 630 bp, Homo sapiens
acacaggtttcctggaaaaacaaaaggagggcattgagggaaatagatcagaactgctgccagtgtaggcttgtagattccagtggtctgtgtcctgtagcactaagtggaattatttccacttcaaactataaaagtgttcacctcaagtattttgttttacatattagggtttgaaaagagagtttcacaactaaaaataactcagccaacatagtgttcttccacaccctcaggcagcctccatcatttgatacagctgtctgttcaagtctgccaacaggacagttaaaaatagatggccagtctcctttaagggtgttgcgtaattgacttatatagttttccatattcatttttctagattagttgtctctaaacatttttgcttgtgctcccttaaaagacattggaaaaatttatgtatccttcggcaaaaaaagttgaccacttaatatttttaatatgtttagataattgaaaagtttatttgtccatgggttaatattaccttatrgctaaaatcagtcaggatttagctattcctgtttttcatttatacctatagcactaaaaaaccttgttcttatacataagtaaatgagattggaaattctgttagcaatgtca

SEQ ID NO: 672780 - DNA, 717 bp, Homo sapiens
aaacaccgtacaatccaaaaaaccctactgagaataaaactaaataggcttatgataagaaatacagatattcccatgtatttacaaatatcatagacacacaaatttggtcaaatactgtaaagaaagaagaagtacctgtacctctacctctacctctacctcctctacctcctctacctcctctacctcctctacctcctctacctcctcttcctctacctctacctctacctctacctctacccacggtctccctttccctctctttccacggtctccctctgatgccragccgaagctggactgtactgctgccatctcggctcactgcaacctccctgcctgattctcctgcctcaacctgccgagtgcctgcgattgcaggcgcgcgccgccacgcctgactggttttcgtatttttttggtggagacggggtttcgctgtgttggccgggctggtctccagctcctaacctcgagtgatccgccagcctcggcctcccgaggtgccgggtttgcagaggagtctcattcactcagtgctcaatggtgcccaggctggagtgcagtggcgtgatctcggctcgctacaacctccacctcccagcagcctgccttggcctcccaaagtgccgagattgcagtctccgcccggctgccaccccatctgggaagtgaggagcatctctgcctggccgcccatcgtctgggatg

SEQ ID NO: 672781 - DNA, 717 bp, Homo sapiens
aaacaccgtacaatccaaaaaaccctactgagaataaaactaaataggcttatgataagaaatacagatattcccatgtatttacaaatatcatagacacacaaatttggtcaaatactgtaaagaaagaagaagtacctgtacctctacctctacctctacctcctctacctcctctacctcctctacctcctctacctcctctacctcctcttcctctacctctacctctacctctacctctacccacggtctccctttccctctctttccacggtctccctctgatgccgagccgaagctggactgtactgctgccatctcggctcactgcaacctccctgcctgattctcctgcctcarcctgccgagtgcctgcgattgcaggcgcgcgccgccacgcctgactggttttcgtatttttttggtggagacggggtttcgctgtgttggccgggctggtctccagctcctaacctcgagtgatccgccagcctcggcctcccgaggtgccgggtttgcagaggagtctcattcactcagtgctcaatggtgcccaggctggagtgcagtggcgtgatctcggctcgctacaacctccacctcccagcagcctgccttggcctcccaaagtgccgagattgcagtctccgcccggctgccaccccatctgggaagtgaggagcatctctgcctggccgcccatcgtctgggatg

SEQ ID NO: 672782 - DNA, 717 bp, Homo sapiens
aaacaccgtacaatccaaaaaaccctactgagaataaaactaaataggcttatgataagaaatacagatattcccatgtatttacaaatatcatagacacacaaatttggtcaaatactgtaaagaaagaagaagtacctgtacctctacctctacctctacctcctctacctcctctacctcctctacctcctctacctcctctacctcctcttcctctacctctacctctacctctacctctacccacggtctccctttccctctctttccacggtctccctctgatgccgagccgaagctggactgtactgctgccatctcggctcactgcaacctccctgcctgattctcctgcctcaacctgccgagtgcctgcgattgcaggcgcgcgccgccacgcctgactggttttcgtatttttttggtggagacggggtttcgctgtgttggccgggctggtctccagctcctaacctcgagtgatccgccagcctcggcctcccgaggtgccgggtttgcagaggagtctcattcactcagtgctcaatggtgcccaggctggagtgcagtggcgtgatctcggctcgctacaacctccacctcccagcagcctgccttggcctcccaaagtgccgagattgcagtctccgcccggctgccaccccrtctgggaagtgaggagcatctctgcctggccgcccatcgtctgggatg

SEQ ID NO: 672783 - DNA, 1927 bp, Homo sapiens
gcagactttaaaccttctttataattattagaatacgaaaatactgactatggtcaagtctattagaaatataatacatataaattttaaacacgaatataactttcaattaataatgggcaataataactgatgaggcaggaaagtttagttccactgagtaaaatctttaatatctaaggaatttctttgagaggaaaaaaactaatatttacctatttaatatatattatttataatttataatccttgacttattaaacatccaacaaagtaataaaagaggatatactaacagggatattttctgtgaacaaaagwtttcagtaaaagacactaagagaatgctctatagtgaaactaagaatttcttctctaagcaactaaatgtactttttctataatacaatttggcattaatatattaagaatgtttatattttttgatctaggaattttatatagattttttgagaaaagtatcagtgatgtaaacagagattatgtataaggatatttatcacagcctcatttattgaaatgaaataaactgacaacaacctaaatatctaatgattggcagtgattaaataaattatggtaaatctacaagctggcatattgtaaagccattataaatcatgttatcaaaagacatttggccaggcacagtagctcacgcctgtaatctcaacactctgggaggccgaggcgagaggatcacctgaggtcagaagtttgagaccagcctgaccaacatggtgaaaccccatctctactaaacgcaaaaatagctgggtgtggtggtgtgcacctgtaatcccaactactcaggaggctggggcagaattgcttcaacccaggaggcagaggttgcagtgagctaggatcgcaccactgcactccagcatgggtgacagagcaagactccattaaaaaaaaatgtaataaccacttttaatttattctattttgttacattgtacacatttatgtagagcttttaaaatatcttctggaaaaaagtatggctgaaacatggcagtaggcagggaggtagagtacatacaccataatactactacaaacaggggaaaaaggcaggttacaaaattgtttagatagtataatcctaattaaaaaaaaaacacagaaaaaatgctttttatacatttgcataattttataattagggaaaacattttaaaattagagctacaattatgaagggatagactaagaaataattacagaaagaattaaaacatgaagtaaaatacttagtgactgagaagcataaacatttacatctcacaagaatgactaaatttatctttaggagaaatagtgtcattttgaacaagtacaaacagcagagattagctgtctgggtatatgtgtacaacctgtcccctgttaagtttatacaaatactgtttttataattacacaagtattcagagaacttgcagagcaaaggttaaaactcatctaaaatctccaaaacagtatttggatcagtgctctaccttcaggaaaaaaccccaataattcccaagctaagtcatttatttatataatatatatgtatgatgttctcatagattatgtaaattataaaatataaaagttaacttaatgggataagatataaatgaaataaataatatttaaataatacattttatttattagtgggtagaaaaaaccttttggctctcactaaaaattaatattgataatatctctcagtgaaaatgtaactaaataaatttcattattttaaaaagtcttggttttaatattttgtaataaagtgattcaaagatttcaagttctacttattttgggtaaaatcatataatgatgaaagaagcatttctaaaaatatatattcaaaatgctttcactatagcaagggttggca

SEQ ID NO: 672784 - DNA, 631 bp, Homo sapiens
tgcataggtatgaggcaacaaggaattcttaattatgaagactgagatgcaaaaaagcaaaaacttagccaaaatagttcactataaaatatctacataatttggaaaagggtctcttttttttttttgcawtatatagtggttttaattttcgtttactacatccaaagtaagaaatatttttacattataacccaacaaacatttcatgaaacattatttacctttactacatgttatagatgtgtatgtttcctatttcttcctttttttgttttatgctggttacaccctactgcattatttcacgatctaccaatggatcttaacctgcagtctgatgaacattactttatggcatgcatggaccattaagtttcagccttgaatcaaattctaaattaagagtatcaagaatttcagtaaaaaagaaaagttctcagaatcaaaggaacaaacaggctaagcaacagggaaaatttttggagatagaagctggattttgccttattctcacttcattccatttgtgagcctgaacaaaaagtataaatatggcaaataaattagcattctcacagtaatcttctgtatgagaaaggttgttgtttaactacccataatataaaaa

SEQ ID NO: 672785 - DNA, 631 bp, Homo sapiens
tgcataggtatgaggcaacaaggaattcttaattatgaagactgagatgcaaaaaagcaaaaacttagccaaaatagttcactataaaatatctacataatttggaaaagggtctcttttttttttttgcattatatagtggttttaattttcgtttactacatccaaagtaagaaatatttttacattataacccaacaaacatttcatgaaacattatttacctttactacatgttatagatgtgtatgtttcctatttcttcctttttttgttttatgctggttacaccctactgcattatttyacgatctaccaatggatcttaacctgcagtctgatgaacattactttatggcatgcatggaccattaagtttcagccttgaatcaaattctaaattaagagtatcaagaatttcagtaaaaaagaaaagttctcagaatcaaaggaacaaacaggctaagcaacagggaaaatttttggagatagaagctggattttgccttattctcacttcattccatttgtgagcctgaacaaaaagtataaatatggcaaataaattagcattctcacagtaatcttctgtatgagaaaggttgttgtttaactacccataatataaaaa

SEQ ID NO: 672786 - DNA, 328 bp, Homo sapiens
ttgctgaagtaagtagagctatattatcgtcccaaaaaatcaaggacataataataaatattaccatgttatatataatatttacattgttttctaacctgaaccattttcctccttccttcatcatctttcagttrtaataaatggaaatcgggtttatagattactagataaagttgcacatttagatttacctctaaaaacacacctagtctgtacacataccaaattaactttcaaatttattttaattacaggttggtaaatggttgcaggctatgttcttctacctgaagcagatcccacgttaccttatcccatgttactt

SEQ ID NO: 672787 - DNA, 328 bp, Homo sapiens
ttgctgaagtaagtagagctatattatcgtcccaaaaaatcaaggacataataataaatattaccatgttatatataatatttacattgttttctaacctgaaccattttcctccttccttcatcatctttcagttataataaatggaaatcgggtttatagattactagataaagttgcacatttagatttacctctaaaaacacacctagtctgtacacataccaaattaacttwcaaatttattttaattacaggttggtaaatggttgcaggctatgttcttctacctgaagcagatcccacgttaccttatcccatgttactt

SEQ ID NO: 672788 - DNA, 616 bp, Homo sapiens
gaaattagctgggtgtggtggcgggcgcctgtagtcccagctacttgagaggctgaggcacgagaatcgcttgagcctgggaggcagaggctgcagtgagctgagatcatgccactgcactccagcctgggcaacggagcaagactctgtcacaaaataataataataataattaaataaaggaaaataattcattggacttttgctcaacattaaaattgttatattcattagaaagatagtcagaaggctttactttattttcctagttaagaattctttcaacaacaccattctgtcctacatgaaataattaggattcaaagagatttgaaaatgttgggctggaaccaacaagatgaaatatragagattttgtgtctgctaaagcagcttaaattacatgaacttttaaaattgccatgtcacatggctgactcacacaaaacttgtggtcaactaaagcccctgtgtctttctctgtggtgccaaataggtctttctcatgttccactttaaaagtattagacattatagattatcttattggtttcaacttatttttcttgcatgtctagattttaaaaaaaaattattaaagtataacttacgtaaa

SEQ ID NO: 672789 - DNA, 616 bp, Homo sapiens
gaaattagctgggtgtggtggcgggcgcctgtagtcccagctacttgagaggctgaggcacgagaatcgcttgagcctgggaggcagaggctgcagtgagctgagatcatgccactgcactccagcctgggcaacggagcaagactctgtcacaaaataataataataataattaaataaaggaaaataattcattggacttttgctcaacattaaaattgttatattcattagaaagatagtcagaaggctttactttattttcctagttaagaattctttcaacaacaccattctgtcctacatgaaataattaggattcaaagagatttgaaaatgttgggctggaaccaacaagatgaaatataagagattttgtgtctgctaaagcagcttaaattacatgaacttttaaaattgccatgtcacatggctgactcacacaaaacttgtggtcaactaaagcccctgtgtctttctctgtggtgccaaataggtctttctcatgttccactttaaaagtattagacattatagattatcttattggtttcaacttatttttcttgcatgtctagatttwaaaaaaaaattattaaagtataacttacgtaaa

SEQ ID NO: 672790 - DNA, 656 bp, Homo sapiens
gcaggggaaacaagtgctctgaggcaggatggcccaaagaacttctagaagcaggagagctaatattcagttttaaatagcttgcttttttgcagcataaactcctccttaaagcatcagtgaaatctgctgcacatacaagggctttgagtgagtgactatttctgggaaatcaagaaaagtggctcaggtccaggtctgcatccgtgtgaaacaaaacaagaatgatatagataggagagggggaaaaaaaaaaataacatgagcaggacgcaaaaaacagagataagaccatgacaaataagccctccagaaatgtgcataatcctgtgtcatgagtctgacttttctcaattctagaatggggtatggagaaggtaatcttatctagacctcaggggcaggtgactcagctatctgtcactcaagtgatatataatgattctgctgaggcttatgtcatgtgatttgaaggatgcaacaagaatttcctaaacaaaatatctaatatttcctcttggcttgtgccagagcctgaaatcaacaccatcatcattctttcagggtgaagcatgaaaatcttcccttaaaatacaatcatactctgacacycattaggatcactactatcaaataaaaaaaaaaaacaaacccag

SEQ ID NO: 672791 - DNA, 2114 bp, Homo sapiens
tcagtcagatgagttaacctttttagactatgaaaaggttccagcattatcatctctgggggcattcagacatgaaagttatttagcacaatgtgctatgcaaatctaacaagggataacagcttgaactcctggagcactcaattaactgtagcatctgttaaaaatgaaaaaagacatcacaaaattgaaggtaacacccctatctcctagggaaaaaaaaaatgagagttgctcaacctttagagatttatgttggggtgtaacttatagctcatgggttaagagtgacttgtgtggccccttggataaggaatttaatctctgggctaaccactcagtttctttgtcatttgagaggaaagaaagagaaaagtcaatggacccttggagaataaagatagaagattagacaccaaatgaaaaactatgaccttgtattcagccctcatctcacgactttgaatcttaccccaaaatcaccttttgaataacagggaaggtaactggagagagagataatatgaaaaggactgagaaatgctaacaagggtacataattttcatcactcccaaatgacaagctcatgtgccaggacatgggctttaattctacttatacaaaagcctgagttccaatacttaatatcttccgataattacttggccagtaatccacatcaaatccccacactccaatgattcattttgaaaagctcctaaacaagcaccaactcggcaatcttccaccctgattctcttggatggcgaaaagaaaatacttcagagttgctcaccactgggcggcacttggagtgaggtcatgtttggaaacaggagacgaaccaatagcaaagattaatggggctttggaaaagcaagtttaaacaatatgttcatgaatcgggggtaaatgtaaaccaatcaaaaagggaaaatatgtatccatcttttacgcttatatttttggccaccctgtcgaacagctgcatcttgctgccttattggctatcccaggccaaggatagtttacaagctgaagtcacaggctcagctggggaactgagttgcggcgggggtkggggggggaattaggtcaaggaggattcagtgctaaaggaggactgtgatttgcaatggttttttaaaatcccataactgctctcttactaaacaggtttttagtggtgtcataactgacatggccattttcctaagttattgcctcattggaatttcagtaaatagtgctagtcttccccatgatcatggcaagagaaaggtaggtagaaaaagacaagcatctccagaagtgataagcaacccaaatcttatgatacaagtgattcatcctaagagccagagtcaagataaatgctaagaaagctgatctgtgttgccacttctcacatacatccgcagactaacattcgaggttgaaaatcaacataaatgttcttactcaccttcttctattcaacaaggcagatatttcaattgcctataaatccccactatggaacttattacaactagtggccattttgaataaaggaaaagtaatctgtaaaaattttttatttttgatacaggaaagtatgggtattggtatgttttatagggtttcgtgccttgtatacttaagaaggaaaaatcacaaaaagccctatctattgtatgcttagtgtctagaagaacttttgtcaaatctccaagtcagtataaaaataattttttttaccttaacaactgatagtctaagaccaagtccaaagctgtgggaaaggacacagaggcagatcatttctcctagtccaagccatgtgtaaataaaggaggcaatcacatttggggaatcaatcagggtgcaacttgatctgcaatctcataactgccccataaggctgcattatcagtcaccagagagtggtctattctctgttaaagacagatgctagagaagaagcaagaccccattgcaatccacactccatgtcacagactggaaagatggacacaaagcagggatcaaaacccagccagatcatctgaagatatccaaagagattcctactggacatcaacctctagatcataagagagaaaccccaggt

SEQ ID NO: 672792 - DNA, 645 bp, Homo sapiens
ttttaagtagctccagaactgcaataacaacacttgtccaactttaaattacaggcatgaatggagaacacaggtgacacaggcaaattatatttacttatgcaatatgaattatcctgatactttgtgccaggaaatgttctaagtgctgggaatttagcagtaaagaaaggggacaaaactcctcacccacatggagtttattttctagaattggaggggagtggattgggagaacagtaaccaagggtatcaaaaattcattttagcccttagtttcctagcaaagccagctctgaaaaaaacttgtcaaagcaagatttctgtcatttccttccctggggctagaagccttttgcaccatgtttagcagctttcccacttccacccctcccaaagacttactctgggctgtgtgtctggtcagctgtgtgtcttttcccccaggagttgctcattgtgtttcaaggctgttagctcagctaatgtgyttttttattttagtaacttcataatactaatagtctctgatatttgcagagtgcttttgtatttacagagcattttcacttacagtaaccattttattcatactccaactcccatgatatagtcagaacaggttttattttcctccttttgctg

SEQ ID NO: 672793 - DNA, 645 bp, Homo sapiens
ttttaagtagctccagaactgcaataacaacacttgtccaactttaaattacaggcatgaatggagaacacaggtgacacaggcaaattatatttacttatgcaatatgaattatcctgatactttgtgccaggaaatgttctaagtgctgggaatttagcagtaaagaaaggggacaaaactcctcacccacatggagtttattttctagaattggaggggagtggattgggagaacagtaaccaagggtatcaaaaattcattttagcccttagtttcctagcaaagccagctctgaaaaaaacttgtcaaagcaagatttctgtcatttccttccctggggctagaagccttttgcaccatgtttagcagctttcccacttccacccctcccaaagacttactctgggctgtgtgtctggtcagctgtgtgtcttttcccccaggagttgctcattgtgtttcaaggctgttagctcagctaatgtgcttttttattttartaacttcataatactaatagtctctgatatttgcagagtgcttttgtatttacagagcattttcacttacagtaaccattttattcatactccaactcccatgatatagtcagaacaggttttattttcctccttttgctg

SEQ ID NO: 672794 - DNA, 439 bp, Homo sapiens
gttaaaattctataaacagggattaggatgtgtaggtttacccaagggaaaatatatttaatgtttaggtttaaaaagcaaaaaaaaagcctactttttgtttcaaaaatatgcatatgtaagtagaaaatatctgaaagctgaaaggctactatccaaaaatattaacagcagctttctctaaacagaaactaaagcagtttctcttttctttttgcttttctatacttattacatktctaccacaaacctctttgttataatttctccagttgagtcagttttacaatttggaatgcagagatcaagtggttctataatcagcatatacttcgcacgtaccattcattcaatccacacccctttaaacccctttgacacacgtcaaactcatttacatctatgtccctccaatgacaatatagtggtcaacacatat

SEQ ID NO: 672795 - DNA, 651 bp, Homo sapiens
cattggtggagttatacttgattactttctggatacctttcctctttcaaaatttgtcttctttttagagtcatgttgctccacccttcaaaaagtccactctaaaatataactggaaaattctcaatgaaaagaacccctgtccaggtaagggcatttctttgctgaggcctgatttgaaacaagtttaactaaagtgagtattttgaaaggaaaaaggtggtaagatttttcacaacagccgaggcctctagrgatgctgatttgtaggggactttcggccataaccaattgtgagaaaagaatttcacatcagagagaaagagaggcagacacagagaactgagccaaggatcacacacaaagaaactcactgtttgcagcgactgatattttataattatagttgttttcatttctgcttgttgccttgttggttgttacccactaaggtggtgccatggtggtcgttacccactaaagaggaccagcctcctcctgtggatcataaccagccggttgaaaaagttgacatgtaaatccctctgctttggtcatgaataaaggacaaaacccttccaccatgataatgatgatgactgtgaggctggcatttaaacacatgtgctgatgtgtacattatgggtgtca

SEQ ID NO: 672796 - DNA, 651 bp, Homo sapiens
cattggtggagttatacttgattactttctggatacctttcctctttcaaaatttgtcttctttttagagtcatgttgctccacccttcaaaaagtccactctaaaatataactggaaaattctcaatgaaaagaacccctgtccaggtaagggcatttctttgctgaggcctgatttgaaacaagtttaactaaagtgagtattttgaaaggaaaaaggtggtaagatttttcacaacagccgaggcctctagagatgstgatttgtaggggactttcggccataaccaattgtgagaaaagaatttcacatcagagagaaagagaggcagacacagagaactgagccaaggatcacacacaaagaaactcactgtttgcagcgactgatattttataattatagttgttttcatttctgcttgttgccttgttggttgttacccactaaggtggtgccatggtggtcgttacccactaaagaggaccagcctcctcctgtggatcataaccagccggttgaaaaagttgacatgtaaatccctctgctttggtcatgaataaaggacaaaacccttccaccatgataatgatgatgactgtgaggctggcatttaaacacatgtgctgatgtgtacattatgggtgtca

SEQ ID NO: 672797 - DNA, 1345 bp, Homo sapiens
gggttcaacttcaaagaggtctttttaatttaattttcactaccagagttgaaggccagagtgtgggaaggagtcagcatatctttgtattgcttcatttcctattccagttgaccaacttgggaaaatgactcatccatattcttggtttttgggatggtaccattgaagagaattacactgatagacttggctgataagattttcaacggtttcattagggtggtattctgaaattgttgtctcatttgtatwagaagaatcttcgtggccgggcgcggtgactcacgcctgtaatcccagccctttgggaggccgaggcgggcagatcacgaggtcaggagatcgagaccatcctggctaacgcggtgaaaccccatctctactaaaaatacaaaaaattagccgggcatggtggcgggcgcctgtagtcccagctactcaggaggctgaggcaggagaatggcgtgaacccgggaggcggcggagcttgcagtgagcggagattgcgccactgcactctaggctgggcgacagagcgagattctatctcaaaaaaaaaaaaaaaaaaaaagaagaagaatcttcgtaagatccagcatgaatatggcaaatatgccctaatttggcaagtccaaatacacatcaagcaatttacttcttgtcttgattttattacatatatgaaacgtggtcttattatccctaacgttaacaccttcatctttctgttttccatttatttttataaattcatgagtaaatgcaataaattatgcaaataataacatagatatggctggatagctgggctggtaatcacctcctccatgtaccactcaaaatgtttgctgcatcatcttttttttttttgggatggagtttcttttgctcttgtcacccaggctggagtgcaatggcacaatcttggctcactgcaacctctgcctcccgggttcaagcgattctcctgccttagcctccccagtagctgggattacaggcacacaccgccacgcccagctaatttttgtgtttttagtagagacgggatttcctccatgttggccaggctggtctcgaactcctaaccttaggtgatccgcctgcatcggcctcccaaagtgttgggattacagacgtgagccaccgcgcccagcctgctgcatcatcttttaaatgacaaatgaaagacggattaagcctgccattgtcagctgtactgaagacaaaattgtctgcatgtaaaactgaaatgcctaaacccaaaggaagtccctgaaattctgagcattctgtgtgctcatagtccaattctgcacgcgatagattgcaccatgggatg

SEQ ID NO: 672798 - DNA, 657 bp, Homo sapiens
aggagaaacagagaaacagaaaagaaattcactacaatgaatcgtgacagtgagtttagggaataagcaactcatcatgaaattttaccagagaactaattttttttgttttttgtttttttaaaaaaacggaccaagcaatttctggttcaggagctttccagagaaggagacaatttgaagactgcaaggccaaatcatacttcttccctttcctagtgatgttggatttttaaaaaaaaattcaaagctattatccccatacagtttcatgggcaaaaatgagaatactttgaacattattcaacagatattamcacctgaggtataactttccacaacatccagttttaagaacaacccactgctaactgtaaagctgtcttacagaaggaaaaaggacacatatggacattcctgtaatcaataaatatcccgtactcaccagaacaggtgggctcggaaaagaggtgaacgcaggctctcccatagccgtagagtttctcttgctgaccccactcttgagatgcagacaacccttggcttgccggaaaatgcagtgacttctgcatctggttcccctttttatagagaaagcgagtgataatgcaatcagtggataatccacagggaacaccctgtctccgcccattggat

SEQ ID NO: 672799 - DNA, 1380 bp, Homo sapiens
ttgccatttctttcaatggcaaagatgaccattacttttgcaccaactcaatatgaaactggaagacccattctaattctcttttataattctactgtgcaataccttttaggcttcttagaggggaattaggatgggctgcrgaattattagggaaagactcaacttgagggtgactagaagaagggatgtaagcagggtgtattttctcccatatctctttcaatgacatcttttctttcacagagaacaatagtcaagggacgacacagtcaaacgtggatatttgggtgagtggggtgaagcctggatttgggaaacagctggtacgtataactatgccattttcctacccaaacattaacatgtcttcctgtgatttttagggtagggtagttctatccaggggtaattttgtcctctgtcccaaggtcatctgtcaatgtctggggacacttttggttgtcataccttgggggtgatgtgtgtgactggcatctggtggatggagaccagggatacagctcaacatcctacagtgcccaggacagcctcccacaatcaagaagtgcctagtgccacatgtccatagagatagagaaatacaagcgtagggggaaagtgcctcagctggcattcaaagacctacatcaagcacctagattctcaatgccacacgcaccttgtagcaccttaataaatatcgttgccttctgggctccccactccaacacttgtgcatattccctatttcttacatttcagtaagagtcaatctaattagcttaatttttttggaaggaaaatctgagaagaaatggaagcagagaggactttgcaagaagggctactcaactaattcaaagcgtggagttgagcatctggaatgcgagttttgcttctccaggaaagggtcaaatttctgaatttgatataggtaagagaggctgagtagagtctttatgaccctccataaagaccataaagacgtctgggtcctggctttgtcagggtttctgaatgatgaaatctgtgggctctcaggatcacagaccctctacaccaacattctacatgagaaggactccattttcaaaaatgcaaattcaagggacaagagaataaaccagctctcttcttcttttcaacttcccttggtatgatggaaagtatttaagagcatattcgctatgccaccatggctaggggatagaaaaaacctcggttattttcctactctactctcacatagtaacaagaacacggaatacttcatctctggtcaccaaattattgtgggctccttttccacactgaccacacagttctccagtggaccccagctgggtgttctacaattcaattatgacattatctgac

SEQ ID NO: 672800 - DNA, 1380 bp, Homo sapiens
ttgccatttctttcaatggcaaagatgaccattacttttgcaccaactcaatatgaaactggaagacccattctaattctcttttataattctactgtgcaataccttttaggcttcttagaggggaattaggatgggctgcagaattattagggaaagactcaacttgagggtgactrgaagaagggatgtaagcagggtgtattttctcccatatctctttcaatgacatcttttctttcacagagaacaatagtcaagggacgacacagtcaaacgtggatatttgggtgagtggggtgaagcctggatttgggaaacagctggtacgtataactatgccattttcctacccaaacattaacatgtcttcctgtgatttttagggtagggtagttctatccaggggtaattttgtcctctgtcccaaggtcatctgtcaatgtctggggacacttttggttgtcataccttgggggtgatgtgtgtgactggcatctggtggatggagaccagggatacagctcaacatcctacagtgcccaggacagcctcccacaatcaagaagtgcctagtgccacatgtccatagagatagagaaatacaagcgtagggggaaagtgcctcagctggcattcaaagacctacatcaagcacctagattctcaatgccacacgcaccttgtagcaccttaataaatatcgttgccttctgggctccccactccaacacttgtgcatattccctatttcttacatttcagtaagagtcaatctaattagcttaatttttttggaaggaaaatctgagaagaaatggaagcagagaggactttgcaagaagggctactcaactaattcaaagcgtggagttgagcatctggaatgcgagttttgcttctccaggaaagggtcaaatttctgaatttgatataggtaagagaggctgagtagagtctttatgaccctccataaagaccataaagacgtctgggtcctggctttgtcagggtttctgaatgatgaaatctgtgggctctcaggatcacagaccctctacaccaacattctacatgagaaggactccattttcaaaaatgcaaattcaagggacaagagaataaaccagctctcttcttcttttcaacttcccttggtatgatggaaagtatttaagagcatattcgctatgccaccatggctaggggatagaaaaaacctcggttattttcctactctactctcacatagtaacaagaacacggaatacttcatctctggtcaccaaattattgtgggctccttttccacactgaccacacagttctccagtggaccccagctgggtgttctacaattcaattatgacattatctgac

SEQ ID NO: 672801 - DNA, 1380 bp, Homo sapiens
ttgccatttctttcaatggcaaagatgaccattacttttgcaccaactcaatatgaaactggaagacccattctaattctcttttataattctactgtgcaataccttttaggcttcttagaggggaattaggatgggctgcagaattattagggaaagactcaacttgagggtgactagaagaagggatgtaagcagggtgtattttctcccatatctctttcaatgacatcttttctttcacagagaacaatagtcaagggaygacacagtcaaacgtggatatttgggtgagtggggtgaagcctggatttgggaaacagctggtacgtataactatgccattttcctacccaaacattaacatgtcttcctgtgatttttagggtagggtagttctatccaggggtaattttgtcctctgtcccaaggtcatctgtcaatgtctggggacacttttggttgtcataccttgggggtgatgtgtgtgactggcatctggtggatggagaccagggatacagctcaacatcctacagtgcccaggacagcctcccacaatcaagaagtgcctagtgccacatgtccatagagatagagaaatacaagcgtagggggaaagtgcctcagctggcattcaaagacctacatcaagcacctagattctcaatgccacacgcaccttgtagcaccttaataaatatcgttgccttctgggctccccactccaacacttgtgcatattccctatttcttacatttcagtaagagtcaatctaattagcttaatttttttggaaggaaaatctgagaagaaatggaagcagagaggactttgcaagaagggctactcaactaattcaaagcgtggagttgagcatctggaatgcgagttttgcttctccaggaaagggtcaaatttctgaatttgatataggtaagagaggctgagtagagtctttatgaccctccataaagaccataaagacgtctgggtcctggctttgtcagggtttctgaatgatgaaatctgtgggctctcaggatcacagaccctctacaccaacattctacatgagaaggactccattttcaaaaatgcaaattcaagggacaagagaataaaccagctctcttcttcttttcaacttcccttggtatgatggaaagtatttaagagcatattcgctatgccaccatggctaggggatagaaaaaacctcggttattttcctactctactctcacatagtaacaagaacacggaatacttcatctctggtcaccaaattattgtgggctccttttccacactgaccacacagttctccagtggaccccagctgggtgttctacaattcaattatgacattatctgac

SEQ ID NO: 672802 - DNA, 1380 bp, Homo sapiens
ttgccatttctttcaatggcaaagatgaccattacttttgcaccaactcaatatgaaactggaagacccattctaattctcttttataattctactgtgcaataccttttaggcttcttagaggggaattaggatgggctgcagaattattagggaaagactcaacttgagggtgactagaagaagggatgtaagcagggtgtattttctcccatatctctttcaatgacatcttttctttcacagagaacaatagtcaagggacgacacagtcaaacgtggatatttgggtgagtggggtgaagcctggatttgggaaacagctggtacgtataactatgccattttcctacccaaacattaacatgtcttcctgtgatttttagggtagggtagttctatccaggggtaattttgtcctctgtcccaaggtcatctgtcaatgwctggggacacttttggttgtcataccttgggggtgatgtgtgtgactggcatctggtggatggagaccagggatacagctcaacatcctacagtgcccaggacagcctcccacaatcaagaagtgcctagtgccacatgtccatagagatagagaaatacaagcgtagggggaaagtgcctcagctggcattcaaagacctacatcaagcacctagattctcaatgccacacgcaccttgtagcaccttaataaatatcgttgccttctgggctccccactccaacacttgtgcatattccctatttcttacatttcagtaagagtcaatctaattagcttaatttttttggaaggaaaatctgagaagaaatggaagcagagaggactttgcaagaagggctactcaactaattcaaagcgtggagttgagcatctggaatgcgagttttgcttctccaggaaagggtcaaatttctgaatttgatataggtaagagaggctgagtagagtctttatgaccctccataaagaccataaagacgtctgggtcctggctttgtcagggtttctgaatgatgaaatctgtgggctctcaggatcacagaccctctacaccaacattctacatgagaaggactccattttcaaaaatgcaaattcaagggacaagagaataaaccagctctcttcttcttttcaacttcccttggtatgatggaaagtatttaagagcatattcgctatgccaccatggctaggggatagaaaaaacctcggttattttcctactctactctcacatagtaacaagaacacggaatacttcatctctggtcaccaaattattgtgggctccttttccacactgaccacacagttctccagtggaccccagctgggtgttctacaattcaattatgacattatctgac

SEQ ID NO: 672803 - DNA, 1380 bp, Homo sapiens
ttgccatttctttcaatggcaaagatgaccattacttttgcaccaactcaatatgaaactggaagacccattctaattctcttttataattctactgtgcaataccttttaggcttcttagaggggaattaggatgggctgcagaattattagggaaagactcaacttgagggtgactagaagaagggatgtaagcagggtgtattttctcccatatctctttcaatgacatcttttctttcacagagaacaatagtcaagggacgacacagtcaaacgtggatatttgggtgagtggggtgaagcctggatttgggaaacagctggtacgtataactatgccattttcctacccaaacattaacatgtcttcctgtgatttttagggtagggtagttctatccaggggtaattttgtcctctgtcccaaggtcatctgtcaatgtctggggacacttttggttgtcataccttgggggtgatgtgtgtgactggcatctggtggatggagaccagggatacagctcaacatcctacagtgcccaggacagcctcccacaatcaagaagtgcctagtgccacatgtccatagagatagagaaatacaagcgtagggggaaagtgcctcagctggcattcaaagacctacatcaagcacctagattctcaatgccacacgcaccttgtagcaccttaataaatatcgttgccttctgggctccccactccaacacttgtgcatattccctatttcttacatttcagtaagagtcaatctaattagcttaatttttttggaaggaaaatctgagaagaaatggaagcagagaggactttgcaagaagggctactcaactaattcaaagcgtggagttgagcatctggaatgcgagttttgcttctccaggaaagggtcaaatttctgaatttgatataggtaagagaggctgagtagagtctttatgaccctccataaagaccataaagacgtctgggtcctggctttgtcagggtttctgaatgatgaaatctgtgggctctcaggatcacagaccctctacaccaacattctacatgagaaggactccrttttcaaaaatgcaaattcaagggacaagagaataaaccagctctcttcttcttttcaacttcccttggtatgatggaaagtatttaagagcatattcgctatgccaccatggctaggggatagaaaaaacctcggttattttcctactctactctcacatagtaacaagaacacggaatacttcatctctggtcaccaaattattgtgggctccttttccacactgaccacacagttctccagtggaccccagctgggtgttctacaattcaattatgacattatctgac

SEQ ID NO: 672804 - DNA, 1380 bp, Homo sapiens
ttgccatttctttcaatggcaaagatgaccattacttttgcaccaactcaatatgaaactggaagacccattctaattctcttttataattctactgtgcaataccttttaggcttcttagaggggaattaggatgggctgcagaattattagggaaagactcaacttgagggtgactagaagaagggatgtaagcagggtgtattttctcccatatctctttcaatgacatcttttctttcacagagaacaatagtcaagggacgacacagtcaaacgtggatatttgggtgagtggggtgaagcctggatttgggaaacagctggtacgtataactatgccattttcctacccaaacattaacatgtcttcctgtgatttttagggtagggtagttctatccaggggtaattttgtcctctgtcccaaggtcatctgtcaatgtctggggacacttttggttgtcataccttgggggtgatgtgtgtgactggcatctggtggatggagaccagggatacagctcaacatcctacagtgcccaggacagcctcccacaatcaagaagtgcctagtgccacatgtccatagagatagagaaatacaagcgtagggggaaagtgcctcagctggcattcaaagacctacatcaagcacctagattctcaatgccacacgcaccttgtagcaccttaataaatatcgttgccttctgggctccccactccaacacttgtgcatattccctatttcttacatttcagtaagagtcaatctaattagcttaatttttttggaaggaaaatctgagaagaaatggaagcagagaggactttgcaagaagggctactcaactaattcaaagcgtggagttgagcatctggaatgcgagttttgcttctccaggaaagggtcaaatttctgaatttgatataggtaagagaggctgagtagagtctttatgaccctccataaagaccataaagacgtctgggtcctggctttgtcagggtttctgaatgatgaaatctgtgggctctcaggatcacagaccctctacaccaacattctacatgagaaggactccattttcaaaaatgcaaattcaagggacaagagaataaaccagctctcttcttcttttcaacttcccttggtatgatggaaagtatttaagagcatattcgctatgccaccatggctaggggatagaaaaaacctcggttattttcctactctactctcacatagtaacaagaacacrgaatacttcatctctggtcaccaaattattgtgggctccttttccacactgaccacacagttctccagtggaccccagctgggtgttctacaattcaattatgacattatctgac

SEQ ID NO: 672805 - DNA, 1067 bp, Homo sapiens
gatgatggcttgccctgtctacaggaggcagtgctgatgtcacaaccacctagaaatgcaggacgcgaacctagatcctggatggtggtttctagaaaacactctgctctaaaggagccggggctccatggagaagtggctgagtccagggcgtgggcaggagaatgactgggtgcacctggagcatctatgccgggaagtcagacacactcagaaaaggtggggacactcctgaccacctcaggagccatcagaagccactgaggttgtaactcatggaatagagtagcaactcacaaggccatcctggtgacagaaaaaccagcaactgtgtgctggggggattggtcagcagttcccgagagcagaataccaaccagcaggtgcaaaagacgtgatttaaacaagcgtcccggtaaggatgggcgggaggatgccacacagacatggtgggaggaagcmgggcagcccaggtggaggcggggcccacagtgtgtgcaggggtcttaagaggtccgtgtgtttggaaagtcacatagtaagatgttgacaaaagataaaaataaagatgaggattgggaaaaagaaaagaaaaagaaaaagaatgtgctgcagggtgatattcatctcctgtgggaaacaccagttctacccacctgccacaggcccggccgccagggtgcacccacctgctgtaggcccggccaccagggtgcacccacctgctgtaggcccggccgtccgggtgcacccacctgtcataggcccggctgcccgggtgcacccacctgtcacaggccaggccgcctgggtgcagtttttatccctattttgcagggaaagaagctaaggcgcagagaaattatgcagcttgccccagccggccgtggaaagtggaaagactcaaacccagttccactggtgtggagcccagctcctgcctgccctgcctgccccgccttcacctgctcctcatggaaagactgggctgtgagaaaggggagggctgagcagagggacccagcacacccagccctcacccagcccctgcatggcccaggccctcc

SEQ ID NO: 672806 - DNA, 533 bp, Homo sapiens
tgtgtgaccaagagcaagtgactggacatctctgaacttcagtttcccctcctgcaagatggaagttcagacaccttctttccagagtgcctgtgtgcaaagtctgcacaccagcttcaccaagaggggtcatgagtggctggcccccagcaggcactcmtacagtgacccttttctccttgacgtgccacaagattggtgaataaaccagttgcccttgtctctggcttcagggagtggctactgagaggtgccttgcagtcccatgaccctctgggcaggattgtcccacgctgggcagggggctgaagaagctaccactgcctttagggagctgcagtctctggacaggcagccccataagcagccccagtgcagggtccagccacccacctaggacactccaggctcagtggctactcacagagcttcctctcatgcttttcagctgtgagaaggtgattgtgaaaaacgctttctaaaagccaagcctatcctttgttattctacttccctttgttattccagaaaca

SEQ ID NO: 672807 - DNA, 533 bp, Homo sapiens
tgtgtgaccaagagcaagtgactggacatctctgaacttcagtttcccctcctgcaagatggaagttcagacaccttctttccagagtgcctgtgtgcaaagtctgcacaccagcttcaccaagaggggtcatgagtggctggcccccagcaggcactcatacagtgacccttttctccttgacrtgccacaagattggtgaataaaccagttgcccttgtctctggcttcagggagtggctactgagaggtgccttgcagtcccatgaccctctgggcaggattgtcccacgctgggcagggggctgaagaagctaccactgcctttagggagctgcagtctctggacaggcagccccataagcagccccagtgcagggtccagccacccacctaggacactccaggctcagtggctactcacagagcttcctctcatgcttttcagctgtgagaaggtgattgtgaaaaacgctttctaaaagccaagcctatcctttgttattctacttccctttgttattccagaaaca

SEQ ID NO: 672808 - DNA, 2194 bp, Homo sapiens
ggagaagggaagtggtgcttcggtgggaccacaggaaacgctagattttggttagtagttggaaagtaccagcaatttctctttcaacagaaaaccagaaggaggtcaggtttttcttattaaaacagagacaaatgcagactttgcaaaggaagcagggatttgcagagtgaggctggaagtcaccgaagctgagtgatattccccagagaaaggttttacattcatgtggagtgggtcagaggaccttgagttgagctgatgagcagccacaggatggcaccaggttttcacgatatggagagaaggggacctggtggtggtttggccaccgtgtcctgtttcctgaagaacagagagtgtacgtgacagctggggcctcatagccagttactgccagcaggactccatctcaattcagatcttacttcatgggactacacagaaagaaggaaagccaggccgggcatggtggctcatgcctgtaatcccagcactttgggaggctggggtgggcagatcaatagaggccaggagttygagaccaacctgaccagccttcaccaatggtgaagcccgtctctactaaaagtacaaaaattagctggtcgtggtgacgggcgcttgtaatcccagctacttgggaggctgaggcaggagaatggcttgaacccgggaggcagaggttgcagtgaggcgagattgcaccactgcactccagcctgggtgacagagcgagactccgtctcaaaaaaagaaaagaaaagaaaaaaaaagctgggctgggtgaggggctcacacctgtaatcccagcactttgggaggatcactttgggtggattgcttgagcccaggagtttgagaccagcctgagcaacatagcgagactccatccttacaaaagataagaaaacaaaagacagaaggagtggtttggagctatgcaagtgtccctcttggctctggcaatttctgggtggataacctggggtagcacccttctctttgaatcgaagtttccttatctaaactagcgatgataagacctcccttgctatgttgttataaaattacttgtgtgcctagcccagagaaggtgtgcaatgaatgagtaaatggatgaatggctaaattccacacatatttatggagtgctaagtctgtgtcaggcattaccttggggatacagctggaagtgaacaagcctcagtcttcggtttttaggagcccacattctggcagaagagacaggaagtagctgggcagggtggctcatgcctataatcccagcacttcgggaggctgaggtgggctgatcacctgaggtcaggagtttgagaacagcctggccaacatggtgaaaccccatctctactaaaaatacaaaaattagcgaggcatggtggcatgcacctgtaatcccagctactcggggggctgaggcagggaaatcgcttgaacccgagaggtggaggttgcagtgagccgagatcgagccaccacagtccagcttgggcgacagagtgaaactccatctcaaaaacaaacaaaaaaaagagacaggaagtaagtgagacagataagatcaacacagagcatgctaaacagaaaagtaggaaagacatactattcagtgttggggtgggtggggagattaatatttcagaaagggtggcctgggaagggctcattgagaagctgactgttgaataaagattggcaggaattacgcaaccagccgtgtagatctctgggagaggagaattccggggagaaggaacagtcagtgcaaaggcccttaggccagagcatgcttggggttcaagaaacagagtgagtgccagtgtgcctgaagcccagtacagaagggagaaggttgtcggagatgaaggcaaagaggtaatgacgggtgggttagagtttgcagggcctttggaggctgtgagaaggattttggctttttttctgggtcagaggggagccagtgcaggagtttgagcagaggagtggcatattacggttctccagagaaagggaaccaacaggatatacacatgtctacattaatcaattaattattttgagggggttctcccgagaaagggaaccaacaggatatacacatgtctacattaatcaattaattaattttgagattgagtttcgctctttcacccaggctggagtgcagtgg

SEQ ID NO: 672809 - DNA, 2194 bp, Homo sapiens
ggagaagggaagtggtgcttcggtgggaccacaggaaacgctagattttggttagtagttggaaagtaccagcaatttctctttcaacagaaaaccagaaggaggtcaggtttttcttattaaaacagagacaaatgcagactttgcaaaggaagcagggatttgcagagtgaggctggaagtcaccgaagctgagtgatattccccagagaaaggttttacattcatgtggagtgggtcagaggaccttgagttgagctgatgagcagccacaggatggcaccaggttttcacgatatggagagaaggggacctggtggtggtttggccaccgtgtcctgtttcctgaagaacagagagtgtacgtgacagctggggcctcatagccagttactgccagcaggactccatctcaattcagatcttacttcatgggactacacagaaagaaggaaagccaggccgggcatggtggctcatgcctgtaatcccagcactttgggaggctggggtgggcagatcaatagaggccaggagtttgagaccaacctgaccagccttcaccaatggtgaagcccgtctctactaaaagtacaaaaattagctggkcgtggtgacgggcgcttgtaatcccagctacttgggaggctgaggcaggagaatggcttgaacccgggaggcagaggttgcagtgaggcgagattgcaccactgcactccagcctgggtgacagagcgagactccgtctcaaaaaaagaaaagaaaagaaaaaaaaagctgggctgggtgaggggctcacacctgtaatcccagcactttgggaggatcactttgggtggattgcttgagcccaggagtttgagaccagcctgagcaacatagcgagactccatccttacaaaagataagaaaacaaaagacagaaggagtggtttggagctatgcaagtgtccctcttggctctggcaatttctgggtggataacctggggtagcacccttctctttgaatcgaagtttccttatctaaactagcgatgataagacctcccttgctatgttgttataaaattacttgtgtgcctagcccagagaaggtgtgcaatgaatgagtaaatggatgaatggctaaattccacacatatttatggagtgctaagtctgtgtcaggcattaccttggggatacagctggaagtgaacaagcctcagtcttcggtttttaggagcccacattctggcagaagagacaggaagtagctgggcagggtggctcatgcctataatcccagcacttcgggaggctgaggtgggctgatcacctgaggtcaggagtttgagaacagcctggccaacatggtgaaaccccatctctactaaaaatacaaaaattagcgaggcatggtggcatgcacctgtaatcccagctactcggggggctgaggcagggaaatcgcttgaacccgagaggtggaggttgcagtgagccgagatcgagccaccacagtccagcttgggcgacagagtgaaactccatctcaaaaacaaacaaaaaaaagagacaggaagtaagtgagacagataagatcaacacagagcatgctaaacagaaaagtaggaaagacatactattcagtgttggggtgggtggggagattaatatttcagaaagggtggcctgggaagggctcattgagaagctgactgttgaataaagattggcaggaattacgcaaccagccgtgtagatctctgggagaggagaattccggggagaaggaacagtcagtgcaaaggcccttaggccagagcatgcttggggttcaagaaacagagtgagtgccagtgtgcctgaagcccagtacagaagggagaaggttgtcggagatgaaggcaaagaggtaatgacgggtgggttagagtttgcagggcctttggaggctgtgagaaggattttggctttttttctgggtcagaggggagccagtgcaggagtttgagcagaggagtggcatattacggttctccagagaaagggaaccaacaggatatacacatgtctacattaatcaattaattattttgagggggttctcccgagaaagggaaccaacaggatatacacatgtctacattaatcaattaattaattttgagattgagtttcgctctttcacccaggctggagtgcagtgg

SEQ ID NO: 672810 - DNA, 2194 bp, Homo sapiens
ggagaagggaagtggtgcttcggtgggaccacaggaaacgctagattttggttagtagttggaaagtaccagcaatttctctttcaacagaaaaccagaaggaggtcaggtttttcttattaaaacagagacaaatgcagactttgcaaaggaagcagggatttgcagagtgaggctggaagtcaccgaagctgagtgatattccccagagaaaggttttacattcatgtggagtgggtcagaggaccttgagttgagctgatgagcagccacaggatggcaccaggttttcacgatatggagagaaggggacctggtggtggtttggccaccgtgtcctgtttcctgaagaacagagagtgtacgtgacagctggggcctcatagccagttactgccagcaggactccatctcaattcagatcttacttcatgggactacacagaaagaaggaaagccaggccgggcatggtggctcatgcctgtaatcccagcactttgggaggctggggtgggcagatcaatagaggccaggagtttgagaccaacctgaccagccttcaccaatggtgaagcccgtctctactaaaagtacaaaaattagctggtygtggtgacgggcgcttgtaatcccagctacttgggaggctgaggcaggagaatggcttgaacccgggaggcagaggttgcagtgaggcgagattgcaccactgcactccagcctgggtgacagagcgagactccgtctcaaaaaaagaaaagaaaagaaaaaaaaagctgggctgggtgaggggctcacacctgtaatcccagcactttgggaggatcactttgggtggattgcttgagcccaggagtttgagaccagcctgagcaacatagcgagactccatccttacaaaagataagaaaacaaaagacagaaggagtggtttggagctatgcaagtgtccctcttggctctggcaatttctgggtggataacctggggtagcacccttctctttgaatcgaagtttccttatctaaactagcgatgataagacctcccttgctatgttgttataaaattacttgtgtgcctagcccagagaaggtgtgcaatgaatgagtaaatggatgaatggctaaattccacacatatttatggagtgctaagtctgtgtcaggcattaccttggggatacagctggaagtgaacaagcctcagtcttcggtttttaggagcccacattctggcagaagagacaggaagtagctgggcagggtggctcatgcctataatcccagcacttcgggaggctgaggtgggctgatcacctgaggtcaggagtttgagaacagcctggccaacatggtgaaaccccatctctactaaaaatacaaaaattagcgaggcatggtggcatgcacctgtaatcccagctactcggggggctgaggcagggaaatcgcttgaacccgagaggtggaggttgcagtgagccgagatcgagccaccacagtccagcttgggcgacagagtgaaactccatctcaaaaacaaacaaaaaaaagagacaggaagtaagtgagacagataagatcaacacagagcatgctaaacagaaaagtaggaaagacatactattcagtgttggggtgggtggggagattaatatttcagaaagggtggcctgggaagggctcattgagaagctgactgttgaataaagattggcaggaattacgcaaccagccgtgtagatctctgggagaggagaattccggggagaaggaacagtcagtgcaaaggcccttaggccagagcatgcttggggttcaagaaacagagtgagtgccagtgtgcctgaagcccagtacagaagggagaaggttgtcggagatgaaggcaaagaggtaatgacgggtgggttagagtttgcagggcctttggaggctgtgagaaggattttggctttttttctgggtcagaggggagccagtgcaggagtttgagcagaggagtggcatattacggttctccagagaaagggaaccaacaggatatacacatgtctacattaatcaattaattattttgagggggttctcccgagaaagggaaccaacaggatatacacatgtctacattaatcaattaattaattttgagattgagtttcgctctttcacccaggctggagtgcagtgg

SEQ ID NO: 672811 - DNA, 2194 bp, Homo sapiens
ggagaagggaagtggtgcttcggtgggaccacaggaaacgctagattttggttagtagttggaaagtaccagcaatttctctttcaacagaaaaccagaaggaggtcaggtttttcttattaaaacagagacaaatgcagactttgcaaaggaagcagggatttgcagagtgaggctggaagtcaccgaagctgagtgatattccccagagaaaggttttacattcatgtggagtgggtcagaggaccttgagttgagctgatgagcagccacaggatggcaccaggttttcacgatatggagagaaggggacctggtggtggtttggccaccgtgtcctgtttcctgaagaacagagagtgtacgtgacagctggggcctcatagccagttactgccagcaggactccatctcaattcagatcttacttcatgggactacacagaaagaaggaaagccaggccgggcatggtggctcatgcctgtaatcccagcactttgggaggctggggtgggcagatcaatagaggccaggagtttgagaccaacctgaccagccttcaccaatggtgaagcccgtctctactaaaagtacaaaaattagctggtcgtggtgacgggcgcttrtaatcccagctacttgggaggctgaggcaggagaatggcttgaacccgggaggcagaggttgcagtgaggcgagattgcaccactgcactccagcctgggtgacagagcgagactccgtctcaaaaaaagaaaagaaaagaaaaaaaaagctgggctgggtgaggggctcacacctgtaatcccagcactttgggaggatcactttgggtggattgcttgagcccaggagtttgagaccagcctgagcaacatagcgagactccatccttacaaaagataagaaaacaaaagacagaaggagtggtttggagctatgcaagtgtccctcttggctctggcaatttctgggtggataacctggggtagcacccttctctttgaatcgaagtttccttatctaaactagcgatgataagacctcccttgctatgttgttataaaattacttgtgtgcctagcccagagaaggtgtgcaatgaatgagtaaatggatgaatggctaaattccacacatatttatggagtgctaagtctgtgtcaggcattaccttggggatacagctggaagtgaacaagcctcagtcttcggtttttaggagcccacattctggcagaagagacaggaagtagctgggcagggtggctcatgcctataatcccagcacttcgggaggctgaggtgggctgatcacctgaggtcaggagtttgagaacagcctggccaacatggtgaaaccccatctctactaaaaatacaaaaattagcgaggcatggtggcatgcacctgtaatcccagctactcggggggctgaggcagggaaatcgcttgaacccgagaggtggaggttgcagtgagccgagatcgagccaccacagtccagcttgggcgacagagtgaaactccatctcaaaaacaaacaaaaaaaagagacaggaagtaagtgagacagataagatcaacacagagcatgctaaacagaaaagtaggaaagacatactattcagtgttggggtgggtggggagattaatatttcagaaagggtggcctgggaagggctcattgagaagctgactgttgaataaagattggcaggaattacgcaaccagccgtgtagatctctgggagaggagaattccggggagaaggaacagtcagtgcaaaggcccttaggccagagcatgcttggggttcaagaaacagagtgagtgccagtgtgcctgaagcccagtacagaagggagaaggttgtcggagatgaaggcaaagaggtaatgacgggtgggttagagtttgcagggcctttggaggctgtgagaaggattttggctttttttctgggtcagaggggagccagtgcaggagtttgagcagaggagtggcatattacggttctccagagaaagggaaccaacaggatatacacatgtctacattaatcaattaattattttgagggggttctcccgagaaagggaaccaacaggatatacacatgtctacattaatcaattaattaattttgagattgagtttcgctctttcacccaggctggagtgcagtgg

SEQ ID NO: 672812 - DNA, 611 bp, Homo sapiens
aagactttttaatatatagcttctgtttgtgggagtgccttaagtcttctgtaatatataacccataaagaacccataaagaatgtttctcataagcacttctagtttccagaatttgtagtacttctgtaaacttggtaacctaaagcacttgagtaaatcagtgactcgcaaactttttgtcctccagacacttaaactctttttttgwtattatactttaagttctgggaaacatgtgtagaatgtacaggtttgttacataggtatatatacatgtgccatggtggtttgctgcacccatcaacccttcatctacattaggtatttctcctaatgctatccctcccctagtcccccacctccctaaactcttaaaaaagtgctgagaactccaaagagcttttgtccattgatatatacttaaccactgcagctatgatatcagcatgtcacaaagcctctggaaagccacttgtgagaaaattagaagaaaaatggcaaatatctctgagaggcggtgaatagttaagtgaatagttaagttagacatgtttagttaggaataataatgactatgtttttctaacctttattaatttttttaacag

SEQ ID NO: 672813 - DNA, 611 bp, Homo sapiens
aagactttttaatatatagcttctgtttgtgggagtgccttaagtcttctgtaatatataacccataaagaacccataaagaatgtttctcataagcacttctagtttccagaatttgtagtacttctgtaaacttggtaacctaaagcacttgagtaaatcagtgactcgcaaactttttgtcctccagacacttaaactctttttttgttattatactttaagttctgggawacatgtgtagaatgtacaggtttgttacataggtatatatacatgtgccatggtggtttgctgcacccatcaacccttcatctacattaggtatttctcctaatgctatccctcccctagtcccccacctccctaaactcttaaaaaagtgctgagaactccaaagagcttttgtccattgatatatacttaaccactgcagctatgatatcagcatgtcacaaagcctctggaaagccacttgtgagaaaattagaagaaaaatggcaaatatctctgagaggcggtgaatagttaagtgaatagttaagttagacatgtttagttaggaataataatgactatgtttttctaacctttattaatttttttaacag

SEQ ID NO: 672814 - DNA, 645 bp, Homo sapiens
taattactcaatgtattggaatatagagaatgagaagggaaactgggcaataaggctcatggagaaggcataaactagaccatgaatgactgtttgggtcatgctgaagaatttggactttcatcctgaggacaatggaggtcattacaatgtttaaatagaggaggagtgtaattacatgtgcaagtctgacatctgtgtgtgaagaatgaattggaaggggggtcaaagttgaccctggagtggcttctgttttctcaaccctagtcttttagttctgggactctgagctagcccaggccacsaggaacccatccctttctacctgctgcctttctggaagtcaaggcccttcttccttgcctgccatctattgtacactacagcaaatggatactttgctctcctatctattgtgttctctatctgaccctcactgccagatctctgggtcacaactcatcttccctccaccgtatatgctactgattgggcctccattattacctatgctatccttgtggatcttattgatttcttaatcccaaccattctccatttgtcccactccagctcgtctaaatgtctagggttaggcagatgttttccttcaataactctgaattctaagtgaccagtcctatc

SEQ ID NO: 672815 - DNA, 602 bp, Homo sapiens
gtgttgtaaggggacagccctcctgattaagaatatgtgtttaatttttattgtataaattaaacggtataaaatctaatatactaattaaaacctttggcttccaaattagacaaacctgggtttgaattccagctcccactcttactagctytgttggcttttgcaaattgatttgtttcagcaaactttggtcacctcaactgaaaatggtgataaaactagctcctactcatgagggtattatgagaattaaatgaaataatgcaagaaaaacacaaagcatgatgtctaacatatgcgaagcacttcacacactaccatgtccatttgaagctgctgttctaatattgaacttgcataggggaatagccagttttcacatttaaccctattatctacattcagatgaaacccaaataaataatacttcctaacttctttctgcccaccagttgctaataatcaacaacccactagggattttcaagtggaagtcccaacagcacatcacagtttctgtgtctgaagtcaggtgtattattttccatctaacaagaaagttcttcctcttgacttactgactactgttaaactgggaa

SEQ ID NO: 672816 - DNA, 602 bp, Homo sapiens
gtgttgtaaggggacagccctcctgattaagaatatgtgtttaatttttattgtataaattaaacggtataaaatctaatatactaattaaaacctttggcttccaaattagacaaacctgggtttgaattccagctcccactcttactagctctgttggcttttgcaaattgatttgtttcagcaaactttggtcacctcaactgaaaatggtgataaaactagctcctactcatgagggtattatgagaattaaatgaaataatgcaagaaaaacacaaagcatgatgtctaacatatgcgaagcacttcacacactaccatgtccatttgaagctgctgttytaatattgaacttgcataggggaatagccagttttcacatttaaccctattatctacattcagatgaaacccaaataaataatacttcctaacttctttctgcccaccagttgctaataatcaacaacccactagggattttcaagtggaagtcccaacagcacatcacagtttctgtgtctgaagtcaggtgtattattttccatctaacaagaaagttcttcctcttgacttactgactactgttaaactgggaa

SEQ ID NO: 672817 - DNA, 1081 bp, Homo sapiens
gatgcatatgtgttattgaaacattcttgttattttattatttttataatgatgcactattctagtatctatttttagtgatgaaaaaatgttgctgtcagtctattgttccttaggagttaatatcatttttatttttgtaccctttagaattttatatttattttagataggcgaacttgtgtttttatttctaggaagttctgttattatatcttcaaataacacttccttgtcgtgtccttcactgctctacttccaaaattctyatgcgatgtgtgatggagatcgttggtctatcgcccgtctttcttaattgttccttcatattttctctctttctatatctctaggctatattttacattagtttctcagcagtatcttcaattcattaatttatgttattactatgatctgttttggtctagagtttgtctcaaaaattagatctctatatttcaatgactgtattttttatttcaagcttttctcatagttcttttttacacctacctcttatttttaaaaatttgtgcctgattctattttatacttgttgttcttttaatgtatagtttgccttgatttgtgtctatgagcaatccaaaacatacctattttagagtctttatccaatttttccaagatattaattttatctgaggtgcattcattttcaaattttgttttgctgttgttgacttccagtagtgtgtttatgattctgatgtccaattctggcctcatccctttatcagttcgaatcctgtgtcctgtgaaggggactatattgcaatcaggttcaacacatgatgataatgtactttgcatgtatgtaaaactatagccagacaggtggaggaatcagagccatatgtgcacgaatcatatctaaaactgacatattagggctacttaatttatctatgtataaaatttacaaccagctgttggggaagtaacaaaaccagtgaaatcataggacaattatagaataatcagcagaagctagaataatcatatctaggacccacatataagggttcccaaataataactctaggcttccacatttcaa

SEQ ID NO: 672818 - DNA, 1317 bp, Homo sapiens
tgagatttgatctgggcccttagaaataattagcacttgtcctggaacagaaaagataaaaaggcatcacatgtggaagtaacatggataaattttgagccstaagtgtttgtgaagttctaggtatttcgtatgataatttatgtacctgttataacaccagtatgagaatggtaataatatctctattttaaatcaaaaataaaatagagagctaatttaacatgttcaaggtaatagacctattaaacaatgaaacgaaatataaccgaggccagtaatagcacacgtctctcacccatcccaagctccccaggtattgggggctatataatttattatcagtcaggtctgttggaggacatttgttttcctaggatccagtttactttgttatcctcgttcttattgttcagtcagaaaaagaaaaagagagcgaaaaagaaaagagaaggaagaaagactcaccagcagtgaacttagtgcaaggcatggctctatacactgtgataaagtatatataacctgtgattatgggtgctttattatatccctttattcaagaagcaggaacccagccatggtggccctgttaaccatgtagaaaaaaatatgtgcacatatctcaaatgcagaatagaggacagtaagttcaatacacatgcacatatgtaatattctatgagaaagatgaaataacttctgatggggaagagggaggaaagacattacaaagaaatgacagtgatttttaaatcctgcagtaatccagaagctagactcagctgtaccttaggcagagtatatagggccgagttttcttcttgccaagttttcagaaactttggggtgcagggatgaggcaacttttaaggtacagaatatgataataaggataaataaaaatagacaaaacccagtttggatacaaaggatttatcacatggaagtggtagacttttccagggtaacaactcctgaaatagcttttatttaaatggtctaccttttattaaaagatctaccctttattacattgttttggctgtttgtaagcaagagcttttcagattgctcaggttggacccacagttcctcaaaacaggacagtcctttaatctgtccccatatcagtcaacagcatttactaaatgacccacatatgaagagcaagagcccagtgctgctcttgaggagcttatggccccatgaaggagacaaggtagaacaataaaatcagaaacttgagtgacagaaacatctgccagatggaagctgtaaagagacgtttacgtaagtgttcagtattcaggaaag

SEQ ID NO: 672819 - DNA, 1317 bp, Homo sapiens
tgagatttgatctgggcccttagaaataattagcacttgtcctggaacagaaaagataaaaaggcatcacatgtggaagtaacatggataaattttgagccctaagtgtttgtgaagttctaggtatttcgtatgataatttatgtacctgttataacaccagtatgagaatggtaataatatctctattttaaatcaaaaataaaatagagagctaatttaacatgttcaaggtaatagacctattaaacaatgaaacgaaatataaccgaggccagtaatagcacacgtctctcacccatcccaagctccccaggtattgggggctatataatttattatcagtcaggtctgttggaggacatttgttttcctaggatccagtttactttgttatcctcgttcttattrttcagtcagaaaaagaaaaagagagcgaaaaagaaaagagaaggaagaaagactcaccagcagtgaacttagtgcaaggcatggctctatacactgtgataaagtatatataacctgtgattatgggtgctttattatatccctttattcaagaagcaggaacccagccatggtggccctgttaaccatgtagaaaaaaatatgtgcacatatctcaaatgcagaatagaggacagtaagttcaatacacatgcacatatgtaatattctatgagaaagatgaaataacttctgatggggaagagggaggaaagacattacaaagaaatgacagtgatttttaaatcctgcagtaatccagaagctagactcagctgtaccttaggcagagtatatagggccgagttttcttcttgccaagttttcagaaactttggggtgcagggatgaggcaacttttaaggtacagaatatgataataaggataaataaaaatagacaaaacccagtttggatacaaaggatttatcacatggaagtggtagacttttccagggtaacaactcctgaaatagcttttatttaaatggtctaccttttattaaaagatctaccctttattacattgttttggctgtttgtaagcaagagcttttcagattgctcaggttggacccacagttcctcaaaacaggacagtcctttaatctgtccccatatcagtcaacagcatttactaaatgacccacatatgaagagcaagagcccagtgctgctcttgaggagcttatggccccatgaaggagacaaggtagaacaataaaatcagaaacttgagtgacagaaacatctgccagatggaagctgtaaagagacgtttacgtaagtgttcagtattcaggaaag

SEQ ID NO: 672820 - DNA, 631 bp, Homo sapiens
ctgcaagagcctggtgactagcctgtagcctgatgcttgtgtgacccaaagaccaacattgcatgtgcaatgttgactcagctcataaacgtcataacattgctctaatgttgaaagattgctgcagaacacattttctcagagcaccggaattttcctagagcggctgttttactttgctaatttgaggatttttgtttggatgccttagagtaagtgacaagagaagagaggggaaaagtttattttaatgctgctgaatttaatgacaagtaattggttccacaggtactgtattcattgacctttttccatatggagctctcagaaaattccattgctattgatcccctccgattttaatgctataatgatgttgttcccacacacaagggaaatgattatgtgctgtgactgctayactttgaattgtgtgaataattgtgtacatatttatatacatatctttgttgtcctagtggagttctcaatgcacttgaaatggtttgtgaacgtcttttctaaatcccctccagatgtgtcaaatagcatactgtaaatcagacttttctttccatttttttctttttcctttggtctgctggtatttggttttaacgtgccaagcatt

SEQ ID NO: 672821 - DNA, 585 bp, Homo sapiens
ataaattacccagtcttgggtatgtctttattagcagcatgagaacagactaacgtactgtccctaagtcctattttcccacatgtggttacaatgagataggcccctcacttgatagtgtcttcataattaagcaagaagagaagtcagtctgatgggaacagtagtggtagaacttggcattggcctaggccctgagtgtcctgcaggtagcataggagttcaccctgcagagagtggtgacatgaggaacttgagcatcatctagaaatccaggcatatactggaacatgggcaggattcttgactcctccatttctgcctccctttctcaggccaggctccatttactgtgtttttggtgtgtggacaagattcttggggctcaggatggtggtggtagtgatggacctagaacctggcctttttygctggagagcaggtggaatatttttaatattctttttgccagaaaaattgtaagagaaaataaataatttaaatgtaaatttaattataaaatttagaattaaacataattataaatttaattataaaattaagaattaaacataattctaaatt

SEQ ID NO: 672822 - DNA, 1132 bp, Homo sapiens
taaataaaagaggtttaattgactcacagtaccacatggccggggaagtctcaggaaatttacaatcatggcggaaggcaaaggcggaagcaagcaccttcttcacaaggctgcaggagagagagagcgaggaagcaaggaaatgagaactcacccactgtgacgagaacagcatgggagaaactgcccacatgatccaatcacctcccaacaaatccttccttcgacacgaagggattaccatttgaggtgatatttgggtgggaacacagagcaaaaccacgtgagtagtattagagtttattcttcattctgatggaaatagcaatacaacaaaagacagtcttaaaaatcctcactattgtttatctcaacctcttctttgggaagtagaataattgcagccctggacatgtctaattcatgagggcacatagatataattcacgttttgcctcatcaagtattctatagagggaaaagactaaaatatgtgaaaagttgctacaataaaaaaatgtaatttataatttttggaattatgctagcaagatgttgtgaacaggttttcccaattcagaacaccaaaaatattaaataaaacatgaagataagaaatatttttctttctttaaatagataaactagagggacagtaaaaaaaataagtgaaactagaaacaacacaggggtcatgagggatgaaggcatctcaagtagcatttccaagatagcatctgccaaatttggagtaaacatgtatgtgtgctctgctaaggccagttatacatttaaggggaggtgaaaggtcagctcagacagctgcccctattgccartgagcacgcatcctttcctcccaactcccccaacgaagccaagattcctttattctttcacttaggaaaccaggaaaaaaaactagaaagcaataaggtgcttcatttcctatcttggtcttggctccaggtggagtataaaaaatcattaactttctttgtcatcatttattgtctagtgggctttataaatattatgttggatctagagtctatgaaatctatctacagagtttgtcctgtggcagaattttaagaaaatcagagataaatacaattactctaaataaaaca

SEQ ID NO: 672823 - DNA, 1132 bp, Homo sapiens
taaataaaagaggtttaattgactcacagtaccacatggccggggaagtctcaggaaatttacaatcatggcggaaggcaaaggcggaagcaagcaccttcttcacaaggctgcaggagagagagagcgaggaagcaaggaaatgagaactcacccactgtgacgagaacagcatgggagaaactgcccacatgatccaatcacctcccaacaaatccttccttcgacacgaagggattaccatttgaggtgatatttgggtgggaacacagagcaaaaccacgtgagtagtattagagtttattcttcattctgatggaaatagcaatacaacaaaagacagtcttaaaaatcctcactattgtttatctcaacctcttctttgggaagtagaataattgcagccctggacatgtctaattcatgagggcacatagatataattcacgttttgcctcatcaagtattctatagagggaaaagactaaaatatgtgaaaagttgctacaataaaaaaatgtaatttataatttttggaattatgctagcaagatgttgtgaacaggttttcccaattcagaacaccaaaaatattaaataaaacatgaagataagaaatatttttctttctttaaatagataaactagagggacagtaaaaaaaataagtgaaactagaaacaacacaggggtcatgagggatgaaggcatctcaagtagcatttccaagatagcatctgccaaatttggagtaaacatgtatgtgtgctctgctaaggccagttatacatttaaggggaggtgaaaggtcagctcagacagctgcccctattgccaatgagcacgcatcctttcctcccaactcccccaacraagccaagattcctttattctttcacttaggaaaccaggaaaaaaaactagaaagcaataaggtgcttcatttcctatcttggtcttggctccaggtggagtataaaaaatcattaactttctttgtcatcatttattgtctagtgggctttataaatattatgttggatctagagtctatgaaatctatctacagagtttgtcctgtggcagaattttaagaaaatcagagataaatacaattactctaaataaaaca

SEQ ID NO: 672824 - DNA, 3183 bp, Homo sapiens
gaaggaatcgttttggaataatttatgatactgtttttttaggataaaagtaaaagtataaatctccctagattggtctaccatgtcaaaatttcaataccaggaagtttgctctataaatgctttggtgaagaatttttcattgggttgatatatctgtttttagaagaatgctccatagagatcagaatttttttttctttcttgaaccacttcagagagaactcagtgaactagctgccaatcttggcattcagttcccccagagagcagtgttatttaccaaattggttttagctgactaccagagaagcagaaatgtgaagcaaacacctaactccttccacatgttgaatccagtaccagggaagtaaaacttaacatttataaagaattatataatttcaacttttttttctgtcaatcaaattcttactccagcattctagtgtctgaagaatactggtaagtagtctcagggtaccaaagataggagagagagagagagagagagagaaagagaaaagagaggggaaggaagggaaggggaggagattagaaaagagagagaatatttgacttttagaagtgtggacacaaaaaaataaaataaaaatgtactcttgatgttgtcaaatataatcatacagtctggctctcttcacttcctgaccacattcactcttgaaacacaaaatcaattccagctccctgaagtcacttgttgtgggtcaccattaataccctaattgcagaaactactttgaaattttttagtctagtatcttaatcatgtttgaccactctctgctcttgtaagctcccatccagggcacaatctcctaatttctcatgtatcacagactagtcttacatgtctcctaggcaagcttctcctttgaccaatcccatctgtttcttagacgtaaatccttaggttctctccccgttctcacctaattttttccctttcytgggtggttttatcaatggcctcatctaccaacaacatgactcattaatttcaagtctccagcccagctctccctcctgagcttgtgtattctacggccagctgcttatgcagggaatatttataactaaatgtgccattgtaactgcagcatccttaaactcgaataaccttcccagacagatgctccagaaagtagtatctttgtgataatatgattaaatgataggtatcatggtacaagcagctggatgagtaaaaccagaggattatgtttatgataaaataggaaaataagagaagttaaatattcggtatttaagagtttaacatgtcataaagagaaaatagatggtgcaactgaatgcatttttaaattgaaatctaccatgtaaaatttttttattatttcaatagactataagttccattaagtgtaggacaaagatagtctttcctaccactacactgcaatttctccaatagttgtgttttaataaacatttgtggatttctggtaatattataataatgccaattgtgatgatgatagtaaaggtattttgcagtaacatgtgctaattatttgttactggtacattttaggtgctcagtaaattttagtggataaaagataaaagagtaattttttacacatttgggttttttaaattttttaaaatttaatttaattttatttgaaattccaggatccatgtgcaggatgtgcaggtttgttacataggtaaacatgtcccatggtggtttactgcacctatcaacccatcacataggtattgagccctgtatgcatcagctatttatcctgatgctctctctccccctgccccccgcaataagccccggtgtgtgctgttcccctccctgtgtctagtacacatttcttttataagttggagatagctagctctaggttgtgggtagagattcctaattctggagatagcttcgccaggcatgggtgtgcagggaagaacggaaaagtagttgctgatactatagacgcacatctcctagagaatgtaggggagggtgggcgagataggggatagaatttctaggttcctctttcacacccatcctggcttttcaagcttccattgggaatgaaggtcaaacagaagaaacagatatgttcttagtttctttgtgccagtcccagatgcctcagaacaacaaataatagtttccagaaaataatgagagactgtatgtgtgtgggtgtgtttgtgagattggtagggacagaacaggagtctcagtaaaatagtaaatagagatgacaaatgttactcagttcctgggtgtatcgggagctaagcttctttccagctgtggagaaagaatacgtgtaagaacaagagctacaggtgtttctactagatatcacctaggctagtgctattacagacagacacacacagacacacacatataaatataaccatatataaatataattttaaaaccatgattataaatatcatattatatggttataaaactgtgattaattttcttaaatctaaggtgctaagtaagaggaaaggtcatttgccaagaattaacagtgtggagtcaggtttgtagttaaaacattatcaaagttatttgagaaaaattcattgtgaaaggtaataggaagtcactgaaatgcagagcaatagtaaaagtcaagagaaatcagcctgtggttttagtgggaaaaaaaatactttcgtgattgtcttcagcaagcatgatttcgtctaaattttcaaaatttgtagaaaagaggtaccacattatttctttacacagataaagaattaaggcacagagaggatagttcctaccctgagatcatatagcttaccagtggtttttcagtctgtattgtgagttgacagaggttttcttccctccaaaaccttgtccttgatttatgtcatataaaggaatcactgaggaggtttcaaatgcaggtttaatgcagaatagaattttgtttctttattcagttatctctgaaattgacaaattgctagttaaaaacaaaacctaaacagaaactttcattcattgctggtggaagtagaaaatggtgcacccattttgaaagacagcatggcagtttcttacaaagctaaacttagtgttactgcataatctagccatcgttcttacagatatttatacacatgatttga

SEQ ID NO: 672825 - DNA, 590 bp, Homo sapiens
cgaggtcagaagttcgagactagcctgaccaacatgatgaaacctcgtctctactaaaaacacaaaaattagccagacgtggtggtgcawgcctataatcccagctactcgggaggctgaggcaggagaatcacttgaaccagggaggtggaggttgtagtgagccgagatcgtgcctctgcactccagtctgggtgacagagtgacactctgtctcaaaaaaaaaaaaaaaaaagtaaagggaagaaacacctccatttattgagcaatggtccaggttctttcacacctgagagcagaggcgccttctacacttcagtattttcttaagaccctggtttctccccatttagctctgcagtggttctgcgttccagtgctccccaccacatattccacatgctggacacactgaaccgttaacatttcttggaggtgcgctgctggtttgccaccaggcttttgttcatgcagggaaaatgaacaatcttaagacacacaaaaggcacagatgctggtatccttgccactttttgctgtataatttatttgcccatactaacactgggtgaaaagattatttttgctca

SEQ ID NO: 672826 - DNA, 641 bp, Homo sapiens
gggctccagcctcagctttaggcacagctccccaaaggtgtgttggtgcttttgtgttagtccttcatcctggagttttcttcttcatctaaatgctaaaatactgcctcccgtgggaagtcttccaagatttctcttagcctgaacaacagctcatcttttgggtcccagtgcactatcagtgagtgttaattcttgtctgtgtttctcacacaatggaacacacttgagagcaagtaccagccttttttatttccacttgcacctagcaaaatttttccacaaatttaaaacaaagtaagtgctacttaactaaataataatttcccctggaatctcctaatatcaacctattccatgagggatcatttagaaatgccctttaggaatccatataaacataacattctgaaaattttcataaaatatctgaggcaattaaactataacagctttgtgttagaacttcaaataatttctaagtgactgtatttttttctggattgtcttggatgtttgctttgatatctcatatttattayaatctttcttctcatttgaaatcaaaattcatttgttactaaaaaaaaataagggcaaaacctcaaatccaaacacctctcttttagagtgaggtggta

SEQ ID NO: 672827 - DNA, 595 bp, Homo sapiens
ttttttggtttggtagcatagttgcaacttcaaggcaagcttccttccagctcccacgtaagagttctcaaaccttacggcatcccactgtcttcggtttttcactctgtttcttcacccaatcatggaagctgccgttttaaaagaaacaaattgatttcccttggtaaaaggggtggatatggggatggggacaccagacccagaagaggcaaggattaacaagataggagtaaatatttactggacctgtggacatggagaacttcaaaattctctaaagcaagatttcagtttgcaaaactgcttctgggttaataaattctaaaacaatgaacagccaattgtttttttcttaatttataagataygcttatattatttcttaaattgtctaaataatatctaaaatcataagattatttacagcccccagaagtcattagtatctactcaaaacagcatgtgagctcttctagacaaatgggtatttatcttatccagtggaatctccaagagacagatttcagagtctcttgtagtgtgacacgttctagttcctatcagtccaaacagagcacctgatgggctcctg

SEQ ID NO: 672828 - DNA, 595 bp, Homo sapiens
ttttttggtttggtagcatagttgcaacttcaaggcaagcttccttccagctcccacgtaagagttctcaaaccttacggcatcccactgtcttcggtttttcactctgtttcttcacccaatcatggaagctgccgttttaaaagaaacaaattgatttcccttggtaaaaggggtggatatggggatggggacaccagacccagaagaggcaaggattaacaagataggagtaaatatttactggacctgtggacatggagaacttcaaaattctctaaagcaagatttcagtttgcaaaactgcttctgggttaataaattctaaaacaatgaacagccaattgtttttttcttaatttataagatatgcttatattatttcttaaattgtctaaataatatctaaaatcataagattatttacagcccccagaagtcattagtatctactcaaaacagcatgtgagctcttctagacaaatgggtatttatcttrtccagtggaatctccaagagacagatttcagagtctcttgtagtgtgacacgttctagttcctatcagtccaaacagagcacctgatgggctcctg

SEQ ID NO: 672829 - DNA, 2045 bp, Homo sapiens
ggatttagcacatgttatattccagtctctgggttaggtgtttaatatatattatttatttacttctataaataactctaaaaattatattatctccctttgacacatctgagattcaaagagtttaaatgacttgatcaagttacatggttaataaatatcaaaaggcactttcctgcccagactggtgtggcctcatgctgtgtcatttccactctccacaaggctgcttcaagtagaaaatagtcaatgcttcctcaagacctcaggaaccccaggcagctagccacgtccagctgaaggcaattgacagatctcaggcacggtctcttaaaagcctccagccccctgtaggttcaagcccatggataaactgccatctggagccctgcagcatcaacagactcaggtagagctttcagcccttcagaactggtcatgttgtccccagggtagttgtattagttatctattgcagtgtaaaaaattacagcaagtttagtggtgtaaaacatacattactatctcatggtttcagcattcaagcatctggccatggcttaactaggtcctctgctcagagtctcacaaggcacaaagtattggccagttgcattttcatctggagcttgggctccacttccaagctcatgtaggctattggcagaattcagttcctcccaatggtaggactaaggtcctcaagtcctagatgctgcctccctccagaggcagttgacagcatggctgtttgctttttaaaagcctgcaggagagcatctgttatggactgaatgtttgtgttctcccccaaatctgtatgttgaaatcctaacccacaatgtgatcatattaggagatggggcctttgagagattattaggccatgaggatggagccctcattaatgggattagtgcctctatataaggaactccagagagctctttggctctctttctgtcatttgagaaggcagctgtctacaaaacaggaaaagagccctcaccagaacctaaacatgctggcactctgattttggtcttccagcctccagaactgtgagaaataagtttctattgtttacaaatcactctgtctgtggtaatttgccatagcagctccaagggactaaggcagtgcctcgttcctgaggaaggacacatgcctcctttaaggactttcatttgattaagtcaaacccttgcaaaataacctcatttttggttcactcaaaatcaaatgatttgggacctcaattacatctgcaaaatctcttcattttttgcaatataatgtagacaaatcacaggaatgatatcccaccctattcacaggacttgcccacactcatagggagggaattatgtacagcaagtacaccatggagcaagaatttgaggatcgtcttagaattccacctgccatggggcaagaatttgagaatcgtcttagaattctgcctgccatgtgaaactcattcctagcaccgtggatgctttgatctccttctggctaaaacaggacctcgttatctaggcagagccagagaagagtctatatatgagccacatgcattttggaattgcctgtctccatttgcttttgtgcaggggtcacacaccaccatcagtgaggtttggccatgggtcagcatttctgatgaaagatttcatgggaaaaggatgacatttatgtcwaaagttgatttggtggttagctttggtgattatcttttaattatctctgcttcccctctcccccattgttgttaacagtcaagacttagttgtgcatattatttattgaaagagctaaagaggaaaaggccaaggctaaagcctaataactgagaggaaacaagtcagaagacatctaaatgtcaattgatggaattggcttcttgacttgaagattatatctttaaacagtcttgggaaacaccattttaattcaacaaaggaattcttataaatacaatttaattgctttttcaaggattgtctattgagaccccacattaggttttgttttgtcttgttgtg

SEQ ID NO: 672830 - DNA, 591 bp, Homo sapiens
tcaaaaataaaattatttaaaaatccaatgcaatgattctggtggtgtactaggctctgggagagcgaaacagcaaatattccctatcagcctacaatctactagatatttttaaagttttatggctcatcggtgacacaacacagctttaggtagattcccaatatcaaaacatgtgtaaacaaataattataagaaaaatagtaattgttttcctaaagatatgggcttagagctttgaaagtgcatgttgtgggctgggcagcttattctgcttgaaggttagtgggaggtaacatgtaaactgggatacgaagaacgcatgcataggagcttcaaaaatggaaaagagagtaaaagcaattaatcaacgagaaatacaattttccraaaaaaaaaagaaatgtttttggaggaaaatagtttcgtatgatgatcggaccagcaaagggaatgacaggaggtgaggctaacagtcgggatgagaacaaattgtgcaggctttgcctgttgtcttaagaactatgaatttctaccccagaaagctcaaaaaacccttcatgggcattggcattctggaagttggtgaat

SEQ ID NO: 672831 - DNA, 1610 bp, Homo sapiens
tattatctaatttattagaatggtaaaattatgaataaatttaatagcacaacaattgaaagtcagagattatttttaaaaagtcatcaggatggcaatcatttatgtacgtagactatgtgccaagcactattctaaacattttccacgttaactcatttaatcattccagctaccctctacagtagttgctacctttaagaaccctgatttacagatgaagaaatcgaagtactaacaagaagtaccttgcctaaggtcataaagcctattaggagttgaattcagggggtctggatccagaatctttgatctcaactgcctcctaaagatgaagatggtacagtacagaatgkaagtaggagaagaagaagccaagttacagtatttgagataaatttttagaaaacatctggaagggattttgggatgggcagcaaaatagcagacttgggaatacactacatggcatgtaaataaaatggagttttccaaatggctcagaaacagctgccttcatgtcagaaatagaagaaatgatatttgagcatccaaccagtgttgcaaggacaaattgctggtgtcaacttgaggactcatctagaaaaaggaatgatgtttggggttagtccaaaacaattacttagaccaagtttattcttatagattaaaatgtaatgacagcctatacattataaaaaataaaaacgctagctcattgctttctataatatgtcaaattggatgaattaaatgggcaaaataattaagttggcagaaattaaccacatgtaatttattcaagacagtatttaattattttctatagcatccatggtgtctagaatagtattttcacatctttcataacaaaattgctgtgttcacatatggactcagtagtgggacttaaaaagtgatggatggttgcagctgattaggaaataataaatagccaacattcattaaaccttgattgtgttctaggccctatcctaagcactttatgccattcagttctcaaaagaaccttacatggaaagcgctattcccattttcaaatcataacattaaggcttagagaggttatgtagcaggctcaaggtggcacaattaagtggtgaagctggggatcaagttatgtattattcacagagaactgaacatttgtgcctatatgtagaagtcatattaattcaattgatgctgccgaaaaggaaatacagaggagaaaaaatgttttatttgaggcttccagaacataattctgctttccccagatacatcttctcttgtgaggctcaaggtctgcatgaaaggatttttggtcaatggttacacctacaacaaatccactagaaatgaataataccaaatatatttagtgttgtttgtggtttgcaagcttctttatcttacttaatttcactttttctcacaatcgtgagaggtactctagagagtattatgcagaaacctagtcacaggaagggaaaatgtgttgctcgcatcttacaacaagagagtgacaacaggtccctgcgatagaatccaaatctgttcatccttactcttgacccagggcctgtttcttggtttcccttaaattg

SEQ ID NO: 672832 - DNA, 676 bp, Homo sapiens
attctggcaatgatttcttggtttaagttcaaaacatgcaaactgtctcaagagaattagatgttagcaattgtattggggtatgaagtatctgatttgtaaggctgtatattttacaaccactagatactggttgaaatcattgtgacttttttattgctttgataaatgayggccttttaagggtggtgactttcttgcaatctgcttttgtaagctcatacctacacttttttaaaaaaaaacatttttatgtttatttgtcctgttgttatcatagtaagttaatagcctttgctttaccacttcatttttgttgtctatgatcataaaaagcctgacggatcaatatgaggcttttaatgtactttttctgcctttttcattaaaggtttgtagccagagtattaaaatgcagttgagacataatctcttttgagcttggttcccataaagtgcttcccagggagagagagggtcgctggcagtaagggtctacacatgctagctttcataatacaaagaaggggagcttccgctccagcagttttatgaaatttttttctcaaggattagagaatgttgagcagatgtttactgcatcctccactgtgcattctaaagcattgtcctcatttgaatgtttagttctcattgaaaggcatggctcatattg

SEQ ID NO: 672833 - DNA, 676 bp, Homo sapiens
attctggcaatgatttcttggtttaagttcaaaacatgcaaactgtctcaagagaattagatgttagcaattgtattggggtatgaagtatctgatttgtaaggctgtatattttacaaccactagatactggttgaaatcattgtgacttttttattgctttgataaatgacggccttttaagggtggtgactttcttgcaatctgcttttgtaagctcatacctacacttttttwaaaaaaaacatttttatgtttatttgtcctgttgttatcatagtaagttaatagcctttgctttaccacttcatttttgttgtctatgatcataaaaagcctgacggatcaatatgaggcttttaatgtactttttctgcctttttcattaaaggtttgtagccagagtattaaaatgcagttgagacataatctcttttgagcttggttcccataaagtgcttcccagggagagagagggtcgctggcagtaagggtctacacatgctagctttcataatacaaagaaggggagcttccgctccagcagttttatgaaatttttttctcaaggattagagaatgttgagcagatgtttactgcatcctccactgtgcattctaaagcattgtcctcatttgaatgtttagttctcattgaaaggcatggctcatattg

SEQ ID NO: 672834 - DNA, 663 bp, Homo sapiens
agaagacctctttgatgagatttaacagtctcaaaaaatactttgatgttcactagactatgttttctattcatttctttaaaatgaaaaaggagaatttcaagtcagcagccgctattaccgtatcttacaatttaattacatacacagtgaattgaaaccattgtgcaaaatggattacacatgtatacaaagatacgatttgatgatgacactggcacattattctaaactattcattcagcatgcctataattacataaattgtatgagactttttgttgcaaaggacacatttatcatattcattcacacatattatatgtgatagctgtccaacatcctgtctgggaagattttgaaaacaggacaaagaaaacatcattttaaaatgtcttcagctttttttgaatagacgtattcaaacataytctgaacattgatgtttgaacattttaatttgtgtgatgatgtagaaaatataattttagtttgtacataaacattgtgaaaatctgataataaaatttttgatacattgaagattttgtgtttttaataaaatgtgttatttaggttaacttttattttagtaagtaacaggtttttagaaactgcttattaatgtaaatgtaaccccctgtgtggcaaaagaaaagcata

SEQ ID NO: 672835 - DNA, 615 bp, Homo sapiens
tattttattaaaaaacacaagaaagccatctcaggaagagaaagaaaactgtcagtttctttaatctcttccagctgattccttatgggagaacgaacatatcattgaataattctaaatattaacatgggcagtgctagaaaccttgtccacagctgagagtttaatgggcacacagtaggtttaatcttaaacttggctgggtgtggtgggtcacgcctgtaaccccaacactttgggaggccaaggggggcagacatgaggtcaagagatcaagaccatcctggccaacatggtgaaaccccatctcaactaaaaatacaaaaattagctgggcgtggtggcacrtgcctgtagtcccagctactcaggaggctgaggcaggagaatcacttgaaccttggaggcagaggttgcagggagctgagatcgcaccattgcactccagcctggtgacaaagcaagattccgtctcaaaaataaataaataaataaaatagcaatttcaagttaataagaatttacatagtaaaatgcatgtatttcagtgatagcacatttttattgatattttaatgtcagatcattttcaagttggatgttttgtgaactgaa

SEQ ID NO: 672836 - DNA, 1048 bp, Homo sapiens
atgctgctgtgaagtttggtgctctattgtctatgcccttcccaaagagcaatcttctcagcaacctagatatcatgaacttcaatcccccaggtcctactgactaatagtagagctgggaacctcttattaaattagctctggtcatcaatttaaacatactactaggatgacaataagcagaactgcctcagaggccaccgcatggtatgtatccaccccttagaagcatgctcagggattcagtgcttccagtagacacagctgcaggacatatattctccaagctataggggctttgtagaatcttataatcttcctaatttgaataactctagagtgaaacacattgaatatatcaggctccaattttgttggcaataaagctctctcagaattccaactgtagccttgcctgctgtattgggttgattaggccgttttgcctcaaccaaaataatccatgtttttccataagttgttaarataatcactctgaataagatcatatcctgcttggacttcccacttcctgagatattgttaccaaatacaattagttagttctgtaaaatggatataggaaggcagacagctctctggagaagaaacttgagtttactaaaagaacatatttgaaacagaaccatcaaaccaaaatgacaatgtgtacacattagagataccaaggaaactcatgtgatgggatgtttagaagtaaagccaagaatgaaatggcactaagtacttagtaatggtactaagtttttattcaacgggaaaccgagattaacttccgatcaatctcaagagagattggtctagttggacattagtgttattgtgctgatggttgaaaagaatcataattcggtgtatccaggtcccattgcaggaattttcttgtatttacaacatacaattacttctatattattgtacatataaaataatgcatagattttatatatatatatacttttttctgctattccatctaaacctttagaaattgttaaacaaaaaattttctgatacttgttaaaga

SEQ ID NO: 672837 - DNA, 1096 bp, Homo sapiens
caataattcattcactgaacaaatatttattgggctcctactttttgtcaagcacttgcacaacaaatacacaggaaaagccccaaccctcttagagcttacatattggggagagaaaaatgtttcattagagtgatatggattgcagtgagttgagaaggactttggagatgaggaagagggtaacatagattattctttcaagaaatgtggaggtaaagaagagaacagtaggagagaaaagctcaagtgaagtatgagattgcttgttttatggacctagagactggggccacttatcagttgagaaaaagagtcagtggcaggagagatgaaaatggtacaaggacaagatggaaagaggccctctggggacggaaagaggaatatgcaatcaatggttcatgtggaagaggtgatatcataggaaagaagtagagatgccatcttctttgatactggatgagaagaggtgcaggtaatattaataatggttgaaatttattaaacagcatgcctagtgatgtgccaagccctgtttcaggtgctttatgaatattatctcactggatcttcacaacagccataaaatatagktactttcattattcccattttacagatgatgaaactaaggcacggatggattaggtaactcgcccaattttaagcagctagtaagtggtaaagctgaaacacaaacctaggaagttttaatgtttcttcactttttactaaggagtggctaagcaatgggaagaatctagcttcttatattatctcttatatgttaaagttggtttaatgaaattatttttgcaaaaaaaataaataaaatttatttccaagaatataaataccatttattgaaaatttaactcagtgtaaaaagtttaactataaaagtatatatgaggctattttgtaagaagaaccacaaaggataatgtttttataattgtgcttacatcaattaagaatatgagtaattggaatggggtttgaatttagcttaactatcaacaatagtaatttaaagaatttcattttgaagacaaattttatttgtgcttataatgaaaatgtactctttatt

SEQ ID NO: 672838 - DNA, 1096 bp, Homo sapiens
caataattcattcactgaacaaatatttattgggctcctactttttgtcaagcacttgcacaacaaatacacaggaaaagccccaaccctcttagagcttacatattggggagagaaaaatgtttcattagagtgatatggattgcagtgagttgagaaggactttggagatgaggaagagggtaacatagattattctttcaagaaatgtggaggtaaagaagagaacagtaggagagaaaagctcaagtgaagtatgagattgcttgttttatggacctagagactggggccacttatcagttgagaaaaagagtcagtggcaggagagatgaaaatggtacaaggacaagatggaaagaggccctctggggacggaaagaggaatatgcaatcaatggttcatgtggaagaggtgatatcataggaaagaagtagagatgccatcttctttgatactggatgagaagaggtgcaggtaatattaataatggttgaaatttattaaacagcatgcctagtgatgtgccaagccctgtttcaggtgctttatgaatattatctcactggatcttcacaacagccataaaatatagttactttcattattcccattttacagatgatgaaactaaggcacggatggattaggtaactcgcccarttttaagcagctagtaagtggtaaagctgaaacacaaacctaggaagttttaatgtttcttcactttttactaaggagtggctaagcaatgggaagaatctagcttcttatattatctcttatatgttaaagttggtttaatgaaattatttttgcaaaaaaaataaataaaatttatttccaagaatataaataccatttattgaaaatttaactcagtgtaaaaagtttaactataaaagtatatatgaggctattttgtaagaagaaccacaaaggataatgtttttataattgtgcttacatcaattaagaatatgagtaattggaatggggtttgaatttagcttaactatcaacaatagtaatttaaagaatttcattttgaagacaaattttatttgtgcttataatgaaaatgtactctttatt

SEQ ID NO: 672839 - DNA, 1096 bp, Homo sapiens
caataattcattcactgaacaaatatttattgggctcctactttttgtcaagcacttgcacaacaaatacacaggaaaagccccaaccctcttagagcttacatattggggagagaaaaatgtttcattagagtgatatggattgcagtgagttgagaaggactttggagatgaggaagagggtaacatagattattctttcaagaaatgtggaggtaaagaagagaacagtaggagagaaaagctcaagtgaagtatgagattgcttgttttatggacctagagactggggccacttatcagttgagaaaaagagtcagtggcaggagagatgaaaatggtacaaggacaagatggaaagaggccctctggggacggaaagaggaatatgcaatcaatggttcatgtggaagaggtgatatcataggaaagaagtagagatgccatcttctttgatactggatgagaagaggtgcaggtaatattaataatggttgaaatttattaaacagcatgcctagtgatgtgccaagccctgtttcaggtgctttatgaatattatctcactggatcttcacaacagccataaaatatagttactttcattattcccattttacagatgatgaaactaaggcacggatggattaggtaactcgcccaattttaagcagctagtaagtggtaaagctgaaacacaaacctaggaagttttaatgtttcttcactttttactaaggagtggctaagcaatgggaagaatctagcttcttatattatctcttatatgttaaagttggtttaatgaaattatttttgcaaaaaaaataaataaaatttatttccaagaatataaataccatttattgaaaatttaactcagtgtaaaaagtttaactataaaagtatatatgaggctattttgtaagaagaaccacaaaggataatgtttttataattgtgcttacatcaattaagaatatgagtaattggaatggggtttgaatttagcktaactatcaacaatagtaatttaaagaatttcattttgaagacaaattttatttgtgcttataatgaaaatgtactctttatt

SEQ ID NO: 672840 - DNA, 642 bp, Homo sapiens
agctggttaacattgagccagcctctaaataactctcagcttcaatttccccaactgtaaaaacggggatgcttacttctacctgcctcagagttcagaattgaacgtttttgtagcttcaagaagagtggactaactggagtagagtttatatataataaaatgtaaagcagtcatgtaattatatgacttgccagagggtaaataaaggattatattcccctttggtgttacatgataaagagagaaagcactcttaaagtagtgtttaagttgagaccaattgctgtgactgtaatttatgtggaaccagcctgtctattagtgccaagcctaatgcagacagtctccaagaatgttgagaaaaaggaaatatgataccattaaatattctgaaataaattatgttcaaaatgatcayagggaacaaataaggcaaaaggaagactctgtgtcttcctggtcttcttaagaaaaaaagataaacatattgcaattaaataaatattcatattttggaaaatgaagaaaattgtctataatgtatgcctttttaagggtaaattgaaattttttatctttggacatgagagctaatgatcatattagttctaatataatgtattagtagtaaagtcatga

SEQ ID NO: 672841 - DNA, 519 bp, Homo sapiens
  misc_feature 2, 3, 4, 5, 6, 7, 8, 9, 10, 11, 12, 13, 14, 15, 16, 17, 18,19, 20, 21, 22, 23, 24, 25, 26, 27, 28, 29, 30, 31, 32,33, 34, 35, 36, 37, 38, 39, 40, 41, 42, 43, 44, 45, 46,47, 48, 49, 50, 51, 52, 53, 54, 55, 56, 57, 58, 59, 60,61: n = A,T,C or G
  misc_feature 62, 63, 64, 65, 66, 67, 68, 69, 70, 71, 72, 73, 74, 75, 76,77, 78, 79, 80, 81, 82, 83, 84, 85, 86, 87, 88, 89, 90,91, 92, 93, 94, 95, 96, 97, 98, 99, 100, 101: n = A,T,C or G
gnnnnnnnnnnnnnnnnnnnnnnnnnnnnnnnnnnnnnnnnnnnnnnnnnnnnnnnnnnnnnnnnnnnnnnnnnnnnnnnnnnnnnnnnnnnnnnnnnnnntcaataggaccagagtgggtgagtgaaagttcatattgctgaggccagttttgatcttgatcattgccatcatgagtacttggtacagaggccctttgaacagaggaaagggtctaactggcatttacaagatgggtcttcacatcctccttgttacttagatccccttccacagatatatacattcatgtggacatcaaagaaaaaaaaatcttcatactttgtyaccaacttttcaattttattactccaagtctgtaaaccacaagccaaactattggtctttacacaggaatgactgaatataaataacacatcatgcagagtaatcaggaaatcaggctatgtggatttgtctttcatttctataaccatagataatattccatgggggcatacaataatttttttagggtga

SEQ ID NO: 672842 - DNA, 665 bp, Homo sapiens
cagaaagttgaattcacttcaggaattggaatttattcaagttgtgaaacaaaatgaaagagtggttagagagtttggattaatggaaagatatttctgaaatgatagaccaagaaatctgagacttaatgatgagagacatgaggaaaatgaatggatgtagtgaaagtggagtagtctgaacaaggttgtagaacagttgaagtggaaaaactgagtggaaacagattgaaagctaaatgtttatatgtagagtggaatgtttgcatgagcagtcttgaagatggaagcaagacaactggtaaaattcaagttatgattttggtatgttttcttatttgaatcaaggagaaaaatctttatgcatgaaaaatttgaatatcaaaaagtcctgagttttacaggttatcccatgtgtactgaaatcaccaggataaaacatgcaaaagagagcaatgctttaaatcaagtggcaaagctttctcttgctctgtccctctttctttctttctttcatttctgttctttacttgtctattactgttatttaataaataagaagaagttccccatatgttggtagagaatgatarcatgcttgccttcattgataaactgcagaaatctcaaaacatctattgttaggaaaaaatagatgccaaaag

SEQ ID NO: 672843 - DNA, 644 bp, Homo sapiens
aactcaaaagtaaattctttgaaaattgaagaacctgaggccaagaaatcttaccttagcaaacttctgggtgggggctgggttttgttagaatagcattttttataacatttttcaagggctcagtaatgtaattctacctagcatttaactttgattttctgcaaatactttaaggttgctgatttgttttaaaataagagtttaacataacagtcactctgatggctaatactgagtgtcaactcgattagattgaaggttgtgaagtattgatcctgggtgtgtctgtgagaatgttgccaaaggagattaacatttgagtcagtggactggggaaggcagaccggcccttaatctggtgggaacaatctaatcagctgccagcgaatataaagcaggcagaaaaacgtgaagaggtgagactggcctakcctcccagcctacatctttctcctgtgctagaggcttcctgccctcaaacatcggactcccaagttcttcagttttgaaactcggactggctctccttgctccaagcttgcagacagcctactgtgggaccttgtgatcatgtaagttaatatttaataaactcctctctctatatatattacatcagtcaagagacattttagggagct

SEQ ID NO: 672844 - DNA, 596 bp, Homo sapiens
cttggaaggggatgctttttgaataccattttagaatgttttcagtgggtcaggtgaaataaggtgagagacaaagagtcatgacaaagaactataaatattcttaaggtagagaagaataagtgtgcatgtgtgtggataggcccacagcactccyctaccaggaaactgaagactggagttaccaatactcaccttaatcacttgattctcaagatactccataaaacaaccagagcttgctatacattttctacatttccaacaacgaagaatacttgtttcctcttgactatgatttttagttatcaattctttgcttcttttcatctgcggaaacattagtgcatttttagaatgttaaactgtcagataaactggactttctaaatccttaacatggcattagctacaagtggacagtaaagcagggaactatcatttattaaggtacctaccagttatcaggtcttaggtttggggcactctatacattacatctgagattgaaaatcccaattaattatgatgatacattatgttaatgactaccagcttattttctttgtgcacaaagttttgtatctactgctttt

SEQ ID NO: 672845 - DNA, 698 bp, Homo sapiens
  misc_feature 52, 53, 54, 55, 56, 57, 58, 59, 60, 61, 62, 63, 64, 65, 66,67, 68, 69, 70, 71, 72, 73, 74, 75, 76, 77, 78, 79, 80,81, 82, 83, 84, 85, 86, 87, 88, 89, 90, 91, 92, 93, 94,95, 96, 97, 98, 99, 100, 101, 102, 103, 104, 105, 106, 107: n = A,T,C or G
  misc_feature 108, 109, 110, 111, 112, 113, 114, 115, 116, 117, 118, 119,120, 121, 122, 123, 124, 125, 126, 127, 128, 129, 130, 131,132, 133, 134, 135, 136, 137, 138, 139, 140, 141, 142, 143,144, 145, 146, 147, 148, 149, 150, 151: n = A,T,C or G
aatgcaactataagagagggaacatggacagacagtaatcaactttaaagtnnnnnnnnnnnnnnnnnnnnnnnnnnnnnnnnnnnnnnnnnnnnnnnnnnnnnnnnnnnnnnnnnnnnnnnnnnnnnnnnnnnnnnnnnnnnnnnnnnnnaggacttaaagaactctggctcagagggcacagcaagcccctctagttcagaccttcaagtagacaggctgcagttctgtctctactgacccatcttcagaatgcatcttagcccagttgaccactccattttaactatgacctcaatgaccaccaaaaatcatttaatttggccgggcgtggtggctcacgcccgtaatcccagcactctgggaggccaaggcgggtggatcatctgaggtcagsagttcgaaaccagcctggccaacatggtgaaactctgtctctactaaaaatacaaaaatttagccgtgtgtggtggcaacatgcctgtagtcccagctacttgggaggctgaggcaggagaattgcttgaactcgggagacagagatggcagtgggccaagatcgtgccactgcactccagcctgggcaacaagagcgaaactccgtctcaaaaaaaaaaaaaaattgtttaatttgcaaatgttctgccctcccctttcttcattgttgaagcacgaacacacttaacttctttagtatt

SEQ ID NO: 672846 - DNA, 698 bp, Homo sapiens
  misc_feature 52, 53, 54, 55, 56, 57, 58, 59, 60, 61, 62, 63, 64, 65, 66,67, 68, 69, 70, 71, 72, 73, 74, 75, 76, 77, 78, 79, 80,81, 82, 83, 84, 85, 86, 87, 88, 89, 90, 91, 92, 93, 94,95, 96, 97, 98, 99, 100, 101, 102, 103, 104, 105, 106, 107: n = A,T,C or G
  misc_feature 108, 109, 110, 111, 112, 113, 114, 115, 116, 117, 118, 119,120, 121, 122, 123, 124, 125, 126, 127, 128, 129, 130, 131,132, 133, 134, 135, 136, 137, 138, 139, 140, 141, 142, 143,144, 145, 146, 147, 148, 149, 150, 151: n = A,T,C or G
aatgcaactataagagagggaacatggacagacagtaatcaactttaaagtnnnnnnnnnnnnnnnnnnnnnnnnnnnnnnnnnnnnnnnnnnnnnnnnnnnnnnnnnnnnnnnnnnnnnnnnnnnnnnnnnnnnnnnnnnnnnnnnnnnnaggacttaaagaactctggctcagagggcacagcaagcccctctagttcagaccttcaagtagacaggctgcagttctgtctctactgacccatcttcagaatgcatcttagcccagttgaccactccattttaactatgacctcaatgaccaccaaaaatcatttaatttggccgggcgtggtggctcacgcccgtaatcccagcactctgggaggccaaggcgggtggatcatctgaggtcagcagttcgaaaccagcctggccaacatggtgaaactctgtctctactaaaaatacaaaaatttagccgtgtgtggtggcaacatgcctgtagtcccagctacttgggaggctgaggcaggagaattgcttgaactcgggagacagagatggcagtgggccragatcgtgccactgcactccagcctgggcaacaagagcgaaactccgtctcaaaaaaaaaaaaaaattgtttaatttgcaaatgttctgccctcccctttcttcattgttgaagcacgaacacacttaacttctttagtatt

SEQ ID NO: 672847 - DNA, 551 bp, Homo sapiens
ccccttgtgcttcagacttcttatttatctccagcatttgagggtagaggtaattacctctttcaacactaaaagttctcaaaattgtacattctttttyttttttttttttttttttttgacacggaatctcactctgtcacccaggctagagtgcagtggtgcaatcttggcttactgcaaccttcacctcctaggttcaagcaattctcctgtctcagcctcctgaatagctgggactacaggtgcatgccaccacacccagctactttttgtatttttggtagagacaggatttcagcacgttgaccaggctggtttcaaactcctgacctcaggtgatccacctgccttggcctcccaaagtgatgggattacaggcatgagccaccatgcccagcataaattcaatttttaatcatcttaatatggactgaatgtttatgccctgatgcccaaattcatatgttgaaatccatacccccagtgtgatggcattaggaggtggggccttttgaagtaattaggttatgaggtggatttgtgtcctt

SEQ ID NO: 672848 - DNA, 551 bp, Homo sapiens
ccccttgtgcttcagacttcttatttatctccagcatttgagggtagaggtaattacctctttcaacactaaaagttctcaaaattgtacattcttttttttttytttttttttttttttgacacggaatctcactctgtcacccaggctagagtgcagtggtgcaatcttggcttactgcaaccttcacctcctaggttcaagcaattctcctgtctcagcctcctgaatagctgggactacaggtgcatgccaccacacccagctactttttgtatttttggtagagacaggatttcagcacgttgaccaggctggtttcaaactcctgacctcaggtgatccacctgccttggcctcccaaagtgatgggattacaggcatgagccaccatgcccagcataaattcaatttttaatcatcttaatatggactgaatgtttatgccctgatgcccaaattcatatgttgaaatccatacccccagtgtgatggcattaggaggtggggccttttgaagtaattaggttatgaggtggatttgtgtcctt

SEQ ID NO: 672849 - DNA, 551 bp, Homo sapiens
ccccttgtgcttcagacttcttatttatctccagcatttgagggtagaggtaattacctctttcaacactaaaagttctcaaaattgtacattcttttttttttttttttttttttttttgacacggaatctcactctgtcacccaggctagagtgcagtggtgcaatcttggcttactgcaaccttcacctcctaggttcaagcaattctcctgtctcagcctcctgaatagctgggactacaggtgcatgccaccacacccagctactttttgtatttttggtagagacaggatttcagcacgttgaccaggctggtttcaaactcctgacctcaggtgatccacctgccttggcctcccaaagtgatgggattacaggcatgagccaccatgcccagcataaattcaatttttaatcaycttaatatggactgaatgtttatgccctgatgcccaaattcatatgttgaaatccatacccccagtgtgatggcattaggaggtggggccttttgaagtaattaggttatgaggtggatttgtgtcctt

SEQ ID NO: 672850 - DNA, 657 bp, Homo sapiens
catgaggtcaggagatggagaccatcctgtctaacatggcgaaaygctgtctgtactaaaaatacaaaaaattagccaggtgtggtggcgggtgcctgtggtcccagctactcaggaggctgaggcagcagaatggcatgaacccgggaggcagagcttgcagtgagctgagatcgtgccactgcactccagcctgggcaacagagcgagactctgtctcaaaataaataaataagtaaataaatttttaaaaataataaggtgcaaaacctgtaagcagaacactgtaaaacattgctggggaaaattttaaaatatctcaataaatagagagatataccatgctcaggtatcagaagactcaatatatgaaaatgtcattccctctctaatttgttagatttaacacaatggtgtaataaagacttaagttttcctagaactatcaaagctctgagaaatttccaactccatcttttattttaaggctgagatttatatttctattaattttacaaacggtgaaacactcaaaataataaattatttgtcctcaagtaaatttttttctgtatgttttttgtttgcttttgaacgttccctcctgtgtgtgttccattatcaacgataacactgacatcatctcttctttgggca

SEQ ID NO: 672851 - DNA, 657 bp, Homo sapiens
catgaggtcaggagatggagaccatcctgtctaacatggcgaaacgctgtctgtactaaaaatacaaaaaattagccaggtgtggtggcgggtgcctgtggtcccagctactcaggaggctgaggcagcagaatggcatgaacccgggaggcagagcttgcagtgagctgagatcgtgccactgcactccagcctgggcaacagagcgagactctgtctcaaaataaataaataagtaaataaatttktaaaaataataaggtgcaaaacctgtaagcagaacactgtaaaacattgctggggaaaattttaaaatatctcaataaatagagagatataccatgctcaggtatcagaagactcaatatatgaaaatgtcattccctctctaatttgttagatttaacacaatggtgtaataaagacttaagttttcctagaactatcaaagctctgagaaatttccaactccatcttttattttaaggctgagatttatatttctattaattttacaaacggtgaaacactcaaaataataaattatttgtcctcaagtaaatttttttctgtatgttttttgtttgcttttgaacgttccctcctgtgtgtgttccattatcaacgataacactgacatcatctcttctttgggca

SEQ ID NO: 672852 - DNA, 657 bp, Homo sapiens
catgaggtcaggagatggagaccatcctgtctaacatggcgaaacgctgtctgtactaaaaatacaaaaaattagccaggtgtggtggcgggtgcctgtggtcccagctactcaggaggctgaggcagcagaatggcatgaacccgggaggcagagcttgcagtgagctgagatcgtgccactgcactccagcctgggcaacagagcgagactctgtctcaaaataaataaataagtaaataaatttttaaaaataataaggtgcaaaacctgtaagcagaacactgtaaaacattgctggggaaaattttaaaatatctcaataaatagagagatataccatgctcrggtatcagaagactcaatatatgaaaatgtcattccctctctaatttgttagatttaacacaatggtgtaataaagacttaagttttcctagaactatcaaagctctgagaaatttccaactccatcttttattttaaggctgagatttatatttctattaattttacaaacggtgaaacactcaaaataataaattatttgtcctcaagtaaatttttttctgtatgttttttgtttgcttttgaacgttccctcctgtgtgtgttccattatcaacgataacactgacatcatctcttctttgggca

SEQ ID NO: 672853 - DNA, 657 bp, Homo sapiens
catgaggtcaggagatggagaccatcctgtctaacatggcgaaacgctgtctgtactaaaaatacaaaaaattagccaggtgtggtggcgggtgcctgtggtcccagctactcaggaggctgaggcagcagaatggcatgaacccgggaggcagagcttgcagtgagctgagatcgtgccactgcactccagcctgggcaacagagcgagactctgtctcaaaataaataaataagtaaataaatttttaaaaataataaggtgcaaaacctgtaagcagaacactgtaaaacattgctggggaaaattttaaaatatctcaataaatagagagatataccatgctcakgtatcagaagactcaatatatgaaaatgtcattccctctctaatttgttagatttaacacaatggtgtaataaagacttaagttttcctagaactatcaaagctctgagaaatttccaactccatcttttattttaaggctgagatttatatttctattaattttacaaacggtgaaacactcaaaataataaattatttgtcctcaagtaaatttttttctgtatgttttttgtttgcttttgaacgttccctcctgtgtgtgttccattatcaacgataacactgacatcatctcttctttgggca

SEQ ID NO: 672854 - DNA, 550 bp, Homo sapiens
catcaatgtgtcacatgaaaacgccctgcaaaattaagagtctgcagcgaagggagctggtcacaaagccgaccatggtggagtcttcatggggcacagcactcagactccctacacctgagtcttcaaaacctgacagattttacatgagggactccaaagctaggataatattttggcttccacgttccttgggcctctcgtgttgctgcctctaagaccctggcacggaacgctgccctgaagaatctaacgaactttcccttacaagccactcatggcacgtgcagatgatcgtcactgtttcctgtccacttcctccggtatagkgtgcgtacctgcaaacggcagacgctcttgtgtcttgttttacttcacaaaagctttcttgaattagtttttaaaatatattctgttccaatgctttggatttcttcttcatggacttcaatgtgcctaggatggatatattttccctaccttctccagctatcaccaaaacatcattcacaataagaatgatcttttttggccgggcgcggtggctcac

SEQ ID NO: 672855 - DNA, 1885 bp, Homo sapiens
tgggatcaacttagtaatagcagcaactccacaagagccaaacactcagggggctcaggaagggacagagggaagaaccgtgtgggagttttcttgtgcctcctaaaggaggcacagtgctctgaagccaaggttctggggaagccaacaytgctacgaacctgggcttgcaggacaagtgttccccacatcttctgcaaagcaaagatagactgctatcaacttaagataactgggttccagaggtgactcttgggtaagtcatcaacccccacctgcataggaaagacccctttcctaagctagccaatgcaggacacctcgtgaacaggacttttcaatcactgtattttcatatattcacacggctttcctgcaaacttttatttatttatttatttatttatttatttatttatttatttattttgagacagagtctcgctctgtcaccaggctagagtgctgtggtgcgatctcggctcactgcaacctccaactccccggttcaaaggattctcctgcctctgcctcccgagtagtcctgcaaacttttcttaaatgacatattttaaagaatgttcatctgagtgcagcacagaaaggttctcctggttatagtggctgcctgagttcagtagtaaccaccaagccagaggacggaactggcaatctgcaagagtcattgcgatgggctggagtccagtcaggggaaaagtgttggacaagaagaaccacaacctgctcatcaacggattctatgccaggggaagtctacccacagaagaacctcctcccctcaaggtcctacaccctactccttggaacctgtggctctgatgaggttatcacaccatgatcatgttgtactactacatgaccttcaggtaggcaggttatctgcaggagcctgactcaataacacaagcccatagaaacagggggcttcctccagctggcggaaaacatcagagaaattcaaagtaccttgctttgcagatggaatgcaggtggccttaagaagctgacagcgccctacccaattcccctgctggcagctagcaagcaatcaaggacttccatcctgcaaggaactgaattctgacaataacaggaatgtgctggtaagaggaccctgagtgccagctgagaacacagctggccaacaccttgacttcagccttgcaaaagcctaagcagagaacccagccccgccatccctgatctgacacacaaaatccttaagaccataagtgagtgttcttctaagcctctgagtttatgctaatttgctacacagcaacagagaactaccacaacatagaaatctcaaaaataggatgctgacgagtgtgcatccccagtgttgggagaaaaggcatcctggccacctcactcaggcacatgttcccaacaggtcaggtaacttggacacctgtcagcgctgactgagaccacctgcctgccctccctgaggtgcttctcaaggcaggttcagagtggcagctttcgaagagggcgaggcttgccatccaattcactgcagagaagacaaagcactgacaagccagccacacctcctagaaagggcctcttcatggcagcactgcggcttcttcaatcttctgcaagtctgggtggtctgactctgccacccctctgtacctttagtccaaattctggttgcatcctcaaaaatcaagtttctgaatttgaatatcaaggtttgctgtttttttttcttaacctttactccacaactacaaaatcagatcctaaaccatatgacctaactgaggcataaaaagttcttattttccaaggataactattaactcttcttccacaggacgcttacatgaatccatttaaaatgaggacaaaa

SEQ ID NO: 672856 - DNA, 628 bp, Homo sapiens
cacctcctgggttcaagcgattctcatgcctcagcctccctagtgtctgggattacaggcgtgtgccaccatgcctgtctaatttttgtatttttagtagagatagggtttcacgatgttggtcatatttattcctatatcccagcaacacattccatgatggtgatattcggtcttgatactggttgaatactgacttaatgtttggccagtcagcattcattgtgaatgtatatgcttatctgtgatagggacaatgaaaatccaaatagccaatgaaagaaaaacaagcaaatctgtaccccatgattaatgaaaatctgaccttgatttgcgaacactaaaggttatccaaaaaggaaagataacactacgtactggaatagtcaaaacctcaaaagttgatgcaaaacgcttaatttggcagggcgcagtggctcacgcctgtaatcccagcactttgggaggccgaggtgggcggatcatgaggtcaggagatgagaccatcctggctagcaaggtraaaacccgtctccactaaaaatacaaaaaaattggccgggcgtggtggcgggcacctgtagtcccagctactcgggaggctgagacaagagaatggcgtgaacca

SEQ ID NO: 672857 - DNA, 986 bp, Homo sapiens
tgaaatacacagaagggaaaacatcaaaaaatttgtacatggcccatgacattggtattcctctaacatggattttactaagcatcacttatataaacaatggcgccaaatcctgttttctttcataatgcatgttttctcagcagtagtactgcagatcttgaaatacaatatgggggctctagtttcccagtgaaatcatatggttggtgtatttcctcaaaataagcttgccatatggaaccagccctggaacaggcccagatcaaacagaagtagctaaagatcctgcacctcttgaaccagccaacacagccagtgmgaagaccagtcagccttaatgatttctttagagtctatgcacttaggtctctgtattggactttctctaaagtttttgtttgaagaaagaattctgtgactaaaatgagttggaaatataccgtgatgggactttcttgattttttttaccctatcaaaaccttcctgttcttaattgccttttttctcggagctctactaggtaattggctaagtaaaccatactatgctaaagccaatgtaagggataaaacataatatgtttgtgcttttctggataacatttgcatttatactttagtcttcaacctcctaaccaaagagagttaagcatgaattttaggttccatggcagggctacttggcaaaatagttttgccgtaggcatgaagtacagaagagacttctcagtgcttgaaatcataccacccagcaatcaccaagacaatgattctccaaatgtggtacccataccagcaacatcagcattacctgggaatttgcacattctttggccacaccccagacctactcaatcagaaattctgagatctgtgtttttaaccagccttccaaatgattgtgatgcacgcaaaagtttgagaaccacagacatagattcatgttctaagttgtgttacctagaagcagagcctgagatggg

SEQ ID NO: 672858 - DNA, 1518 bp, Homo sapiens
gatcctgaaacttcacctccaccagaacattcagagagttgttctcccagattccaacatcaattacactgaacaaatgctctctctatgttgyggacccaactgagaggtggctggccatggtgcaggtacaccaggtagacatctgtctgcaggacgcttgggcatcttctcaactgactcatctataagggcagggactatgccgggtcatctctgcacaccaaactccaatcagcccaaggaaacttctataagcaaccaataaaacctcaacaaactctgagaatcgtattcacctttccagaggagtcatttctccaatgcaagtagtagttatcaaactagagtcccagatattgtttttgaggcactgatgaggtgagagagccattgaggggcagagaatggagctgagaagctggagccccgaagaacagggtaggggcaatcactggcttgcagtacatgggagaaccagctctgtgcaccatccaactgcactgactgcgctcagaccccggcccaggtctccccactattggctgcactcttatcccggaaggctgtgggtcactgtctccatggagccagtgcccatcctacctgctcatttctgggacacacactccctgacttcctggagagttcaaagcaacattcaacattttgtgaaaaggtttttgtttttttttttctttttaatgcaggccctgacgcatttcttggaacccaatggcaaccttggccaagaaatataacccaaataagagcatgtagagaccagtggggtgcgttagaatgcacaggattttccaaccctggttgcctgatctgccaagacactgtggcttattcaccaagcccaacttgtacaccttggaagccctcaccacagccacaggagagaaatgggccaaatgcagagtgagtgaggccaatcaggagagagagtgttggcaggtcttgctgatttagaggagaggtctccccttacagattatttccagtcctggctctgctccggctgaagcagagagattaaagatttgttaaaaaaacaacacaatcttaaaataatgaaaagacaggtttgttgttttttacaaaagagctttaaaagatgaactcattttgatgaaaagaatagaattagaacataatggtcagttgcatcctgtacttcgtttcctaataaagaaagattgccaagcagcaatgagataaaagagacagaaacaaatgattttaactcacagataattaaccccagaggctggtggatagcacattaatatgctggggcaaatagcttaatgaggtttgaaaagggcttcagtgtttatatgaagaagataatttcaagggttcctgaaaagcaaagaaatgcctctggcttggggactggtcaagtaacgaagatgacaaatgtcaagcttaacttctgctgggatctgagagatgagggtgagtctcctgggtagggtggggacctcagcaggtatacagggagcacca

SEQ ID NO: 672859 - DNA, 639 bp, Homo sapiens
agggagtttgataaaggccaggggtccctgcacctttcagctagccctgcctaggagttgcccaatcagcagaggctgagcttgcctttctcatcttcccagaagaccagatgtgaaggggagagggctgggcatggccatataggcaaagaatgtgcaagtctcctttgagcccacgagttcgagaccagcctgggcaacatagtraaacccccctctctacaaaaaaatatgaaaattagctgggcatggtggtgcctacctgtagtcccagatacttgtgaggctgaggtgggaggatcacctgagcccagggaggtagaggctgcaatggagcgccactgcactccaacctgggtgatagcgtaagactctgtctcaaaacaaacaaacaaacaaacaaaacagtgcaagtctccagcactttggggctgaaacagagatagcacagcaagcaagctcgatgtcccctctattgcctatcttacaataaatgacaataaatggatcaatgtaaggaaaccagtattacatgaggctgggaagtctaaaataactaagccagagagtttaaagggaggtttatcaagacaaaaggaagagatcatgtcacatgactttttaaaaataccaaggaaa

SEQ ID NO: 672860 - DNA, 597 bp, Homo sapiens
tgctaggctcttacccatgactttctctcagcctttggggctgcccattggctcatttgttccaacccacttgaatgccaggatgccttccacttggtcttctgcaggtatagatacctcatctgtcctgggccctgtatgtscctgggctatccctgtcctgccctttgagatgccctcctctcctcactcatgggcagctctgaccactcactagccatggccatcccatagcgcaggggtgctcatccacctagatgaaaggggcatactctgaaggagccaccacagctcaaccaatctttagtactcagtgtgcctgggggtgcctgacacttccacctctaaggaggaggctgtccctccatggcagcacctccagcagaagtacatgagcttgcctctggcctcatctcagcagcagccctgctgctgtctccagcggccagtggaagagtcagcaaacaccagcacattcccactgggtttcctgaccctccaaaagcccttcacagtaaccacagttggtatcacagtaaccaacttggctgccaatgctgggaatcttacctcctccttaagatcaaggccccagga

SEQ ID NO: 672861 - DNA, 597 bp, Homo sapiens
tgctaggctcttacccatgactttctctcagcctttggggctgcccattggctcatttgttccaacccacttgaatgccaggatgccttccacttggtcttctgcaggtatagatacctcatctgtcctgggccctgtatgtccctgggctatccctgtcctgmcctttgagatgccctcctctcctcactcatgggcagctctgaccactcactagccatggccatcccatagcgcaggggtgctcatccacctagatgaaaggggcatactctgaaggagccaccacagctcaaccaatctttagtactcagtgtgcctgggggtgcctgacacttccacctctaaggaggaggctgtccctccatggcagcacctccagcagaagtacatgagcttgcctctggcctcatctcagcagcagccctgctgctgtctccagcggccagtggaagagtcagcaaacaccagcacattcccactgggtttcctgaccctccaaaagcccttcacagtaaccacagttggtatcacagtaaccaacttggctgccaatgctgggaatcttacctcctccttaagatcaaggccccagga

SEQ ID NO: 672862 - DNA, 597 bp, Homo sapiens
tgctaggctcttacccatgactttctctcagcctttggggctgcccattggctcatttgttccaacccacttgaatgccaggatgccttccacttggtcttctgcaggtatagatacctcatctgtcctgggccctgtatgtccctgggctatccctgtcctgccctttgagatgccctcctctcctcactcatgggcagctctgaccactcactagccayggccatcccatagcgcaggggtgctcatccacctagatgaaaggggcatactctgaaggagccaccacagctcaaccaatctttagtactcagtgtgcctgggggtgcctgacacttccacctctaaggaggaggctgtccctccatggcagcacctccagcagaagtacatgagcttgcctctggcctcatctcagcagcagccctgctgctgtctccagcggccagtggaagagtcagcaaacaccagcacattcccactgggtttcctgaccctccaaaagcccttcacagtaaccacagttggtatcacagtaaccaacttggctgccaatgctgggaatcttacctcctccttaagatcaaggccccagga

SEQ ID NO: 672863 - DNA, 597 bp, Homo sapiens
tgctaggctcttacccatgactttctctcagcctttggggctgcccattggctcatttgttccaacccacttgaatgccaggatgccttccacttggtcttctgcaggtatagatacctcatctgtcctgggccctgtatgtccctgggctatccctgtcctgccctttgagatgccctcctctcctcactcatgggcagctctgaccactcactagccatggccatcccatagcgcaggggtgctcatccacctagatgaaaggggcatactctgaaggagccaccacagctcaaccaatctttagtactcagtgtgcctgggggtgcctgacactyccacctctaaggaggaggctgtccctccatggcagcacctccagcagaagtacatgagcttgcctctggcctcatctcagcagcagccctgctgctgtctccagcggccagtggaagagtcagcaaacaccagcacattcccactgggtttcctgaccctccaaaagcccttcacagtaaccacagttggtatcacagtaaccaacttggctgccaatgctgggaatcttacctcctccttaagatcaaggccccagga

SEQ ID NO: 672864 - DNA, 585 bp, Homo sapiens
aaattttttwaaaagtgccttcaaaattcaaaattcagtagcattgtgaggcttggtataaggccccatttgcttcactggacagagaaaggactgtaagtcttctgtatttaaccttcttctctacgatatacctcagctagctatcagatgcacttattgagtctctactatgtgtaaattacttgcatattattctcaaaataactctgcagaattcataaatgcaggtaatttacttcagaatatctaggtattaactagcagaatctggatttatatccaaatatgcctggttcatggttcatgttaagcacctcttcattagtatggctatttctatatgacaagaaaatcaaagaagatggtttgctatcacttcttcctgctccttccacatgaaaggagaaaactgtacttcaagtgattccctcggtctgtgggtgattgagtcagccctctgtaagctggactgtgatctcaatggccagtattgcaaagccccacacaccactgacacaaagagttaagagggcctcctccctctggcaacaacagtccagaccagtcccaaataaagggtca

SEQ ID NO: 672865 - DNA, 652 bp, Homo sapiens
aaaaaggaccccgtattttcattttgcactggtcccgcaaattacacagctgattctgactctaccctctcaaagattgtttcatagaaagaaaacttcatactccagccaatggcatgaagacaaattcaagagataaggaaattaaaaacaaacaaacaaacaaaacaggaaaaaattatagaagaaaaaaatacttcttgtgcatcctatagaacatcagtcaccatgtgactgaaaaatggcttcatgggaaataatacagatagaaccccaacaaatttcaccagaggccagccyaagctcccaagaaaccactagtaagcagtgattgagtgggaagaggatggggtacatccaatctagctgtacaatttacctgaacatcctctgaccaaaaaggccttaatagatctgattggtcttctcatgcaggaatcacactaaacatctcatcatatggaaaaaaataatctccagataagaggccctcaaaaggtgtttatatgctgaagtatacacagatttgccagtggggaatttggaggtgtctaattgtaagaaatgttacaccaggcaataataccaatgaggacattagggaaacctaatccttttgtccattagtggtgcatttgacaggaggtggaga

SEQ ID NO: 672866 - DNA, 601 bp, Homo sapiens
tgaagttgtatacattgaatacacacagctttttgtatgccagtcataccacaataaagtgatttaataaaaaagaaaagaaacctgaaagcctggattatctaagaactgagctttgtgggatggaaacaaagctggatgtagtaatcagctcagaataaatgaggctacatttcatgctctgtttttccatccatcaaactgattgagtccaacagtcaccaggatacaaatgatcattaatgaactaagaaaagaaaggtagggcttggagctacatgccagaaatgagaatcagatgtctgttaatttagtgtgaagtgtagacrgtaaagtgattattactaagtagtgatataattgtttacttaaggtgaaaggtcacacctcagtttgtaattttaccaggaatagaactgtcaagaaaatgctatttttcttatgaaggacaaaagacagagagtagtataaatcattgcataatgtaaattctgaactgatattccacattatattatttggatcttctgaattcaccaaacaactgataatgtttgaaaaactgaaatacaatataaatggattggtaattaaatctaag

SEQ ID NO: 672867 - DNA, 614 bp, Homo sapiens
caatattagtggctgagatatagacatattaattgatacatatcgatatattccattaattttaactacttcccattatttaatatactgtgatttatcaattctcttatgtatttttattacaaacaatgatacaatgaacattcttgacatgtctctttgaacacatggacaataaccatgataagatctgtatatgcagatatgtgtgtacctagaagtggaattgctgagtctttttttttttaattttattattattatactttaagttttagggtrcatgtgcacaacatgcagttttgttacatatgtatacatgtgccatgttggtgtgctgcacccattaactcgtcatttagcattaggtatatctcctaatgctatccctcccccctccccccaccccacaacagtccccggggtgtgatgttccccttcctgtgtccatgtgttctcattgttcagttcctacctatgagtgagaacatgtggtgtttgtttttttgtccctatgatagtttgctgagaatgatggtttccagcttcatctatgtctctacaaaggacatgaactcatcattttttatggctgcatagtaatccatggtgta

SEQ ID NO: 672868 - DNA, 614 bp, Homo sapiens
caatattagtggctgagatatagacatattaattgatacatatcgatatattccattaattttaactacttcccattatttaatatactgtgatttatcaattctcttatgtatttttattacaaacaatgatacaatgaacattcttgacatgtctctttgaacacatggacaataaccatgataagatctgtatatgcagatatgtgtgtacctagaagtggaattgctgagtctttttttttttaattttattattattatactttaagttttagggtgcatgtgcacaacatgcagttttgttacatatgtatacatgtgccatgttggtgtgctgcacccattaactcgtcatttagcattaggtatatctyctaatgctatccctcccccctccccccaccccacaacagtccccggggtgtgatgttccccttcctgtgtccatgtgttctcattgttcagttcctacctatgagtgagaacatgtggtgtttgtttttttgtccctatgatagtttgctgagaatgatggtttccagcttcatctatgtctctacaaaggacatgaactcatcattttttatggctgcatagtaatccatggtgta

SEQ ID NO: 672869 - DNA, 614 bp, Homo sapiens
caatattagtggctgagatatagacatattaattgatacatatcgatatattccattaattttaactacttcccattatttaatatactgtgatttatcaattctcttatgtatttttattacaaacaatgatacaatgaacattcttgacatgtctctttgaacacatggacaataaccatgataagatctgtatatgcagatatgtgtgtacctagaagtggaattgctgagtctttttttttttaattttattattattatactttaagttttagggtgcatgtgcacaacatgcagttttgttacatatgtatacatgtgccatgttggtgtgctgcacccattaactcgtcatttagcattaggtatatctcctaatgctatccctcccccctccccccaccccacaacagtccccggggtgtgatgttccccttcctgtgtccatgtgttctcattgttcagttcctacctatgagtgagaacatgtggtgtttgtttttttgtccctaygatagtttgctgagaatgatggtttccagcttcatctatgtctctacaaaggacatgaactcatcattttttatggctgcatagtaatccatggtgta

SEQ ID NO: 672870 - DNA, 614 bp, Homo sapiens
caatattagtggctgagatatagacatattaattgatacatatcgatatattccattaattttaactacttcccattatttaatatactgtgatttatcaattctcttatgtatttttattacaaacaatgatacaatgaacattcttgacatgtctctttgaacacatggacaataaccatgataagatctgtatatgcagatatgtgtgtacctagaagtggaattgctgagtctttttttttttaattttattattattatactttaagttttagggtgcatgtgcacaacatgcagttttgttacatatgtatacatgtgccatgttggtgtgctgcacccattaactcgtcatttagcattaggtatatctcctaatgctatccctcccccctccccccaccccacaacagtccccggggtgtgatgttccccttcctgtgtccatgtgttctcattgttcagttcctacctatgagtgagaacatgtggtgtttgtttttttgtccctatgatagtttgctgagaatgatggtttccagcttcatcyatgtctctacaaaggacatgaactcatcattttttatggctgcatagtaatccatggtgta

SEQ ID NO: 672871 - DNA, 614 bp, Homo sapiens
caatattagtggctgagatatagacatattaattgatacatatcgatatattccattaattttaactacttcccattatttaatatactgtgatttatcaattctcttatgtatttttattacaaacaatgatacaatgaacattcttgacatgtctctttgaacacatggacaataaccatgataagatctgtatatgcagatatgtgtgtacctagaagtggaattgctgagtctttttttttttaattttattattattatactttaagttttagggtgcatgtgcacaacatgcagttttgttacatatgtatacatgtgccatgttggtgtgctgcacccattaactcgtcatttagcattaggtatatctcctaatgctatccctcccccctccccccaccccacaacagtccccggggtgtgatgttccccttcctgtgtccatgtgttctcattgttcagttcctacctatgagtgagaacatgtggtgtttgtttttttgtccctatgatagtttgctgagaatgatggtttccagcttcatctatgtctctacaaaggacatgaactcatcattttttatggctgcatagtawtccatggtgta

SEQ ID NO: 672872 - DNA, 996 bp, Homo sapiens
ttgttggccttatagcattttggggttttagttcaaacacttatttttaaagtatgtttattttttctgactataaagtgacacagattcaatgtggataatttagaatgtatgaaaaatatgaacaaattatagttacttgtaattctacaacatagtgataatgactgttatcatatttcttctaagttgggaaaactgctattttcattaactttgctttaccatgtagctttttttaaaagtgttttcttccccagccattgctccttcatttctcattcacacttctcaatgcactgccatctggctcccttcctgtcaatcctttgtagcttctgttgtcatggtcacaaatgataatttttttctttgtcactaatttgaatggacactattcaatctatcttacttaaattatctgcagtacttcagaatcctgccctaccacctagggaagttaataaaagctgctgagtcagactgcttccaactcattgcttaagcctttgggaataagcccagtcaaatctgtgtgccaagaaagaattaggactcagtctattttgygtcactagctagtctacctcaaaactgccccaaaggggcaagtatatgtgctcaattcttatgacgtagccatctgtaacattattttgtgctcattatctttttcatggtggtatcgtttaagtttgtgtggctgcccaaatctcatgtcaaattgtaatcctcagtgttggaggaggggcctgatggaaggtgattagatcagggttttggatttcccccttgctcttcccatgacagtgagttctcacgaaacctgattgtttaaacgtgtgtagcacctcccccttcactctcttcctcctgctctggccatataagacatgcctgcttcccctcaccttctgccatgattgtaagtttcctgaggcctcactagccatgttttctgtatagtctgtggaagcatgagccaattaaacctct

SEQ ID NO: 672873 - DNA, 656 bp, Homo sapiens
gatgtatgaatcccaaagacattttcctgagtaaaaaacccaatctcaaagggttacatgctgaattattgtatttatattatgtttttgaagacacaaaattacaataatgatatataggtgtttgccaggctttaggtttgaaggagggatgaggagatttctttgtgaggatgctgcggtttaggcttgaaggaggatattacatgaggaaatttctctgcggggatataacagttgtgtatcctatttatggtgatggttattcaaatatactcagaaataaaacttcatggaaattgatagcccacaaatccatcctactcctcccaaaatgtktaatccaaataagctatgtagctgaggtaatggtattatactcatatctctttcccagtattggcaatgtcctatgattatggaagatattactcttgggcaaacatgaactctgtgctatttttgcaacctcttgtgcaaaataatctgaagcagtttcaaaatgaaaatacaatgctggaaaaagagcagcaattagatttctaggtgtgaacaatatagcatgttagagaaaagtgttaaatttccacagcccatagaaagcactatacgtgtttgttaaataaaaaagcaaataaacagcaaatgttcaaatg

SEQ ID NO: 672874 - DNA, 656 bp, Homo sapiens
gatgtatgaatcccaaagacattttcctgagtaaaaaacccaatctcaaagggttacatgctgaattattgtatttatattatgtttttgaagacacaaaattacaataatgatatataggtgtttgccaggctttaggtttgaaggagggatgaggagatttctttgtgaggatgctgcggtttaggcttgaaggaggatattacatgaggaaatttctctgcggggatataacagttgtgtatcctatttatggtgatggttattcaaatatactcagaaataaaacttcatggaaattgatagcccacaaatccatcctactcctcccaaaatgtgtaatccaaataagctatgtagctgaggtaatggtattatactcatatctctttcccagtattggcaatgtcctatgattatggaagatattactcttgggcaaacatgaactctgtgctatttttgcaacctcttgtgcaaaataatctgaagcagtttcaaaatgaaaatamaatgctggaaaaagagcagcaattagatttctaggtgtgaacaatatagcatgttagagaaaagtgttaaatttccacagcccatagaaagcactatacgtgtttgttaaataaaaaagcaaataaacagcaaatgttcaaatg

SEQ ID NO: 672875 - DNA, 588 bp, Homo sapiens
taatttttcaggcacggcgtgaaacagtatctccaaatgaccaacaaacatttgaaaaggagcatcattttattagcaattacgttactgcaaattgaaagcaaattaacagaaactcatgattggattaatgcaaattaagagaaaaatgagatagtactaccgattcccagaatgaatactatttaaaggcctgacaataacaagtattggattgtgaggcaaatggattctcgaatgctgcttgtggggttataaatcaatagcgcaactttggaaagtaatttagtattttctagtaaaatgaattacacatgaatgcaaaattaataattccatttataggtatttgagagtgcttatgtttactgmaatatcacaacaatgttcaaggcagcattataaatagatggcaaataactggaaacagaccaaatgttcactgataatgaaatgatgaaaaatgagcagaatgtacctacgtacggcaagtgtgacacttaggaagcaatactggataaagatgcaacacagatacatattttataatttttcaaattaatttaaaaccagtcaaaactaagctta

SEQ ID NO: 672876 - DNA, 914 bp, Homo sapiens
cgggatactatgcagccatgaaaaagaacaagatcatgtctcttgtgggaacgtggatggagctggaggctattatccttagcaaactaacacgggaacagaaaaccaaataccacatgttctcacttataagtaagaactaaatgatgagaacttatgaacacaatgaatgaaacaamaaacactgggatctacttgaggatggagggagaggagcagaaaagataactgctgggtactgggcttaatacctgagtgatgaaatattctgtatgacaaacctccatgacaggtgtttacctatgtaacctatgtaacaaatcttcccatgtacccctgaacctaaaataaagttaaaaaaataccatcttttgggataccttttttatcagatagaaaaagatttccagctctaccagatgcaaatctacaagttaacatgtcacgatagactttgagacataattaattaaaaacagcaagtcaaacaagggcatataagcctagataaataatcaaacttgcacggacctattagacaatgctcctaggacagaaaatatatgtcaaccttcttttgctttactttcaaattttggataatttttcttaacaacatattaaatattttaccttcctctcattaaaatgctaacctttctttgagagattagatttccatatatgttatattttatttgcttaatcagaaattagtgctgttttttgcaattgaaggctgatatttttagtttcctctgttatagctacatataatgtctagtcctttatttagtggctaccacaatcataggcatagctctgggtacataggaaatgagtcttatactcataggtatatgaatctcttgaattaacaggctctgagcaattagaaaggaagaaggaacaaa

SEQ ID NO: 672877 - DNA, 629 bp, Homo sapiens
gaaagcaagtattcctgttggctgaagccaaatgtatccttcttgtcctcaaaatggcagcaaaggacagagagcccctttcaacttgacacattatggaagggacagyactttggtcttatgggaacaaaaacttactctggatacagatctgcctttgctgcaccagtgcttctcccaaaactaccaactacagacttacagaatgccttatacactgtcatgatattccacacagtattgcttcttatcaaggaaattaattcacagaaaattaagtgaggcaataagcccacactcatgtaattcactgatcttaaatgctccctatattctcaactgatggcttgacagagcagtggaaaggacattgaagtcacagcatcactaagtggtaaaaccttgcagcgctgaagcaaggttgttcagaaggatgtgtacttctggataagtgtccaatatatgatgttctttctccatggctgggattcacaggtccagaaatttagggatgaaaatgggaggggcaccacatactattaccccctaatgacccactagtaaaatttcaggatactgtttccatgaccttatcctctgctggcctataagttttagttccaaaggaa

SEQ ID NO: 672878 - DNA, 629 bp, Homo sapiens
gaaagcaagtattcctgttggctgaagccaaatgtatccttcttgtcctcaaaatggcagcaaaggacagagagcccctttcaacttgacacattatggaagggacagcactttggtcttatgggaacaaaaacttactctggatacagatctgcctttgctgcaccagtgcttctcccaaaactaccaactacagacttacagaatgccttatacactgtcatgatattccacacagtattgcttcttatcaaggaaattaattcacagaaaattaagtgaggcaataagcccacactcatgtaattcaytgatcttaaatgctccctatattctcaactgatggcttgacagagcagtggaaaggacattgaagtcacagcatcactaagtggtaaaaccttgcagcgctgaagcaaggttgttcagaaggatgtgtacttctggataagtgtccaatatatgatgttctttctccatggctgggattcacaggtccagaaatttagggatgaaaatgggaggggcaccacatactattaccccctaatgacccactagtaaaatttcaggatactgtttccatgaccttatcctctgctggcctataagttttagttccaaaggaa

SEQ ID NO: 672879 - DNA, 688 bp, Homo sapiens
ggtcaggagatcaagaccatcctggccaacatggtgaaaccccgtctctactaaaaatacaaaaattagctgggtgtggtggcatgcgcctgtaatcccagctactygggaggctgaggcaggagaattgcttgaacctgggaatcggaggttgcagtgagccaagatcgccactgtactgcagcctggtgacagagcaagactccctctcaaaaaaaaaaaaaaaaaaaaaaaaggaaggtatggacgataaggggttcatatcaaacaacactatgggaatgaagtccatcggatttagaatgtggaaatactaaaagatgccacaccacatttcttcagtaaatacatggaaaaaaaaaagacgggggaagtggtgttaatgaaagaaactttgaagggactgtggcagatgcaattgatgttctgcctaccttcactccacttctacctctatagcttgctggaggctgtgtgccaggaacacctgtgacgctttcccctagggcatttattctgtccccaaggttacacatggtaagcggagcagagtgcccgagaattaatggcctagagagttaatgtctctggaagcagtgcttagccaaagatgggtggaaagctggtggacaaataccccagcttccttccctctatcccccagggttgggaaaactctcagtggtgc

SEQ ID NO: 672880 - DNA, 502 bp, Homo sapiens
aacgaaagaaagccataaaaaactggggaaggctcttgccatgtttattcacttgctttcagaaaaatcaaacagagctcagctttacaccttctaagtgaagtatttagcctggtacaaatcgttggcagctcagtaggaacacatatttgaagagatagtaagtgctcaataaatacttgaaggarcaagtgaagttgtcaatttagacagcttaatttataacccatcttacaaattcataaaacatctccctatctttctctcttcctcagaaacatacattgcacgttgataaagtaatgaaatagctcggggaccagggctgcggtggggcagtggctgcccacagctaatactgttgagcaaacagaagacagcggctgccacctgctcaattggaaggacatggagcagcagccactgatcagagactaagaaactacagctttgcacagtggatgccggcctggattcagaactccggctgatagtgctgaaa

SEQ ID NO: 672881 - DNA, 1321 bp, Homo sapiens
attgagtggggacctcattttagacagaatggaagcacatttgtcaggagggcacttctgctcctctgggcctctggcttctcagccaaccccaggaacccagcttcgagctccgctgccttctccgtggccctaaacaacccgcagtatcagcgttcccacccactcttcatcaaagccgtttcctcggtgtggatgagcccagctaggaaacaggaacaaagttttaaaaatgtcactggcaatgactgatacacttaattctggttaaggtgggaagtttacatttcaagaggcttttctgggtttgacagagtttaattggcagaatgtgttggagacattttgtggtgagaaaacacggtcttcacccctcacatattccgggttaactcctccctgcagaatttaaattcacaatactgaggttggcgaggactctttcataaggcacgataccagccctgcctggtccatgtctaatgtcagagtgagggtgccatgtacccatcacctgtgtgagctattctgagctggaaaaacaattaacaccatcaagaatcgtaaccgattcgaataatctgctcattcttatttttacagtcctataacatctttattctcctatttggttataggattttcagtttataaaatgacattcatggatgtccctgtggcttctcttctcaggacactacacaatgaaattcaagtgatctttgaaagaaatacaggaggtttttttctctttattgtatggcgttcagaggtccttgacaaggagctagaggcaatttgtccagcctcaattatgattcaccagcctggataaactgtaatatacaaacgtgaacacatttatcttcattaagtccctactgttctaggtgtagtgaggtgggaaggctaatctcataccctgggtgggaaatacagagaggacgcagaggaggcacctgccctttgcaggcatggaagacaatggacccttccagggcctcaggcaaagaacttctcccaggtgctggattcagcaagaagtgacaccacctgtgcatgccccagggcgtagcaggcagccagctgagggctggaggagcaggcagtgccccagagcccatcaagcagttccttcagcatgaggggggcccaagttcctggagggagcagctgctctgccaaccaggctgagcacagccaggggcagcaattcttctcgagatgttcttgtcccatttgatcatgcacacctggattggcaatggcaggaaagaccagccctgggaaggttctgayttccattccaggtaagagttga

SEQ ID NO: 672882 - DNA, 1321 bp, Homo sapiens
attgagtggggacctcattttagacagaatggaagcacatttgtcaggagggcacttctgctcctctgggcctctggcttctcagccaaccccaggaacccagcttcgagctccgctgccttctccgtggccctaaacaacccgcagtatcagcgttcccacccactcttcatcaaagccgtttcctcggtgtggatgagcccagctaggaaacaggaacaaagttttaaaaatgtcactggcaatgactgatacacttaattctggttaaggtgggaagtttacatttcaagaggcttttctgggtttgacagagtttaattggcagaatgtgttggagacattttgtggtgagaaaacacggtcttcacccctcacatattccgggttaactcctccctgcagaatttaaattcacaatactgaggttggcgaggactctttcataaggcacgataccagccctgcctggtccatgtctaatgtcagagtgagggtgccatgtacccatcacctgtgtgagctattctgagctggaaaaacaattaacaccatcaagaatcgtaaccgattcgaataatctgctcattcttatttttacagtcctataacatctttattctcctatttggttataggattttcagtttataaaatgacattcatggatgtccctgtggcttctcttctcaggacactacacaatgaaattcaagtgatctttgaaagaaatacaggaggtttttttctctttattgtatggcgttcagaggtccttgacaaggagctagaggcaatttgtccagcctcaattatgattcaccagcctggataaactgtaatatacaaacgtgaacacatttatcttcattaagtccctactgttctaggtgtagtgaggtgggaaggctaatctcataccctgggtgggaaatacagagaggacgcagaggaggcacctgccctttgcaggcatggaagacaatggacccttccagggcctcaggcaaagaacttctcccaggtgctggattcagcaagaagtgacaccacctgtgcatgccccagggcgtagcaggcagccagctgagggctggaggagcaggcagtgccccagagcccatcaagcagttccttcagcatgaggggggcccaagttcctggagggagcagctgctctgccaaccaggctgagcacagccaggggcagcaattcttctcgagatgttcttgtcccatttgatcatgcacacctggattggcaatggcaggaaagaccagccctgggaaggttctgacttccattccaggtaagrgttga

SEQ ID NO: 672883 - DNA, 1847 bp, Homo sapiens
ccaaaaatgtagaggccattttattgcctgcttcttacctggattcttgttggcaattgaaaatgtaatataaaatcttgaaatttctgctgacctaacttaatatgaggacagtcactaactcttctggagcactcactaagtcctaggcatcagtccaagtgttttaatacctcaactcataggcctcatggcaaccctatggaatgtctccctcctgcaaataagaacccagaagtacagaaagtgtcaacaatctagcccgtggccactcagaagttgaatgtgtaacggctccgcagtattttctggatcaatcaagcttggaaagctgccccttcctcactcttctctttctattctgctccagccgcagatgcacctctcgttcctccaacgtgccggcagctcgggcctttctcctgggctcttctgcctggaactctctctgcagactttcacaggacctcctcctcgtttccttcaggttcagttgtcgtcttctccacccaggccgccctgaacctgcccctggagctccgacttccctcccctacacgcatttttccatagcactttccccatacagggcacttttccccccgtacagggctcagtgtgttttgactcatgagtttcctgattccttgtctctcatttttgcccatcatgttctctatcgagtctccaggagccacaagacggtgcttccctccgggggccacgaggccgcagggacagggagctccggcagttctgggatgcggcagggttccgcggcgcggcatggggcgtgggttctgtacaattgacatttttttaattgttgctttttgtttttgagacggagtctcactgtcgcccaggctggagtgcagtggcacaatctcagctcactgcaacctccgcctccctggttcaagcgattctcctgcctcagcctccggagtagctgggattacaggggcccgccaccacgccaggctaatttttttgtatttttagtcgagatggggtttcactatgttggccaggctggtcttcaactcctgaccttgtgatccacccacctcggcctcccaaagtgctgggattacaggcgtgagccaccgggcccggattttttttttttttggtggaatctcactctgtcgcccaggctggaktgtagtggcatgatctcggctcactggaatctccacctcccaggttcaagcgattcccctgcctcagccttctgagtagctgggattagaggcatgcgctaccatgcccagttaattttttatatttttagtggagaccgggtttcaccatgttggccaggctggtctcgaacccctgacctcaagtgatccacccacctccagctcccaaagtgctgggattacaggtgtgaatcacctctcccggccttgtcatcttttaaaattggacatatgcttgcatttgtgtatgcatgctatgattcaggataatagagaaaatgctctgggatgggggacgtgatttatttgacacgggaaccgaggataaggaatgatttcagagaacacatggcttttacattcagcctggtagaataagttgaactctcagtagaaacgacagaggaaatactgtgaaggaaatattttcacttagctctgtcgtcacttagtctcagaactccctaccatgtttctatacccagtcctctgttttcagtggcttttttttttgaagggggatcatcttttcatatattcatatacatatatatctccaagaaatatgtcacttgtatatctttttcaagatagatatacaagatagatacacatatgtattcatatacgtatatatct

SEQ ID NO: 672884 - DNA, 1582 bp, Homo sapiens
cagggtcttactctgttgcccaggcgagtgcagtgacacaatcagggctcatgtgttcaagcgatcctcctgcctcaatcgcccagtagctgggctgggattatacacgcatcaccacgcccagctaatttttgtatttttagtaraaacaaggttttgccatggtgccaggctggtcttgaactcctggcctcaagtgatctgcccacctctgcctcccaaagtgctggggttacaggcgtgagacacctgcctggccaaaagctcactcttttacatttactcatgtggttaaaattattacttggaaacacatatgtgacttgttttagaatgtctgaatctcggagacaaaagagtaaagtttcctttctattattttcctatgatctgtagaatgaccttatgatcactctcttggagggtttctttgccttgctgaatttcataatgacgtatagtacttggagtttagttcaccttagaagccatcctttggcatgatctccacctcatgtttttggatctttgtccttttgaggtgcaccctttgtgtttagatcctttgccagaaacattcttattcaagatttcttggtaagtgatgaaggggatcagcctttggggtatctattcattgggcagagctgttccaacattcttggagcaattgtttattcaataaatgtctaattccacacacatgtgttgagcacccactgcataccctgggctaaagtctggagatactgacacattggtagatgattatgatataacatggcaaataaaatgttaaagatgtctccaggtgaatcgggattagacaagaagagtttctggccctggctgtgggcatctggggggcttcccaaagaaggtgcaaagggatccgaatcttgaagagtgagaaggagttacccagacaagagacgagggcatgggaagtgggagtgaggtcatgccagacagatgagactgcacagccaagacaaggagtcaaggaacaccatggtaagtttggataaaaaaaactcattggtatttctggaccataaaaggcaaggcaggggaaagcaaaagactggacttgagcctgaggaggcagagcaaatccaggggctttgatcctcctatctcataaataatgaggagattttaaatcaggaagtgacaaaggtaattttatgttttagatagatctgagtggctttgggattgaaatcttgagggctttgagaagactctgttgcgtgtctctccctaggcttctggtggtttgcggtcaaggtttgagttccttggcttacagaaacatcaccccagtctctgtgttcatcatctttccatggtgttctccctgggtgtctgtctgtgtctaaatttcccctttttgtgaggacaccagccatattggaatagtgcccaccctgacaacctcatctttatacctgcaacaaccctattcccaaatgaggtcacattctaaggtactggcagttattacttcaacatatgaatttggggggggtggtgggggagatacaattcaacccatagcaagtgccaatgataagctgca

SEQ ID NO: 672885 - DNA, 611 bp, Homo sapiens
cacattccaggcactgtttcaggtactagaaaaacatcagtgaacaaaacaacaacaaaaaataaacaatgcctttttcttttcaggaatggaaaaataagtaagtaaaatatttagtaygctagtgatggtctgtgctatggtgaaacaattaaggaaaggggatcataaagagagacaaaggtatacccttaggtagagaatggtcatggaaaatctcatagagaatgtcataactgaggaaaaacctgaaaatgaggaagtgagctaagcttttaagcgggagaagataattctacttaaacagaagacctggtgcaaaggtcataaaccagaagcatgctgatgtgtttggaaaataacaggcagcatagtggtgatgaccagtgagcaaggcaagaacagtagtagataaagtcagagagtaatgaaggggaccagataagagttttagtggacagcaatggcagtgttggacaacttccaggctgagagatgtcaaggttatttggaggaacacactactgaaaaaattggttggaagctgggattgtgggtataacataaagagctcagctatggttttactctctttacaatgtcgaggctta

SEQ ID NO: 672886 - DNA, 577 bp, Homo sapiens
gcatgatatttgtataaatcagacacatagaccaatggaacagaataaatccacgtgtttacagccaactgattttcaacaaaggtaccaagaacgtacactggggacaagacactttcttgaataaatggtgctgagaacatggtatattatatatgcagaagaatgaaactggatctccatctcttactatatacaaaagtcaaatccagtcacaccagtacactccagcctgggcaaaagagtgagactctgtctcaaataataaaataaaataaaataaagataatttaaagacttaaatgtaaaacccyaaactacaaaactactagaagaaaacataggggtttcagcatgttattctgggtcttaaaaaaaaaaaaaaaaagaatactgagcaacatagtgagaccttgtctctacaaaaaaaaaaaaaaaaaaaaaaaaatttagaccacaggggcttacacctataatcccagtactttgggaggctaaggcaggaggatcacatgagcccaggagttcaagatgagtctgggtaatatagggagaccctgtctttaaaaaaaaaaaa

SEQ ID NO: 672887 - DNA, 1195 bp, Homo sapiens
cccagattgcccattaccagttcctgcaagttggttttcatttttgatgtcttgccatgtgctgatagatgaaattttccctggtgattctgctcctaattttgatatctctttctgaattcccattgtgctctatagttagtgccacttttcagcaattagttttgtttacttttaattttatcttattttgtcattctctagtcacacctctcagactagacatggtttcttatatttcttcaatttctctttactctcagaattaagaataaaatctcaggactaaacacatagtaggtacttgaattattctagcttgttgattagtctactaatttatgaaatcacaatttctattcacatagcatcccatattctatggttctttgtctggaatttgataactgaatgtataatgttcctttctgaatataacaacattctactttcttctggcctaaatatctaagcacctgggtgtatttgtattaaatactaagtactactgacaatgcttgcttggcttgaagcttcctactaactttarttaaatgcaccaggcagctttttactcatagtcccaaagccttaattataagaacataccagtacacagaaacaatcagtagttccttcctgtgacagggtggagtaagtgcatctggataaatgtttgctggaggattaaactaaagagagccaattctcatctaaattttttgagtaaatgtatttgtgaacagcttttgtcaacttcattttagattcaatttctggacactaataccaacaataacttgattaaggggattgtttgcaaacctactgcatacctgccatgaaactgctgaagaaatgaatagcatcaatcaatattgcttctgctatgcaaggtcaagttaaaccctcggtgtgctttttattgcacttttagaacactgagtccacctaaatcaaagatgtgcacactgcaaaaatttagaacattttgtttcttttaagtcattgacctctgcaagaaagtagaagcacatatgattagtagaattgaagaggattacttgtcacacatggctgcacatttatctgcatggaatcatggtttcatatactcttgaaaatgtaactaacatactgtaacttactagacaagacttcagtgtgagcaggagactttatttacttagttttc

SEQ ID NO: 672888 - DNA, 639 bp, Homo sapiens
ttttagtatacatatagaatcccctaaccacgtgtttttctaaatgctcaagaataattctagaactttgtaaggattctatattaagccagtttgtataccagaaatctttcctttgaactatgtaacacttgcccaagtgtcacttgactctttcacttgattccccagagataaccagaaatagaatagcaatcacattttcaaagttttctccatatcctaagaagtaatttgtatgggtctagagactcaacctcattaaaagattgggtgtttaccccttatcattttccgtatcttgggmtccaatttccttttaaccatgtctgttctacgctttccgttgcaacaattattcccttgacagcctgtctggaaaaaaataattctgctttttgttagtatttaaccatctgccccaagcaatgggccaaacctttctttttatgtgcagcctcttaacatgtagataagaaaatttctgttaattatccctcactttagtgtaagagacttttttttctatttgtctttgactttcttgacactagtcttaagatttgtgctactcttgtatttatttattctagggtagattcatttcttcctataccatccataaccatccatcacacg

SEQ ID NO: 672889 - DNA, 424 bp, Homo sapiens
ttcaagcacctaatatatattacagcattgcttactttctggtaaaattatacatatagttctggaatatattttagagacttttccaagggctgaagtaaaaagtttatctgaaaccttggactgataaataatgtcactttccaaaaaaaaaaattaaatgtttagagtcaaaacacttctttttaccatcccataagaaaattgtaatctgctaacataaaaaagaaacaagatatattattccagaaaatattttttactgtttacaagatcctattttaagctgaataatcttttrctttcacatagatgtcaaggagagttgggggaagggatggattagggaatttgagccttcaaaggcaaatgggaccagtttacaaatgatacctttcatctccagagctgtttgctggagggc

SEQ ID NO: 672890 - DNA, 621 bp, Homo sapiens
ggcaaggtaaaactatgactttttcaaagaggttaattgacttgcccaaggttaaatagcttgtcagtggaagcattggtgctggaaccattatttgctatcagttcaccattttattacaattttgttgctatcccaactccactccagtgaagagagaaaaaaataatttactcacatgaagtaataatatkggaatgtaatgctcagcttttgacagtgatgggagactaaatagggcgtgatggcattggattctagagttggaaaaagctttacggagaacataggatttgtgctggtatgtacgggtcatcttagagcccatttagttgcctttatgaattccaaggctagaatgaaactcacttctctggcaagcctgttatatagattgatgtggtggcttttattgggatggcttaaaatatttttttccctatatgaaactttcagaattatgtgcctctcatgaatcactacattaaagtacaaatttaataataatggtgaatgactgctaagttgctcagtatattaggggagatagtcgtaattttgattaaacaaacatttcttaaatgagacatagaaaaaatatcaaaaatggaaaatttcata

SEQ ID NO: 672891 - DNA, 2536 bp, Homo sapiens
tcatgcccgccctggctgctggctcatgatgctgcatatgcctctgcccactgcacactctgtcccagtgcgtgcaccagccttcttctcacccttgtgaaggcacccttcccttttcagctggttacctacaccgttcacaccacctagcactgccagcatgtgtgcctggcctcctgggtatctcctcctattcctgtgtttacccttctccctctggtcctatctatctaaatctcttttcactgccccctgctctgtgtagttgtcactctctccccctagatatccatcactgaccacagcttttccgatcacatccatctccctctgtgtccctcagtctgctggtttacccacccacccctgcacaggtatttctacccataggctggtctgtttctaaccattaccatttaatcaccgttccacctgccatcacaaggaaaagcacaccacctcccaaagatagcaagcacaccaggcatttctgcacgggctcggtggagaggtcggcaggcgcccgggccctgcttcctctcccacactcaccgtagttcctgctgggctgccgtggtgtccagcgtgtcctccagctctgttttcagagcttccagttcctcactcaagtcccttttctgcttttcggccttgttccgtgaagccttctcggattcaaagtcttcctgaagttcagcaatttgggcttgtagctctcgcacaactttaagggcattgttcttatggagtgtttcatcatcacctctgttaaaacacccaggcgcaagaggcactcagagatggcacccggatggcctgtttctcaggcgagccccagcccctgagcacctctccacgagaccccagccccacatccctcctcctggggcctgaggctggtgcagatgctcagcacctgctagggcaggaggaggttctcaggtagaggccttgctgaaggccccaaagctaatggtggcagagccagaactagattccagccccagccccctttccaaacgaccatgcttctccattaaaaggtaggacactcttactttagcccttagaatatgaaaacattttctctgaagtcaaaggctgttatagttaaaaatctgcttctaactatgaaggagtgacctcctcatcacaccggaacccagccaaaccagggatgctcaaagaacacagtagaagaaagaggctctcatcctcataccctccaggtgcctctcttccatagggcatctttttgtttatgtctgtggtttaaaatgttggaagatttttctgattgggaatagttgggatgtttgaggtaagggagatttttcttgaaagattttgattgtaacacattataaactccaagtattacaaccatgtagccaaatagttatyctttataaagaaatgaaacattagacatatatttattacatctgatttgcattctaaactgaatggtttagaactgattattgaatcatgctctcagtggagaaatataatttttgaaaagtgatttcccttcaagttctaaaacatactacaggctgggtgaggtggctcacgcctgtaatcccagcactttgggaggccaagtcaggtggatcacttggggtcaggagtttgggaccagcctgaccaacatggtggaaccccatctctactaaaaatacaaaaattagccagtgtggtggtgcacacgtgtaatcccagctagtcgggaggctgaggcacgagaattgcttgaacccaggaagtggagtttgcagtgagctgagattgcaccactgcactccagcctgggtgacagagtgagactccattcaaaaaaaaaaaataaataaaacatactacagttaatctgtaatgtacagagaccaaaacatttgttatagtgaaataatttgttctggtgtgaatttccaagggtttcataatataatttgtcattttaaagtataaatattgagatggtttatgagactttcttgctgtcctgacacaaattctgtacgcctgggcttttcactttctcaggtcacaccaaacagcaagcaaaccccatctcactctcccagggtttttgaatgctcccgaacataacaaagtctgctgaaactcagccccatgggctcccgtgcagcgcagctgctgggctgcagacctggccagtgcgccctgcagctcctcctcctttttggccagctgcagcttgagctcatcaatctgcgcctgcagctatgcgatctggtcctgcaggtcggtcgtctccccgtcgagttttcttttggccttttccagttcctgacgagtcttttcttccttctttaagcgttctttaaggtaagacataagaagctcttcaacacaccgagtgactcacctcaggaataaactaaaatacagactgatccaagttgaaaataagccattttattcaaaagcatgtcactgccctgatgacatggtcatgcgctgatgtcaactgctcagtcatttcaaacccaccgagatctggagggga

SEQ ID NO: 672892 - DNA, 2536 bp, Homo sapiens
tcatgcccgccctggctgctggctcatgatgctgcatatgcctctgcccactgcacactctgtcccagtgcgtgcaccagccttcttctcacccttgtgaaggcacccttcccttttcagctggttacctacaccgttcacaccacctagcactgccagcatgtgtgcctggcctcctgggtatctcctcctattcctgtgtttacccttctccctctggtcctatctatctaaatctcttttcactgccccctgctctgtgtagttgtcactctctccccctagatatccatcactgaccacagcttttccgatcacatccatctccctctgtgtccctcagtctgctggtttacccacccacccctgcacaggtatttctacccataggctggtctgtttctaaccattaccatttaatcaccgttccacctgccatcacaaggaaaagcacaccacctcccaaagatagcaagcacaccaggcatttctgcacgggctcggtggagaggtcggcaggcgcccgggccctgcttcctctcccacactcaccgtagttcctgctgggctgccgtggtgtccagcgtgtcctccagctctgttttcagagcttccagttcctcactcaagtcccttttctgcttttcggccttgttccgtgaagccttctcggattcaaagtcttcctgaagttcagcaatttgggcttgtagctctcgcacaactttaagggcattgttcttatggagtgtttcatcatcacctctgttaaaacacccaggcgcaagaggcactcagagatggcacccggatggcctgtttctcaggcgagccccagcccctgagcacctctccacgagaccccagccccacatccctcctcctggggcctgaggctggtgcagatgctcagcacctgctagggcaggaggaggttctcaggtagaggccttgctgaaggccccaaagctaatggtggcagagccagaactagattccagccccagccccctttccaaacgaccatgcttctccattaaaaggtaggacactcttactttagcccttagaatatgaaaacattttctctgaagtcaaaggctgttatagttaaaaatctgcttctaactatgaaggagtgacctcctcatcacaccggaacccagccaaaccagggatgctcaaagaacacagtagaagaaagaggctctcatcctcataccctccaggtgcctctcttccatagggcatctttttgtttatgtctgtggtttaaaatgttggaagatttttctgattgggaatagttgggatgtttgaggtaagggagatttttcttgaaagattttgattgtaacacattataaactccaagtattacaaccatgtagccaaatagttattctttataaagaaatgaaacattagacatatatttattacatctgatttgcattctaaactgaatggtttagaactgattattgaatcatgctctcagtggagaaatataatttttgaaaagtgatttcccttcaagttctaaaacatactacaggctgggygaggtggctcacgcctgtaatcccagcactttgggaggccaagtcaggtggatcacttggggtcaggagtttgggaccagcctgaccaacatggtggaaccccatctctactaaaaatacaaaaattagccagtgtggtggtgcacacgtgtaatcccagctagtcgggaggctgaggcacgagaattgcttgaacccaggaagtggagtttgcagtgagctgagattgcaccactgcactccagcctgggtgacagagtgagactccattcaaaaaaaaaaaataaataaaacatactacagttaatctgtaatgtacagagaccaaaacatttgttatagtgaaataatttgttctggtgtgaatttccaagggtttcataatataatttgtcattttaaagtataaatattgagatggtttatgagactttcttgctgtcctgacacaaattctgtacgcctgggcttttcactttctcaggtcacaccaaacagcaagcaaaccccatctcactctcccagggtttttgaatgctcccgaacataacaaagtctgctgaaactcagccccatgggctcccgtgcagcgcagctgctgggctgcagacctggccagtgcgccctgcagctcctcctcctttttggccagctgcagcttgagctcatcaatctgcgcctgcagctatgcgatctggtcctgcaggtcggtcgtctccccgtcgagttttcttttggccttttccagttcctgacgagtcttttcttccttctttaagcgttctttaaggtaagacataagaagctcttcaacacaccgagtgactcacctcaggaataaactaaaatacagactgatccaagttgaaaataagccattttattcaaaagcatgtcactgccctgatgacatggtcatgcgctgatgtcaactgctcagtcatttcaaacccaccgagatctggagggga

SEQ ID NO: 672893 - DNA, 2536 bp, Homo sapiens
tcatgcccgccctggctgctggctcatgatgctgcatatgcctctgcccactgcacactctgtcccagtgcgtgcaccagccttcttctcacccttgtgaaggcacccttcccttttcagctggttacctacaccgttcacaccacctagcactgccagcatgtgtgcctggcctcctgggtatctcctcctattcctgtgtttacccttctccctctggtcctatctatctaaatctcttttcactgccccctgctctgtgtagttgtcactctctccccctagatatccatcactgaccacagcttttccgatcacatccatctccctctgtgtccctcagtctgctggtttacccacccacccctgcacaggtatttctacccataggctggtctgtttctaaccattaccatttaatcaccgttccacctgccatcacaaggaaaagcacaccacctcccaaagatagcaagcacaccaggcatttctgcacgggctcggtggagaggtcggcaggcgcccgggccctgcttcctctcccacactcaccgtagttcctgctgggctgccgtggtgtccagcgtgtcctccagctctgttttcagagcttccagttcctcactcaagtcccttttctgcttttcggccttgttccgtgaagccttctcggattcaaagtcttcctgaagttcagcaatttgggcttgtagctctcgcacaactttaagggcattgttcttatggagtgtttcatcatcacctctgttaaaacacccaggcgcaagaggcactcagagatggcacccggatggcctgtttctcaggcgagccccagcccctgagcacctctccacgagaccccagccccacatccctcctcctggggcctgaggctggtgcagatgctcagcacctgctagggcaggaggaggttctcaggtagaggccttgctgaaggccccaaagctaatggtggcagagccagaactagattccagccccagccccctttccaaacgaccatgcttctccattaaaaggtaggacactcttactttagcccttagaatatgaaaacattttctctgaagtcaaaggctgttatagttaaaaatctgcttctaactatgaaggagtgacctcctcatcacaccggaacccagccaaaccagggatgctcaaagaacacagtagaagaaagaggctctcatcctcataccctccaggtgcctctcttccatagggcatctttttgtttatgtctgtggtttaaaatgttggaagatttttctgattgggaatagttgggatgtttgaggtaagggagatttttcttgaaagattttgattgtaacacattataaactccaagtattacaaccatgtagccaaatagttattctttataaagaaatgaaacattagacatatatttattacatctgatttgcattctaaactgaatggtttagaactgattattgaatcatgctctcagtggagaaatataatttttgaaaagtgatttcccttcaagttctaaaacatactacaggctgggtgwggtggctcacgcctgtaatcccagcactttgggaggccaagtcaggtggatcacttggggtcaggagtttgggaccagcctgaccaacatggtggaaccccatctctactaaaaatacaaaaattagccagtgtggtggtgcacacgtgtaatcccagctagtcgggaggctgaggcacgagaattgcttgaacccaggaagtggagtttgcagtgagctgagattgcaccactgcactccagcctgggtgacagagtgagactccattcaaaaaaaaaaaataaataaaacatactacagttaatctgtaatgtacagagaccaaaacatttgttatagtgaaataatttgttctggtgtgaatttccaagggtttcataatataatttgtcattttaaagtataaatattgagatggtttatgagactttcttgctgtcctgacacaaattctgtacgcctgggcttttcactttctcaggtcacaccaaacagcaagcaaaccccatctcactctcccagggtttttgaatgctcccgaacataacaaagtctgctgaaactcagccccatgggctcccgtgcagcgcagctgctgggctgcagacctggccagtgcgccctgcagctcctcctcctttttggccagctgcagcttgagctcatcaatctgcgcctgcagctatgcgatctggtcctgcaggtcggtcgtctccccgtcgagttttcttttggccttttccagttcctgacgagtcttttcttccttctttaagcgttctttaaggtaagacataagaagctcttcaacacaccgagtgactcacctcaggaataaactaaaatacagactgatccaagttgaaaataagccattttattcaaaagcatgtcactgccctgatgacatggtcatgcgctgatgtcaactgctcagtcatttcaaacccaccgagatctggagggga

SEQ ID NO: 672894 - DNA, 1269 bp, Homo sapiens
aaataggaaaggaagttaggttcaaaggagaaatggggctttgtagtcatcgctgccacctgaagccacctgcctctagccatggtcaacgccactgtgttcttttgacatcattgttgatggtaactcctttggcccatgcagctccttcgagctgtttgccgacaaagytccaaaaacagtggaaaactttcgtgcactgagcactggaggaaaaggatttggttataagggttcctgctttcacagaattattccagggtttattttatctgccagagtgctgacttcacacaccataataatgccagtccatctaccaggagaaatttgatgatgagaacttcatcctgaagcacacaggtcctggcatcttgtccatggcaaatgctggcccgacacaaatggttcccagtttttcacctgtgtggccaagactgagtggctggatggcaagcacaaggtctttggcaaagtgagaagagggagtgaatatcatggaagccatggagtgctctgggtccgggaatggtgagactggcaagaagatcaccactgccaactgcggacaactctaatcaatctgcttgtgtttgatcttaaccaccaaatcattctttctgtagctcaggagagcatccctccatcccacttgctcacaatatcctgtaatctttgtggtctcactgcagttctttggtttccttattcccctcgacatcaagctggattgtagttaagtttaggattataaaataaaaactcagtaacaaaaacaaacaaaggagaaatgggagaaaattaagatttggggcctctcctctccggtccgtgcctccaagatgacaaagaaaagaaggaacaaaggtcgtgctgaaaagggccgcggccacgtgcaggctattcgctgcactaactgtgcccgatgcatgcccaaggacaaggccattaagaaattcgtcattcgaaacacagtggaggccgcagcagtcaggggcattctgaagcaagtgtcttcgatgcctatgtgcttcccaagctgtgtgtgaagctacattaccgtgtgagttgtgcaattcacagcaaagtagtcaggaatcgatctcgtgaagcccgcaaggaccgaacacccccaccccgatttagacctgcgggtgctgccccatgtctcccaccaaagcccatgtaaggagctgagttcttaaagactgaagacagactattctctggagaaaaataaaatggaaattgtacttaaaaaaaaaaaaa

SEQ ID NO: 672895 - DNA, 2945 bp, Homo sapiens
cagggctgcaggggcctgtggtgtggaaggaggcaaaagagaacggtatttctgaaaatatatttggtaaccaataaatctcagttataagccaaagcactaacatgtattctattttaaaaacactttaacaaaacaaaaaccttatgaagttgaaaattatcaactttctagctaaatgacactcatactcagatattttacaagacatagccaagcactttgacaacctgacaaagtgaaatttcagaagcaaaaatgaaaaactttactgaatatccccaagtgatctaggacttagattattccccttcatgttggatacgctggcaaatcaggtaagatgcaggccatgggacctgacgtcacttgagtgttggccacttggccagataagcaaaggtgacttttctttcttccttggcggcaggccgaggggagagaatatctgttaaaagttaaaaaagctttctcctcacatctataataaatactttcagaattaacatttttattgaaacacacatctagactaaattggaaaatacgagttttacttttaagtgggaacgctatctttaaacattatgtgaagaaatctgtgccgaaaatgcccactccataattgatttgcataaaggtcagattatggtacttagaatattcaatcggaacttcaccagtaaaaacaaaagcatggaaaacccccaaaacgtgacaagtaccttgtgtattaattacagctacacattttgataacgcttattgtataccaatccagaaacaagtgaaattacacgtgtactgtgagagctctcaacagcaaagacaactagaattctctcatatataatcaaatataacttgttaaggatttcactcaaaatgtgcaatagggaaacccggatatttgatattttcataccctgaagaaaataaaatgaaaattatcttaattagtttcaaaaattttgtttgttctgaattgacatcgatttctagaatcttttctggggtgattataatgtatctatagtaactaaaactagattagttattagttagcaacttaatttaggggcaatgcaggtttgtttcatattctgaacatattttcccccttcttaatttggcatctaaagttattacatgatctgcagtatgcattaaaacacatcagcacagatagggtgctatgcatgtgtgttagctatttgccctaaatgagaaaatccattctaggagtaatgagctagcacttaatccaaaggccagatggccaccttaaatgctttagctatcttaatctccaaaccaaaccagaagctttgttgttagtaaaatgagttttcacatgcactaagtggcctcattacttagtataatggatattagaaatcactagggtaacatgagtggcattaagccatggactgattagaaagagatatatattaacttcaaatagagccttaaaaaaagataaatacataaataaaaacaaagaaagatatatatagaccctccccaatccggggtcaagggaacaagtgttgagactccagcaagtccaggaggctgtattgttgggggtgctcctagagcttgatactaaatggctgtgtgcagccagtgatctggaagatgctggttgcctggtgcagaccatattctgtcactgatactgtcacatttgcctcagtaaatctttcaggtaaacgtttggttagagaaattaaacagagctgggctgcatgcaacttacaaaactgttttcagcaactgccttttgataaatagatatgagggtgcagaatccggacgtgctttcattataacctggtcgccaaactgtaaggaggatgcctagagcccttacctagctttaactgctggaggatacttatctaccaagaggtacataatagttggaaattgccagcctggcttaagtcaacttggaaaaaaaaaaaaaaaagagagagagaaagaaaataaaaggaaagaaaagaaggatttgtggaaatagagaaagtgattctaactaaaactctgtgagggaagatgtacctgctgatccaaacaatcattttgaaattgaagtccctgtttttaaagtttcattatgagagattctttttacataaatctcctccatctggaaygcattttacttctccataaacagagaactggactaactgtgaacgattattttcttaagggtaatgctctcctaaataaagaatccctttaatataaaccatatgctagtatctttgaaagaaaagatattcttcaggaaattagtcgtctatatcagatcaaagaaatggaaccaaatggattctaaagcttatggagtttatagcctcaaatattttcactgtaagcatgtagcttataaatatgactgcatgaaatttcactgtatacacaactcattttttaacatcgtactactcttggtatgacattgatctcaacccaaggcctggcctgcccacggagcaactgcctccctcatgttctctacccttgcttctaaaatgggggcatgcatattctcagaggatctagcatatgcactaccttccccgagctcaacaacatcatgacatgccgttgaaaacatattaaagttaacaccaatatgaaggtgtgctctacagggctagggaaccttagttttgaccactggtatattcccagggcctggaagagtgtatggcactttgtagtgtctgccacattttcagtaaatgaattccataaaatccataaatatacctgtggggcactatgctaggaaccaaagatacaaagtccctactgacaaagatcttagacattctactaggaaagataataaatacacaaagtaattagttacagcttgtgataggtgccatgagggaaataaacaggatactgtgatagagaat

SEQ ID NO: 672896 - DNA, 2945 bp, Homo sapiens
cagggctgcaggggcctgtggtgtggaaggaggcaaaagagaacggtatttctgaaaatatatttggtaaccaataaatctcagttataagccaaagcactaacatgtattctattttaaaaacactttaacaaaacaaaaaccttatgaagttgaaaattatcaactttctagctaaatgacactcatactcagatattttacaagacatagccaagcactttgacaacctgacaaagtgaaatttcagaagcaaaaatgaaaaactttactgaatatccccaagtgatctaggacttagattattccccttcatgttggatacgctggcaaatcaggtaagatgcaggccatgggacctgacgtcacttgagtgttggccacttggccagataagcaaaggtgacttttctttcttccttggcggcaggccgaggggagagaatatctgttaaaagttaaaaaagctttctcctcacatctataataaatactttcagaattaacatttttattgaaacacacatctagactaaattggaaaatacgagttttacttttaagtgggaacgctatctttaaacattatgtgaagaaatctgtgccgaaaatgcccactccataattgatttgcataaaggtcagattatggtacttagaatattcaatcggaacttcaccagtaaaaacaaaagcatggaaaacccccaaaacgtgacaagtaccttgtgtattaattacagctacacattttgataacgcttattgtataccaatccagaaacaagtgaaattacacgtgtactgtgagagctctcaacagcaaagacaactagaattctctcatatataatcaaatataacttgttaaggatttcactcaaaatgtgcaatagggaaacccggatatttgatattttcataccctgaagaaaataaaatgaaaattatcttaattagtttcaaaaattttgtttgttctgaattgacatcgatttctagaatcttttctggggtgattataatgtatctatagtaactaaaactagattagttattagttagcaacttaatttaggggcaatgcaggtttgtttcatattctgaacatattttcccccttcttaatttggcatctaaagttattacatgatctgcagtatgcattaaaacacatcagcacagatagggtgctatgcatgtgtgttagctatttgccctaaatgagaaaatccattctaggagtaatgagctagcacttaatccaaaggccagatggccaccttaaatgctttagctatcttaatctccaaaccaaaccagaagctttgttgttagtaaaatgagttttcacatgcactaagtggcctcattacttagtataatggatattagaaatcactagggtaacatgagtggcattaagccatggactgattagaaagagatatatattaacttcaaatagagccttaaaaaaagataaatacataaataaaaacaaagaaagatatatatagaccctccccaatccggggtcaagggaacaagtgttgagactccagcaagtccaggaggctgtattgttgggggtgctcctagagcttgatactaaatggctgtgtgcagccagtgatctggaagatgctggttgcctggtgcagaccatattctgtcactgatactgtcacatttgcctcagtaaatctttcaggtaaacgtttggttagagaaattaaacagagctgggctgcatgcaacttacaaaactgttttcagcaactgccttttgataaatagatatgagggtgcagaatccggacgtgctttcattataacctggtcgccaaactgtaaggaggatgcctagagcccttacctagctttaactgctggaggatacttatctaccaagaggtacataatagttggaaattgccagcctggcttaagtcaacttggaaaaaaaaaaaaaaaagagagagagaaagaaaataaaaggaaagaaaagaaggatttgtggaaatagagaaagtgattctaactaaaactctgtgagggaagatgtacctgctgatccaaacaatcattttgaaattgaagtccctgtttttaaagtttcattatgagagattctttttacataaatctcctccatctggaacgcattttacttctccataaacagagaactggactaactgtgaacgattattttcttaagggtaatgctctcctaaakaaagaatccctttaatataaaccatatgctagtatctttgaaagaaaagatattcttcaggaaattagtcgtctatatcagatcaaagaaatggaaccaaatggattctaaagcttatggagtttatagcctcaaatattttcactgtaagcatgtagcttataaatatgactgcatgaaatttcactgtatacacaactcattttttaacatcgtactactcttggtatgacattgatctcaacccaaggcctggcctgcccacggagcaactgcctccctcatgttctctacccttgcttctaaaatgggggcatgcatattctcagaggatctagcatatgcactaccttccccgagctcaacaacatcatgacatgccgttgaaaacatattaaagttaacaccaatatgaaggtgtgctctacagggctagggaaccttagttttgaccactggtatattcccagggcctggaagagtgtatggcactttgtagtgtctgccacattttcagtaaatgaattccataaaatccataaatatacctgtggggcactatgctaggaaccaaagatacaaagtccctactgacaaagatcttagacattctactaggaaagataataaatacacaaagtaattagttacagcttgtgataggtgccatgagggaaataaacaggatactgtgatagagaat

SEQ ID NO: 672897 - DNA, 1077 bp, Homo sapiens
gttttgtgagttgagatgaagcattgatgcctaaagaaatagtctcttggtaaattgttcattagtgaagaatggtcaagaagccagtctctttcagcataagtcagggtaatcagcaggccatctcagctcaccgcaacttccgcctcccagactcaagcacttcttgttcttcagcctcctgagtagctgggactacaggtgtgtgccaccactgaccagtgctaaattttgtatttttggtggagatggggtttcgccatgttggccaggctggtctcaaactcctagcctcaagccatctgccggcctcagcctcccaaagtgttgagattacaggcaaaagccacaatgcctggcctctgggctatagttttctttttgtatgttaggatcaaatcagaaatatgtacatacgtacatatagatgatagatagatagatagatagacagacagatacagatatagttatgtagatatagaaggcacttggtacataaaatttatagaacctagtaaatgttaaagatagatgcatattgttattctaagtattcagatggtaatcaaaaattggataacaattggatacaattttaagtaaaatggttaaaatagcctctgtatcctcttaatcctctcccagccaatttctagcatcattttcctagaattttggaaaaataagagcatcrtttagaagtgaataacattttttattctaaaatgttataattctaaagtattaaaatactgtttggtgaaacagtattctaaaatgttatattctaaaatgttctaaaatgttaaaatactgtttggtgaaacagtattttgtattctaaaatgttaaaatactgtttggtgaaaacaaaatttatattgtggaatgtaattagcaagaagccaacttttatttatatttagtatttatccagactagatcattccattctttacacagagaagggtccaaatattgactctctttgtttctctatcagtgaaaaagtacttcttttgctgtgccttatctcaagcttttaagtattttgagaacacacatgaaacagaa

SEQ ID NO: 672898 - DNA, 599 bp, Homo sapiens
gcaaaccagtttggcacgttcttaaaatgttaaccataaatttaccacataagccagcaaatcccttcctagaaatctacccaagagaaatgaaaacacacgtccacaaaaatacgtccaatattcatcagagttttgtagccaaaaactggatataattcaaacgtctgtcaactggtaaacagataaacaaaatrcagtatatccacaaaatggaacaccagcaacaaaatggaatgaagtacagacataggcaacagcacggatgaactttattcaaaaacattaacctaagtcaaagaaagtagatacaaatcctacatattatattattttcacagctagttagacaggcatgagtggagcaggagagggctctccctgcacccagtaggaatatcaggttatggttcgataattatcatactacctctctaaagccagggaagaacaatctcctgatgatccacagctattaacactaaagatagtgtcagggagaagaaacttcctgggcatgtggtttaagagacaaaatggggaaatatgaccctccaggtgcactctatgggaaaaaggaacaaagcctcagatgggca

SEQ ID NO: 672899 - DNA, 599 bp, Homo sapiens
gcaaaccagtttggcacgttcttaaaatgttaaccataaatttaccacataagccagcaaatcccttcctagaaatctacccaagagaaatgaaaacacacgtccacaaaaatacgtccaatattcatcagagttttgtagccaaaaactggatataattcaaacgtctgtcaactggtaaacagataaacaaaatacagtatatccacaaaatggaacaccagcaacaaaatggaatgaagtacagrcataggcaacagcacggatgaactttattcaaaaacattaacctaagtcaaagaaagtagatacaaatcctacatattatattattttcacagctagttagacaggcatgagtggagcaggagagggctctccctgcacccagtaggaatatcaggttatggttcgataattatcatactacctctctaaagccagggaagaacaatctcctgatgatccacagctattaacactaaagatagtgtcagggagaagaaacttcctgggcatgtggtttaagagacaaaatggggaaatatgaccctccaggtgcactctatgggaaaaaggaacaaagcctcagatgggca

SEQ ID NO: 672900 - DNA, 1019 bp, Homo sapiens
tgtggtttggctctgtgtcctcccccatatctcatcttgaattgtactcccataattcccatgtgttgtgggagggacccagagggagataattgaatcatgggggcggtttctcccatactgttctcgtggtagtaaataagtctcacaagatctgatgatttgataaggggaaacatgtttagcttggctctcattctctctctttcctgctgtgatgtaagatgtgctttttgccttatgccatgattctgaggtgtctccagccatgtggaactgtaagtccaatgaaacttctttctttggtaaattgcccaatcttgggtatgtctttatcagtagtgtgaaaactaactaatacaatattcaagctgccccatcttttcctagtggcagtaccttcaattaggctcctgtgtctttttgatgtgatcccagatagccttgttgcttccttatatggctagatcttccaagctcatcctgctgcagaggtggattcagctgtttctccagagagttctggttccttttactggggaatatttaaagacygcacaatatggattctaggagataggagtgttaaacaacagattctgtgtgaacaacattgcagtcttgcaaatgtggtagacatgtaggtgtaatctgtttgtcttcttttgtaatatactaacttccgcttcattcttctgggaacagcatttcatcttttgggacattgctttttttctcactttagtcatttgtttttagtcatcacactctgcctctccaggtctaagcataagcatgtcaccaaagtcctctgccagaatcttttgaactggaacaggagaaagaattaagttaccaacaaaattttgagaggtgctggagctgtccatcagccataatatctactgtgtgtaggaggctggtttgatatcccatatggtttggctctgtgtccccacacaaatctcatgttgaattgtaattctcaatgttgggggagggacctggtgaaaggtgat

SEQ ID NO: 672901 - DNA, 1019 bp, Homo sapiens
tgtggtttggctctgtgtcctcccccatatctcatcttgaattgtactcccataattcccatgtgttgtgggagggacccagagggagataattgaatcatgggggcggtttctcccatactgttctcgtggtagtaaataagtctcacaagatctgatgatttgataaggggaaacatgtttagcttggctctcattctctctctttcctgctgtgatgtaagatgtgctttttgccttatgccatgattctgaggtgtctccagccatgtggaactgtaagtccaatgaaacttctttctttggtaaattgcccaatcttgggtatgtctttatcagtagtgtgaaaactaactaatacaatattcaagctgccccatcttttcctagtggcagtaccttcaattaggctcctgtgtctttttgatgtgatcccagatagccttgttgcttccttatatggctagatcttccaagctcatcctgctgcagaggtggattcagctgtttctccagagagttctggttccttttactggggaatatttaaagactgcacaatatggattctaggagataggagygttaaacaacagattctgtgtgaacaacattgcagtcttgcaaatgtggtagacatgtaggtgtaatctgtttgtcttcttttgtaatatactaacttccgcttcattcttctgggaacagcatttcatcttttgggacattgctttttttctcactttagtcatttgtttttagtcatcacactctgcctctccaggtctaagcataagcatgtcaccaaagtcctctgccagaatcttttgaactggaacaggagaaagaattaagttaccaacaaaattttgagaggtgctggagctgtccatcagccataatatctactgtgtgtaggaggctggtttgatatcccatatggtttggctctgtgtccccacacaaatctcatgttgaattgtaattctcaatgttgggggagggacctggtgaaaggtgat

SEQ ID NO: 672902 - DNA, 638 bp, Homo sapiens
ttcactgagtatatatctattaattttagatgagactacattaggaaacctttgttacatgaaggttgtaattaagtgaataatatattcaaattcaatacaaaacatcttcttccacatctttttagtgacaattctttagtaaaaaatttcaaggaactgaaaggcttaaaaagtaatgattaaatatgcaaatataacaatttatagttctttctaaagaattaaaatttgaaagatatgtccaaatggattctcttcttatatctcattatcttctttatctactttagcatttgtgatttcattattttattaagaaagtgctctcatttcttraccccgtttattcttctactttatttctatatttcaaaattctccctattttctgttttctcattctattaacatacattacataacttccaaattattctttttttctctgtgactattcctctttcctttgaaaagctctccagtttctaaccttaaaattcgtgcttaaagactttatttccagaatcatttttgtgtgtgtgctaccatcagttatccatgaaaatcaacttcggcttatgaatgcatggctatgcaaaaagtgaacactcattttctatcttttttgcatgttt

SEQ ID NO: 672903 - DNA, 1651 bp, Homo sapiens
ggaaagggaagtccctgaccccttgtgcttcccgagtgagccaatgcctcgccctgcttcggctggtgcacggtgcgcgcacccactgacctgcgcccactgtctggcactccctagtgagatgtacctggtacctcagatggaaatgcagaaatcacccgtattctgcgtcgctcacactgggagctgtagaccagagctgttcctattcggccatcttggctcctccctcctaatctcaaagattttatacttgcaaaagttaggggattgccactctacaattttaagcttctactggcatagaattgccttattttgtcttctagattatattatctttaaaagcaattactcaaaactttattaatgttagcattaaaactcaattaakgcagccatttaaatattgcttacctcaggaaatatacccagattgttgagctaaaaacctacatgtcctccttgatttctgtctttaactaatcttcttgcttctactcttttgtcccttgttattcattctccagaaaccagaatggtcttttaaaatttccaaccaaagcatgttacttccaagttaaattcatcaaatgagttttgtttgtatttaaatattatccaaaacactttaccttaactttcagagccctacacaatttgccattacctccttttccaacctcatgttataacactagccctggtctttgcattggtcaagttagactccactttggtatgttctgaagacccccaaatttgtttgaaatttaaggcctttggatttgctgagcctcatgcctactatatccttgccagagctcctagcatggttacattccactgtcactaaggtcttggtttatgtctcactttctcagagacacctcctcttccttgccctcccaatattaactggtcatgattctttatcatagtacctcatttatttttctcattatcttatttctctttgtttattcattcatttatttgaccaatcattcattcattcatcttacttttcaggttcttctttagatataggtaccagaaaagtagaaagaaaactacctttaaagttcacaactacatccttgatgccaaaagtattttctggtacatactagacactgaataaatatttgttgatggaataagcaaatgaatgaatagctgagggacagtagttataactaacatttagaggcaaattattaaaactgcattctctaaaaaaattttgaagcattttttataagaaactttatgtaatattatacctcaaaagccaaagatgaaccttttttgtctggcaaattaaaaaatcagtttgaactaaagaactaatgacactttttgtaagccagaatagaaacaaatcctgtccctaaagcaaaattatacatatatatatataaaatatgaaatataaaacttccattacattttcagaaatgattaaagatggaaggtaaaatgtagattaagatgtaaaatagctttaattcaaataagaattgatcttcctgttctttgccatgtaagacaatattgtacatagtacattctctctctgtctccctcttccccctctttctaaatctaggtagagaactatggtcacatagtgataattactctttgg

SEQ ID NO: 672904 - DNA, 1651 bp, Homo sapiens
ggaaagggaagtccctgaccccttgtgcttcccgagtgagccaatgcctcgccctgcttcggctggtgcacggtgcgcgcacccactgacctgcgcccactgtctggcactccctagtgagatgtacctggtacctcagatggaaatgcagaaatcacccgtattctgcgtcgctcacactgggagctgtagaccagagctgttcctattcggccatcttggctcctccctcctaatctcaaagattttatacttgcaaaagttaggggattgccactctacaattttaagcttctactggcatagaattgccttattttgtcttctagattatattatctttaaaagcaattactcaaaactttattaatgttagcattaaaactcaattaatgcagccatttaaatattgcttacctcaggaaatatacccagattgttgagctaaaaacctacatgtcctccttgatttctgtctttaactaatcttcttgcttctactcttttgtcccttgttattcattctccagaaaccagaatggtcttttaaaatttccaaccaaagcatgttacttccaagttaaattcatcaaatgagttttgtttgtatttaaatattatccaaaacactttaccttaactttcagagccctacacaatttgccattacctccttttccaacctcatgttataacactagccctggtctttgcattggtcaagttagactccactttggtatgttctgaagacccccaaatttgtttgaaatttaaggcctttggatttgctgagcctcatgcctactatatccttgccagagctcctagcatggttacattccactgtcactaaggtcttggtttatgtctcactttctcagagacacctcctcttccttgccctcccaatattaactggtcatgattctttatcatagtacctcatttatttttctcattatcttatttctctttgtttattcattcatttatttgaccaatcattcattcattcatcttacttttcaggttcttctttagatataggtaccagaaaagtagaaagaaaactacctttaaagttcacaactacatccttgatgccaaaagtattttctggtacatactagacactgaataaatatttgttgatggaataagcaaatgaatgaatagctgagggacagtagttataastaacatttagaggcaaattattaaaactgcattctctaaaaaaattttgaagcattttttataagaaactttatgtaatattatacctcaaaagccaaagatgaaccttttttgtctggcaaattaaaaaatcagtttgaactaaagaactaatgacactttttgtaagccagaatagaaacaaatcctgtccctaaagcaaaattatacatatatatatataaaatatgaaatataaaacttccattacattttcagaaatgattaaagatggaaggtaaaatgtagattaagatgtaaaatagctttaattcaaataagaattgatcttcctgttctttgccatgtaagacaatattgtacatagtacattctctctctgtctccctcttccccctctttctaaatctaggtagagaactatggtcacatagtgataattactctttgg

SEQ ID NO: 672905 - DNA, 1517 bp, Homo sapiens
ataaggatattgtctcacgcatctggaactggcagctgggtgctgcaaggatgccctttggaggggaatgccaagcactgcaaggccgaaattgttggtttctgttttatatctttctgggcccactgatgccacatgttgcctacggtggtcatgtgagtccgaaagtttagaaaagtgtgcaaagaccccagtgggtgattctcagtagcatgtaagtggagaatattttaagactattgcttcaacttgggaaaggcacagtgaggttaaaagagagagaaagggagatgcctgcaggacataatacctacatagaggkgccaccccacctatggtttgatgggaatgctctttgtggcttatgacaggagaaaacttttccttttgtgagtgaataaagattgagagaagccaaagaaaatgccaagaagaaaaactactcaattctcttaatctccatgaaatgaatctaaaactttgtgcagcctcttcagtatatatggatttttggctcacatcttatcaaattttgaggttgttcacatgggcttatccatttcataatattttcaaggacctaggatttttctatctttccagcatgccatggttatgtacatgtttgacatatgggattttgttcttatacaggcagcatagcaccttcagatgcaggtatcttgttcttattgaagaaggtaagaatgggagaaccagtaccatggagcctttggaaggaagcacatattacccaggaactctctgtagacttttgtttacatctcattgtccagcatgactaacagttgtcacttccacttgcaacattgggtgggaaagtggatatttagcttttctagattttatagcagaagcagacaaagaaaaacggttttaaaggcctgttattccataaaacaaaatgtagttgccacaattagggatctgcagaccatgtcacctgagaaataattgcaaatttcaggacaactgcatagcatgtttagttagaagaaggaagatttagaaaagccataaaactatttctagacttttaaatttagattttgtgaaataaagtttactcacattttctgtatacattagttctctatcagggagaagtttgcagcagaaacagctgttccagatatgatggattctccaaagtggaagaacattctgaagtttgagttttaggtggaaaatttttaaataatctactatagatattgcagaggggattcttatgttagttcaaggagaggatctatttacttttaagtttgtttccaatatatttatgatctgcttctaatctcccttacatgtcttcaacaaattgaaacatcatttgtgaactctggaaaaagtttctaatatagcatcaagtttacattaggtagagtcttaaaactatcattgacaaggttttttacttgactctcaaagaaaaggccaattattttttgaatctaattaagcatttaatgagttttgctttatataaaatc

SEQ ID NO: 672906 - DNA, 647 bp, Homo sapiens
ggcccaaggactgatgaccaacactaggatacattccccaggactgtcttacacactttgctcaggacgcgacttttttttaagctttttttttttggtgtgtgtgtgtgtgtgtgtgtgtgtgatagagtctcactctgtcacccaggctggagtgcagtggcgcgatctcrgctcactgcaacctctgcctcccaggttcaagcaattcttgtgcctcagcctcctgagtagctgggactacaggtgtgtgccatcacgccaggctaatttttgtatttttagtagagacggtgtttcaccctgctggccaggctggttttgaactcctgacctcacgtgatctgcctgcctcagcctcccaaagtgctggggttacacgcatgagccactacatccagccaggacatgagttttgctgttgtttattgaggctgtagtgggaaagagacccccacttcctctacctgcccagacctggagggcctgcctgctgggcctgatcatcccatcaggggataagagtgagacctgtttgaagcaaatccacttatgtgtccttcctgagacccccatgttccatggcctgggtcctttggagctatcagatggtcatctctgggtgtgcttagagatgagaggtggca

SEQ ID NO: 672907 - DNA, 647 bp, Homo sapiens
ggcccaaggactgatgaccaacactaggatacattccccaggactgtcttacacactttgctcaggacgcgacttttttttaagctttttttttttggtgtgtgtgtgtgtgtgtgtgtgtgtgatagagtctcactctgtcacccaggctggagtgcagtggcgcgatctcagctcactgcaacctctgcctcccaggttcaagcaattcttgtgcctcagcctcctgagtagctgggactacaggtgtgtgccatcacgccaggctaatttttgtatttttagtagagacggtgtttcaccctgctggccaggctggttttgaactcctgacctcacgtgatctgcctgcctcagcctcccaaagtgctggggttacacgcatgagccactacatccagccaggacatgagttttgctgttgtttattgaggctgtagtgggaaagagacccccacttyctctacctgcccagacctggagggcctgcctgctgggcctgatcatcccatcaggggataagagtgagacctgtttgaagcaaatccacttatgtgtccttcctgagacccccatgttccatggcctgggtcctttggagctatcagatggtcatctctgggtgtgcttagagatgagaggtggca

SEQ ID NO: 672908 - DNA, 643 bp, Homo sapiens
tggaaatggaggcccaggtgagtgatcagacatgattgaggctcccgggcagatggtgataatagctaccttctcctttcttcctggccacaatctgggaagaaagggagggaccactatatagatgagaaaacggaagcccaagtcacacagctcccaagggccagagctgggaacctctggtgtggagagctggtggctcaattaactaacttaaaaaatctaattctgcaaaaacaattccacatacggcaaccacagtaactctgtgaaccagaatatgtgtctcattccccaggcaggttgcaagtcagttcaccgtaataaccactgttgtaggatagtgaaggtgatgatgatgaagcctcacacatgagggatgttaccacgtaacygttaggtgccaggcattatatgtgcagaaacttgccaaattctcaccacagtgtgaggctggtactgttgttgtgcccatttaacaaaagaggaaactgaggctaagagaagtcaaagtcacccaagctagtaagtgccaggctcaggaggcaggcgttagcagtcagctccggacacccacccttcattgctgtggtagtgacactgataacaaattcgaccagaccatgggtaattagagcaaaag

SEQ ID NO: 672909 - DNA, 1755 bp, Homo sapiens
gctgctgcccctaaccttgaaacggaggacttgggcccaggacccactgggaagcacaggagtgtgggattatattatattattatgtgagttcagctcccagctgtacggggttgaataatgttcccccaaactcatgtctacctggaactttcaaaggtggccttatttggaaatagagtctttgctgcagatgtaactcattaagacgaggtcctgctggattagagtgggctgtaatccagcgactggtctccttataagaaggggagaacgtggacacagacgtgcgggggagatgagagcctggggtggtagatcaacaagccgaggcacgtcaaggtctgctggcaaacaccagaagctagaaggagcagggaaggattcttcccttcgagtctttggagagagaacattgaccccttgatttggactcctggcctccagaactgtgggagaacaagttctgttgtttcaagccacccagttgagtacgttgttatggcagacctgggcaatgagtaaacaggctcccttccctatgtgctgatttcccgtgggtaggtcrctagcttctccaagcctcagttccttgtcttgcagtaaggatgataaaacctggttcacagggtattgtgaagattaaatgaaacgatgtatacaaacatgaagcggttcagtaaatggcagtggaatttgactccactgtttaactacagtcattctttagagatgggctcaccgttgcttacggagagactgacagctcccctattatttttttatggttgattttggaaattctaagtttgtggtttggttaaaagttgatcataattatttaatctatgtgatactttattaaaagtatcacaagttttgtattcagcactttcacgaaaaggaaaaaaataccagtcatatatttcactctgtgcacacacagattacatgcttgtaccaactgaatgaacagttagtttataccagatgccagctgactgcctgatgccaactggaaataaagttatatatgtgtatacactcatataaactgatctctaaccttgtatataaaaccatatgtgtctctctgtgcacattgcatcctgatatattcacaacagatgcataagtatatatctcttcagcagttccatccagaaaatatttattcagcattcactctatctggggcatgtgtgtgtacacgtgcgtgtacagatacagaggattatgagtttgtccataaataatatatgcacctagctgattacaccagaagccaaccaaagtctagaggtagggatgtgagcattgctgttggaaaacagtatactccacatgtcctggttgggaaatgggccaaggcctggaagttaacacagctcccaaatgagagacgaggcagcatggggcagatttgggggcacaggaggaaggccttgcgactttcttttcttttcttttcttttgagacaagatatcactctatcacccaggctagagtgctcactgaaacctcggcctcccaggctcaacccatcctctcacctcagcctcccaagtagctgggactccaggcatgcaacaacaaacccagctactatttttgtttttttttgtagagttgaggttttgttatgttgcccaggctggtcttgaacctgtgagctcaatcgatccacctgcctcggcctcccaaggtactgggattacaggagtgagccaccacgcctggctggccttgggtct

SEQ ID NO: 672910 - DNA, 841 bp, Homo sapiens
ccaatttttctcttattggcactctttaagtgttaagaaattgagatagtgccactccactccaggctgggtgacagagtgagactccgtctcaaaaaaaaaaaaaaaaaattgtttgttgtatgtaatacaatttttttccaccatttgtcatttttcttttgactttttgaaaggttttttttggacatgtacaatttcttttttttttttttacttttatatagataatacatcagtctttttttttttttttccatttatagcttctaagttttatgtcacatttctaaggggattccccagttcagtgacaataaraaaagatttttgctatgttccatctcattctgttgtttcaccaactcttttccaagcacttatatctctgcttcatgcaactgtttaacttgggcaatcactcattaattgttttcatttaaggcaatatatttggtcaaagattccttttgttcgatgaaaacattttttatggtgtttcttatgccctgtttttcacattccttccccatttgttcttgagatatattttatgtatcctgtgatagctctttttgagtaaattctttctggatcagcaattaaaagttgagtgtatgcagtgtctaggctggcaagaagtctccttatgcgtcagagttataggtataaacaatttctttgagctttgacttctccccagccaattaagatcaaaagctatggggatgtacacaacccgtagagtttactacacccaataccttttactacacccaatactacactcaataccttcctcctgcacatacatggctcatctgtgtgactcattctgcct

SEQ ID NO: 672911 - DNA, 1314 bp, Homo sapiens
  misc_feature 524, 525, 526, 527, 528, 529, 530, 531, 532, 533, 534, 535,536, 537, 538, 539, 540, 541, 542, 543, 544, 545, 546, 547,548, 549, 550, 551, 552, 553, 554, 555, 556, 557, 558, 559,560, 561, 562, 563, 564, 565, 566, 567, 568, 569, 570: n = A,T,C or G
  misc_feature 571, 572, 573, 574, 575, 576, 577, 578, 579, 580, 581, 582,583, 584, 585, 586, 587, 588, 589, 590, 591, 592, 593, 594,595, 596, 597, 598, 599, 600, 601, 602, 603, 604, 605, 606,607, 608, 609, 610, 611, 612, 613, 614, 615, 616, 617: n = A,T,C or G
  misc_feature 618, 619, 620, 621, 622, 623: n = A,T,C or G
ggctgaggcaggaggatcgcttgaagctgggagatcatatcactgcactccagcctggcaacagagcaacactctgtctcaaaaaaaaaaaaaaaaaaaaaaaaccctattatctacaaaagccatctccaaacaccctgaaacataaattgtcttctattagtatgaattgtatctaagatctacatagttaacacaacagacattaaaaggagaaataccagttaaatagtccctttcagtttacattaatatcttaacttcttacttgagctgcagcttcctcataaccagtggtgccattgatctgtccagcaaagaagagtcgttgaaccaaatgagtctccarggaaggggtgatctgacggggatctaagtaatcatactgaacaccgtagcctgaccaaagaacaaagacattaaataagtaaatacagagctggatttgctcaaggtagagatgcaagcattacccttaaatgccctttaaaaacagactatttaggtcaggagcagtggctcannnnnnnnnnnnnnnnnnnnnnnnnnnnnnnnnnnnnnnnnnnnnnnnnnnnnnnnnnnnnnnnnnnnnnnnnnnnnnnnnnnnnnnnnnnnnnnnnnnntccaggaaaaaaaagaataagaataaaatgtgtatattaccatcttacacagtaaatatgggacataaattgatatatctatagcgataaatatggtaaaatattaacagtgagtgacgttcaatggtttataggagtttgttgtgaaaaaactcttacattgagaaaagtcttacaactttttctcgatgttgcttacttttttttgtttttctccgtctttttaaaataaaattatatgcgttgagggttaactttctttttttttttttttttttgagatggagtcttgctgttgcccaggctggaggctggagtgcagtggcacaatcacagctaactgcaacctctgcctcccaggttcgagcaattttcctgcctcagcctcccgagtagctgggattacaggcatgagccaccatgcctggctaatttttttattttttttttatttttagtagggatggagtttcaccatgttggccagactggtcttgaactcctgacctcaagtgatccacctgcctcagcctcccaaactgttgggattacaggcatgagccaccacgcccagctgagggttaactttcaatagatcgcagcgaggaagttgctctgctatgtctgaaatcccaccccagaagcaggtcatctaagaatggttcagtgtcgggttctccataaaaatgca

SEQ ID NO: 672912 - DNA, 1308 bp, Homo sapiens
ttgttgttgttgttgttgttgttttgagtcaaagtttttgctctcgttgcccaggctggagtgcaatggcgtgatcttggctcactgcaacctctgccgcctggcttgaaatgattctcctgcctcagcctcccgagtagctgtgattacaggtgcccaccaccacacccagctaattttttatatttttagtagagacaaggtttcaccatgttggccaggttggtctcgaactcctgaccttcaggtgatccacctgccttggtctcccaaagtgctggaattacaggtgtgagccaccacacccagcctctccattaatttgtatatctgccacctggggacccactgtaaaataaatactactgttcctttatggatagtactgtattgttttcacacttgatttcattaattccagttaacgtataccaacctttgtgctcaagatctagaacaataaactcttcactttggaagacagtttaatctccatgtactgaaaaccactaattttacaggtgagaaactgtgggaatgactgagtgatttgcccagtgctcatgtggctaaagatcaagcctgcccgcccaccttatgacttccattttttgcctttagcgagtaaagcagtagggattaaaagtgtatgttctagagccagactagctgggttccaagcccaactcttaatatttaatagctatgtgacctgaggcatattaaactctttaagtcttagcttctttatttgcaaaatgaggataatattcctcatttataaaattatgacaaataagttaatatacgtattctaaattatttacattgtttaagtattagctatcatgttttgttcattattctaccttcaggacctaaaatagtacctgcacaatgactttgctaaatgaataattgaatggataaagggtaagctgcttccctatgccatcattgactagttgacttaaaaaawtttttttaacatatatttttgtggaaggatggttctcactgtcagacatcaataggttagtttgagttgcagaaggtaaatgaaaattgtaggtaggactacttttaagatttttgatctacattaatatgttatgaagaaataatatggctgaacatttcccaaatttagtgaaggatagattcaacccaatgaatgaaaaccaagcaagatagtaagacttcgtttaggcacattgtagtcatcagtcagactggtgaaaactaaagtttaagaaaaaaacttggatgggcttggtggctcatacctgtaatcctagcaccttcgga

SEQ ID NO: 672913 - DNA, 599 bp, Homo sapiens
tgtgcctggctgagcttccagtattctttactagagtcttgtggtctgtggactcccttgctaagaatcactgtagtccttgtgatctgtctcaagcttataatggtgtatgtgaaaatgtaagaaaattastaatgaattatcttgaaatgttttctctgttttgccagatatgaacaatataaagccattggaaggggtaaaaattctggatctaacaaggtttgtattggtttatctacattttggtgattgggtttttccctttcctcaaaaacttttaattttttgaattataagaagagacttatatgcttatgttgaaattttagagaagaaaataagaaaagaaaaattgctgtaatatcatcattctatgagacaattagtgtagtatttatgccttttcccaatgtatatttatatataatcttaaaaaacaaaaattggaaccatattgaaattagttttacccatattttaaacacaatgttatatttttaatattttcctatgttattcaaaattcaacaaaaaagtgaaatagtaattaatatatcgatgtcacataattacttaatcatcctctaatctttcac

SEQ ID NO: 672914 - DNA, 2098 bp, Homo sapiens
taaattacctaccactggtttcaagagggcaaagagaggaaaaatgagtcacaatctatgggtgaagaggacaaaagctgataaaaatctgcttcatttgtttagggtccagcatctgggaaatataattctagtactaccatcacccatctaataactgaaaatctctctgaaataagcaaataaattcattttcagttcctctaaaggtagagctctcattatgtactgatgtctcccattatttctctagaaagccctggctgaagatgaaggcttttatcaagcaaaaaaagtggtttccctctaactttaacagagcagcgctagttctactccccaaaatcacacagaataagcttaataaagaatgttaaggctctgaaaacagttcatcactgctgtcatgacccttcacctctccaggaaaaataaatccaactctttttttttttttttttctttttgagaaggagtttcgctcttgctgcccaggctagggtgcaatggtgcaatctcagctcactgcaacctctgcctcccaggttcaagtgattctcctgcctcagcctcctgagtagctgggattacaagtacccaccaccaagccgggctaattttttgtatttttagtagagacggggtttcaccatgttcgtcaggctggtctcaaactgctgacctcaaatgatccacccgcctcggcctcccaaagtgctgggattataggcatgagcccctgcgcccagccaactcttctccaatgtacctcatgatcatggataagaactyccaattttccttatttatgagttttctaaattctctaagtttataaaatgcatccacattctatcagtgaaataagcaacacattgaactatcgggactgaatactagtcctggttttgcttttaaactccacatccttgaggaagtcctatttctctctctgggctgcagacactgctgaaccataaactttccagtttcagtagcctcaaagtctgtattaaaaacaatcatttgcaatattgctttcattttgataagaaatttaaaataaatatctaaccaattaatagaactgacaaaggtattttacttaaattgtctcccacaatatttaagagtccttagaatataatggtggatagcagaggggagataaataaatatatactacaagtagttacgtagtatgtagttatgtatatatgtatttatacacatacacaacataaatacctaactacaagcaccatcaaaatgacctcgtagtttactcttacccaatataaacataagtttaagcatatacttataagtttaaccttaaaaagctatttttctagatctatgctgtccaatatagtagcctcaagtcacatattggtatctaaattaaaattaaaaatcagttatttagttgcactagtcacctttcaaatactcgatgtccacatatggctagtggccactgtactggacagggcagataaggaacaggtctatcataacagaaagtcctactgggacagtgctgttctagagcagttcacctaaatctgttttgcaaatggaaacagaaaagcaagacctcaaaacacttgagctctgaagtcagaaacaaggttgaaatcctagttctgccatttacttgctatgtgaccttcagcaagttagttacttaacccttccaagcctgtcttcccatctataaaatgctgtacaaaactactacccacctcaactcaaaagcataagaatgacacaacagactttggggactcagggggaaagggtgggaagagggtgagggataaaagacttcaaactgggttcagtgtatactgttcaggagatgggtgcaccaaaatctcacaaatcaccactgaagaatttactcatgtaaccaaataccacctgttccccaaaaaacctatggaaataaaaaacttaaaataaataataaaactactgtcacctcaaagacagttgtaaagattacacgagataatgctggtaaagcatttagcacactgcttcaaatactggaaacattcaatagctgttagctccctactataattaatta

SEQ ID NO: 672915 - DNA, 1167 bp, Homo sapiens
gcacaattattgatggtgtgtcttaaaatcaatgatctttcagaatcatagatatatagtatataccaccatttagaatgaaactctagacttcttatttgcaatggcaatgtgttttctaaagattgctttgacatttaaaaaattttaataattagttgcatgatgcttttttgagaataagttcattttggaaggttttcgctaggtgattcaattgattagagtaggggtttttaggttgactgaggaatgtagtctgtaagggaatatagaaagttgtctagatgagatgaagggttttaaaaaaattcctgctaagaaattactttgcgaatctgcgtatccacacattcatgttctacttggctctcagtaaatttttgaattttctttaactcaagaaatgtatgtgtgtgttttaaacatgttagtacatatacactgcttcatttttctgaacccttagcccaatatattgatgttaaaatgagtgtttcgtatcttctctgttctgtataattttggtaccatattcttcatttaagtctgagtgaatcatgattgttatgattcccctcctctgctattttttttaaagcaaataacagtcccacacagcattcttattgtagtcttatcattcattcctggaacggttaaggtataaggtggagtaatatacattgaaatttaattgtgtattgctccttgacttgtctcaggaacaatgggcagttgctgacttctgtatcatactaacctaagaggtggcactgccttatgaaaattggaaatttaggtgattgttcaggtgatttttgtgtaaaataattttgtcttaaaagttctgatgagggaagtcttcttgtttgacttagcaagataatagttctccatctttcaccttaccagcgtaaaataattagccttagttttccttgccttttaaatggggactgataaaacagatacttagagaattctgtgagatttacctaatcacttttaatggtaaaagatcatcatgggaaaggtagactgtaagtgtgaattattgatacttttcatttttcctcaccctaagagacagtgcctgaaataggtacctttcttwtcccacttgtcaaggctgagaaacttaatacataccataatcacaacttt

SEQ ID NO: 672916 - DNA, 643 bp, Homo sapiens
caacagagcaaacacaaacatactgaacttagattttagaaaaataactttgtgtatgatggttcacagaaccartggtgatggttcacaatgatgcttaaaggttcatcaagccctgccaataaaattagtctgggaacatttaatatgtttgtcacaataaaatgttctatataacaaacctctttaaaggaagtggtggaaattagtttctaacagctgcatcaaatatcaataagtacgtttgcaaaaaactgagctgatagttgagacttttattttaggattgaaaaaaacaatctgagaattaaattcatatactggtctacaattataaattacaaataatttattatatggttaaaacaatcatgctttttattttgcttctacctcttttatttaaaaagtagctgtaagaataacagaactgaaattaagtatttaaatatctaaatatttcttgctatggaaagcaaaaaagctgatgtgctttaagttattgtgccattgtgcatgaactaacatgggttgttgagtgcttgcttatgtctaggcattgttacctatttattatgtgtagtatctcctttggtcctattattaccttgtcaaaattaacattcacatatatccagtaaat

SEQ ID NO: 672917 - DNA, 643 bp, Homo sapiens
caacagagcaaacacaaacatactgaacttagattttagaaaaataactttgtgtatgatggttcacagaaccagtggtgatggttcacaatgatgcttaaaggttcatcaagccctgccaataaaattagtctgggaacatttaatatgtttgtcacaataaaatgttctatataacaaacctctttaaaggaagtggtggaaattagtttctaacagctgcatcaaatatcaataagtacgtttgcaaaaaactgagctgatagttgagacttttattttaggattgaaaaaaacaatctgagaattaaattcatatactkgtctacaattataaattacaaataatttattatatggttaaaacaatcatgctttttattttgcttctacctcttttatttaaaaagtagctgtaagaataacagaactgaaattaagtatttaaatatctaaatatttcttgctatggaaagcaaaaaagctgatgtgctttaagttattgtgccattgtgcatgaactaacatgggttgttgagtgcttgcttatgtctaggcattgttacctatttattatgtgtagtatctcctttggtcctattattaccttgtcaaaattaacattcacatatatccagtaaat

SEQ ID NO: 672918 - DNA, 965 bp, Homo sapiens
tatttcacaaatcactggtgcatgcaattattaacatttaacaaacaacttttttttaactctgtcttccatgtcatctttgggctagaatgcaatagccaatgcttcaactaagcaaaataattcattacactcactgactgtactctctaaaaaggggactttgcttctctgcatgtaggaagcagagaatgttttactcaagagtagagagcaataacatttactaatttttttgggaatgcatccccattttggtaaaaatatttatagaccattgcagggtcaactcctttttaagaggactacagcaaatgcaaacatcaaattatttctgattgggctgrgcacagtggctcatgcctgtaatctcaacactttaggaggctaagatgggaggactgcttgaggctaaagactactgaccagcctgggcaacacaggccatctcaacaacaaaaaaaatttttaaattagccagctgccactgcactccagcctcctgggtgacagagagagacttggtctcaaaaaaataaattatttctgattgacctgaaacaaaattatcagaccacttcacccattgaaagatacttgattcatttaggttgtgaaaactttagtgactttaaaaagcagaaaaactaagtcttctctgtcagaggattctattatcaccttagtttaaccccagcagatttaaataattcagaataattcatgttagtttaaccccagcagatttaaataattcagaataattcatgtcagactttcataattagtacagaataatacagatcctaagtgtgaggaggtttcgagaaaagatatttgctaatggctggagtcataaatatagtctccaaaagacctgccaggttctttgtctatcctgagaactgaaaccaacaaacctctctgtccttgtgctaaacaattatgggacaaaacattccttc

SEQ ID NO: 672919 - DNA, 2166 bp, Homo sapiens
  misc_feature 326, 327, 328, 329, 330, 331, 332, 333, 334, 335, 336, 337,338, 339, 340, 341, 342, 343, 344, 345, 346, 347, 348, 349,350, 351, 352, 353, 354, 355, 356, 357, 358, 359, 360, 361,362, 363, 364, 365, 366, 367, 368, 369, 370, 371, 372: n = A,T,C or G
  misc_feature 373, 374, 375, 376, 377, 378, 379, 380, 381, 382, 383, 384,385, 386, 387, 388, 389, 390, 391, 392, 393, 394, 395, 396,397, 398, 399, 400, 401, 402, 403, 404, 405, 406, 407, 408,409, 410, 411, 412, 413, 414, 415, 416, 417, 418, 419: n = A,T,C or G
  misc_feature 420, 421, 422, 423, 424, 425: n = A,T,C or G
caaggttacagatctgtgactagaaacttacggccttgagtcatagttcattgctttaaccatgaaacaacccactcccgccttctgttctaaccagagatcatgctttacattctcagcatattattgctagttaatcctctcttcagctgagcataataaggcaaatcatcacaacctggttacacttatgtcaaatatatgtgaatcacaccatctgtttcagaggtagaaaagacctatgagatcatctgggcttttattttttttccctttacaagagggctgccagcatttggggccaaatggaaggcttcaaatgtctnnnnnnnnnnnnnnnnnnnnnnnnnnnnnnnnnnnnnnnnnnnnnnnnnnnnnnnnnnnnnnnnnnnnnnnnnnnnnnnnnnnnnnnnnnnnnnnnnnnnctggtgagcttagctcctgcctcccagagaactggaatgaccttattcagacacctccagcctgtataagtcaggggcaaggactggggagtcaagagggttaagggagtgagaggtgagagttacaatccacattgtattttatgtcaacagcatcccctggagtactgcaaagctctaagtcagatatcccagtgggggggcatcacccatcctagactttctcccctgccccatgccccttataccaacatcaattcagcacatagcactgtacttggccattaagatagtaaataaatgcctggtgaatagtttgatagacagaaagatgcccactcccccaacccaaagatgtttacattctcattcctagaaactgtaaatatgttatcttaatagcaaacaggattttgcaagtgtggttaacattaaggatcttgagataaagagattatcctggattatccgaatgggcctaatctaatcctaaaaagcagacaggcttccctgggtgcagtcagagacagaaatgcagctaggggaattggagtcaaagagagggccatgagagaaggattccatgccctgtggctggttctgagaggtagggactctatgtaaggacagagcaaatgtcttctaggagttcagggtggccccagttagcaaccagcaaggacctcagtcttacagtcccacggaactgtcaagaccagaatgagcaaagatagtgatgcacccccagagctgccaccaaggaacgctgtcctgccgagacgttgattttagtcctatgagacccataggacttctggcccatagaactaaatgatagtgtgtgttttaagctgctaaagttttggtaatttattatagtaggaaccgataatagaaatggctataaaatggaatgtattttgtaactgaacataattttcttgcctctggtgtccctaatttccttggtggctggcagtcatagagaagtccttttccatggttagctgtgtgccagtgacggggagggcaaccttactctggtctcaagtgcttcttggcacccctgggtttacttttttgctgatgtcccctggcataggtgttgctagaagctggcgtttttaggaagcacgtagaactctctgctccttcatagtcagtcagtggctccatcccaggcaggtgctccagacccatcccrttcattagtcatctattctgtacaagaaacttgatgaattttatttcatttaattctaacaactatatgaattaggtaatgttatccccattttacagggaggaaagctgaggctcagagcaagtgaacatctaacccagggccaccaacaagagctcagggattggaatctgggagaagatgcttcccttctcttctccaagagtccttttggggctggcaagttgatacaagctccagctcatgtcttcagacaatgctgggtccaaggaaatgcatggatctcctgcattacaaagtttgactccaagagaagcccagaagtggcttccagcccctcctacctaactgtgccccgccgttcaccacttcctgtcttcctgcgacccagtgacagatgtgtctgtgggggctgctacttgggaaagtccaccaggaggagagcatgccaatctctcctctcagatcctctgggggttactttccccacccaaactaggccttgatgtcaaggcctagttacagggatgtcaaact

SEQ ID NO: 672920 - DNA, 643 bp, Homo sapiens
tgatgtgaatcagaccaaacaatttatctgcttcaaatccatattgtaaagaggtttaatataaagacatattttcaaatcaaaataaataatgaagcaaaaatcagatagacatgtactcctttgccaaactggaacacaatttttctttctttgactaaatttcaattcaaatgaagtcctacaaagacaaaacaaatcaactaacaaacagcccaacaaaaacacctaaaccaaacagcccagcaaaaagcggaatggtcattttcatttatccaacacaaatctacttagtgctgggctggttctggtaggcaaccaagtgtttagtggatacccgagcagctcattctaatacaacatggcaacttaaaatcaggtgaagaaatgcagtgggagaaaacaaagaggaattggtaactctgcagagcagtgacatttgaatagacttgtcaaggaagactagatttagtcaggcaggagggagagagggcagggagggaattctacctgactaaggaagagcatgtgcaaggcctaggggaatggaagagaagaatgagttcaggtgtctggaagaggttgtcttagtaggtttcctgttgcwgtaacagaatactacagagtgggtaatttataatga

SEQ ID NO: 672921 - DNA, 910 bp, Homo sapiens
ccaagcagaaactcaaatctgccctataatatagctagaacaatacagctagaacaggaggaaaaggaaaaaaaaatctccagtctttgctctaacatctttactcaacttgacatatctttatacatccaaactgtgatagtttatctcatacctgttgaataagcaaaatctaaaaatacttccaatatcaagagttagaaagggtaaagagcaacgggaacttayatcctgtaggaaggagctcgcactggcataaggccgttggagagcaattccacagcacctagggaagccgaagacatgcatactctattctattcctaggtatttggcctagaaaaacttcacacatttttacagaaagataagtcaaagttttcatggcaaaattgtttataatacacaaaaaatgaagacaggagaatgggtacattaattgtgaaatggtcatacaatagcatacttactgcacagcaactaaaataacttcttagatcaacatgcaattcctaaattaacaaggttaataccaaaaacacaacattgagcaaaaatagcaagatgtatgacaggtacagtaagttcccatttatacacaattttaaaataggcaaagcactatttttagtagcactcagtgcatttatgcacagagagcaaaaatataaaaacatgcatgggaatgaaaagacatcacatttaaaggacagattatctctggagaagaaaagagacaggatttaggaggggtacactgggagcttttgttgtatctataatgttttatttcttttaaaaatctgaaacaaataaaaaatatttgtatctgaaatgggttttgtcacttttgtctgcttttctgtacacttaaaacatttcaaagtttaaaaaagaaaacaaagcacga

SEQ ID NO: 672922 - DNA, 659 bp, Homo sapiens
tgcttaccccctacccatcatgccaacatgtcctttgctttcatgtcgagtacaaaacacatgccattgcttgagtgcccacagaggttggctgtgtaacagtgattacagacatgctatgagaatggacattactcaaagagagtgagctaagtaagaagaaaataaggagaatacyagcatgtatggggcgggccaaaggtgaccatgtgcagtgcattgtggcatccagactgctctgatttgctgaaatagggtcatctgttcttttgatattttgtgcttgctcctgttctgcagctttttttttttttttaattattatactttaagttctagggtacgtgtgcacaacatgcaggtttgttacatatgtatccatgtgccatgttggtgtgccgcacccattaactcgtcacttacattaggtatatctcctaatgctatccctccccctccccctaccccacgacaggccccggtgtgtgatgttccccttcctgtgtccaagtgttctcattgttcaattcccacctatgagtgagaacatgcagtgtttggttttctgtccttacgatagtttgctgagaatgatggtttccagcttcatccatgtccctacaaaggacatgaactcatccttttttatggctgcatag

SEQ ID NO: 672923 - DNA, 611 bp, Homo sapiens
tgaacttgaatctcttctaatccctgctagaaggaggggatctgataaaacatgcatagccacatctctccctatgttaattccctcattttagaagcaaggaggcaggctgcaacacttcgggtttcctccaaagrtgactcccagctcagttctgctgttgatacagtatcattaatgcacctaaactacttaattggttgtacagacatccaaaagaggggaaaaaagggagactcagattctgtctgatcactcatcccagaccactcctccttgactttctccttttctactgtttccttctgtttcttctttgactcctctgtctacatctcccagagtctaatttatgatgaggcagaaagtacacgttgtaccagtctcggacacttgagctgccagatctgatttccctggtagatgtggaagattgaggaaagaactgtggctgacaattagatttatttttctgcatgtgtcccaacccttgacacggaacccagcaggccacaggtaacctactatcttctgcagaactgggaggattttattggctccatgagtggggagacagagtttcccagagtcaggtcaggccctccctgctg

SEQ ID NO: 672924 - DNA, 1516 bp, Homo sapiens
aatgttagttaccagaggctcgaaagggagtgtgtgttgtggagataaagagtttggctaatgggtacaaagatacagttagatataagaaataagttctaatgttcaataacagagtagggtgactatagttaacaacgtttcacatatttcaaaatagaatagagaacttgaaatgttcccgacaagtagaaatgataaatgctcaagatgatggatatcttaagtacyctgacatgatcattacatgttctatgaatgtaacaaatatcacatgcaccctgtaagtatgcacaaatattatgcctccattttttttaaagtagattgaaagcactatgctcactgtccaggctaatcagaattgttaataaacaaaaataaaaaggaaaatttcagaaatgaaaataagcataagtaaaggtagattcaaaaacgtttttaaaagagttattgtttccagtgattctccaatgaatcctgtaaaaattccagtgtttacaggattttatattttcacccattgcatgtgactgtcctgcttatttgtgttcactagcctctgcccccgtgactttcagcatgtgacatacctgtgtgacatttgccacatctgaacagaagattaactgtgtttgtgttatttcactctgtcttccttctaaccttgcctttttaagattatggattcttctttactctgggtgctaaaatgagaaaatacactgggggctgggcgtagtggctcacgcctgtaatcccagcactttgggaggccaaggcgagcagatcacctgaggtcaggagttgatgaccagcctagctaacatggtaaaattccacctctactaaaaatacaaaaattagccgggcacagtggtgggcgcctataatcccagctacttgggaggctgaggcaagagaattgcttgagcccgagaggcggaggttgcagtgagctgagattgtgccactgcactccagcctgggcaacggagtgagactctgtctcaaaaaaataaacaaacaaacaaaaaacaaaacaaaacccaaaaaacgtggggcccaaccaagaccagcccagcccagtaataaccaacagagctcaggtcaaccacaggcttcattacaaaatgagtaaacaagaaataagtgcctttttctgtgaggtacaggtatcttagagttatttgttacaacaggaaaagttgcctaataaactaataatctaacctggggttatttttcttctctttctacacactgatcttgagcaaccttatccatactcttgcctctagaacactgaggacttcaagtacatatttcaaacttctacctttcttctgagctttagatgcttatttccatcttccaaccctaactcaaaagtcattccatctcaggaagcttttctaaatcttcccctctgcacttgaccaaagttacatgctctatgtgtttcaatatcactgtttcatacttttatttataatgttcacctcattgcaatgca

SEQ ID NO: 672925 - DNA, 1775 bp, Homo sapiens
gaactttgttcttcacttatgttgcaaaagggctcttaagttgagatgattgcattaatgtaaaagaccattgccttattggcttagtacttaaaatctgaaggcattggcctaggcatctgtaatactagcaacactagaagcaaatttcaactagtggaccatagtcctgatgcrtttcatatttctatcatcctcatctcacaagtatgttaaaactttgaagacaagacaatgcatcaaaatcaaatcatatttaccacagacttcccatgcatatgatgatatactgagaactaaatcaacagtatttccttataacccagtcttttgtggtaggacctgtcttgctgggacacaaaaagtaaaaggacaacattgtagaaatcagaagaactgattaaaaattttaaatataatccctttaccaaagcatttatttacattttaatgctatcatttctatttatgcttctgtcatatttttgaatgagaaaaatacaacagattagataaactataggaataaaagaaaaaaaattaagggaataaaatgcatcaataaaatggaaggacaaataccaacagaagctacctctggtagtggaattaccagtgattattttttccccttcatgtttggtttatggtatgcctaagggttaaactttaaactatttctttattcagtctcttttgtattaatctatttatttatttgtttgagtacattttattaaaagataaaaattaaagtttacctctttaatagggtaaaacaaaagtgtgccaggcagctactgctaagagagtagaattatcacaaaattgtctatttaaaattaagaatcctttagaggttcacgatgattgtcccaatgtagatgacactttttacagtatcctagacaaagcattgtccagctatggtcaaaagaaggatagctcctttgcaattcagtctatttcactgtagaaaaattgcagttccttatatctagctctccagaacttccatgcattggttctaaatctctttgtgcaaaatagaacataccttcctttcatatgacagcctttccattaccaccactttcccccaaaccccacctggattttctctcctgcaatcttaacattctggtttctcttgaccattaactcaaattatatgtattcccaacttctcacaattgtaataaccttctcttgaacctctattctcaaaatatgatacaaaatgaccacagtacttggtaacaaaccaaattacaacaaagttttcaccttccttgatttgaacttttttctctctgatgacatttaaggtgtcattagttttttaaagtgtatataatacttgtttgaattaaagtgaatttattcaactaaaattattttttccaagacaatgcttctttaatttatacctatgaaatttattatttgagtttaaatgtaggactttacatttatccattagaaattttaggatgttgaatttgaatactgcccagttgagataaatttatatcttggttctttcttacacgatgtcctaatattcatcattggcaaattttacacacatttagatgaaaatacattcactaggaaagaaatctcagggatgcctcaagagacatccctctaaacaacacttttcaaccaagggcacttatgtaccccggggaacatctggtaatgtctggagacagtttgggttgtgatatttggagcggggagagccactggcatctactgggtagagacca

SEQ ID NO: 672926 - DNA, 579 bp, Homo sapiens
tttgtatttttagtagagacagagtttctccatgttggtcaggttggtctcaaactcccgacgtcaggtgatccaccagcctcagcctcccaaagtgctgggattacaggcttgagccactgcgcctggccaaacctctttttcttttaaattacccagtctcaggtatttcttcatagcagtatgaaaatgcactaatacattcatgcactagtacataataaataataatgaataataatttatacacacacatatattagcatgcaagtggagggtgagcataacgtgtataaatgttatattttctaacatactaattttttaagccaatgagtgattaatcaaaacagtatggagcttagaactttagatttctgttgttgattgagattggagagtggctgatgctggaagttctatgaagtatggctggagcatgactttggtctaatacttggcctaagtgtgggagatattggccaasctgaatcctgggaagtgaatggagcccctagtttggtagagcataagatatagatgagtagaccagagaaggtgactgggccaaaaggttga

SEQ ID NO: 672927 - DNA, 972 bp, Homo sapiens
tgaaaaatgaccttggatggaggatgtagacagataacggaacatcagttagaggggtatcaagtgggtacagctggtcaaagggagtcactgaagatttagaaagagataaagtctatgctgggcacaactttggtgaagatcaccctggtcaagggagactaaatgaattgaaagacagcgtccagaaaatcaaccaggagatggctgcagtaagccagggtgagggagtggaaccactacaaccaaaatggtgaggacagagtggtccccagaaaattgagccatcagatctcagggacagatggcttttagagctcatctactctagctgcctttatttaccctgtccccagggaatgggttgaattccctcaatgattttctagcccagccagtgactgctcagtgtttgaatgaataccgaaaaggaagaagaactcactacctcctcttccatttttggaaaacttcaactatctgaaatatctttgtagtaggctaaatctggcctcccatgaaattttatacatgggtcattacagaagaatcagcttctctgaacaaaaagaatgatatttatgggaataatgaaaagagagaagatctgagtccaaggcatggacgcatggttttgagtaggtcggtgaaaccccgtggggcttagtcacttctgtggaaatgacaatgatacatgtcctgcctagttctctgctccacttggaggatcaaatgatagctttgtgacaatgctttggaaacttcaaagtgtcacatataggaggggcagataagatccttaatgctctgcaggagggactatggtacataagtrgctgggaaagccagatccatattccagctctgccactttctagctgtgtggtgttttaggcttgctacttaacttttctaaccctcgtttccataggtgcaaaaaaatataaaaataaccctacctcagaaagttgt

SEQ ID NO: 672928 - DNA, 1430 bp, Homo sapiens
cgaatgtgtggtaccacaaggaatgtggtattctacaagatagcctcaaatactgtggggatatttgaacacataattacttcttttgtgtgttaaaaatgggagtgagtttgtatttgtgtgtatgcacttgtgaatgagtttatgagtcaaaggtaatcacttctattgccaagattgttggatgaccttttcttttcttttcttttcttttttgagacagagtctcrctctgtagcccaggctggagtgtggtggtgtgatcttggctcactgccgcctctgcctcctgggctcaagtgattctcctgcctcaatctcccaagtagctgggattacaggtgcgcactaccatgcccagctaatttttgtatttttagtagagacggggttttgccatgttgaccagctggtcttgaactcttgacctcaggtgatccacccgcctcagcctcccaaactgctgggattacaggtgtgagccaccgcgcccggccggatgaccatttctcttcactccaagatgataattgacaattcattgtacctctcgtggaggaacttcttttcttttttttttctgtttttgttctttgaaaatcagattttattattggtcaatgtttgggtcactgtgttctttagagtagctactgtgctatgcaacctaaatttatctcatcttaagtttgtcccaaatcattgttaaacatcaaaattatcccctactcacaggctttcttgttggtcgggctataagtaggttgtcccaggttaatataccattaaccaaggaaacattggaagtgttcccttctccctttccctccaacagcatttgatgggcaggctttcccaggaagtcacctcagcaactccatgggacaatttcaaggacagaacagcttcaagacatcactcagtcaatacatatggagaccttgactagagctcagggattgctcagaaatcagcatggctcacacaggaaaaaattagaaaacgaagttctagctcagaatgtgggatttcaatgaccctgaccctcaatcaatgttgacatcttaccattttccttattacctcctccctccctttctcccttccttcctctcctgcctttcatcttctttcttctcatcctaagagtcagccgggtatagatggcgctctagtcacacctgccttcagatcccagctatgccgccgaagggtagggtaaccatggatacggtaattaaactctcagaatcctactttccttgtctctaaaatgagagaaaataattctgcccttataggattgttgtgaagactaaatgagataatacgtgtcaagtgcttaacataggggcacatggatacagtaattaaactctcagaatcctactttccttgtctctaaaatgagagaaaataattctgccctt

SEQ ID NO: 672929 - DNA, 1430 bp, Homo sapiens
cgaatgtgtggtaccacaaggaatgtggtattctacaagatagcctcaaatactgtggggatatttgaacacataattacttcttttgtgtgttaaaaatgggagtgagtttgtatttgtgtgtatgcacttgtgaatgagtttatgagtcaaaggtaatcacttctattgccaagattgttggatgaccttttcttttcttttcttttcttttttgagacagagtctcactctgtagcccaggctggagtgtggtggtgtgatcttggctcactgccgcctctgcctcctgggctcaagtgattctcctgcctcaatctcccaagtagctgggattacaggtgcscactaccatgcccagctaatttttgtatttttagtagagacggggttttgccatgttgaccagctggtcttgaactcttgacctcaggtgatccacccgcctcagcctcccaaactgctgggattacaggtgtgagccaccgcgcccggccggatgaccatttctcttcactccaagatgataattgacaattcattgtacctctcgtggaggaacttcttttcttttttttttctgtttttgttctttgaaaatcagattttattattggtcaatgtttgggtcactgtgttctttagagtagctactgtgctatgcaacctaaatttatctcatcttaagtttgtcccaaatcattgttaaacatcaaaattatcccctactcacaggctttcttgttggtcgggctataagtaggttgtcccaggttaatataccattaaccaaggaaacattggaagtgttcccttctccctttccctccaacagcatttgatgggcaggctttcccaggaagtcacctcagcaactccatgggacaatttcaaggacagaacagcttcaagacatcactcagtcaatacatatggagaccttgactagagctcagggattgctcagaaatcagcatggctcacacaggaaaaaattagaaaacgaagttctagctcagaatgtgggatttcaatgaccctgaccctcaatcaatgttgacatcttaccattttccttattacctcctccctccctttctcccttccttcctctcctgcctttcatcttctttcttctcatcctaagagtcagccgggtatagatggcgctctagtcacacctgccttcagatcccagctatgccgccgaagggtagggtaaccatggatacggtaattaaactctcagaatcctactttccttgtctctaaaatgagagaaaataattctgcccttataggattgttgtgaagactaaatgagataatacgtgtcaagtgcttaacataggggcacatggatacagtaattaaactctcagaatcctactttccttgtctctaaaatgagagaaaataattctgccctt

SEQ ID NO: 672930 - DNA, 1430 bp, Homo sapiens
cgaatgtgtggtaccacaaggaatgtggtattctacaagatagcctcaaatactgtggggatatttgaacacataattacttcttttgtgtgttaaaaatgggagtgagtttgtatttgtgtgtatgcacttgtgaatgagtttatgagtcaaaggtaatcacttctattgccaagattgttggatgaccttttcttttcttttcttttcttttttgagacagagtctcactctgtagcccaggctggagtgtggtggtgtgatcttggctcactgccgcctctgcctcctgggctcaagtgattctcctgcctcaatctcccaagtagctgggattacaggtgcgcactaccatgcccagctaatttttgtatttttagtagagacggggttttgccatgttgaccagctggtcttgaactcttgacctcaggtgatccacccgcctcagcctcccaaactgctgggattacrggtgtgagccaccgcgcccggccggatgaccatttctcttcactccaagatgataattgacaattcattgtacctctcgtggaggaacttcttttcttttttttttctgtttttgttctttgaaaatcagattttattattggtcaatgtttgggtcactgtgttctttagagtagctactgtgctatgcaacctaaatttatctcatcttaagtttgtcccaaatcattgttaaacatcaaaattatcccctactcacaggctttcttgttggtcgggctataagtaggttgtcccaggttaatataccattaaccaaggaaacattggaagtgttcccttctccctttccctccaacagcatttgatgggcaggctttcccaggaagtcacctcagcaactccatgggacaatttcaaggacagaacagcttcaagacatcactcagtcaatacatatggagaccttgactagagctcagggattgctcagaaatcagcatggctcacacaggaaaaaattagaaaacgaagttctagctcagaatgtgggatttcaatgaccctgaccctcaatcaatgttgacatcttaccattttccttattacctcctccctccctttctcccttccttcctctcctgcctttcatcttctttcttctcatcctaagagtcagccgggtatagatggcgctctagtcacacctgccttcagatcccagctatgccgccgaagggtagggtaaccatggatacggtaattaaactctcagaatcctactttccttgtctctaaaatgagagaaaataattctgcccttataggattgttgtgaagactaaatgagataatacgtgtcaagtgcttaacataggggcacatggatacagtaattaaactctcagaatcctactttccttgtctctaaaatgagagaaaataattctgccctt

SEQ ID NO: 672931 - DNA, 604 bp, Homo sapiens
ttaagcttccagaaactgtattttctagttacagatattatagaaaatgtatcttttccatttaaggcaaagagtggtggtgatagccacaatataaattataattcatatataatatttaagtattaatttcaaattagctcaaagagaagatttagaatattcctagcacaacgaaatgataaatgtgtgaggtgatgatatamcagttaccctgacttgatcatcacacatcatatgcaaatatcaaagtatcacatgtatcccctaaatatgtaaaactattatgtattagtaagaaaaaaattaagaaaatccattgggtaaggcaaataaaaagtctgctttattctggcacaatcttacccctagtaacttcatgagtgttctatagaacagcattagcctcactgggcaacttgtcagaaacacaaatcctcaggcccaccttagatcagtgaatcagaatctgcatttcaacaaattccccaggtgatttgtgcccacgttgaagttttagaagcttcagtggttgattagtcaaccaatcccagggcttcatggaagttccatgaagacaaattattccatgaacttttcagtt

SEQ ID NO: 672932 - DNA, 1689 bp, Homo sapiens
agtataaaactaagctgtgccctgrccaccttgggcacatgtcatcaggaactcctgaggctgtcatgggcatgtgtcctcaactgtggcaaaataaacttcctaaattgactgagacctgcctcagatatttggggttcatattcttgtgaatttgattggtttgagaacaattgttgttaatttgtgtatagtttagtcatcttctcttttccctatgtgacccaagttttattatttttttctttttgttagagcctaactttaaagtggaaaatattttttattcaattaatacattttaaaaacatttaataaacaataaaaatttccaaaagactcaaaagggttaatgccctgtaagattggaaccactggatgctgtcaaccaacctctgatgacttttttcaaatgcatacatatgaacatttgcacacagcactaaacatattttgagtaccagcgtgtttgtgcaaatcaccttcttccaggcggaatcttatgtctgtgtatatagaaccccagtgattaaactatcccattgtagaaatcactcactggtgggggaacacagtaaaatatacaaccccaatcctctcaaatatatttgggagatgagggatggatagatgaggtttcttttttttcttttttctttttttttttatactttaaattctgcggtacatgtgcagaatgtgcaggtttgttacataggtatacatgtgccttggtggtttgctgcacccatcaactcatcatctatctacattaggtatttctcctaatgctctccctccccttgccccctaccctccgacaggccctggtgtgtgatgttcccctccctgtgtccatgtgttctcattgttcaactcccacttatgagtgagaacatgcagtgtttgattttctgttcctgtgttagtttgctgagaatgaaggtttccagcttcgtccatgtccctgcaaaagacatgaacttagatgaggtttctttggtgggaaaagctgaatggaagagctggaactcgcggaagaggaagaaccataagccggcttagagaaaatggacttctgatgtcataggtacctattccaattgctttctatcatgatcaattagtgagttagcgccataatattgctgtgccacaaaccatcccaacccaaaactcagtggcttaaaacaacaatcatttactctcactcatgtgtgtggggaagcagatctaggctgggcttggcaggcttgactccaggctacacactgggtccatgccttcacattcctctattttccctggctaccgggactaccaggggacgttcttctcacagccatgacaaacgcgcagaagggcaagttcaatcgggcacattttatgcctccacctttcttctgctaacatgtcattggccaaaacaaatcacataacccagccaaagtcaagggacaaggaagtccatttcacctctagtggagttggtgcaaagttgcaggcagtgggcatgaatacgaggagtggcgaagaactgcaacaaataacccaatctaccagagacctctttaaatcacaagccaggaagggatccgctgctacccagcatttttacttggtgttttaattaatcagcactcacacgtttaatcattctttcagtcatttatttactgtatgcattca

SEQ ID NO: 672933 - DNA, 1689 bp, Homo sapiens
agtataaaactaagctgtgccctgaccaccttgggcacatgtcatcaggaactcctgaggctgtcatgggcatgtgtcctcaactgtggcaaaataaacttcctaaattgactgagacctgcctcagatatttggggttcatattcttgtgaatttgattggtttgagaacaattgttgttaatttgtgtatagtttagtcatcttctcttttccctatgtgacccaagttttattatttttttctttttgttagagcctaactttaaagtggaaaatattttttattcaattaatamattttaaaaacatttaataaacaataaaaatttccaaaagactcaaaagggttaatgccctgtaagattggaaccactggatgctgtcaaccaacctctgatgacttttttcaaatgcatacatatgaacatttgcacacagcactaaacatattttgagtaccagcgtgtttgtgcaaatcaccttcttccaggcggaatcttatgtctgtgtatatagaaccccagtgattaaactatcccattgtagaaatcactcactggtgggggaacacagtaaaatatacaaccccaatcctctcaaatatatttgggagatgagggatggatagatgaggtttcttttttttcttttttctttttttttttatactttaaattctgcggtacatgtgcagaatgtgcaggtttgttacataggtatacatgtgccttggtggtttgctgcacccatcaactcatcatctatctacattaggtatttctcctaatgctctccctccccttgccccctaccctccgacaggccctggtgtgtgatgttcccctccctgtgtccatgtgttctcattgttcaactcccacttatgagtgagaacatgcagtgtttgattttctgttcctgtgttagtttgctgagaatgaaggtttccagcttcgtccatgtccctgcaaaagacatgaacttagatgaggtttctttggtgggaaaagctgaatggaagagctggaactcgcggaagaggaagaaccataagccggcttagagaaaatggacttctgatgtcataggtacctattccaattgctttctatcatgatcaattagtgagttagcgccataatattgctgtgccacaaaccatcccaacccaaaactcagtggcttaaaacaacaatcatttactctcactcatgtgtgtggggaagcagatctaggctgggcttggcaggcttgactccaggctacacactgggtccatgccttcacattcctctattttccctggctaccgggactaccaggggacgttcttctcacagccatgacaaacgcgcagaagggcaagttcaatcgggcacattttatgcctccacctttcttctgctaacatgtcattggccaaaacaaatcacataacccagccaaagtcaagggacaaggaagtccatttcacctctagtggagttggtgcaaagttgcaggcagtgggcatgaatacgaggagtggcgaagaactgcaacaaataacccaatctaccagagacctctttaaatcacaagccaggaagggatccgctgctacccagcatttttacttggtgttttaattaatcagcactcacacgtttaatcattctttcagtcatttatttactgtatgcattca

SEQ ID NO: 672934 - DNA, 563 bp, Homo sapiens
ttacctttaaaaatcatcattctcagtaaactatcgcaagaacaaaaaaccaaacaccacatattctcactcataggtgcgaattgaacaatgagatcacatggacacaggaaggggaacatcacactctggggactgttgtggggtggggggaggggggagggatagctttaggagatatacctaatgctagatgatgagttagtggatgcagcgcaccagcatggcacatgtatacatatgtaactaaccctgcacaatgtgcacatgtaccstaaaacttaaagtataataataaaaaaaaattcctatattactaatcaagtatattttacaaaataccactgagtgtggtgcatccaagattctgaggatctaatataaattctggatctaacaattttgtttctgctcacagtatctccaaaatttattgagtttccatagattttagatctgatatgagccattttaccatgttaacttattaaccctcaccatatcctctgaactggatatcacaattctcatttctaaggtgaaacaccttaagctcagagagg

SEQ ID NO: 672935 - DNA, 563 bp, Homo sapiens
ttacctttaaaaatcatcattctcagtaaactatcgcaagaacaaaaaaccaaacaccacatattctcactcataggtgcgaattgaacaatgagatcacatggacacaggaaggggaacatcacactctggggactgttgtggggtggggggaggggggagggatagctttaggagatatacctaatgctagatgatgagttagtggatgcagcgcaccagcatggcacatgtatacatatgtaactaaccctgcacaatgtgcacatgtaccctaaaacttaaagtataataataaaaaaaaattcctatattaytaatcaagtatattttacaaaataccactgagtgtggtgcatccaagattctgaggatctaatataaattctggatctaacaattttgtttctgctcacagtatctccaaaatttattgagtttccatagattttagatctgatatgagccattttaccatgttaacttattaaccctcaccatatcctctgaactggatatcacaattctcatttctaaggtgaaacaccttaagctcagagagg

SEQ ID NO: 672936 - DNA, 622 bp, Homo sapiens
acagattctccttccttttcattggatctctgaaggagtttagaggtcatgttgtcaaactttctctattcttacaaaggcaaaattcaatcccagaaaagagaattggattggctaaccttaggtcacatgtctattccacccaatcaatttagaccaggaaagcaagatcatacaaagcaaacattgctgccaggggcccatagctactgatagaggagtgtgggactgttcctagaaaatgaggaggcgaggcaggtgttgatttccttgtaagggcatttctgtagcatctgctatggtttgaatgtttctgtcccctcttggaacttaatctccaaacaatagtattaataggtggatcctttaggaagtgattaggtcgtgarggctcttccctcttttttttttttccttttttgagatggagtttcgctcttgttgcccaggctggagtgcagtggcaccatctcggctcaccacaacctccgcctcccgggttcaagtgattctcctgcctcagcctcccgaatagctggggttacaggcatgcaccaccatgcctggctaattttgtatttttagtagagatggggtccatgttggtcagtctggtctcctg

SEQ ID NO: 672937 - DNA, 612 bp, Homo sapiens
ttccagctacttgggaggctgaggcagagaattgcttgaacacgggaggcggggattgcagtgagccgagatcacaccactgcactccagcctaagtgacagagcgagaatccgtctcaagaaacgaaaaggtgaagtcagtggcatgttttaagagtttcttggagtttagacataggcaatagggagtgtttcagaattttaaaatagagaagtggcaaatgatggaatcccttttgtctcagcatcttatttttggggcatagaggtcaaccctatttcttgtgtataaagctgacatcatcatcatctaacatttcttgagtgtttaatacrtactgggtcctgtacatgcatagttcctattaatcgtcacaacttaccaagctctggctagttaagtaagttggccaagatcatattgctaagtggtagagctcaggtttggactcagatccacctgactctagatctgagagcctgagaatgaatgaatgttagtgaggaatttgagaaaggccccagcatcacatattttgctatcagcaatttctttgaccttcacaagttaacctctaaaggggtggaattatagcttctatagctttatta

SEQ ID NO: 672938 - DNA, 663 bp, Homo sapiens
atccttgacatttcttgccatctttacctaccaggcagactcatctaatttcacaacttcatttttattttaatgaatycccaaactatacgccattttcctgttgtcttctgagatttaacatgtttataattgaagatttgccgtttcctcttcatgtggtccctttttcagttaacattataatatgcaaaatcactccagttagaaacctcaagcattttttattcaaagcatgttgcattggccaattccctactttatatagtacgctggacttaagtttatataccagggacgattttttattagtatactcattttaactgggagaaaagtttacttttattgaattttacctatatacaaaaaatcaaggtaaagctggtaagagtattactaagaataaatgtgtttagcaatttattcagttgtgaggatattatcaggttagattatttgaattccaggttattttaacacattcagcaaacatttgcattcctaccactttgatcactcggtatttaaatcttacacggttttttttgccttattaataatttatagatatttcatagggcacggggaaacatgattagccagagttttagtggttttttttgtttgtttgtttttacttttcctatggtgctggcagta

SEQ ID NO: 672939 - DNA, 663 bp, Homo sapiens
atccttgacatttcttgccatctttacctaccaggcagactcatctaatttcacaacttcatttttattttaatgaatccccaaactatacgccattttcctgttgtcttctgagatttaacatgtttataattgaagatttgccgtttcctcttcatgtggtccctttttcagttaacattataatatgcaaaatcactccagttagaaacctcaagcattttttattcaaagcatgttgcattggccaattccctactttatatagtacgctggacttaagtttatataccagggacgattttttattagtatactcattttaactgggagaaaagtttacttttattgaattttacctatatacaaaaaatcaaggtaaagctggtaagagtattactaagaataaatgtgtttagcaatttattcagttgtgaggatattatcaggttagattatttgaattccaggttattttaacacattcagcaaacatttgcattcctaccactttgatcactcggtatttaaatcttacacggttttttttgccttattaataatttatagatatttcatagggcacggggaaacatgattagccagagttttagtggttttttttgtttgtttgtttttacttttcctatggtgctggcrgta

SEQ ID NO: 672940 - DNA, 1450 bp, Homo sapiens
taatgttttggaatataaactttattccaaaatatcacaaccggctgtcttgtgcaaaatgacatggaaatcagcaagaatggaagtggggaaataaattagtaagctactgttgtactttagatataattaatattggctttgtttagggcagtagtagttttgatggagacaattgtatactgggcaattcattaaaggatttgtgtcagcctaaaractgctagtaaaaaacaaaacaaaaccaaaagagaaagagaaatagaaaaggggggcattttattgaaatggaggaaagtggagaagatatagagtataaaaaaacaaaagatatgtcaggaaaatgtttaaatggagatgcctcaaatgtccaaatattttactgttacgtaagctcaggtttaagaagaaatggtaattattaaaatgggaattaatgaaattagctacaagaagcaatgtaacatacatttaggtataaaacagtatttagaaaacattatttggatcctaagtctattcattgatactagaatctcgctcctttcttcttgcctttctcacagatacagatgatgtttatctatctgctttagacatatcttttataaactacatatttattttatactgatattttatacatatatacacacaataaaagagtaggtatttttatgtctctaactgtgtctcttcatatatatatatatgcctacacactaaaaacatgtttattgtgatactgccagtccaatccaacactcagggtttattctttatttccccttttcaatatttgtaactctattctctgatagtaagaaaactggcactaactattcatattatatttaggtatatgctcagtctagaatatatctgaaataatttctgtactgcaaatccataccactttgaaacacaataccattatcttggattcaatgtttgtttatagttctttattttttacttttgtctttggcttgattgtatgtagtcaaaatcctggactccagatttattaggttttctgttggctttttattttgtttttcatttaaggtgcttatcttagttatttgagatacacagaaattcattgcttctgttagtatcctttgttgatttgtttgtgaatatgcaaaaagttaacatggtttcagaaagtagaactatagggaaagtttattcaaagaagtgtccctctttaattcttccatcccattaccacacactttcttttcattttatttccagctcctctgtataaacaatctcattatttgctatcttatttcaagattagaaaaggaaataacagaataacttggtcatttattatgtcagaaagtaagttagcccatagaataaaataaaagttcataaattcctactggtttgagcaaataaacatatacaggagaaggagaaccatctcttccat

SEQ ID NO: 672941 - DNA, 1450 bp, Homo sapiens
taatgttttggaatataaactttattccaaaatatcacaaccggctgtcttgtgcaaaatgacatggaaatcagcaagaatggaagtggggaaataaattagtaagctactgttgtactttagatataattaatattggctttgtttagggcagtagtagttttgatggagacaattgtatactgggcaattcattaaaggatttgtgtcagcctaaaaactgctagtaaaaaacaaaacaaaaccaaaagagaaagagaaatagaaaaggggggcattttattgaaatggaggaaagtggagaagatatagagtataaaaaaacaaaagatatgtcaggaaaatgtttaaatggagatgcctcaaatgtccaaatattttactgttacgtaagctcaggtttaagaagaaatggtaattattaaaatgggaattaatgaaattagctacaagaagcaatgtaacatacatttaggtataaaacagtatttagaaaacattatttggatcctaagtctattcattgatactagaatctcrctcctttcttcttgcctttctcacagatacagatgatgtttatctatctgctttagacatatcttttataaactacatatttattttatactgatattttatacatatatacacacaataaaagagtaggtatttttatgtctctaactgtgtctcttcatatatatatatatgcctacacactaaaaacatgtttattgtgatactgccagtccaatccaacactcagggtttattctttatttccccttttcaatatttgtaactctattctctgatagtaagaaaactggcactaactattcatattatatttaggtatatgctcagtctagaatatatctgaaataatttctgtactgcaaatccataccactttgaaacacaataccattatcttggattcaatgtttgtttatagttctttattttttacttttgtctttggcttgattgtatgtagtcaaaatcctggactccagatttattaggttttctgttggctttttattttgtttttcatttaaggtgcttatcttagttatttgagatacacagaaattcattgcttctgttagtatcctttgttgatttgtttgtgaatatgcaaaaagttaacatggtttcagaaagtagaactatagggaaagtttattcaaagaagtgtccctctttaattcttccatcccattaccacacactttcttttcattttatttccagctcctctgtataaacaatctcattatttgctatcttatttcaagattagaaaaggaaataacagaataacttggtcatttattatgtcagaaagtaagttagcccatagaataaaataaaagttcataaattcctactggtttgagcaaataaacatatacaggagaaggagaaccatctcttccat

SEQ ID NO: 672942 - DNA, 630 bp, Homo sapiens
tttttttacttttgatgcttagatattcatgagtcaataagtagcatatttagttcatagttactgtattagtttcaatagcatgaaaaaattaccacaaatttggaggctacagacaaaaaaaacttttattctattcacacaccataaaacttctaactctagatatgtgagaaattttccycatatatcaggcaattctccaggacaccaacaggtgtcttataattcaattaattcaattccaacaccatctacctggaggtagggtcagataccacatgttaagggctcagtctcacaagactgcccccaactttagatgccaatctcaagtactaggttgtcacttatgcttctggaccactggctataaatcagcttcctcacaatccctccccaggttcaattaatttgctagagtggcttttggaactcagggaagcactttacttacatctacccattatattataaaagatattacaaaagatacagaagaatagccagatggaatagacaaggtatgtggaagggcaaggtatagggaaggtttgtggaaagggaataggaacttccgtgccctctcttggtgctccaccctcccagcacctctatgtgttcagtaac

SEQ ID NO: 672943 - DNA, 624 bp, Homo sapiens
atcagaactcagattttctgactctttgtccaatgatctttccaaatattcaagcagaggctgaaacaccagctgttaggaaatttagaagaaactcttgcctttcacatagtagcttctcactctttactgaatgaattaggtgggaagttagactcaaaagcctgttcaacgayaattgtctacagatttaagtcaaaccaattccagccctttgcaatcttccattctttataacctagacccactcaccaccagaaattccttgaggtgagtttcaatgttcttgttgtagagcgtgaagagggcagcagacacctggatgatggctttggtcaagcaatgaatattgttgttgtaacctaggttattattgatatagatggagagaaaaaagaggaaatgacaaagtaagccactccaggatgacccaaactagtaatttctcatgttttcaggctgagccaccagtatttgacaccaaaaggatgagaaggcattttgagattagaggcaggatattcctatgaaatcttattgaaatcgaattatgcatagttcattctctcattctggtttttttttttttcagggtagggggtgttttggtgttttgttcctttt

SEQ ID NO: 672944 - DNA, 624 bp, Homo sapiens
atcagaactcagattttctgactctttgtccaatgatctttccaaatattcaagcagaggctgaaacaccagctgttaggaaatttagaagaaactcttgcctttcacatagtagcttctcactctttactgaatgaattaggtgggaagttagactcaaaagcctgttcaacgataattgtctacagatttaagtcaaaccaattccagccctttgcaatcttccattctttataacctagacccactcaccaccagaaattccttgaggtgagtttcaatgttcttgttgtagagcgtgaagagggcagcagacacctggatgatggctttggtcaagcaatgaatattgttgttgtaacctaggttattattgatatagatggagagaaaaaagaggaaatgacaaagtaagccactccaggatgacccaaactagtaatttctcatgttttcaggctgagccaccagtatttgacaccaaaaggatgagaaggcattttgagattagaggcaggatattcctatgaaatcttattgaaatcgaattatgcatagytcattctctcattctggtttttttttttttcagggtagggggtgttttggtgttttgttcctttt

SEQ ID NO: 672945 - DNA, 524 bp, Homo sapiens
aaaggccaatgaaagaggaattatcaaagaagtgagaaggatatttatggtctttgaattagtatgtgtgacagctttatgaaaggacaaacctcagagtgcccagtttctctcatttatgctcaggggatttgttcttataagtactattaagtaggtaaatcctctgtgtatctgagagagcacagactaacaaacatcaatttacttgctactgtttgcatgctatattcttggtagatgcttacctaattcttctagaaaatgtatccactgaagctcaaatttaaatgccatctttaatttgtttggtttaaataaactgcacacaacagcttcttcagaggatagattgckaggatatgaatatgagcttgaaaaatatctctggtatggctaaaaaaatataagctgcagctctttattcagtgaactacattagtttatcacacttctaccagacttatatgtatatgaagagaagaattacagacaaccaaaatagaattaagatcaaccccaca

SEQ ID NO: 672946 - DNA, 1083 bp, Homo sapiens
ataagcgcattataaaatggcactgaatttcttcctctcagagacaaggaatgctcagggtattaagaacatcaaaagcagaaaaagttaagtagttgcaacaggtacagatctaaggcaaagaactacatctatcgtggaatctcagatcaaatatgcctgctttttcctttcgccctttggggtcgttcctctgataaataattcacagactgcagtgcaaagtagtttgcatactgacaagattaaaaagaatgctttgtctgggttaaatttacaatctgaaaccttcctttaaaatgtcaagaaggtaattaatttaagaaggtttgccaagcagagtctccgaccctgtcagaaaaatttcatttcctgagggtgaaggggatgttgcatttatctttcccaaatgcctgttttggtttccattttaagaccattttctcccttcctaatatgccttatagcccttttctttttaggcaaaaattaacccagtattctttcttggtggatttttttttaagattatctaacacagtctgcaaattacctgtgagtggggactaaagcacaggtcagaccttttgacacaaacagaagggcattttccacagagagcactctccccggcctgaacattcagacaagcattttgagtagcagcgggaaatgcataaattcaacagcatgaaaatttgcttttggcttagcaaaatgccctgccccacatatgcacagtagtatgcattcttatgaatgaatgcttatgacaatcagtrgggtttttacagcaattcttcaagccaagtttactggtgtaaaatgttattagcaattgtgtcccctaactaatccctggaggcatcacagaagagattaaacaatgcattgctgtttggaaacctcatccaaaagccctgtatcatgtatgcgtgcacacacatacacacagcagaaaaagaaagctgttaatcggcccactagaagtacatttcagttcctcttaaaaatagagtttgccagagtagcagggctaaatgatgtcatctcattgatactaaccgggaagaaataatttca

SEQ ID NO: 672947 - DNA, 644 bp, Homo sapiens
acaatgcattatgatttaatagaatgcttcacacactgtactaggccaaaccctgtactaggtaggcatcaggagtaagaaaaagaaagaaagaaaaaaaatgtgcacaatcttgtttaaaagacaagaatgacatagttgaaatatttgtaagttaaaatgaacattgtgtgtgtgtgtgtgtgtgtgtrtatataaatatatacacttgagatgctacattataagtgtagctggaatatagataagggagatgttagtgctagctggaagggtagaataaaagcatcaggaaagaagtgaagatagacagtagatagaaaaaaaggaaaatgtagaattgcacagaaaatgaaaaatcaattaaataagtcttaatgtagaatgaatagatgagtaaaggaaaggaaaaaaataaaactgagttgacaaagaaagaacaaatttttaatcttggggaaacaatgacagataattaattattctaatgcagagtttatttagaattcattgtgcttttaacttatgcttgagctttgtaaacaaaaaaattgaaagtactaaccatcatttatattttcccttgaaactaatacacaactgaaaaaaaaggagtaaggttaaagcgggtttcaaggtacttt

SEQ ID NO: 672948 - DNA, 1688 bp, Homo sapiens
gcctggccaatgtggtgaaaccctgtctctactaaaaatacaaaaattagccaggtgtggtggtgcacacctgtagtcccagtttcttgggaggctgatgcaggagaatcgcttgaacccagaaggtggaggttgcagtgagccgagatcgtgccactgcattccagcctgggtgacagagcaagactctttctcaaaaaaaaaaaagaaagaaagaaaatcattctaatttcctcaaaaccatgtaaatctagcaaattagaaaggagcacagactacttaatctttgaggaagctgtcaagattgtgccataactttttgattcagttctcaactttccaactaattccagacagtaatgagacaccactaccctgatggctgatatttcacaaaatatgcagcaaggagagcccatgagggcaagaatggcctggaatgaccaaccctatgtcagtttctgttttgcctgcttgactctcaggattagaagggtgataaggtcacacaatctcaggccccttctcacctaccacatcttcaaagagacatccaccctctgatatatcaaactgggtgacaggaaacttggttcctgctaaaacccctccagtgaatggccactgcccttagaacaaaatccaaaaccctgaccacggccttcagggccctgcggcccggcctctgctgcccttcccaacccagctcccactgttctaccccagacctaccctcatccaacactccaagctctgcccacttctaggatgtagcttccaccatccctcagcccagaatgccctttctccatcaatcctatctctggctttctcattctccaggtcttagaccaccctggctaagacagatcacctacccaccattcagttcacaagtatcattgacaaaatagtgaagagtttaattgtttacagcctgcctccctctcctcactagactggaagctccaggaggtcagggccatatgctggtcattatgtggatgcagcacctgccacatggggagggtgaccaggcacataaggtggtgactgcctcttgaggctgcccatcccctctttggacagcatttggagacaaagcttaagcaggtaacaggacaagaaaacgcctcatcctggaactttctctgcaatggaaatcaatatgattcaacaaaattaggtactccgtataggggatcttaaccagaaccccacattacaatacacaggggagcttaaaaattatactaaaaataagaataacactaatactgatgcctatgctatatccccaagattctgatttaattgatattaaatctggtttatgtgatttaaatgatatgatattcagctagggttgagaactactgttttagagcactgcttctcaaactagttgtgagaaaggaccagctgtttcttatttcccaaagtatcaaaagataataaaaattaatgaccagaaaaaacacaagcacaccctacaaaatacaagacccaacttttaattattaaactcaacagayagacaactgtcttgtgcaattacatttctttttcttagcctgggcaacctagtgagacctcatctctatgaaatattttttttttctaattagctgggcattgtggtgtacacaccctgggtgacagagtaagaccttgccttaaaaaaaaaa

SEQ ID NO: 672949 - DNA, 585 bp, Homo sapiens
atgtgggcaaaatttaagacaagcagctaagataccagagggcagagagtgagatgtcagtgatgataaggcaactcaaaccctaacaaggcatgatggcttagacacactaataaaccctgagacaaatatgatttttcagaagttcttttccacatttcaagatgaccatttcaacctgaccagatcactccttttattcattcatacaaagatggaaggcatcaagtgcctataacacctaccaacctaaaggaaatacaragagcagaggaacatgtaaactaacaccacagggatgggatcaggtaatccacactatgggaaactacagggcaaacaacccagtttcttcaaatataaattccaggaagaaagagagatgaggaaggtcaggaaggaggggagaaatgaaaaaggaatttaatagataaaaagaaacataaaagaccaattgtattagactgtatattcagttttgtatattgctataaagaaatacctaaatccaaggcaggcagatgacttgaggtcagaagtttgagaccagcctggccaacatggtgcaaccccgtctctactaaa

SEQ ID NO: 672950 - DNA, 585 bp, Homo sapiens
atgtgggcaaaatttaagacaagcagctaagataccagagggcagagagtgagatgtcagtgatgataaggcaactcaaaccctaacaaggcatgatggcttagacacactaataaaccctgagacaaatatgatttttcagaagttcttttccacatttcaagatgaccatttcaacctgaccagatcactccttttattcattcatacaaagatggaaggcatcaagtgcctataacacctaccaacctaaaggaaatacaaagagcagaggaacatgtaaactaacaccacagggatgggatcaggtaatccacactatgggaaactacagggcaaacaacccagtttcttcaaatataaattccaggaagaaagagagatgaggaaggtcaggaaggaggggagaaatgaaaaaggaatttaayagataaaaagaaacataaaagaccaattgtattagactgtatattcagttttgtatattgctataaagaaatacctaaatccaaggcaggcagatgacttgaggtcagaagtttgagaccagcctggccaacatggtgcaaccccgtctctactaaa

SEQ ID NO: 672951 - DNA, 584 bp, Homo sapiens
gccacgacctcccagagataggagagttcctggaattcttccagcaacattctccactgcccacacacctggaaagtcagatgaccattatatctgtccagctcacacaagggaaccataaccagtagatgccttygtcctctgcttctataaaatatgccacgaccccacccagctgcttacccaaccatgggggccaacgtcctgatgcttggtaacagtgagcatcttctctaaggtataaacactaaatacgaatgcaaagcgcgaagtaactcaaatttgccattttctttctttacatttttctttttaaaatcacaggagtggtttcagtcagcatttaaatctatgttggtctgttttgctcatctctggtgtcctgtttgatatttttagctagttcctaaaaggcacaacctcaaatttcacacttccttattcgtctttaaaggtctaatacagggtttctcaaactcagtttgaccaacccatgaaggtcttatttttaaactttttattttgaaaagattttaggtttacagaaagtggtaaagatggaacagagaagttgtgcataccct

SEQ ID NO: 672952 - DNA, 584 bp, Homo sapiens
gccacgacctcccagagataggagagttcctggaattcttccagcaacattctccactgcccacacacctggaaagtcagatgaccattatatctgtccagctcacacaagggaaccataaccagtagatgccttcgtcctctgcttctataaaatatgccacgaccccacccagctgcttacccaaccatgggggccaacgtcctgatgcttggtaacagtgagcatcttctctaaggtataaacactaaatacgaatgcaaagcgygaagtaactcaaatttgccattttctttctttacatttttctttttaaaatcacaggagtggtttcagtcagcatttaaatctatgttggtctgttttgctcatctctggtgtcctgtttgatatttttagctagttcctaaaaggcacaacctcaaatttcacacttccttattcgtctttaaaggtctaatacagggtttctcaaactcagtttgaccaacccatgaaggtcttatttttaaactttttattttgaaaagattttaggtttacagaaagtggtaaagatggaacagagaagttgtgcataccct

SEQ ID NO: 672953 - DNA, 2181 bp, Homo sapiens
aagttaagctgtgttcagttactgacccatagaaacaaggaaatgctcaatgtttgttgttttaagctaaaaacttgtggagtaaagtaaataaacgtcagtttgttacatagcactagataactaatgtaccttcccagctacagacttccacagccaagattaagacttatttacccaccagttaactcactcatttccaaagacccccagattctagaggaccccttcttcatttcgctctcctcatcaggttcctggtatagggaaataagtcatcaccatgacttaaacagtatggactgttttgttttgttttgacatcaaagcaaccaaaacagaatggaactaaaagaaagcaaggtttaaacttttagtccagtttcaactccagtctcagcaaagctctgagagaagagagttttatggtcaaaaatgtttggggctcttcccctaaatggcctgaggtgaaaatggttcaccattctcttgacccagaaacccccacaaaaagcatgcaaattgacaggttaaaattttcattttcactgcaagaacacctgtggaaccacccaggccatcgagggtatgcagatatgaaagccaccaagtatctaaaagatgtcacttgacagaagcaatgtgtgccattccaaagctacaacagtggagttggtaggtgtgtctgggccaaacagtggggctggacactgggtcggtggcccaaaaagagtgctaaatttttgctgcacatgtgtaaaaatgcagagagtcatgctgaacttaagagtttggatatagattctctggtcattgagcagatccgggtgaacaaagcacctaagatgtgctacaggacttgcagagctcacacggtcagattaactgatacacgagctctccctgccacatctagatgatcttgactgaaaaggtacaaattgttcctaaagcagaacagaaagttactcagaagaaaaggatatcccagaagaaactgaagaaacaaaaacgtatggcacaagaataaatttggcataaaataaatccaagtaaaacaattttaaatgtctcgagaacactacaagctatgtcctcttctcagagagccctgaagttttaacatattgaaagctctgatcttgccaaagaactccacttaacttcaaaacacaccctccacacacatcatgatcaactgagatcttactgaaccagaatcctaaatggcatacttcaggaacaggggtccagagaagcagttctcaaagtgcagcttaaaaagaaactgaaaacccaattcatgcaagacctagggcttattttagagcattttccagtgcagattggatccaatctaaacacatagaattaaattacgaaaaatgatacagactattacctaccaatcacccactaaaggacaccccagggatccctaactccactcttaaagtttaggaagacatcagcactctttgtggccatgcattaatttgctcaaccctttccttcatctgagtatttcctctgcccattgaaatccttgggcataggcggggcacggttgctcacactgtaatcccagcactttgggaggccgaggtgggagcatcaaaaggtcaggagttcgagacaagcctggccaatatggtgaaaccccgtctctattaaaaatacaaaacttagctgggtgtggtggtgcasgcctgtagtcccagctattcaggaaggtgaggcaggagaatcacttgaacccaggaggcggcggttgcagtgagctgagattgtgccactgcatttccagcctgggcaacagagggagactccatctcaaaaaaaaaaagagaagagaagagaagaaaaaagaaaagaaaagaaagcaatccttgggcacatagagtgtcgtggttaacatgatgggcccctggagtaacgctgaacttgctatctgaccatcacttactatacatgtcaactaatctcactaagtttcaccatctttatccaaaaatgagcataataataatatctaccacactggaatgcatgagataattctcgtttagctttggcacagtgtctggaacagagtaggcactcaaaaaatgccacctattgctacatttttcatcatccaatgcatcagatcttaaattaaccaattttagtttccagccg

SEQ ID NO: 672954 - DNA, 2181 bp, Homo sapiens
aagttaagctgtgttcagttactgacccatagaaacaaggaaatgctcaatgtttgttgttttaagctaaaaacttgtggagtaaagtaaataaacgtcagtttgttacatagcactagataactaatgtaccttcccagctacagacttccacagccaagattaagacttatttacccaccagttaactcactcatttccaaagacccccagattctagaggaccccttcttcatttcgctctcctcatcaggttcctggtatagggaaataagtcatcaccatgacttaaacagtatggactgttttgttttgttttgacatcaaagcaaccaaaacagaatggaactaaaagaaagcaaggtttaaacttttagtccagtttcaactccagtctcagcaaagctctgagagaagagagttttatggtcaaaaatgtttggggctcttcccctaaatggcctgaggtgaaaatggttcaccattctcttgacccagaaacccccacaaaaagcatgcaaattgacaggttaaaattttcattttcactgcaagaacacctgtggaaccacccaggccatcgagggtatgcagatatgaaagccaccaagtatctaaaagatgtcacttgacagaagcaatgtgtgccattccaaagctacaacagtggagttggtaggtgtgtctgggccaaacagtggggctggacactgggtcggtggcccaaaaagagtgctaaatttttgctgcacatgtgtaaaaatgcagagagtcatgctgaacttaagagtttggatatagattctctggtcattgagcagatccgggtgaacaaagcacctaagatgtgctacaggacttgcagagctcacacggtcagattaactgatacacgagctctccctgccacatctagatgatcttgactgaaaaggtacaaattgttcctaaagcagaacagaaagttactcagaagaaaaggatatcccagaagaaactgaagaaacaaaaacgtatggcacaagaataaatttggcataaaataaatccaagtaaaacaattttaaatgtctcgagaacactacaagctatgtcctcttctcagagagccctgaagttttaacatattgaaagctctgatcttgccaaagaactccacttaacttcaaaacacaccctccacacacatcatgatcaactgagatcttactgaaccagaatcctaaatggcatacttcaggaacaggggtccagagaagcagttctcaaagtgcagcttaaaaagaaactgaaaacccaattcatgcaagacctagggcttattttagagcattttccagtgcagattggatccaatctaaacacatagaattaaattacgaaaaatgatacagactattacctaccaatcacccactaaaggacaccccagggatccctaactccactcttaaagtttaggaagacatcagcactctttgtggccatgcattaatttgctcaaccctttccttcatctgagtatttcctctgcccattgaaatccttgggcataggcggggcacggttgctcacactgtaatcccagcactttgggaggccgaggtgggagcatcaaaaggtcaggagttcgagacaagcctggccaatatggtgaaaccccgtctctattaaaaatacaaaacttagctgggtgtggtggtgcacgcctgtagtcccagctattcaggaaggtgaggcaggagaatcacttgaacccaggaggcggcggttgcagtgagctgagattgtgccactgcatttccagcctgggcaacagagggagactccatctcaaaaaaaaaaagagaagagaagagaagaaaaaagaaaagaaaagaaagcaatccttgggcacatagagtgtcgtggttaasatgatgggcccctggagtaacgctgaacttgctatctgaccatcacttactatacatgtcaactaatctcactaagtttcaccatctttatccaaaaatgagcataataataatatctaccacactggaatgcatgagataattctcgtttagctttggcacagtgtctggaacagagtaggcactcaaaaaatgccacctattgctacatttttcatcatccaatgcatcagatcttaaattaaccaattttagtttccagccg

SEQ ID NO: 672955 - DNA, 638 bp, Homo sapiens
aggactgcatttccaggacagtctgtccactagtctctcctttcagtttaccttctcccaactctgaaggagaatccagttaaggaatagatcaagaaaatatattgcacagctatatctctgcaccaacatcatatagacaaaaacaactcaattttctgctatttgatgctggttctttgtagatacagatgctgcgtaaagtttctgttgtctaagaagttatacaacattctcaattgatgactaaccactgtaaacctgctgtctttatgtcaaacccactgccttcctttttcctcggagcaagacagccaccatatctgtgatttattgcgctaccacaatacagaacacgactcgacctggaccacaccctaaggctagaagacagcagtaacactaaaaggatgagacgcaagccaytgccagaagatctggaatggccattttccttctcgtaaaaggaaaaactcaaaaattggacctaatcaaaactaaaacttgtgctctgtggaaagaggctaaaaatacaagccacaggcagggaggaaacatttgcaagccacagactcaacaaaagactgagacctagaatacataaggaactctcaaaactcaacagcaccttttcctca

SEQ ID NO: 672956 - DNA, 756 bp, Homo sapiens
ataatcaattagttgttgttttttttttttttttgagacggagtctcgctctgtcacccaggctggagtgcagtggcgcgatctcggctcactgcaagctccgcctccygggttcacgccattctcctgcctctgcctctccgagtagctgggactacaggcgcctgccaccacgccctgctaattttttgtatttttagtagagacagggtttcgccgtggtctcgatctcctgacctcgtgatccgcccgcctcggcctcccaaagtgctgggattacaagcgtgagccaccgcgcccggcagtaattatgaggtatgttagaagttgataggggctatgggcaaaggaaaaagtagggcagggtcagagggttgaaaatgtccaggcaggtagcaggtggtagtattacatggggtgatcagggtggactttgtcgagaagtcaagaattcagaaaaatatgcaaagtattgaaaaaagctagtttgtcttagaatctagctacaattgtttaagaactcatttaacaagtctttgctgagctgggtcatgtaggaatggttcttgtcacccttgccctgtaatggcctgtggttttttgagggagattagttagctcccaacatataattaggtgctcaagggaataatgccgacagatttccattggcattaagagcaggaaagactggatgtgggtaagcattctcccaaagatatatgctgagtgcatttgtgataccccataactgat

SEQ ID NO: 672957 - DNA, 1480 bp, Homo sapiens
tctcttctggagtctattttccctattacagtactaacatacccagtttcagtggtttatatacaagaggtgttagtaagaggggtaatactttttctgcagataaggggtttagttcttttctccccatgactatataaaacagggattgcaaactccaagtctttagagtcaagagggtaactcaagagtgacactggcctggctgagagggtcagaaactttgggtggggtggtgactggaccagagagtactcacctggtataagaaattcaaaacttaattaaaaatcaaacaaacattttgttggcacgtcaaatatttgcaacagccttcttcagcctccacgtttccactttgtgacttctgttaaggaatacggctccttgcctccctgcagctggaaaactagagcgaggggggcttgctttctgtcactcatccttttgagtgtgtccctggccccatgatcaaaggccgcgttgtggctgtgctttggctgtccctctcacatccatggagatgctgctgaaaataagaaccttccttaaagaacaacctatgcccttcttatttgaattctctgttaccctagaagtaatgggtaaaataatgattattgtttgttactttgaaatggtatttgaatttgaatttgaattcgaattctctatgttaccctagaagtaatgggtaaaataatgattattgtttgttactttgaaatggcttgacaaatgtatttgtcgtgttggacctggctgaaatctctgaaggacaatctgccttctcagagaagctggggaaatggaagagggaatattcctcaccgtgaacctaccgcacgcatcctgcctttctcccccatggaatctgttcagcagcactggctgccayggggaggacagactcttgacaccatcctaggggacctttctctggcacctggctgagcatgccattaccatggcagatccccatggctcctgttagagatccctgcagcacactccgaggacctgttcctctttttaatcggtgcggagggaggggaacgcgcgggctgcccggatcggtggcttctgacatgcccctgatcaactctgcctccgtgtctctatctgtaaagatggctctgtcaatacccttgtctgcagttctgatataaggattaaatacaatcacatatttgtcaaaagacaaaattacagtaaacttagttatagatctaattggcttttatttgcgattcataaatctgagcagcctccttcgaaatagaataagggctccctctgggcagtagtagaacagtgagttttgttaggtgggaatggggaaatagaagaatagaaaaaatacctgattaggctggatgcggtggctgacacctgtaatcccaacactttgggaggcctaggcaggtggatcacctgaggtggggagttcgacaccagtctgaccaacatgaagaaaccc

SEQ ID NO: 672958 - DNA, 1480 bp, Homo sapiens
tctcttctggagtctattttccctattacagtactaacatacccagtttcagtggtttatatacaagaggtgttagtaagaggggtaatactttttctgcagataaggggtttagttcttttctccccatgactatataaaacagggattgcaaactccaagtctttagagtcaagagggtaactcaagagtgacactggcctggctgagagggtcagaaactttgggtggggtggtgactggaccagagagtactcacctggtataagaaattcaaaacttaattaaaaatcaaacaaacattttgttggcacgtcaaatatttgcaacagccttcttcagcctccacgtttccactttgtgacttctgttaaggaatacggctccttgcctccctgcagctggaaaactagagcgaggggggcttgctttctgtcactcatccttttgagtgtgtccctggccccatgatcaaaggccgcgttgtggctgtgctttggctgtccctctcacatccatggagatgctgctgaaaataagaaccttccttaaagaacaacctatgcccttcttatttgaattctctgttaccctagaagtaatgggtaaaataatgattattgtttgttactttgaaatggtatttgaatttgaatttgaattcgaattctctatgttaccctagaagtaatgggtaaaataatgattattgtttgttactttgaaatggcttgacaaatgtatttgtcgtgttggacctggctgaaatctctgaaggacaatctgccttctcagagaagctggggaaatggaagagggaatattcctcaccgtgaacctaccgcacgcatcctgcctttctcccccatggaatctgttcagcagcactggctgccacggggaggacagactcttgacaccatcctaggggacctttctctggcacctggctgagcatgccattaccatggcagatccccatggctcctgttagagatccctgcagcacactccgaggacctgttcctctttttaatcggtgcggagggaggggaacgcgcgggctgcccggatcggtggcttctgacatgcccctgatcaactctgcctccgtgtctctatctgtaaagatggctctgtcaatacccttgtctgcagttctgatataaggattaaatacaatcacatatttgtcaaaagacaaaattacagtaaacttagttatagatctaattggcttttatttgcgattcataaatctgagcagcctccttcgaaatagaataagggctccctctgggcagtagtagaacagtgagttttgttaggtgggaatggggaaatagaagaatagaaaaaayacctgattaggctggatgcggtggctgacacctgtaatcccaacactttgggaggcctaggcaggtggatcacctgaggtggggagttcgacaccagtctgaccaacatgaagaaaccc

SEQ ID NO: 672959 - DNA, 573 bp, Homo sapiens
cttactgtaacttttttactttttaattttttaaaacttttgagtctttttgtaataacacttaggttaaaacaaaaacacattgcacagttgtacaaaaatatttttctttatatccttattctgtaaatttttctattaaaagtgtttttctttttaaacttttacrgacaacagtgaggcccccatcagcctgcccaagcaccatcggagggcgccagagaacctctgctgaaatcacagctgccactccgtgtggctccagcgctccagctacaggtgcacaccttggttataagcagcgatgacctgtcactgcagcaacaggggagaaagaagacagcacctaggagcagtgtggccacacacatggggaagcagtgctgatggaggaaatgcaggggagggagagcaggcaccagggaagaccggaagggcctggccagaggcagccgaggcagactcagcaagggccaaggccgtagtgcccgggctgcagccaggcgtggggagggccaaggccattggcagggccccagcacagggccgggcactggaacagggcagacgcag

SEQ ID NO: 672960 - DNA, 1259 bp, Homo sapiens
gttgatgcacctgctcaggtagggagagcctgaggctggggctgggccgctcaggtccgggccgcacgcctctcctccacagggccccagctctttggttggggtctcctgaaaagtcaaacagaaactcctgtcagcaaaggcctgctcacgggaaccccccgtgtgaccgcttccccactggcaggcgcatcagactcatcgactgagaagtaagcgtctcaagacaagggcggctccaggcctgggaggacggacagacactaggccctgtctctccctctgcctgcagctctgacctcggcagaggcatgaagcagccctctgaggctgcagagaagcgcagagcagcaggcaggcgggcacgagcggcagtgctcaaggtgccacccaccagcaacaagtgtgtcggcttctcctccacaatcccccgcctggactcaggtcagcccggaatccaaagtgggcacygccctggacacagtgctccaggagaagcccttggttctggcttcggagcaggaagggggtcttctgatgctcagaaagagaagggggaattccagctttcttcttttctctgttctcttgctctccagtctcaagcaatcctggggcaacagctgcctataatcctgagggccatgaagcctcctctccactggaggactgtgatcacgagcgggaggggaccctcgctgagtttttttcccttctgtcctcccactgcttggctccagatgcgcgtgcgattgcaggaagtatggcacatcgtgtaactaaagcctcaactttctagctaggggaccagaaagcagaggcccaaagaactgcaagtatcagggacatcacagaagagggaggagctcaaaaaggtgacccgatgaagttgctggggggctcctgggctgtgtgtggtagatctgactctgaacacacccaagctttgaaaatgaacctcaggggagaccggggtggggtgcggggcacacacgtggggcaggttcaaacagcacagcgaaggctttgaaaggggaactgggagctgacactgaaaccacaacccacagaaggctgcttggagcttgtggcctgcacccaccgggtcaaggcctgctaaggtaaaagtatcaacatgattcacagcatttacacatggcacagactgcctaacatgataggaggatccaaaagctaaaattacttcacatacaaaaaccaggaacacctcaatttacctgggaaaagacaatcaacag

SEQ ID NO: 672961 - DNA, 612 bp, Homo sapiens
tgtaaacaacaaaaatttatttctcatatttctggaggatgggaagtccaagatcaagatgctagcaaattcatgtctggtggggacccattttctagttcatagatagtcagctgtcttcttactgtgttctcatgatgaaaaggtcaaatgagctccctctggcctctttcataagaataatactcctattcattagagcaaagccctcaggacctaatcatttggtaaaagtctcacctcccaattaaacccagctgtgaaggttaagatttcaacatatgaatttgggggcgggtgaggaggtggaaataaacattcagctcactgcagtgttttttaactcttttggccaaatatcccacttcccctctttccagacatatcatattgagagacaggactagctggatttcctaggccaactaagaattcctaagccttgctgggaaggtgactgcatccacctttaaacacggagcttgtaactcagctcacacccaacmaatcaggtagtaaagagggctcactaaaacaccaattaggctaaaaacaggaggtaaagaaatagtcacatcatctatcatctgagagcacaggggaagggacaat

SEQ ID NO: 672962 - DNA, 1365 bp, Homo sapiens
tacctgtgatatttgagtttttttcctatgatcccacttatttaaaaatcctctttactagtccgcctcaacatctgcctccagattgaatattttcacataggaaattacacaatccttttagaatcaagccattaaagttcataaactgataggtttgatcagcaaaacattttcgtgcatcaacaatattataatagaaattatatatattcctattatataaatacatgattttatgtatatatatatatatatatatctgtcaatcagctgtcttttttcagactgtgtttttttttcttactttctcttcattccctttttacccaacttcttcccatttgtcagcgttacatgttttgacaagtttttcaaaatcactttcctgattcttaatttttttcatttcacatatgagaacctcaaaacatactttatgaactctccattgtccccagaaataaatgtagtctccctagcctaaaaccaaattctctgttccaatctttcctttcttgtcgctgctctgatattatcaaatactctcatctcctggtttataaacctgattgaataatacaatcaaccgtggagtttttaaaaatacaaaatcccaaatctgaatctctgagaaataggactgacaagctatatttttaaaaatctctctagatgatggtaaatcatagctaaggaccgctgctttttatcaaactggcttaaaattaaacattctcaatattttctcatatccatgttagctcctgatagttctgcctgaaatgtcatttccacatctctgtttgcagcctgtttttttatttgaggtcttacaaaattctagttaattttaaatattccttttgatatctcccattgcatatcagctaatatcatttatcagagtctctttagrgtttatttatttgaattactgtcttatcttccaaactttatcactacttatttgagctcagggatcatacctatttacttttacttcatgaaaatgccaaatacaaaattttcatgtagtaaatgatcaaaatagtcagcttaactactactgaacacatctaaattgtgataacattttgaaaatgactaaaatttacataatagcatgatatttacaaaggacataatcaagttaatacaggcatacaataatttatggacttaagaatcagtgattttaaaaattcaaattcatatttctaaccattttgaattacaaaattaaaaaagtcataagagctccaaaagcaaaatgagagttttgtaaacgtttcttattatgaacaatatttaaattaaaaacaattttaactatcatgtaaaagatttccagataggcagtcc

SEQ ID NO: 672963 - DNA, 1365 bp, Homo sapiens
tacctgtgatatttgagtttttttcctatgatcccacttatttaaaaatcctctttactagtccgcctcaacatctgcctccagattgaatattttcacataggaaattacacaatccttttagaatcaagccattaaagttcataaactgataggtttgatcagcaaaacattttcgtgcatcaacaatattataatagaaattatatatattcctattatataaatacatgattttatgtatatatatatatatatatatctgtcaatcagctgtcttttttcagactgtgtttttttttcttactttctcttcattccctttttacccaacttcttcccatttgtcagcgttacatgttttgacaagtttttcaaaatcactttcctgattcttaatttttttcatttcacatatgagaacctcaaaacatactttatgaactctccattgtccccagaaataaatgtagtctccctagcctaaaaccaaattctctgttccaatctttcctttcttgtcgctgctctgatattatcaaatactctcatctcctggtttataaacctgattgaataatacaatcaaccgtggagtttttaaaaatacaaaatcccaaatctgaatctctgagaaataggactgacaagctatatttttaaaaatctctctagatgatggtaaatcatagctaaggaccgctgctttttatcaaactggcttaaaattaaacattctcaatattttctcatatccatgttagctcctgatagttctgcctgaaatgtcatttccacatctctgtttgcagcctgtttttttatttgaggtcttacaaaattctagttaattttaaatattccttttgatatctcccattgcatatcagctaatatcatttatcagagtctctttagggtttatttatttgaattactgtcttatcttccaaactttatcactasttatttgagctcagggatcatacctatttacttttacttcatgaaaatgccaaatacaaaattttcatgtagtaaatgatcaaaatagtcagcttaactactactgaacacatctaaattgtgataacattttgaaaatgactaaaatttacataatagcatgatatttacaaaggacataatcaagttaatacaggcatacaataatttatggacttaagaatcagtgattttaaaaattcaaattcatatttctaaccattttgaattacaaaattaaaaaagtcataagagctccaaaagcaaaatgagagttttgtaaacgtttcttattatgaacaatatttaaattaaaaacaattttaactatcatgtaaaagatttccagataggcagtcc

SEQ ID NO: 672964 - DNA, 1365 bp, Homo sapiens
tacctgtgatatttgagtttttttcctatgatcccacttatttaaaaatcctctttactagtccgcctcaacatctgcctccagattgaatattttcacataggaaattacacaatccttttagaatcaagccattaaagttcataaactgataggtttgatcagcaaaacattttcgtgcatcaacaatattataatagaaattatatatattcctattatataaatacatgattttatgtatatatatatatatatatatctgtcaatcagctgtcttttttcagactgtgtttttttttcttactttctcttcattccctttttacccaacttcttcccatttgtcagcgttacatgttttgacaagtttttcaaaatcactttcctgattcttaatttttttcatttcacatatgagaacctcaaaacatactttatgaactctccattgtccccagaaataaatgtagtctccctagcctaaaaccaaattctctgttccaatctttcctttcttgtcgctgctctgatattatcaaatactctcatctcctggtttataaacctgattgaataatacaatcaaccgtggagtttttaaaaatacaaaatcccaaatctgaatctctgagaaataggactgacaagctatatttttaaaaatctctctagatgatggtaaatcatagctaaggaccgctgctttttatcaaactggcttaaaattaaacattctcaatattttctcatatccatgttagctcctgatagttctgcctgaaatgtcatttccacatctctgtttgcagcctgtttttttatttgaggtcttacaaaattctagttaattttaaatattccttttgatatctcccattgcatatcagctaatatcatttatcagagtctctttagggtttatttatttgaattactgtcttatcttccaaactttatcactacttatttgagcwcagggatcatacctatttacttttacttcatgaaaatgccaaatacaaaattttcatgtagtaaatgatcaaaatagtcagcttaactactactgaacacatctaaattgtgataacattttgaaaatgactaaaatttacataatagcatgatatttacaaaggacataatcaagttaatacaggcatacaataatttatggacttaagaatcagtgattttaaaaattcaaattcatatttctaaccattttgaattacaaaattaaaaaagtcataagagctccaaaagcaaaatgagagttttgtaaacgtttcttattatgaacaatatttaaattaaaaacaattttaactatcatgtaaaagatttccagataggcagtcc

SEQ ID NO: 672965 - DNA, 754 bp, Homo sapiens
ggtgaggaagtacaatctgaacacagatttgagggcaatctaaatacctcactatgcaaggacaagaataccaggcaaggggtaaaaaatggcattttcaggagtgatragaacttcagggtgtctggtgtgtggatattcccgtgtacaagagcataagggaacattaagtctgtattaatccattctcacattgctataaagaactatctgagactgggtagtttatgaagaaagaggtttaattgactcagttctgcatggctggggaggtctcaggaaacttacaatcatgacggaaggtgatggagcagcaaggcataccttcccatggcagagcaggagagagagagagctaagggggaagtgtcacacacttttaaactatcagatcttacgagaactcactcattattacaagaacatcaaggaggaaatccgtccccatgatccaatcacctcccaccaggcccctcctccaattcaacatgagagttaggcagggacacaaatccaaaccatactattctgcccctggcccttcccaaatctcctgtccttctcacactgcaaattacaattattccttctcaacagcccccagtcttaactcatttcagcatcatcttaaaagtccacagtccaaagtctcatgtgaggcaaagtaagtcccttatgcctatgagcctgtaaaatcaataactagttacttccaagatacaatgggggtgcagacattgggtaaatagtccca

SEQ ID NO: 672966 - DNA, 622 bp, Homo sapiens
gatgcgagggtccctgggctcctcctgcaggggtggctggagactcaggtccttgcccgccagccctctctgggactttcgagtcggttggtgcacttgcgggggcccagcaggggtacgttcgtgacgggctatttggcaaagacagccattctccccttctcctccggtaagagtctttgccagcacattgygcttcttgtctctgtgtggcctggtgtggccgggccgtgtaaccaagctctgagcaatggcagtgagtgtggcgcccccagcaagcttctttagaagcggaggggcccgaaacccgcttttcttcacgtgctggttgcttcgcattctttagtttcatctttctgaactcatcacaatcacaggggatcatattcatatgcttgtcaaaagccttgaaggtgccaatgaagactcggccatcttgtaggatacgtctcattctgtggtccgtgtgtggcagcatcttgctactcttgcccacggtcacgactgccgttcccccagatccaatgtccacagttaaacttggagcttctgaacctggtatgaggccacccacgggcccaccaattgggcttccctctgctcgagggacaccagtaggcat

SEQ ID NO: 672967 - DNA, 660 bp, Homo sapiens
gatggctaaagccggcccccctgtccctgctggctggttgtgaggtcttgcttgattctagggcctccgtgcagctgggcctgagcctgtctggaactggcccacccttccaggcctgagcaggggttgctgactgagagagggtctccgggagctgcctccgacctcggggtgatgctggtgggtccaggtagacagagctgtgttcctgacagtgaggctgacacctctgggcctcccggccaggaatactcttgctgaagccatgattactttagttttctcctacttggggatgaatgctgtcctggctggaactgaaacttagaaatgattccgtttcctctgcagggctcctggccggagtccccgatcccctaggggcctgagggctgtggtgggggcctggcagggctccaggtaccgagwgaggccctctgcccagcaccctgctgtcccggggcagggaggccacatgtccccaccatgtcccagggtgctgtgaaggccacatgttgggggcagactttcaatgggagatgggaattgggaagaaaagtttgtgtcaactcctgcatggaatgaagggtaacaattcatggatcatggttgggaagcagcaagcccgataaatcagtcctaaatgggattacggattac

SEQ ID NO: 672968 - DNA, 613 bp, Homo sapiens
ggcattaatgtccctttcccggagcccagcttctgtagggagcgacagagacgctagggagagccagcctcagaaatatttccaaattacaggtgggagaattatctctctcagaggtgtcttaatttaatcattatggtgcattatagagagaaagtcttcccttctgcaaggacactctttaactgacatccttctcccagcagcttttgctggcccggcactatttacgtccggggcaatggctgggagctgcactgctgacggcataatttccatttcttaacgcaccgatggtttccacgtggactgcrctggagctaacttggactgcgtcttttatcgacaccccctggacaataaagacaccagctctgtattctaatcatgcggacaccctcaccctcggcaaggtgaccgctccagagtgggcccagatcccgagccccaagtacacatggttcacacggtggcgggggcttcagacctccacctgccacgtgccatttgcaggggcaaggtgggagtttggaaaaggtatttttagaagcccagcaggcattcctggcgtgcaaataaacatatatccacatggagcctggagggtgtctgc

SEQ ID NO: 672969 - DNA, 613 bp, Homo sapiens
ggcattaatgtccctttcccggagcccagcttctgtagggagcgacagagacgctagggagagccagcctcagaaatatttccaaattacaggtgggagaattatctctctcagaggtgtcttaatttaatcattatggtgcattatagagagaaagtcttcccttctgcaaggacactctttaactgacatccttctcccagcagcttttgctggcccggcactatttacgtccggggcaatggctgggagctgcactgctgacggcataatttccatttcttaacgcaccgatggtttccacgtggactgcgctggagctaacttggacygcgtcttttatcgacaccccctggacaataaagacaccagctctgtattctaatcatgcggacaccctcaccctcggcaaggtgaccgctccagagtgggcccagatcccgagccccaagtacacatggttcacacggtggcgggggcttcagacctccacctgccacgtgccatttgcaggggcaaggtgggagtttggaaaaggtatttttagaagcccagcaggcattcctggcgtgcaaataaacatatatccacatggagcctggagggtgtctgc

SEQ ID NO: 672970 - DNA, 654 bp, Homo sapiens
gaagaataaattctcctacctgagtaactggagaaggaaggacttactttaaaactcagtaactgggaaggagagagctccttcagtaactgtgtagatgaatgaattttcctaattagtaactgtgtgaaaaaagatattctcstacctcagtaactgtagtgaataatttattcctctatctcagtaactgtggagaagaatagattctcctgtcttaataactctggaaacggatggattctcttccttcagtaattgtgaaaatgaattctcctaccttggttattgtgaagaggataaaggctgctacctcagtaacaatgaaagaagatagattctcttacctcagtaactgtagagaaaaacgtaatctccaagctcattaactgtagaaaaggaaagattctcctcactcagtaactgtgcagaaaaatattatcttcccttaactgttgggaaaaaaagaggattctcctaccacagcaagggagcagaagagattttcctacctcagtaattgcagggaagaattatcctaccacaacatctacaatgaagagtaaattctcctactcgagtaactgtggagaagaatggatttttttaacttcagaaactgaagaatgaattcccctaatcagtaaatgcatg

SEQ ID NO: 672971 - DNA, 597 bp, Homo sapiens
ttatgatccaaagtttagaatatttttattcagatgtttaaatakctgcttctctagagatcatattttgttcccaaacggtgcaagggactttgagacatgtctgaaactctttccaaacagcacattgatggtgtgacagctcatattcacagtcagcaaaaagcaaaatggctatgactaccattctatttccccttttgtccattggatgtgagggacatcttgacatgttatggaggcatcttgctaaatgactgacgtgttatgtaggcatcttattaaatgattgacatgttgtgcaggcatcttgctaagtgattgacatgttatgtaggcatcttgttaaatggatgcaacttagagacatcctgagatttatttgcagaactgctgcaattctttttagtacttgccggctttccttagcttcctcatagccactgtcaatttacatggaataatatatgactatgaggaataaaaatacaattctaaggcccgcaaccaactgaaatgacctccccttggccaaagggacctctgagaaaccttgaaaactgagttcccagccatgacagaggggaggtcagactt

SEQ ID NO: 672972 - DNA, 586 bp, Homo sapiens
tattgtgagctgtgtggcgctgtygtgagcttgtgtggtgcagttgtgagctgtgtggtgctgtcgtgagctgtgtggtgctgtcgtgagctgtgtggtgcagttgtgagctgtgtggtgttgtcgtgagctgtgtggtgcagtcgtgagctgtgtggtgcagtcgtgagctgtgtggtgcagtcgtgagctgtgtggtgttgtcgtgagctgtgtggtgctgtcgtgagctgtgtggtgttgtcgtgagctgtgtggtgctgtcgtgagctgtgtggtgttgtcgtgagctgtgtggtgcagttgtgagctgtgtggtgctgtcgggagctgtgtggtgttgtcgtgagctgtgtggtgcagttgtgagctatgtggcgctgtcgggagctgtgtggcgctgttgtgaactgtgtggtgttgtgagcttgtgtggtgctgttgtgagctgcgtggtgctgtcgtgagtttgtgtggtgttgtgactgcccagggtgacgcagcgttgaccgatgatgaggcacctgatacagataagtcctaacatattccctggtgcaatttaccagaaaggctgaaaggctgg

SEQ ID NO: 672973 - DNA, 586 bp, Homo sapiens
tattgtgagctgtgtggcgctgttgtgagcttgtgtggtgcagttgtgagctgtgtggtgctgtcgtgagctgtgtggtgcwgtcgtgagctgtgtggtgcagttgtgagctgtgtggtgttgtcgtgagctgtgtggtgcagtcgtgagctgtgtggtgcagtcgtgagctgtgtggtgcagtcgtgagctgtgtggtgttgtcgtgagctgtgtggtgctgtcgtgagctgtgtggtgttgtcgtgagctgtgtggtgctgtcgtgagctgtgtggtgttgtcgtgagctgtgtggtgcagttgtgagctgtgtggtgctgtcgggagctgtgtggtgttgtcgtgagctgtgtggtgcagttgtgagctatgtggcgctgtcgggagctgtgtggcgctgttgtgaactgtgtggtgttgtgagcttgtgtggtgctgttgtgagctgcgtggtgctgtcgtgagtttgtgtggtgttgtgactgcccagggtgacgcagcgttgaccgatgatgaggcacctgatacagataagtcctaacatattccctggtgcaatttaccagaaaggctgaaaggctgg

SEQ ID NO: 672974 - DNA, 586 bp, Homo sapiens
tattgtgagctgtgtggcgctgttgtgagcttgtgtggtgcagttgtgagctgtgtggtgctgtcgtgagctgtgtggtgctgtcgtgagctgtgtggtgcagtygtgagctgtgtggtgttgtcgtgagctgtgtggtgcagtcgtgagctgtgtggtgcagtcgtgagctgtgtggtgcagtcgtgagctgtgtggtgttgtcgtgagctgtgtggtgctgtcgtgagctgtgtggtgttgtcgtgagctgtgtggtgctgtcgtgagctgtgtggtgttgtcgtgagctgtgtggtgcagttgtgagctgtgtggtgctgtcgggagctgtgtggtgttgtcgtgagctgtgtggtgcagttgtgagctatgtggcgctgtcgggagctgtgtggcgctgttgtgaactgtgtggtgttgtgagcttgtgtggtgctgttgtgagctgcgtggtgctgtcgtgagtttgtgtggtgttgtgactgcccagggtgacgcagcgttgaccgatgatgaggcacctgatacagataagtcctaacatattccctggtgcaatttaccagaaaggctgaaaggctgg

SEQ ID NO: 672975 - DNA, 586 bp, Homo sapiens
tattgtgagctgtgtggcgctgttgtgagcttgtgtggtgcagttgtgagctgtgtggtgctgtcgtgagctgtgtggtgctgtcgtgagctgtgtggtgcagttgtgagctgtgtggtgytgtcgtgagctgtgtggtgcagtcgtgagctgtgtggtgcagtcgtgagctgtgtggtgcagtcgtgagctgtgtggtgttgtcgtgagctgtgtggtgctgtcgtgagctgtgtggtgttgtcgtgagctgtgtggtgctgtcgtgagctgtgtggtgttgtcgtgagctgtgtggtgcagttgtgagctgtgtggtgctgtcgggagctgtgtggtgttgtcgtgagctgtgtggtgcagttgtgagctatgtggcgctgtcgggagctgtgtggcgctgttgtgaactgtgtggtgttgtgagcttgtgtggtgctgttgtgagctgcgtggtgctgtcgtgagtttgtgtggtgttgtgactgcccagggtgacgcagcgttgaccgatgatgaggcacctgatacagataagtcctaacatattccctggtgcaatttaccagaaaggctgaaaggctgg

SEQ ID NO: 672976 - DNA, 586 bp, Homo sapiens
tattgtgagctgtgtggcgctgttgtgagcttgtgtggtgcagttgtgagctgtgtggtgctgtcgtgagctgtgtggtgctgtcgtgagctgtgtggtgcagttgtgagctgtgtggtgttgtcgtgagctgtgtggtgcagtcgtgagctgtgtggtgcagtcgtgagctgtgtggtgcagtcgtgagctgtgtggtgytgtcgtgagctgtgtggtgctgtcgtgagctgtgtggtgttgtcgtgagctgtgtggtgctgtcgtgagctgtgtggtgttgtcgtgagctgtgtggtgcagttgtgagctgtgtggtgctgtcgggagctgtgtggtgttgtcgtgagctgtgtggtgcagttgtgagctatgtggcgctgtcgggagctgtgtggcgctgttgtgaactgtgtggtgttgtgagcttgtgtggtgctgttgtgagctgcgtggtgctgtcgtgagtttgtgtggtgttgtgactgcccagggtgacgcagcgttgaccgatgatgaggcacctgatacagataagtcctaacatattccctggtgcaatttaccagaaaggctgaaaggctgg

SEQ ID NO: 672977 - DNA, 996 bp, Homo sapiens
tgacttaaatttctacaactggatatagcaaacgacacaaacaagtcaataacaggtcagatttagagtggaagaaaatagaatacgcaaacagatgaggtttatgaagcttttaaaaagaatatgaaataaatcttactaaacttgcgctgctaagcactgaaaaattcaagtaagtgatatttttagtacattccactataacacaggtgcgaatttagtcaatatagcccttgtgtaataattcatttaaaaaattctagcagtggaattggtttaccactactaattacaaaacctataaatagggcaaacattttttattttacaaaaaatggattgagcaacaaatgagaagcatgatctgaactgagactttgtaatctttaacacgttagacaacatgctttcaaaataagttgccaaatgattatagacagaaattaatatacctgaaaaaagtaattgttaatagttttagcattattttattcacatccccaaaggtattgaaattattttcaaaacaatagaaaaacctctgatgatagcatttcattgttatggttgatactaagtgcactttccaaaggaaatattgaacaacaacaacaaaattactggtgtttagaatatatatgtagttgacactaacgcttgtttgagagccctaaatattaaatgaaaattccatgtacttgtcttttataatttaatttgaagccaaataatttcttattcaaaacataaaatgagggccaagcatcatggctcatgcctataattccaacactttgagaggctgaggcaggaggatcatttgagctcaggagttccacaccaactcggcaacatagtgaaaccctgtctttacaaaaattttttaaaagttagccaggcatggtggtttacacctatagtcccagctaatcagaaggcttggcaggaggattgctggagcccagaatgtagaggctgcaatgagccrtgattgca

SEQ ID NO: 672978 - DNA, 1374 bp, Homo sapiens
aaaagctcagcttccttgaaactcagatggaatgactttaagacattgtggtggtttattcctattcgatgtgggacacttctaaagagaaactgcagcattctccattagcctgacaaagattatggagtttcttcttaaccaatcatcttttcctctcctcttttcacagaggttagacctgtaccrtgatctgaagagtcttccttctaaactctttctcctctttactcttcacatgtgtttcccgaataaatctcttgtatatctaatcctgttttgcctgcttttcaaaaaatccaaactaacacaagtagtgccaggagtagcaggagaaaacaaaggtaaaatgaaattttgggactggtcaacaaatgacctaatggtcaaattgttgcaattggcatagcaaggttaacattaaaataaaagctatagctgctaccaggatactttggactccaggtgtagaaaggagtcaccatcttggctagagtaattgatggttataagcaggaggtggaaggactgcatttacatagttggtgccggtagacaaatatatggaacatgggttacccatgtggacctcttgagtaccctcatccccattgtaactgaatggacatttacaacaattatagcctgagaagcccatgatttccaagggcttatgccctaaggaatgaaggttcggatcacaacacatgattaggcaccaagatctgtcaaagtaatagctgaaggttaggggattttttagaaaggacaaaggagaagagaaaggatgagtataatgtatgaccccaaaaccaactatagcagtggatggtgtagctggtgttaccagtctctctattttaagtttcccttaaataagggagggtaataggaaacatggtgatgccactccttaaacttgcattgagaatcagatttgtgcaatgcagtgggtgaaatgtagaatctgtgaaactatgcccagatcttgctctgcaaggagcataattgacagacagtgctagctgccagctttctggatccaccactacatttgtgcagcaggcatacttcctcagagctactctaagtggaagactgagcagggcgaattactaatgccagcccattcttgctaggtctgggattcctctaatgtgtattggcctaaaactcttagaactgtactgatgtttgagactctccctctcaaatcctccttctgcaggtggtagacctggactgcattctaaatgctctctctgaccactctttctttcttccatttatccttaatagacatttcctctaataaatgtattgcatgtttattctgcttcacagagtactcaaactaacaaaagcatattccaa

SEQ ID NO: 672979 - DNA, 1982 bp, Homo sapiens
  misc_feature 851, 852, 853, 854, 855, 856, 857, 858, 859, 860, 861, 862,863, 864, 865, 866, 867, 868, 869, 870, 871, 872, 873, 874,875, 876, 877, 878, 879, 880, 881, 882, 883, 884, 885, 886,887, 888, 889, 890, 891, 892, 893, 894, 895, 896, 897: n = A,T,C or G
  misc_feature 898, 899, 900, 901, 902, 903, 904, 905, 906, 907, 908, 909,910, 911, 912, 913, 914, 915, 916, 917, 918, 919, 920, 921,922, 923, 924, 925, 926, 927, 928, 929, 930, 931, 932, 933,934, 935, 936, 937, 938, 939, 940, 941, 942, 943, 944: n = A,T,C or G
  misc_feature 945, 946, 947, 948, 949, 950, 1676, 1677, 1678: n = A,T,C or G
tgggcattttcaatatcacaacccaatcataattccaaagctcctaattggaattatgttcactcctgagaaaaagactagggggaaaacatgtatatatctccgtggaaacaaacttgctagtttttttttctgcaatataaagcaaaaaaataaaaaaaaaattttaaaaaaggccaagtatttttatagacttgactaacaatgtaatttatgtattttaggcgcagccaggtgacaactctactagaatcactatcctgacagaactctacrtacaagctgtcatttttgaccacatttccagaaggaagacttaagtaccaacatgttaatttcctaataatttgctaaatttaaataaattccgtagacagagcaaattagaataataaatgagccctgtagctggaaggcaaattagaacaataaagttaataaagaagttagaaagaaaactgtaatattgactgtctttttattatacagatagcctctaagctgattgcaacatttcatgggagagaattttggtgctacttcaaagatacagaaattggtgactattatgtagctcagaatttaaaaaaaaaaaaaaaaaagttccagatcccactattgctaaatcgaatggaccaagcttttgccatatggcagtgctggctgctaaaatcattgaatattgactgttaaggggtcccaaattggcatacaaggttttcgatagtactaaacaagtaagtaaaatctgcaatatcccatgaaatgatgtataaaatgaatgaacgtgtttaatatgcatataagcttggataacatgaatcctataacagcgaagctgaggaaatgannnnnnnnnnnnnnnnnnnnnnnnnnnnnnnnnnnnnnnnnnnnnnnnnnnnnnnnnnnnnnnnnnnnnnnnnnnnnnnnnnnnnnnnnnnnnnnnnnnnacataaatagtaataaggttatttagttattaattaatgatatggagcaaatgaacataaaattattttttctctttttttattatactttaagttctagggtacatgtgcacaacgtgcaggtttgttacatatgtatacatgtgccatgttggtgtgctgcacccattaagtcgtcatttacattaggtatatctcctaatgctatccctcccccctcccccaaccccacaacaggcccaggtgtgtgatgttccccttcctgtgtccaagtgttctcattgaaatgaacataaaattattgagcaatttctcattgatggatttcagcctccagcagcctatcaaaacttgcataaatagacacctggtaactgatgttactcttgaattagccttcgctttactttcacttattcctacatggtcaaacttctgttcactgacaatatgatcttctacttacaaaactctcaagattcctccaaaaacctcttaaatttgatagtgaagtttcaggatacaaaatcaacatacaaaaatcagtagcatttctatacaccaatagtgatcaagtggggaagcaaatcaagaaagccattgcaatcccatttgcaatagctgccagagaaaaatacctaggaatatatttagctgagaaggtgatttctctagcatttcatttgctctattctctctctttttttttttttttttttttttttnnnggagtgtcacccaggctggagtgcagtggcaccatcttggctccctgcaacctctgcctccccggtttaagcgattcctctgcctcagcctcccaagtagctgggactactggcacacaccactacacccagctaatttttgtgtttttagtagagacagtgttccaccatattggccaggctggtcttgaactcctgacctcgtgatccatccacctcggcctcccaaagcgctgggattacaggcatgagccactgctcccagcctgctctattcttacactttggaaaatagatcaatgca

SEQ ID NO: 672980 - DNA, 632 bp, Homo sapiens
cggtttgctttgtttttcctcacaaagcaaaatatcatctaaagtttaagtttttttgtaaagttatttaatcaaaatatgtattatcaaaataatataaagtatgaaagttaaaatacacagtgccaaattggcccatggctaaaaaacaaacatgtaggctccgaatgaagtcaagataaattcatttctcacagtcctaaaatttaagatgtagggaaaggggttacagaagaatccgtagccttgatcacctcataaaaactaagtgaatattatgatattcttcatggaactcaaaattctgaatgaggtctgagaaaatacatttaaaaggataagatgggctacaggaaaataattcattcttgtttaacatatttggaactcatagcaaactcattgtacctttttattttttaatgtaataatggactttaactctctcttcctgtactagaatgagtatggtaattgttaagtagatctttattactcatatgaagctttctactgtagtctwaaactgacacctgtgagactttgtgtctcagtaaacattggatcccctcttctacccactcctggctgcccaactaagctaaataggagcaccataactaggcaccaga

SEQ ID NO: 672981 - DNA, 527 bp, Homo sapiens
aattctaagtagacagtaattctgtgattacatgatatacactgggaagatacactgtggatgatgtaactatggtttgaatgcacaactggctgacaggtatattcagagataattttttattgtatcactgttattctaagatatactgtggggtaagagttattttagtagtttcactcagaacttaaatagtatagtaaaaaaataactaaatgtcatcagaaaattacttaaaattctttaagcttttatttcttcactgataagatgaggatcgtaatatctatactgcttaactcacagaactaactaagatgatatatataaaagcatcaaaagcattttacaggctataagataataaagtgtaagttctgttacagagatcaacgcttactgtaagaattctaagtcattayggaaaaagctagttgtgttcactagagtttgcataagagtcctggactgtgtaatgtattttacaaaattttcattaaaatatttatagctcaagaagcaaaata

SEQ ID NO: 672982 - DNA, 527 bp, Homo sapiens
aattctaagtagacagtaattctgtgattacatgatatacactgggaagatacactgtggatgatgtaactatggtttgaatgcacaactggctgacaggtatattcagagataattttttattgtatcactgttattctaagatatactgtggggtaagagttattttagtagtttcactcagaacttaaatagtatagtaaaaaaataactaaatgtcatcagaaaattacttaaaattctttaagcttttatttcttcactgataagatgaggatcgtaatatctatactgcttaactcacagaactaactaagatgatatatataaaagcatcaaaagcattttacaggctataagataataaagtgtaagttctgttacagagatcaacgcttactgtaagaattctaagtcattacggaaaaagctagttgtgttcactagagtttgcataagagtcctggastgtgtaatgtattttacaaaattttcattaaaatatttatagctcaagaagcaaaata

SEQ ID NO: 672983 - DNA, 591 bp, Homo sapiens
ttttttttttttttttttaaagacagggtttcactatgttgcccaggctggtcttgagcttgtgacctcgagatcttcagagtgctgggattacaggcatgagccaccattcctggccttgattctgtaatatttttaacacttatttgatttgctcccccaagccttgcacacattttactgtgagctggtctttgttttttgtttgttttgttttgttttgtttttgaaacagagtctcactcttattgcccaggctcgagtgcagtggagcaatcttggctcaccgtaacctcygcctcctgggttcaagcaattctcttgcctcagcctcctaagcagctgggattacaagcacgtgccaccatgcccagctactttttgtacttttagtagagatggggttttgccatgttggccaggctggtctcgaactcctgacctcaggtgatctgcccaccttggccagtgctgagattaaaggcataagccaccatgcccagcctgtgagcttgtgtttggttttgagcttctggagtctggacaggtggccatggtgaggcttagggtcatgtcctcactgcctagacc

SEQ ID NO: 672984 - DNA, 600 bp, Homo sapiens
atttagatccttaccaaacttttaatccagacatctgaagtctttcagtggcatttaccttgtcaaatatcacagtaaaatagaatgccctgtctacggtgaaactgctttggaaaggctggtcatttttcacgagtgtttccttgctgtgcccttggtatttcaaagctgtcctctttaagcactgaagcaattagttttgagaaggctgattcttcagggtccagtgctctcctgcctttcatttgctgaaactgtacattttaatgaagttgtttcatctatgttgtcaaacactagaattttgctgctttaattctaatgatctctactggcaagtgctgtgttttattagagccatcaagtgtttattaaatgtccatgcactgtggtgttaggcacataaattaggtcagctgggcttatgggttatggatgaaggagttaaatattttygtcataatcttaaagtgtagtgggattgccttttgtgggctctcaatgatgccattttctgtgagtcgtttcctcttttccccatcagccagtgcgaacactagtgtttgaataatgtggctattaatagtggccctagtacgt

SEQ ID NO: 672985 - DNA, 499 bp, Homo sapiens
  misc_feature 2, 3, 4, 5, 6, 7, 8, 9, 10, 11, 12, 13, 14, 15, 16, 17, 18,19, 20, 21, 22, 23, 24, 25, 26, 27, 28, 29, 30, 31, 32,33, 34, 35, 36, 37, 38, 39, 40, 41, 42, 43, 44, 45, 46,47, 48, 49, 50, 51, 52, 53, 54, 55, 56, 57, 58, 59, 60,61: n = A,T,C or G
  misc_feature 62, 63, 64, 65, 66, 67, 68, 69, 70, 71, 72, 73, 74, 75, 76,77, 78, 79, 80, 81, 82, 83, 84, 85, 86, 87, 88, 89, 90,91, 92, 93, 94, 95, 96, 97, 98, 99, 100, 101: n = A,T,C or G
annnnnnnnnnnnnnnnnnnnnnnnnnnnnnnnnnnnnnnnnnnnnnnnnnnnnnnnnnnnnnnnnnnnnnnnnnnnnnnnnnnnnnnnnnnnnnnnnnnncaaagtaaaaggcaggatttttgagaccattttagaatmaataataacttttctcaaaattatattaactctttttgaatctgataatattaccaccttacgactcaaattacagaacatcaagccacactagattatgatatttgcttatcagacactcaaaaaatgaatgaattatttgcagtggagaaaatggaatggattcagaaggaaagcagaaggaaaagcagatacaatggttcagagaaatacgagttttgcaaatatcctgtaatccaatatgtgatcttttctctctcctgtatttttagcctttttatgcataggcttcatcttattatctaacatatttggttagaacaattcccttgttgaaagaaaactaaaacctatcatcg

SEQ ID NO: 672986 - DNA, 499 bp, Homo sapiens
  misc_feature 2, 3, 4, 5, 6, 7, 8, 9, 10, 11, 12, 13, 14, 15, 16, 17, 18,19, 20, 21, 22, 23, 24, 25, 26, 27, 28, 29, 30, 31, 32,33, 34, 35, 36, 37, 38, 39, 40, 41, 42, 43, 44, 45, 46,47, 48, 49, 50, 51, 52, 53, 54, 55, 56, 57, 58, 59, 60,61: n = A,T,C or G
  misc_feature 62, 63, 64, 65, 66, 67, 68, 69, 70, 71, 72, 73, 74, 75, 76,77, 78, 79, 80, 81, 82, 83, 84, 85, 86, 87, 88, 89, 90,91, 92, 93, 94, 95, 96, 97, 98, 99, 100, 101: n = A,T,C or G
annnnnnnnnnnnnnnnnnnnnnnnnnnnnnnnnnnnnnnnnnnnnnnnnnnnnnnnnnnnnnnnnnnnnnnnnnnnnnnnnnnnnnnnnnnnnnnnnnnncaaagtaaaaggcaggatttttgagaccattttagaatcaataataacttttctcaaaattatattaactctttttgaatctgataatattaccaccttacgactcaaattacagaacatcaagccacactagattatgatatttgcttatcagacactcaaaaaatgaatgaattatttgcagtggagaaaatggaatggattcagaaggaaagcagaaggaaaagcagatacaatggttcagagaaatacgagttttgcaaatatcctgtaatccaatatgtgatcttttctctctcctgtatttttagcctttttatgcataggcttcatcttattatctaacatatttggttagaacaattcccttgttgaaagaaaacyaaaacctatcatcg

SEQ ID NO: 672987 - DNA, 659 bp, Homo sapiens
cttctgattttcttttcagctgagtttagtttcacatgctatggactctatcacagattacatggaatagtggcaaggggacactgggaaaatgttttctgtctctctgaccctgagttattcatgtttctttgcaatgatctgtaacaacactatgttcttggttttatgagtatgattttttataaaatggctgctcttatattagaatatggctagttttctattttattttaatttaaggtatgtagggttcattttatcataaccttgcatattctgttaacacttcatgctttttataaagagatactcataaaagagaggcttgaatcaattcaaatttgaaggataagaaacaactcattataatgaaagattacaggctatagtcactgaaagaatcctcaactcttcccataaactgagatttgttataattgaggccaagtggaataagaatttagggagggtamctttaaataccccataggttacaaaaatgtagattacctttccagcagaggctcttcttagtgtgcctcaagatactgtcttcctatgcagtgaccaaagacatgcacaagaatgcccataatattattaacaatagtcaaataatttgaaaccatagcattattcattaacattagaataga

SEQ ID NO: 672988 - DNA, 634 bp, Homo sapiens
taatagttaaaaatattttgaacttctgttgtgattaaacagacaaaaataattgccatcatagagctcacatgctagtcaacaaataaaaacaaaatcaaaataaggaattgtttagtgacaaacacaatagaatagagctagagggattatgtgcctcttgggagggtgtttgtacaattaataagatgattccaaaagactttactgacatgtctgggcaaagaccagaagtgatcaagggaatgaacttacagatatctggacaagagargccaggcagatggaacatcaactgcaaagctgagaaccaacgtggaatgtgagcatttgaggaccagaaagcaagccactgtggctaaatgagaatgacaagggggataatgttagatggtgaagtcagagttataatggatggccagtacaggcaaggcattgaagactctgggtttttctttggatgatgtggaaaaccacttgagagttttaaaggctgatatgatctatccatcattgaaaaacatcactcttgctcccctgctgagaattgattcaaggatgaaaaaggcaaggacagaagcacgaagtcctgaggactattacaataatccataagagaggggatgctgactta

SEQ ID NO: 672989 - DNA, 2253 bp, Homo sapiens
gcctctaatcccagcactttgggaggccaaggtgaagggatcacttgagctcaggagctttacaccagcctaggcaacagagggagactgtgtctctacaaaaaaattggaaaaaataataattatctgggtatggtggctcacatctgtagttccagatacttagsgggctgaggcacaaggatcactttagctggggtggtagaggctgcagtgagctatgatctcgccactgcactgcagcctgggtgacagggtgagaccctgtctcaaaaataaataaataaatcagtattaaaaagacaaacacaaattacatgcatagggaaagtaaactaattttgtgtaggcctaattaaaatatgaaaaaacaaatttacatttccaacctttagaacttctacaacatggaatagatatactgaaaaagcaacactttcccatttccgtgtgatcagggagatactcgatgatctttcagaaacattggaaaatgaggacagagattagcagtgttctcagtatacgtctgtgtaatttttttcaaagaaaatatttgatattagtatctggcagatcagtaataaatagatttccacatttgtccccctgttctatcatttctgattagcataatagaaattatagaacaaaaattacaagcaagaacaaatagaataaaatataaccatttatattttattgcataatgatataatctgaattagttctggtgcgcctctagtggaaatgtatatacatttttgtatctgaagtcaggtaagttggcaattgaatacaatttctaagacatgtttttgtgttattttgagtttttctttcagtatcttttaaaagaatgggatacttcttagggtaaattaaataattgcgtgctcattgtttggtgctagatccagaatatgatagacaatgaatagcttattaataatacacaatcttaatcagtggcttcccaactacaatataaaatatatatcagtgtgacaggaactcatttttttaaattgcagaatacctacttccccttcagagattctgattctataatttaaaaacccctcaggatttcattgaaaagaatcttaaggattgattttttgtttgcttttttggttcatttataatgtccctgcatatattacttcatatttatctttttctgggggatattgactattaaatatcaattataagtccccctcacatcacgcatttaatttctaatatctttttacattttaccttttataaaatgtatggaagaaaataattccatatttctgtatagaatcttgttacaaatttaaaaaattaagttatactatgaaattcgaaagtacaattcaggcatgatttaaaaacagtgccacacatattccccccaaaattaaaaataaatgtcaattttagtctttttctaccccttgtggataatgatgctaaagatcgtgacaaattatcaacattccagagaaaggtgcaatgaataagagcatgacccacatgacaagagggcaaggatctaaaatccaggctctgtcacttaataattggtgtgtctgtgggcgattaaccccttttccccctcaactatgcatcagcagacaggaggaaacatccaatttctttactggggtgtcagaagtattaaatatgtttgtgaatggaaagctcgtggtgactcacccggcaaaatgtaaacagaatgtatgtttcctattttagtttatgtagtatttgttagtgtggtaggcctggcgaaaggtttcaaataatttcctgttcgtatattttaaagggattttacatcaaaggagaaattttgagactgatgacttcatattccctgcagcatattcaccctcttttcccatttttaaaagtttttaccccataaaatcaaataaacatgcaggatcatctactttagcctcatctggaggggctgcattcttccacataaatttgtgtcttttgattttcactcataaaaattttgtgtggttaaataccatagtaaatatacgttaagtaaataaatgttccacatgctttttctctctatcatatgttttaaatatgtcatccctaaaatgtgagaatgtgtattgttatataagtggatataaaatgatcccaaaggaacgctttgatgacaattgtctgtacatgtcatgaagcacaagacactaggctttgaggcctgagattgtcatttaaagattcctt

SEQ ID NO: 672990 - DNA, 614 bp, Homo sapiens
ggttattatagtctagctaagtgtagcagtctaagtgatagatcaagttttcatgacattggttctgcctttacaaagtttgtgawccccagtgggaataggtgaaatcaaaccttaagtataggaaataaaagaaatgcatgacatgatatagaaatctatggcatttcattaactgtatcttcagcatttgggttaaaagttgaaataaagatgatcacgatcataatgatgctgctgtttttataatgggaggaggtaagaggaggataagtatcagttgttctcgaaaggaatgctatttactgaattaaaagtttgattgtgttttgagagttcaatgttgtattcctaggtattttattcttctggtggtaattttgaatggaattacctttctgatttggttctttggtttgactgttgtggatatatagaaatgctagtgatttttctacatggattttatatcctgcaattttgctgaagttgtatatcagctggaggagcttttgggccaagattattgggtttcctagatatagaatcatgttgcctacaaacagagatagtttgacttcctctcttcctatttggatgccctttatttcttt

SEQ ID NO: 672991 - DNA, 614 bp, Homo sapiens
ggttattatagtctagctaagtgtagcagtctaagtgatagatcaagttttcatgacattggttctgcctttacaaagtttgtgatccccagtgggaataggtgaaatcaaaccttaagtataggaaataaaagaaatgcatgacatgatatagaaatctatggcatttcattaactgtatcttcagcatttgggttaaaagttgaaataaagatgatcacgatcataatgatgctgctgtttttataatgggaggaggtaagaggaggataagtatcagttgttctcgaaaggaatgctatttactgaattaaaagtttgattgtgttttgagagttcaatgttgtattcctaggtattttattcttytggtggtaattttgaatggaattacctttctgatttggttctttggtttgactgttgtggatatatagaaatgctagtgatttttctacatggattttatatcctgcaattttgctgaagttgtatatcagctggaggagcttttgggccaagattattgggtttcctagatatagaatcatgttgcctacaaacagagatagtttgacttcctctcttcctatttggatgccctttatttcttt

SEQ ID NO: 672992 - DNA, 626 bp, Homo sapiens
tgagatcagctttgtccctggaaggtctgaagccccttcgaataggaacactggagttaaatcaagtgcagtttctttatctgcaaaatgagacaattggacaaatgtggtcctcaagttctcttctacacaaaactttctgactctgactggctgctgggttctcctctttatgcaaactcaggattgtgaaagctcccagagccttctccccttcagcatcctattcctgggatgggcagakggcatgggaaagagacagatttggtattccagtaaagcaagggaggcttttcctctgttagcctgtgtcagaggggactccctagtatctggtgctccatctgtcagtgagtctgcccagaggggcagagctggtcctgagtcacctacctgttgctctctgaaggacttccaccacccctgccgctttcctcccaaagaaaaatggccaaagccaacactagtgtacaggctggaggggtgcacatggagatcctgggagaaagagaaatccttcagggtttcaaggtggtcaggaaaggcttcataggcaagaaggagaagggaaaagagtgggagaggaaggagagggttggaggaggaacttcaacaggtcttaagga

SEQ ID NO: 672993 - DNA, 626 bp, Homo sapiens
tgagatcagctttgtccctggaaggtctgaagccccttcgaataggaacactggagttaaatcaagtgcagtttctttatctgcaaaatgagacaattggacaaatgtggtcctcaagttctcttctacacaaaactttctgactctgactggctgctgggttctcctctttatgcaaactcaggattgtgaaagctcccagagccttctccccttcagcatcctattcctgggatgggcagatggcatgggaaagagacagatttggtattccagtaaagcaagggaggcttttcctctgttagcctgtgtcagaggggactccctagtatctggtgctccatctgtcagtgagtctgcccagaggggcagagctggtcctgagtcacctacctgttgctctctgaaggacttccaccacccctgccgctttcctcccaaagaaaaatggccaaagccaacactagtgtacaggctggaggggtgcacatggagatcctgggagaaagagaaatccttcagggtttcaaggtggtcaggaaaggcttcataggcaasaaggagaagggaaaagagtgggagaggaaggagagggttggaggaggaacttcaacaggtcttaagga

SEQ ID NO: 672994 - DNA, 1210 bp, Homo sapiens
ccactgtcttgtccttcccagcctagctcctcctaaggctggcgatgaattccccaaattccagtttccttttttttttttttttttttggtgtctcgytctgtcgcccaggctggagtgcagtggcacgatctcggctcactggcaagctccgcctcctgggttcacgccattctcctgcctcagcctcccaagtagctgggactacaggcgcccaccaccacacctggctaattttttgtatttttaatagagacggggtttcaccgtgttagccaggatggtctcagctagtcttgatctcctgacctcttgatccgcccgcctcagcctcccaaagtgctgggattacaggcgtgagccaccgcgcctggccttcagtttccttttcacactccaaaatgccacttttcctctctagttcacgacaatattatcaactatttgtttcctatgatccattttgaatgggtactgttttgtcatttgtttcaatgagtaatggatggcaacttttaaaacatttgatttgtttctgaacactttacataaaagaaaagcagagaataaccacctgaccactgtataaaatcttcatgactctcctccttttattttacctaagcgcagacatttcatcagaatgtctttgggctgagattcctctatggaaactgtaaagagtgatgtatcctcagccaccctcttgccttttcctggtcctgggtttcagaactgtctggcataacccaagatgcccacagtggccttatcttggagtgtctgatgaatatctgacctgggtcatcttcttccggaggacagactgaggtatgggagtgtagcttctcagtggagcagctggttctgtgctgaggggagtcttccgatagacccttcatctaaaatgctaaccttttgggatattaacagagaagggaaacccaccccagtgacgtggtgaaagaacctgcaaagcaaaataagcactttggacacacagggggcacagtacacttgggggagcagtcactgagcattttagtgagcagggtgagggttggaggacattccacatgtcaggatggcctgacgacgtttcagcataactgtgttccagtcagtaccacccctccctgtgttgtcaccttaaaaagatttgtttgagcctcattcctttattaaatgtaaagtgtatttcatcagtaga

SEQ ID NO: 672995 - DNA, 613 bp, Homo sapiens
ttctttagcacattgttcacattgttttctttgcatgcctagcactcattctacatatagcatgtagtgtactgaattacagttgacattttatgggattgtctcatatgataagtgatctttgtcaggcgaggccagtgattacagcttattcatgttagtatccgtgtcatgtgtcaaagtacctactcagcagtaggactcagttacatgaatcaatggatgaatcattccattagaattcaaccatcatgaattcagaaaatagagaatcagaggtttggtttcctgaaatcagcttctgtcctactgatattgatctaactgatcttactgatcctgtctaaattatygtatatcaaaaaggatgcaggatataagcatcctctgcatctaaagattcaacaagatgtatgactcatccagtccacagtaagagctgcatgatatttagataaagccctctgaaaatagtggagacaatcaataatgctgtctttctttcagcctaccatgtcttagggctgtacaatgcagcaatgcaaagagtactgagtaatctcagagaaagcacatttcaatcttcaatttctttctctattagagaatctta

SEQ ID NO: 672996 - DNA, 643 bp, Homo sapiens
aaaactttaagagtaaatatttatctgtccataatgaggcccagagatttctggaatctgcatgttccagaagaaagtcaatcatttcaatttagttttaacaagaacyacctaaactgcctattgatttttgtcttcacaatcaactacatatagaaaaggaagattggactccaacatgggccttagcactgctggcttcatgagcttctggaaaaattcatactgcacaacttaagtctgatattacgttaacaggccttacagtcaagtcttcttcaacgtgaccttggttttccttttcagtcacgtcttctacagctgttctatagactctctccttcaaccattctgaccaatacacaacataataccatatttatttcttagagcagagacctctgaaagttgaaaatcatctttcaattgaaatttgaaagatggatttgatttcagtggacaaaattctcagggctttctgaaaattcccaagaagcatcattgtcatgtcattgatcttctaaacgagaatgaaatctgcatgctcatgagaaaccacttccaacctcagacattgcccatggatcacagcattgcttcttcaaggctcaaacatatttattatattacatgtggggcttat

SEQ ID NO: 672997 - DNA, 1187 bp, Homo sapiens
  misc_feature 673, 890: n = A,T,C or G
ggcttccatatatcttcgaagactttccagttatttttctccagggaattctcaccagcctggaaagagtaggtatgtttgcctaactgaaaagaaggagggtatctctggtaatttaatagcttctcttataatcttttaggagttcattttgttttcggcacagtttaaagagtttccaaacactactgtatccaggacttttcctggatactgaccatgattaatcttcattttgttgccatcattccactgtaggcacttatgtttcaactttctcctttctgtttaatcattttgcatttttcccatctacctaaaactctttaaattgctttgctgtggtctacttttccattccattagacgtgtagggttcatagctttaactaaaatgtatttgtccctttctattgtttcattagcacagtagtatacaaaaatgtgtgtgttaaatcttccatataatgcaaatatgtgcaatgtaattgtggcagagaggatactgcaccccttgcaaagatgtctatgtcctaatctccagaacctgtcaatgggttactttacacagaaaaaaagaatctgcaaatgtgattacagtaaagatcttgagatgggaggataaacttgaattatgcaggtatcagagaagaaggtgtgatacagaaacagnaatgggagagagaacaaggagaacagggagagagagggagagggagggagtgggagagagacagagagagagagatgctaccactggcttggctttgaaattggagaaaggaaccacagacaaggatgcagggtgtctctaggaagctcagaaaggcaagaaaacagatgctccctgaacctgcagagagaatgtagttctgacaatatcttgattntagcctgtaagaaccatttcagacttctgacctccgtaactgtaacataataaatttatgttgttttaagccaccaagtttgtgataatttgttacttatgaaataagaaactaatcagtaatattaactttttaaaaggctgtcataaaatataatgtatatccacacaattctgtatttgcttaaaaatctatactcaaccaaatacamacatatatctacaaacacctgcatacacgtaaaataagaaagtcagaattttattcatcgaaataataatgtactgaactctgagt

SEQ ID NO: 672998 - DNA, 653 bp, Homo sapiens
taatggtgcacacacacacacaaagggcaatagcctcagaagataaaagctgaaagtggaaatgattgaagtccaaaacattctgagggatgtgtatacagtaacttcagatctttttatttgatctctaattactagaataagggtgacttttcacacttgaaagtgattataaacatatgaaagtcatttcccagaaaggtgatgttgttcaagaatagttcagataaattaattgatggcagatgcatgtcagcttgtcaaaggaagttagaaatcttcaatgtaacattttgagagctcacttactggaatgcgtaaatgattgatctgctccaggatgasatttttctcatattttcacaattttactggtaatagagacagttaatgtttcttgtcaatttattccaataattttgtggcagcaaattatttgttacactgctagagagtcataatcctagtattttcctcccaaatccaaaagcagcctttaaaggagagtaaagactcagcatctcacaggtgccagggtcttatttcttgagttaatgtgaaggaagtagcttctctcgtgtcatttgcgtttttgagacctgacattttctctgctctagcctaagagcatgagcagttttccttgggaaaga

SEQ ID NO: 672999 - DNA, 1714 bp, Homo sapiens
tctataatgttgaataaaaaattttcaatatatttataattattttaacaaattattataatatccattcatagaaaatttagtttactaggatgtcaattttaaatatctgaagcaaagttcaagtaattttttcaataaactattttaatggctttayattcatattattttaagattatgttatccagggtgtgttatatgcaaatacaacagtttgtagctcattgtctcactcagaatcatactttaattatgctctaaacatattttgtgtttctctttgctagtcgaagaaagcaattacactttaactgttcctttttgattaaataataatcagaatgtattaacttgtttaaaaagttagattactcaacctagtgtcatttagagagtggagataaatgagtcaggttccagaaatcattttcagggcttagataacagtaaaacttcttacaatgaaaccaatcaacagaagtttcagtttgaaatctaggtctccatgactacctctaaaggcggtatgactccaaaatgatcctttacaatttaatcttcaaaatgagtaaggtctgtattttaatatctcctgtgaaaaaacaatatgtatagcaagcacacaaggggaaactttacaaattaatttatgttttagaacaaatgtcacacaaagtacatttttgatactatcctgaaaggacaaacatcagcccttgaacaccatatgtggtctgcatgatggcttcttggcaccaatccatgatctatttccagcagtcaccatttcaaaaatttatgaggacctggaaagcacagaagggctaaagaagccacttgagttctgcttattagcatactcattaagcctaatcaataattgatgaaccatttgtggaaaacatatggattaaattatatcttggcttataccattctgaaaagtcataagtattttgacccactgtttgctgtgtaaacgtgttgtcaaaactgattccataatagataattgaaaaaatttgagctttcatctccacaggccaaagctataaattattatgccatattttaacaaaatattttaaaagaatataatacagaagctattggcatgtaaaattattaggatatgatagaaacttttgaaaaattttcaaataatcctttagtagtgcttgagagagggaaataaaggacactcatgagcaagttacagtgaagatttaaaatgttaggctacccccaatgttaaagatactcttatgacactgatcttggggtggttttgagctaaaaaattcacatattttgtgtgtgattataagattttagaatcagaatatttttttaaaaaatgttgattttagaatagtattctatttacaaaaacactgcaaacacagtacagtttccacacaccctacactcaatttcccctattattaacttcttagattagtataggacatttgccataattaatgagctgatattaatatattatcataaactaaacttcatactttattgtgattttaattctacttgtcttctttctttttctaggattccctccaggataccacattatatttagatgtcatgccttattaggcacctcttggctgtgacaatttctcagacttttctcattttagaagaccttgatagttttgagcagcattgctattttatagactgatcttca

SEQ ID NO: 673000 - DNA, 796 bp, Homo sapiens
caactcctatgtgagaccttttctgaacactacagtcagtagggtctcttctgcctctgattttttgtagcagatgtagtatgtttcttttatataacattttctcatcttatgcctttattaattttcattatatgtacagctttttaaactagattttgaactaactagtaattgcaattttataactttcacagaatttaatgcacaagataaatgttaaaagcatgctcatattttgagaagccacaggagtcgccctttgtaatatataattgagattggagcttgagtctcaacaggaaaagtaacagcraaaactacagtcgcttgccaaaaaaagaaaaaaaaaagagagagagatttcagaggaaactatctcaagtgagatatcaacatgttaagtcatttcttgatattgatatttctacaagcttttgcttttcagacttacattttcagtgcatcataagaaagggtaaggtcgttttgttttttcctggtagatctgggggaaaacactttacataaaatatgactgggacttcataaattctcaaaaagttgcaagggtaagttcacctaaactctccaaaccagtactgtgagctaaagatggcatatgctataaaggaaaactttgcaaacttttgcaaaaagttcaacagttgccacacacacaaaaaaaatacaggaaagagtaaaacttagaaaattgagaggatgaatccaatcattttggaccttaggtttcatgttaacaatcagaatgtttagcagaactcagctttcataa

SEQ ID NO: 673001 - DNA, 796 bp, Homo sapiens
caactcctatgtgagaccttttctgaacactacagtcagtagggtctcttctgcctctgattttttgtagcagatgtagtatgtttcttttatataacattttctcatcttatgcctttattaattttcattatatgtacagctttttaaactagattttgaactaactagtaattgcaattttataactttcacagaatttaatgcacaagataaatgttaaaagcatgctcatattttgagaagccacaggagtcgccctttgtaatatataattgagattggagcttgagtctcaacaggaaaagtaacagcgaaaactacagtcgcttgccaaaaaaagaaaaaaaaaagagagagagatttcasaggaaactatctcaagtgagatatcaacatgttaagtcatttcttgatattgatatttctacaagcttttgcttttcagacttacattttcagtgcatcataagaaagggtaaggtcgttttgttttttcctggtagatctgggggaaaacactttacataaaatatgactgggacttcataaattctcaaaaagttgcaagggtaagttcacctaaactctccaaaccagtactgtgagctaaagatggcatatgctataaaggaaaactttgcaaacttttgcaaaaagttcaacagttgccacacacacaaaaaaaatacaggaaagagtaaaacttagaaaattgagaggatgaatccaatcattttggaccttaggtttcatgttaacaatcagaatgtttagcagaactcagctttcataa

SEQ ID NO: 673002 - DNA, 651 bp, Homo sapiens
caaaactttcataagtctatgttgtcttctggcaaagaattttagcttccttgtcttacttggggattagaaattaatttcagctgtgggatttttgctactcttagttctatttagtgcctatcccagacctgtgaggcccaacaggtagcagggaatataggaaagagtagatcactccagactgggagtccctccacggtgctcctgcatcctgctctgctctctgcagtggtgaatctcaacctcaccttcctgcactttcctgctccggctgcctcctgggacttcactcctcagctgtcagaactgcaacagcttccaaactccctcccatctcccagacttttcctagtcctaaaccttccaaacaactgttccattgcttcttgtattccaacataaaataacagtttatggttgaaaataactgccaccctckcccccccaaaattctagaactaaaaaaaaaaaatcaaaattgagatttaatttgtttaaaaggtgcacactgttttactatcggttttgtggttatcctagagatttactcatttatgttaacatatttaatagcagagtaaacacagctaaagagaaaattagtaaactagcacataggtcagaaaattttatcaagaaaaatgcata

SEQ ID NO: 673003 - DNA, 637 bp, Homo sapiens
tcagagcagctgacaggtgtggcatctgggtaaccattgtgtaaaccagaaccacacatccaggggcatctctgcaggaagatgtactcaatgtccggtttctgaccttggaaattatccccaaatgttaaaaaaaaaaaaatagacaagatagcactaatgactgagaagataccctgaaagtagatgcagagctgctacatgcagaggaaggaaactgatcatagctctgggatagcaaatgagcaaatgcttacagccagacactgaacttacgtgtgccaggaaactgaggcayagaaaagggaacaatcttgccctcatccctgaactaccaagtgagctgtcgggatttcctccctggggaacaagtactaagaactaagaagtctgtgtcaggcattgatatttttatgcagcacacgagatggtaactatttctgttatcatctctccttcacttttcccttctctccatatccaagaactacagatgacagttctccttttattcctacactttcacccagattttgtcatacataacagatcatactttctgaccaatcttacctgattgttttttaggcgtactttattagttgcattttgtcaaagtcttttcagacagaatata

SEQ ID NO: 673004 - DNA, 637 bp, Homo sapiens
tcagagcagctgacaggtgtggcatctgggtaaccattgtgtaaaccagaaccacacatccaggggcatctctgcaggaagatgtactcaatgtccggtttctgaccttggaaattatccccaaatgttaaaaaaaaaaaaatagacaagatagcactaatgactgagaagataccctgaaagtagatgcagagctgctacatgcagaggaaggaaactgatcatagctctgggatagcaaatgagcaaatgcttacagccagacactgaacttacgtgtgccaggaaactgaggcacasaaaagggaacaatcttgccctcatccctgaactaccaagtgagctgtcgggatttcctccctggggaacaagtactaagaactaagaagtctgtgtcaggcattgatatttttatgcagcacacgagatggtaactatttctgttatcatctctccttcacttttcccttctctccatatccaagaactacagatgacagttctccttttattcctacactttcacccagattttgtcatacataacagatcatactttctgaccaatcttacctgattgttttttaggcgtactttattagttgcattttgtcaaagtcttttcagacagaatata

SEQ ID NO: 673005 - DNA, 947 bp, Homo sapiens
  misc_feature 847, 848, 849, 850, 851, 852, 853, 854, 855, 856, 857, 858,859, 860, 861, 862, 863, 864, 865, 866, 867, 868, 869, 870,871, 872, 873, 874, 875, 876, 877, 878, 879, 880, 881, 882,883, 884, 885, 886, 887, 888, 889, 890, 891, 892, 893: n = A,T,C or G
  misc_feature 894, 895, 896, 897, 898, 899, 900, 901, 902, 903, 904, 905,906, 907, 908, 909, 910, 911, 912, 913, 914, 915, 916, 917,918, 919, 920, 921, 922, 923, 924, 925, 926, 927, 928, 929,930, 931, 932, 933, 934, 935, 936, 937, 938, 939, 940: n = A,T,C or G
  misc_feature 941, 942, 943, 944, 945, 946: n = A,T,C or G
gtcgattttctgttttaagcaggtatcaaacaggcaatcaacactgtgcctagtatcgaaccagaatgcccgcaggatacaagggagactgttccttaaggattgttaaatcaggagggagagtataaattagcgtgcatgygcaattcatatatcattacaagctaaattttgatttttcctaaagaatgacagttgctctgtgaaggctgacatagttgaaaaagactttttggaggaagtgaagcttgatctgggattagtgaataagtgggatataagtatcaaaattaggaaattttgacaaggatagctgacaactagaagttggggtaatatggcctttaggggatgagaagccccacgatgaccagtgaaaagtgttcctggtccccttataggaaacgaagtagggcggaattagaaaacaaagaaactccatcttcctccctacccaccctccccattttttgtcaaacaaccaaactctcccacttgagtgtttcatggaagaatggttaaaggcaggaagaagagagaagaaaagaaaaggagctgagctacaatcagaaagaagaaaacaagctagagagtgaagatatctctatgacccccattccctaaagaaggaactgtctcctctctcccaacacagatgtggggaccgaggccctggaaggcctagcaagctcagggtgggacatgtgggggctgggggtctctctggagcatgcaggcattgttttatgccatgcttgaattctgaacaaccaaacgctgtcagaaggaagctggcatgttgctccactggtaactcaattccacactgcagatctgccggctagtnnnnnnnnnnnnnnnnnnnnnnnnnnnnnnnnnnnnnnnnnnnnnnnnnnnnnnnnnnnnnnnnnnnnnnnnnnnnnnnnnnnnnnnnnnnnnnnnnnnnt

SEQ ID NO: 673006 - DNA, 509 bp, Homo sapiens
tgtggcaagttcccattggaagagacaggcacttgtagcagaagttctcagaggaaggtctgggattgctggagatgagcggccaattctagggccagggcagaactggtctgagcaaatcacctacctgtaggcaatttccccagtgaagcaggcaagggctggtcttgagttgaacagaggtttccttcaaaggccacagtggactcagctcaaatagacagcccttcagtgcacaggctacagggtgagagatgttgcttcatttccttttgtcctgttccttaacccagctggtggattgccgtggtgctccataagaaatagatttagggccaggcgcagtggctcacacctgtaatcccagcactttgggaggctgaggtgggcagatcactaggtcaagagattgagaccatcctggctaacatgatgaaactctgtctctactaaaaatacaaaaattagmtgggcatggtggcaaacgcctgtagtcccagctacttggg

SEQ ID NO: 673007 - DNA, 1299 bp, Homo sapiens
tgctatccttttccccagattagacttgaagaaagtggctcttcttcttcctgacctccagaagacttagctcagaaccgagcccgcagcagatgctcagtgctttgtgaacatgtcttgattcatcagcaagtgcaggataagaactggatgtgacaacatctgagagctcagtgaacattagactcgccttgttaataatttactccctttgtcccctagtttcctgctcatccctctatttctcctggctcttttcagcttcaattcctctcatttgtccacttcttccctttgtccagtaaaccacatgggctgatcagggttggagtagagagtgtaggattgtctattttctcttggaactgatggccatggtgaacaccttgcttgccatatgatcaacatggctctatgaggcagttaaaactatgtagacaaaattttttttgtcagataaaatgaggataaaaatacctcctcatcaacatatagaggaactatggaattaaatgaataatgagtaatgggctaagaatataggattggatgtaccagaatcacagtgcaactgcctcatggaaaagctgggcattttcatcttaagggatgatccagaagggcaaagtttaaaacaaaggaactgattcaagtgcaatattttacattgtgtaaatatctgaaggaattcacaaacggaccacaatggctgcagagacacagtggtaaagtgcttaataaattggcgaacacgtgttgtgccataaatgttagtgcatraagcaagttatgattatttgtttccctttgtgtttttctaatcaaagatttaaaaatcatgggagttttgagcatcatgagataacaagtattgtgatacaggtccaccattccttttccaaaaactttggtattagatgtgttttggaaatcaggatttttcagattttataaaggtcatctggatcatatgttgtatattgtatactactaccagtgggatatgggtcagcaccctacaatcaaacacagaaatatttctgcaacacaacgtgtaaaatataaaatctacaaatggactcacctgagttcagattgagttcactgccaaatgagttctgataaggtcagattttggccccaaattattaatcgagaacttgcaattttcagagcttttgaacttaggaatacagacattgtgtacctgtcctattctacatcattttctttaaaaagaggtagtctttttgaaagtttctattaaacttttagagatgtaaaaaatagtgggtagta

SEQ ID NO: 673008 - DNA, 1486 bp, Homo sapiens
agaggttccattctaagctataggccatttcatttactccccagtgtgaggcatgacatcttcccactaattaatggtggccctccttagtgatgagttgctatctggattcccacaccatctggagaggagtctggacactggagtttctatttttaccaggctctggcattgcacttacattccatttcaactgagccagaggccacagaaaacttgaatcatgctctttttttttccttacctaaggccactattaacaggataaagggctttttgcaccctgctatctgttatacagtaagggaagagcaaaacagaaggcagctttcgaaaaaaaaaaaaaaatctttggtgtaaacacccagcttctggggccagttccaccttgtctgaaggaaggctgtagggaagtgattttgcagttaggaggctgcatgaattgcaacccagttaaaaacagggcagtgctaataacccataatgggtcattcttggagtaaggggaaaagagaggcaggacagaatgggaacattcgggagttcggtcattaggtaaagctgccacatgcctggaaggataaaataggaagagcaagcacattggcggctgcacaagtggcctcagggaatgtcctagaaaaggagaaccagccacaaccctcagctttccagagtgggtgtggagggggcctgcacctgcaacagtgatagaagatgcctagggggaagggggcacaggctctgataagctgtgtctttatcaagggccaacgtcacttggctttggctctgttaataatgccaaatctatgtgggggggaaaatggttaaaaataaatgtgttcaagtaatgagcttactgaagttccagtaactcttggctcatcaagattcttgtaccaggtagaagcaacacaaaaaagaaagccttgtaatacttttcatagcaagtaattattacccaccagctctggagctggggtaccagagttcaaatccagttccatctctcacttgttccatggccttgggcaagttacttagcctctcatgcctgtttcrtaatctgtaataacactaatgtcttggtatcctcctagcatttttggaaaattaaatgagctaatatatggaaagcgtttcgaaagtactgggcatagagtggacacgcagtaagtattcagtcttgtattacccagagtcttggtctcccttctctaagacaatgttgtagcgtagtagacaagtgatttgcttcatctttaaagtgggaataattcccaccttgtagatccaaaccagaaatattaattcaatgttaacttactgtctagctcataacactcaaaatgtaagaaagcacaattaataaccatactgaggcaataggtgtaaattgagagtggacaaatgaggaaggcgacttcacgtgaagagccaggtaggcagaggtgagagccccattcttggtcgtcacagtggg

SEQ ID NO: 673009 - DNA, 2390 bp, Homo sapiens
tttttccatgtatataatttatacacattaacaaaaaatgagaaaatatgacaaatatttaacaatagctayttctccagtggcaggattacagataatttttattttcatacatttctgtctgacttttccaaatgtgctattatgagcataaattttataattaaatacaagtcaataagcattttaatgtgcctataacagcccatcagcaagtgaagagatgagataaaaatgtgtctgcacttggtacacatattgactttcttttccttccatttccagatgatattgacaaagatattgaaaaaatttgattaatatgcctcagcttagatttgctatgcgagaggaaagtcttattgttttaaaggaattatttgctgatcagctataggctgacttgacctcatattcctaccatgatagtcccacagtgtagggatggggtggtatgactcccaagacttggagtatgttattttctcagggcaatgaagatttggaaaaatgatggcaaagacagaattactatctcatcaaagacatccctcagcagtatctgtgggctgtgcagtgttctcagttcgataaaggattagaacacaatgcttctttggagagctgtgacttgatactgcatcaatacctttctgagaattgtttttcattttcttgcctctttaacttcttaagccttaggagaattagttgaaaagccaagtctttggggtagatactaacattaagtcttctactctgtcatttgcaatcataaattccagaacacagctcctaattccattgtgtattgttttctaagggaatgatagacagattctttatttttttaaacctctaagcctaccacacttgccgagttcctcactagtcactaagaaagtcctgccaatcaatgcatgggtttatgtccattgctcagctcttctccaatcagactcattcccccagcatccctgacacaccactctaaaatgcggctgctgatggttcaccttcctcacttttgtctacaaatctcaatcctgctgattccacaaatcctacatcaagcaatatcattttatgagtctttccacaaccaccccttcaggggattcttcaatttctgtcacaccggaagtcttcagagtatcaccctcagagccaggcaagagggaccccggctagggtttcaggctttagagagtccagctctgactccttttggccataggactaatgtgatatgcccacctggagcctgtgccctcctttctagaccatgccctgggactcagaatcccttgccccagatggccacacaatcactttcaggtccattctctctgggcagacaacatcacaaatgtgtgtaccccaaggcctgaggccaagaaggcagctttctggctgtaggggctgaggtgttcacacacatttgcatggcccctcaagacaaagaacaagggggaaagtgagaagaaaagaagcagccagtgatcagggccagctcttgcaacttagccatgttgggtcattctgattaaaccacttagctcaagtgtagtgctcaagacacttagcacattctccagctgaatttaccagtgttcatggactacctgggttagaaatatatttcactataaagtagcatacaaaatgagcagaaagggagttaataagattaataatagagttagtgaatattatgagctgagtttttgagaaacgtaatttctttcacaacactaataacaaccttgtgggggttcattgtctccctttaaaaattaggaaaccaaggctttgccatggtcgcataggagggtcagaatagcatctttatgaccccagagcatactcgtctccactccacctacccatgtgtacaactcagacactttctgggatgtccacgtcaactattctttaaagagtaaccaacagatggatagttttctgtttgtgaatcaatggtaggtgactgaaaaattggttctgagaggtcgttttgcaaggattgatggtcacaggctgagaagcagatttgaaagacctacctgctagcagcatgaagagctgctcttccttatcttagtattaactagttaattattggaggtgggtgcaggggtggattatgtgtattcttaattgttgtagagtggggactgggagttacaaagacttttgcaattttcgaccttgcagagctgagcaattttcagttgctttgcttgctgatagcactgcttcccttatctaccatggaacacatcttaatgaagaatttgcattcacagcatcaggttaatgaatacaaaacaaaacagtgtatatccctctgatggatgggatttcggaagcacagacattatacacat

SEQ ID NO: 673010 - DNA, 2390 bp, Homo sapiens
tttttccatgtatataatttatacacattaacaaaaaatgagaaaatatgacaaatatttaacaatagctacttctccagtggcaggattacagataatttttattttcatacatttctgtctgacttttccaaatgtgctattatgagcataaattttataattaaatacaagtcaataagcattttaatgtgcctataacagcccatcagcaagtgaagagatgagataaaaatgtgtctgcacttggtacacatattgactttcttttccttccatttccagatgatattgacaaagatattgaaaaaatttgattaatatgcctcagcttagatttgctatgcgagagsaaagtcttattgttttaaaggaattatttgctgatcagctataggctgacttgacctcatattcctaccatgatagtcccacagtgtagggatggggtggtatgactcccaagacttggagtatgttattttctcagggcaatgaagatttggaaaaatgatggcaaagacagaattactatctcatcaaagacatccctcagcagtatctgtgggctgtgcagtgttctcagttcgataaaggattagaacacaatgcttctttggagagctgtgacttgatactgcatcaatacctttctgagaattgtttttcattttcttgcctctttaacttcttaagccttaggagaattagttgaaaagccaagtctttggggtagatactaacattaagtcttctactctgtcatttgcaatcataaattccagaacacagctcctaattccattgtgtattgttttctaagggaatgatagacagattctttatttttttaaacctctaagcctaccacacttgccgagttcctcactagtcactaagaaagtcctgccaatcaatgcatgggtttatgtccattgctcagctcttctccaatcagactcattcccccagcatccctgacacaccactctaaaatgcggctgctgatggttcaccttcctcacttttgtctacaaatctcaatcctgctgattccacaaatcctacatcaagcaatatcattttatgagtctttccacaaccaccccttcaggggattcttcaatttctgtcacaccggaagtcttcagagtatcaccctcagagccaggcaagagggaccccggctagggtttcaggctttagagagtccagctctgactccttttggccataggactaatgtgatatgcccacctggagcctgtgccctcctttctagaccatgccctgggactcagaatcccttgccccagatggccacacaatcactttcaggtccattctctctgggcagacaacatcacaaatgtgtgtaccccaaggcctgaggccaagaaggcagctttctggctgtaggggctgaggtgttcacacacatttgcatggcccctcaagacaaagaacaagggggaaagtgagaagaaaagaagcagccagtgatcagggccagctcttgcaacttagccatgttgggtcattctgattaaaccacttagctcaagtgtagtgctcaagacacttagcacattctccagctgaatttaccagtgttcatggactacctgggttagaaatatatttcactataaagtagcatacaaaatgagcagaaagggagttaataagattaataatagagttagtgaatattatgagctgagtttttgagaaacgtaatttctttcacaacactaataacaaccttgtgggggttcattgtctccctttaaaaattaggaaaccaaggctttgccatggtcgcataggagggtcagaatagcatctttatgaccccagagcatactcgtctccactccacctacccatgtgtacaactcagacactttctgggatgtccacgtcaactattctttaaagagtaaccaacagatggatagttttctgtttgtgaatcaatggtaggtgactgaaaaattggttctgagaggtcgttttgcaaggattgatggtcacaggctgagaagcagatttgaaagacctacctgctagcagcatgaagagctgctcttccttatcttagtattaactagttaattattggaggtgggtgcaggggtggattatgtgtattcttaattgttgtagagtggggactgggagttacaaagacttttgcaattttcgaccttgcagagctgagcaattttcagttgctttgcttgctgatagcactgcttcccttatctaccatggaacacatcttaatgaagaatttgcattcacagcatcaggttaatgaatacaaaacaaaacagtgtatatccctctgatggatgggatttcggaagcacagacattatacacat

SEQ ID NO: 673011 - DNA, 1541 bp, Homo sapiens
  misc_feature 1058: n = A,T,C or G
caaacggataaatgaagacagtcttaaaataaatcttaatacctattcatccaaaaagcaaaagacactttgcaaactattacaatctacctcatttagcccgctgaagacaccaattttctttgcactacccactccatttctcaagagacattaacaacacaccatgattgaaaaactagggtgttatgtgtttaaagaaagaggtttaaaatattttattagagaacacatatcaatattgaacaacacttaaatagatggcattcatattaataaggacaatataaattcttataatttgaacagtcagtttgttcaacaaataaaataaattcatttttatcagtgggcatgatccatgaagtatattttttcaataatttattcatctgcttagtactatatacattcattttctttgaaaagaaacataaaatcaacgtgattgtttatctcatcacatcataaacagatggacctgtaaaaatggcgtgtagaaaattcagaaacacttaaacagcacattccaaggatactgagtccatttaagagaaattaaactctttgaagccattgtagtcagcctgggtgtcatatatattcattgatacaaaatgttgccacaaattcaagtataatgattcacacacataaatatattattctgacacagaagagaatgctcccttgaatagtatagcgtgcataccaaactctcagcacgattcagattaacttttttttttaaatggaaggaaaggtaatgacatcgtcaacttagtcgaccaaataccaaacctggagaaggtggatgtggttcacaaacactgcacagttagaaagttgcaccttacatggaatcttatttgtcacaacaattgttaaaggttacagaaaaaccatagcagctaaaatcagccagtcagcccacatttgcttctctggcaacatggaaatgctgtgtttgtattttaaacaaatgtaacaaggagacaagcagaaacgctgcagcaagccaggaaatgtcaccgggttcatggttaaatggcgtcctnttatttactaaagtataattttaatttcacaggcaaaatgaacctccagatttgttttccttagccccagcaagtcaagtccttcctaactgttagttgattgcaaaagtgcagcttcaagtctgtcccttttgctttcatttcccccctgccccacctctgctccatcaggtttgtaacacaagcagacactctttcatacgcttcaatgtagcgtgasgtgtgacccttggatggtgtgaaagccagcctttggggatattatagtgattcagttattttctgttttttctttttgttgttgttgttgttgttggaaaaacttgttttttaaaaacatgctgcataacatcttcttgctaaaaacaatttctcaattagtaggaacactgaattgctttgtatatgatttgcttgttaagaagtccaaagcatttggttattcttaagaattaagcacttccattcttgggcaaatattta

SEQ ID NO: 673012 - DNA, 1282 bp, Homo sapiens
tgtaggaatgacaggacctgagccgcggtgcagcaggtagtttgtgacctgctttctaattacagagaaatgaatgtcttcaggtggggatgaccagctcctggaaatgtaaacctgaagtgagataaagagcaaaggaaagtgaaggacttattttctctcttcctgcacatggcactttcagtgcttgaagatactttaaaggtgatctaatttttagttgtgtcttattcagatggcatttgagaggggaaatgaagatgggaatagagtgctagcatttatagggggcctactatgattttatagctttatcacctcataaggcatttcatgtacacaattgtatctgctaatcccatttcacaggtgaggaaaatggctcaagagaggtcacgtgatttgttcagggccacttaaataggtacagagatgggaactgcaatgaagcccaggcccgtggytcccagtccatcatcggtcttctctcaacaccattttccaggtccttccagtgcccttcctagcatgggcattggggtggagttgggaaggtcacgtttagcaagctaagaggtgagcacaggagaacaccaggagaacacacaagagagcgcagctctttccagtatttctctttttcaaaactccctgcagacttgacttacttgcctcttctcatacccataatgttgtatttattctctgggaaaatttttttttgtaatgtgactatgaaatctcataccttaccatatcatgtgcaaaaacttggcatgtagtggatactctgaaaatacaatttttactatttaaactttatctttgtaaatcatcatggatgcattataggcagcaaaatgatttcgttgtcaggaatattggattaagtttctgtgttaatactggagagtgaattgcttgtgacttgttatacccagagataaaaatagtttgttttctctcacatctgatgaagaaagcatgtgtttttgattcagctttaaatactgaggcagaatttctgttgcacaaatgtcagctctcacttgttgaagtttaggtatcagggttgcatatggtattcagaagaggaagacggggccagataagctgctgggaatggagatgaaagcaagcaagggacctcagtttttattcaattacttcccaataaaagtatgactctttttttttaaagtatgtagaaaactagcaatggattgttatttaaatatttgtaatgcttgctttgatcttcaaaatacttcacagaagtact

SEQ ID NO: 673013 - DNA, 1282 bp, Homo sapiens
tgtaggaatgacaggacctgagccgcggtgcagcaggtagtttgtgacctgctttctaattacagagaaatgaatgtcttcaggtggggatgaccagctcctggaaatgtaaacctgaagtgagataaagagcaaaggaaagtgaaggacttattttctctcttcctgcacatggcactttcagtgcttgaagatactttaaaggtgatctaatttttagttgtgtcttattcagatggcatttgagaggggaaatgaagatgggaatagagtgctagcatttatagggggcctactatgattttatagctttatcacctcataaggcatttcatgtacacaattgtatctgctaatcccatttcacaggtgaggaaaatggctcaagagaggtcacgtgatttgttcagggccacttaaataggtacagagatgggaactgcaatgaagcccaggcccgtggttcccagtccatcatcggtcttctctcaacaccattttccaggtccttccagtgcccttcctagcatgggcattggggtggagttgggaaggtcacgtttagcaagctaagaggtgagcacaggagaacaccaggagaacacacaagagagcgcagctctttccagtatttctctttttcaaaactccctgcagacttgacttacttgcctcttctcatacccataatgttgtatttattctctgggaaaatttttttttgtaatgtgactatgaaatctcataccttaccatatcatgtgcaaaaacttggcatgtagtggatactctgaaaatacaatttttactatttaaactttatctttgtaaatcatcatggatgcattataggcagcaaaatgatttcgttgtcaggaatattggattaagtttctgtgttaatactggagagtgaattgcttgtgacttgttatacccagagataaaaatagtttgttttctctcacatctgatgaagaaagcatgtgtttttgattcagctttaaatactgaggcagaatttctgttgcacaaatgtcagctctcacttgttgaagtttaggtatcagggttgcatatgktattcagaagaggaagacggggccagataagctgctgggaatggagatgaaagcaagcaagggacctcagtttttattcaattacttcccaataaaagtatgactctttttttttaaagtatgtagaaaactagcaatggattgttatttaaatatttgtaatgcttgctttgatcttcaaaatacttcacagaagtact

SEQ ID NO: 673014 - DNA, 1060 bp, Homo sapiens
gtgtgtgataaacacacaccacattttctttaataattcattcatcaatggacacttaggctgtttctgtatcttggttattgtgaatctcgctgtctctttggcagccatttctgtactccctyccccagaagcagctttactgcagtctaaaagtgtcttaggaaaatgattcagaagcaactacttctcttggcatgttcttcagtaaacacgatgatggaaagctttgatttctgcccttctttaaacagtgcaatcgattttcagttgggattttttccagttaatttgatagctccacgtttctaccaggctgaagaaaatgtatgtgttgtgggctgttgtattactgttgctggtggtgctgttgctactgctgagattttgtggttgagtccatattataaaggaattgtagagcagtaataaatttaacttgagctctgaactcaagccttcaggtgtgacttttttaatcacgtggaaattcacgtaagaattttcaaccagacttcatgtttatttttatttcttaagcaaagggtacaggaatctggtctaaacgaatgggaacaaacattacagttagactttattggagtgttgtaaaaatgtttttttccaaaatcagattgtttcaaaactgaccctggtttccagatttttaagttaggaagtaagacagtaaaaatcaagggtcaaatagtcaagcgactatttttttaaaatcagcattttccttggcgacttccgttagaccatgctctgtttagtactgaaactcagagaagttccaggaatagcgggatgaaatctaagtgatccgctcacgggaagctctacccttccttcgctcgctcagtaaatccgggatgggctcagagaatgacttcgcattttgcaccagaagatctcagtctttagagagaaccctagacgaaatccttacttccctgcctcattcctgaaaacttctacctgggaaccgacttgctgtgacaaataaaatgggaggagtctggctgaatagtttgtggatttcggaaagcaaagcgaa

SEQ ID NO: 673015 - DNA, 2304 bp, Homo sapiens
cctcttaagctgtaaactggcctgatggtcagaaacatgctttctagggtattctctcctgcatacatgataaggattcagagatcatggttttctaggtgtaattgaggtctgagatctttttgtaccactcctttgtacttcagttcctcatctaactcagatatgattgacccccataatcgcacctccagacatgacatctaaaggatgcaattttttgtgtgtgtattacctgaacctgtacttgttctagtccatagttaaaaattatctcctctgaacttgcaggaacacagcatgaaggaagcttctttgtgcaaatcaaattaggtaacaaactgtgtacctggaggaatgcaattgaactcgtacatcagacagactatctgtaggattcgctgggctgagtgcatcataattttgagtgcaaagttgtgggagttgggaaacaggaatctacaccatctatgttaactctccttctttcatgttacgattcttgctccaatccccaataactaatagtgctatttcagtagcactattaaagacctgagagtaggaaaaaaaaaaaaaactgccttacactagagtactctgtacctcctaagtagaccacagctccctgtagtattagagggtggacaacgtggagaggaaaatcttcaatctaaattacattgcaatatagagacattctgtggaaaggaaacttgaatagcagtcagaagacccaggatctaattttggatatatcatttaacatggtggttattcagccagtgttccagtttataatcagttatgcaatcagtgtgtcaatgtataaaacagggcaatctcattggccatatcttctttctgtagatgtgtaagaaggatcagttatggtagtggatataagagtgaaaaataactgattaatagaatccaacagacatcagtaattgcattttcagtatcaaggaagctgcacaatagggaaagaggcaaattaagccactgagcaaagggagagatgaagggctcattcagtcatgtgataaatatatactgagtggttataattgccagggactccctagtggcattcagtacctggatccagttgtccctaagtctgtctgcattattggccttcctgaaatttgatcatttagttacatactgtagcatcatttcaaaagtttcctttttttcttgcttaatttgacaggtttttatctcttataaccaaagataccttaaaaatgcagaggagagatgaagaggataagagaaagtcaagcaatttctgtggccaaaaagtgctttcagaaatcataaattcaggcctgaagttcctaaggtgcacgggatggaacagggcaccagctcaaaggaaggaaacatgttataaagaatgatcaactcaaagtatcttacaggccaatggttgtcaaagattttttagcaatggaacaagtgtccaaatgaaatataataataacctttatctaaaatagttacagatgatatttctttaatatacattcatttgtaaattcaaattgttaacattttctttttgtgaagacagataataagcataatgagcctgtttgagtgaagacacatttgatgtggaggatgatagataacagttttaagcatgtcagcttttgtatttatgaaaattaaattaaatattcttacacattcttctgaatataatatgaaaattatagatgatgtccatcctcctctattgagagttgcatcacagggacagaattagaacaaatatctccctctagctagctcatgtactttctacaacattacatgaatctcaaggggtatggtaatatttaccaaaaaaaaaaactcaatgtatttaaaatcccatcaatattttatgaagaaaattaatgagttgatacactaaaattctggtcaaaaaatgccaacacataagtttcagaggaacacgataaaattctgagtcaattcaggtacacatttggtgaaaatgttcatgaatgctttttgattccagttgattaaatttgattggacactctggaatgaaattatttgtcctcaaatggctgataacagcttcaccatgatcagtgtgagatacacttaaaattttgagctccactaagaagtctttgaaacatgattataagacagctacgtcaagctctaastggacagagtaactaccaatatgaattgattttcaagagcatctgttaaggtactttctctaaaacatctcattccagtttctttccccccctccctccctccctt

SEQ ID NO: 673016 - DNA, 2035 bp, Homo sapiens
atttttctcatgatggtttcttttgggtccatcattgctccccactattatgacacaaagaatatgcatagcagtgtagagtaaaagcatcaactaaaataaactttcgagaaattctgaaagggaatttttaaaaagccaaacaaactctgggagagtaatataatttagtggctgaggatatagactctggagccaaattgcctggttccaatatcctagctttgtcaattactagttatatgaccttgatcgtgtcacttaaattctctgtgcctcagtttcctcatctgtaaaatggatacaagatacctacttcatagaggtgttacaataaaaaataaactttcaaagtataagaagaactaaattaatataaatttacgttatataaaatttcacagtagtgtagtttatctttaagtgcattttaaagtggacattctatgcttgttatttttccctacacatgctctgaattttgkactggagaagttggcatagagaggtaaactatacttaatgacgccttcttctaaatgtctcttaaaatttagaatttcctctggtcagtgaaatggtggacaaaaatctgggttcagtaattcgttgcatattaaaaactctaaagctagaagatcaacttatcttttaaaatctaaatttactgagttagtggaggctaactttgtaataattggatctacaaacatgtgtcttaatcacaatcttgcagacagaacaatcctctttgaatgagctggtgggtatgatagtccatcttcatgcaatcatatgaggtcccaaaatgatgatggctttgtgcttctttccattcaacccagccagaaaggaaagagcacatggaggaggcttacatgggtagtttctatggacccatcacttccattcacatgtttttggcgaaaactccattttttggcttcacctaactgcaatggatactgggaaatttattttctgctgagcagcctcttagaagcaacaactgtgcccagcagaatgggaagcatattctgtgctgagctcaacatctttgacacacctaagtgtcaaagattttacatattttgagggtcttgtacagtgttttaaagacttacaaattgaatattaacatttaatagtttgtagattttacaaaaatctttcataattctaccttctcttgaaaaatcagaagatttggacaaaatggatttatagttcccctgggcagcaattgtttgcagctgcctgcattctccccagtttgccagagggagcattttgccagcgtcactttttaatttgccttcctgaatttggaggcactaaatttgtgacccttgccagatcatgagatgaaaaacttgatttaagaaatctaggggctgggcgcagtggctcatgcctgtaatcccagcactttgggaagccgaggcgggtggatcacaaggtcaggagttcaagaccagtcaggctgagatggtgaaacccgtctctactaaaaatacaaaaattagctgggtctggtggtgcacgcctgtaatcccagccacccgggaggctgaggcagaagaatcacttgaacctgggaggcgaagtttgcagtgagccgagactgcgccacatcactccagcctgggtgacagagcaagactccttctcaaaaaaaaaaaaaaaaaaaaaaaaaaaaaaaaaaaaaaaagaagaagaagaagaagaaaactaggaaattctaaattttaaaggatcttcagaagaagaagagtcacttactgtagtttgcctttctgtgccaacttctccaaatagaaaattcagagcatgtgtagataaaagaaaactaggtacataatatatactgtaaaatatatttaaagaacaatacatttaaatatagaagaaaaggagcagaggaagtgaaagaggagaaaaacaggggaagacaaagacagggtcagggataagcagaaatttaaaaaaatagaacaagtaagagagaaactaactttttcaaagtaaataaaga

SEQ ID NO: 673017 - DNA, 889 bp, Homo sapiens
ggccactctggtcacttacataaaatactcagcagaagccctaccactttataataattcagtaagtgttaacatcttataactaaggtatcattcaattctaaaatattctaaggaacttttgaaatggatgtagtgcgtatatttccaggttaaaaatgaagcatttttaaaaaaattacttttatttattttaactcctttgaagtactctttgaaaacaatagaagtaaggaagaaattttgggatagaacagaaaggaataaactaaacaaccaacggagttactggaaagagttcacctgtaaccagataaggtccgctctcagaccaaaaacttgctgtgttctacctccctctcaactctttctaggtgctcttctgttctgttttcataatctcaccttcagtattatcaaatattgwcacagaatggctggactctcagctcaactccaccctctaacctagaacctcggctctaagtgaaaacagctgaccccatttttcggcccaaatgattgcccttttggcctgccccgccccctatcttgtgagtataaaaagacttcagctggccaagcaatagaagcagctggtgcaacaggttggggatgcaggctgctgagtgttgaggatacaagcggctgagcatctcagactacagacagacggagctaacttcagagggtgcggcttcagggaaagatcactttcttcccgcaccatcccctttccaactccccattccactgagaaccacatccattgcccagtaaaatcctctgcatacactacccttcaattagtgacctgattctttctggaccccgaacaagaaatgggtgccaagagggcaggggattggatgctgctgtggaacgcata

SEQ ID NO: 673018 - DNA, 889 bp, Homo sapiens
ggccactctggtcacttacataaaatactcagcagaagccctaccactttataataattcagtaagtgttaacatcttataactaaggtatcattcaattctaaaatattctaaggaacttttgaaatggatgtagtgcgtatatttccaggttaaaaatgaagcatttttaaaaaaattacttttatttattttaactcctttgaagtactctttgaaaacaatagaagtaaggaagaaattttgggatagaacagaaaggaataaactaaacaaccaacggagttactggaaagagttcacctgtaaccagataaggtccgctctcagaccaaaaacttgctgtgttctacctccctctcaactctttctaggtgctcttctgttctgttttcataatctcaccttcagtattatcaaatattgtcacagaatggctggactctcagctcaactccaccctctaacctagaacctcggcyctaagtgaaaacagctgaccccatttttcggcccaaatgattgcccttttggcctgccccgccccctatcttgtgagtataaaaagacttcagctggccaagcaatagaagcagctggtgcaacaggttggggatgcaggctgctgagtgttgaggatacaagcggctgagcatctcagactacagacagacggagctaacttcagagggtgcggcttcagggaaagatcactttcttcccgcaccatcccctttccaactccccattccactgagaaccacatccattgcccagtaaaatcctctgcatacactacccttcaattagtgacctgattctttctggaccccgaacaagaaatgggtgccaagagggcaggggattggatgctgctgtggaacgcata

SEQ ID NO: 673019 - DNA, 1515 bp, Homo sapiens
aattagctgggcgtggtggtgtgcgcctgtaatcccaactactgaggaggctgaggcaggagaatcacttgaacccgggaggcggaggttgcaataagccgagatcgcagcactgccctccagcctgggcgacaaagcaagactccatctcaaaaaaaaaaaaaagaaaagaaaagaaatggagacctccctacttctacccactggagaaaacttgagaaaggatgtagggcaaaaagtgactcttgaactcttaagagaagacaattggaactggaggaatagaatggtcagaagcgctgagatgggaacatcaaggatcgaatcctagctgtaataggtggtttctaataggaagaaggaaagggaggctagaattgacgatacaggggtaggtgagacagctggctcagaccaatggggagctcctctagaatcatcctgagtttgagattgaccagtcttgcaacagattcagaatggctggcagagaagaaactaaatttaaggatgtcaggaggcagacatcctgatgagtttcagaggctgagatttttttttttttaaactataaactttgggaagactgggaccacgtctctcttgaccaggatatgttctctgtgtctggcacatataggtgcttaatatttttaataataaatggctagattagactattggcagaggaataaataggagggctgagactgagacgctttaggaaggcaggcgtaactggacttggtaacaatggagaggaaggaggtagaggctatttgagtttcagttcttggcagaatgttggggtcactgatataaatgagagtatttggcctttatttcatcatcttatcatcaaatggcaataccatacctaagctgggatgctacgtaggtaaaggattaggactgggtttatttacttcactggtcactagagtagcttttacaaaattgactgccttcaagggccttccaggtaatgcacgccccaacacaagctgtatttgtcttcttgctgttcyccctcccaggacctctgcgctcgctgttcccctgcctggaacactcttcccccagatttccatgaggtccactcctcatgtctttcaggtgtatcctcaaatttcacttgcatcttgcataggaaccacctcctccttgcattcctaatccccctgagtaatcactttctagtatactatatctacactatgtaatttatttgatttattgggtattgtctatccctactaaaatgtaatctccaaaagagcaaggattaaaaaaaaaagtttttctctccattgtttttccaatacctagaagagaaaattctgcacagcctgaccctagaaggggcttgattattttcgctaaggacttatggctaagtgagtgattgaactgtgtaaccaacaggtagtgatggagcctgagggaactggtgattgcataactcctcgtacgcccccaaagctgacaaaggcattcaaatcaagatttaaaaga

SEQ ID NO: 673020 - DNA, 1697 bp, Homo sapiens
  misc_feature 838, 839, 840, 841, 842, 843, 844, 845, 846, 847, 848, 849,850, 851, 852, 853, 854, 855, 856, 857, 858, 859, 860, 861,862, 863, 864, 865, 866, 867, 868, 869, 870, 871, 872, 873,874, 875, 876, 877, 878, 879, 880, 881, 882, 883, 884: n = A,T,C or G
  misc_feature 885, 886, 887, 888, 889, 890, 891, 892, 893, 894, 895, 896,897, 898, 899, 900, 901, 902, 903, 904, 905, 906, 907, 908,909, 910, 911, 912, 913, 914, 915, 916, 917, 918, 919, 920,921, 922, 923, 924, 925, 926, 927, 928, 929, 930, 931: n = A,T,C or G
  misc_feature 932, 933, 934, 935, 936, 937: n = A,T,C or G
attactaaaattctgttacgtagagtctccgagggtttgaattagtgtgcctcagacatccgtggtgcataattcttcaaaatattaatactagattgtactagggttcagggttgtctcttaaaatgtggacacttacacaaataccctgtagagttgaaaataattttaaacataaaatatttgaataagtacaattaagtagcttttaacatgtttggtgtgaaagtttattctgtggaagaatcaaagagccagtcaaaatactactaaatgtatgattctgtacttactgaaaatgaaatatcatatagaaacatttatctttcttttgataataacatttactcagtgcttactatgtgctaggcatttttctaagccttatgcatgtgttaactcatttaatcacacaacagtcctgagaagaagatacaataattatttcattgaacggatgaagaaaaaagtcaagtaattgctcaaagtcatgcagctaagaaaaggtcgagccaagttatgagaccagaatctgtgagcttgattactcctccatcctcctaccaacggataggtccatgcaaataattgtttcccattcccaaatccctatatatacatatcttattatatttaaaattttgttatgcatcccattattatacgaaagatcatcatagatttttatcctccctggattttaactattgctaatgaatagctcggcagcgtgatgtaattgggtcaggtaagtctggatttaaaatctagttctaccacttaccatttatatatggccttgggaaagtttctttatcttatgagcccatctgctatnnnnnnnnnnnnnnnnnnnnnnnnnnnnnnnnnnnnnnnnnnnnnnnnnnnnnnnnnnnnnnnnnnnnnnnnnnnnnnnnnnnnnnnnnnnnnnnnnnnnagctggacattcagcaatgaattcacatcacagaaggatcatatatatctttgggctaaattcagytaagagctgctggtttgtgtcctcatcagctttactttcttgaaggcaatatccactatattcactaagtctggatggcttcctgagctggcatcagccaacgctacaggcaacatcatggcaggcagcagtggtaagagtgagaccaggagagcaggtttacaggagagttagtcctacaactttcagacatttggctttcgcccaaagaaagagagtatgtgaccaacaaggcaccctctacctaaaaagaaaataccaaccctcccttgactgagtcatcagttatgaaacatgcatgttttcttgtctctgccatgtgatgatggatttaggctgagccatccatacctgtcactcatgatgtgcgctcaaaaaagagctgaacagggtgagaaacacacttggttcaaagcaaaatagtctctgcagagactgaaacactgaacttgaactaatcagcaccatgaacttaacagctgaactaaccagtcctcatgcagaatggtgcaagagaagacaaatcaacgtagaatttccttagtatttcagaggtaccaagtattaatacattctgggttttctaccttgaggttgatctccaggaattgtacgtatgtataactttggaaactgtgggcttctaggtgacttctagaagtgtttatacttcttatgtaaaagtgctcatttc

SEQ ID NO: 673021 - DNA, 1697 bp, Homo sapiens
  misc_feature 838, 839, 840, 841, 842, 843, 844, 845, 846, 847, 848, 849,850, 851, 852, 853, 854, 855, 856, 857, 858, 859, 860, 861,862, 863, 864, 865, 866, 867, 868, 869, 870, 871, 872, 873,874, 875, 876, 877, 878, 879, 880, 881, 882, 883, 884: n = A,T,C or G
  misc_feature 885, 886, 887, 888, 889, 890, 891, 892, 893, 894, 895, 896,897, 898, 899, 900, 901, 902, 903, 904, 905, 906, 907, 908,909, 910, 911, 912, 913, 914, 915, 916, 917, 918, 919, 920,921, 922, 923, 924, 925, 926, 927, 928, 929, 930, 931: n = A,T,C or G
  misc_feature 932, 933, 934, 935, 936, 937: n = A,T,C or G
attactaaaattctgttacgtagagtctccgagggtttgaattagtgtgcctcagacatccgtggtgcataattcttcaaaatattaatactagattgtactagggttcagggttgtctcttaaaatgtggacacttacacaaataccctgtagagttgaaaataattttaaacataaaatatttgaataagtacaattaagtagcttttaacatgtttggtgtgaaagtttattctgtggaagaatcaaagagccagtcaaaatactactaaatgtatgattctgtacttactgaaaatgaaatatcatatagaaacatttatctttcttttgataataacatttactcagtgcttactatgtgctaggcatttttctaagccttatgcatgtgttaactcatttaatcacacaacagtcctgagaagaagatacaataattatttcattgaacggatgaagaaaaaagtcaagtaattgctcaaagtcatgcagctaagaaaaggtcgagccaagttatgagaccagaatctgtgagcttgattactcctccatcctcctaccaacggataggtccatgcaaataattgtttcccattcccaaatccctatatatacatatcttattatatttaaaattttgttatgcatcccattattatacgaaagatcatcatagatttttatcctccctggattttaactattgctaatgaatagctcggcagcgtgatgtaattgggtcaggtaagtctggatttaaaatctagttctaccacttaccatttatatatggccttgggaaagtttctttatcttatgagcccatctgctatnnnnnnnnnnnnnnnnnnnnnnnnnnnnnnnnnnnnnnnnnnnnnnnnnnnnnnnnnnnnnnnnnnnnnnnnnnnnnnnnnnnnnnnnnnnnnnnnnnnnagctggacattcagcaatgaattcacatcacagaaggatcatatatatctttgggctaaattcagctaagagctgctggtttgtgtcctcatcagctttactttcttgaaggcaatatccactatattcactaagtctggatggcttcctgagctggcatcagccaacgctacaggcaacatcatggcaggcagcagtggtaagagtgagaccaggagagcaggtttacaggagagttagtcctacaactttcagacatttggctttcgcccaaagaaagagagtatgtgaccaacaaggcaccctctacctaaaaagaaaataccaaccctcccttgactgagtcatcagttatgaaacatgcatgttttcttgtctctgccatgtgatgatggatttaggctgagccatccatacctgtcactcatgatgtgcgctcaaaaaagagctgaacagggtgagaaacacacttggttcaaagcaaaatagtctctgcagagactgaaacactgaacttgaactaatcagcaccatgaacttaacagctgaactaaccagtcctcatgcagaatggtgcaagagaagacaaatcaacgtagaatttccttagtatttcagaggtaccaagtattaatacattctgggttttctaccttgaggttgatctccaggaattgtacgtatgtataactttggaaactgtgggcttctaggtgacttctagaagtgtttatacttcttatgtaaaagtrctcatttc

SEQ ID NO: 673022 - DNA, 1680 bp, Homo sapiens
gtaggtcaaggaccaggaagacatgtctgccctatgtcctagtgaccataagtcacccagagcaactgatgctcacgaaacaggaaggttgtaggactcttggtcagcatttgctgttgacgaactaatataggctggtggtgttttctgttaactaaaccccgcatctaaactggtttgttaaattgggccagtggagctggactgacttgtggggtttctttcccccggggctggcggagaactcaatgccaagtgaagcatgatacagcacttcctgcaagtaactcaattctcttggaccacagcacctcagacaccagggtgacctcaacctaaaagcatatggaatgacatcctgccaccaacccgctgtcctcccttcctccttgtcccttgatggaccacacttagctcccttccatcacattgctcctgcttctcctcctgcctgaaatgctccaagacacggtgaggtcattagaaaccaggcagatctagatctatctagaaaatagttctgaacatacatcccacctcttctgcttcccagtctggggatcctgaggcattaatataagctctctgcttcattttctctctctgtaatatcagggtacctattttaataatgtgttgtagggataaatggagtaacgcaggcaaaatgcctggcacagtgcacagcctgtagcaggcagtcaataagtgttcactccattcccaccrtacatgttaatgtctttatgtctagacaaatatcacatatgcctggaggtacaattccagtctcatctcattaaggaatctccagttatcatctcccattctgaagtcctacttagcttaatagctttaccactaactcaggcacatcaactgcccttgttattcatctgttctgacacagatgtcttgtttggctaattcaacagatgtttccaaaggggacagctggtgtcaatgacaattccgtctcatcactccaacttcctactgtatctatctatcatagttatagatgcccaatatatttgtgtgagtaaaggagtgagtgaaaaaaatccgagtgcaagggtaaaaggccagttacaggtataattcctaccagattataatttggttgacttctttacaaatttataatccagtagggattgagcacccaaatttttgaagcagatcaatggtggttagcatggaagagagtatagtggagtaaagatgttgaaggtgaaaaagaagatgaagagaaaggcaatgttgcaagagaggtcagttcggaggttaagtgggcttcatggaggtattacggactctgagttagacagaaggttgacaagcattaccgcctgagctccgcctcctgtcagatcagcagagccattagattctcacaggagtgggaaccctattgtgaactgcgcatgtggggagtctaggttacataatccttatgagactctaatgcctgatgatctgaggtggaacaatttcatccccaaactatcccccaccgaccttctatgaaatcggtctctgatgccaaaaacgttggggatgctgctgccctatatggtgaagaagatagttagctgtccaccaaaacttattctctgttactttcactgtcattgagctatggttgggtacatggtcatcttgccagggcctgcattt

SEQ ID NO: 673023 - DNA, 3135 bp, Homo sapiens
caaatttgtaaactttcttaaaccattatgagattttgtgtgtaattttttttttagctcatcagctatcattagtgttagtatattttatgtgtggcccaagacaattcttcttcttccaatgtggcccagggaagccaaaagattggagactccttctctattaggaaagacaactataaccaccactgaccacgtttacagagaggtataacttattatcacagcacagagcagccctgattagctttctttggccaggagtggggcaagagtgggccttgaaggtgacatctgaaagagttttggaaccaacagtgcacctggacaaagcagaaaaaaattgcaatcagggcgactgaccaaagatgtgaaggcaaaagcactttaagaggatagagatgcaccatgttggggatgcctgagggaagagccatcgagtagatgagaacactcagggagagaatgctctcaccctggcctcaccccttataggtctgcatgacagtacaaatagctagagtttatggataaccttaagacttggaaccttttttgttccaagaaggtttcttgctatagttgctttcatgagaacaactttagcctgctagaaaggaagaatttaaaaacttggttatttgtttgctttgctttttcctctagctttaacacacagcctgaggtttgtcagcatgtttaacaagagccaagcaagaaagtgaaagagaaggcaaaagagaagggagatggactaaaaaacaacacagcaggggccagtactatttcaagtgtgaatactgaattgtttaacctagaggttaattatcttttaaaaacagaataccaaagttttagcaatttcttctggtatatctggagaatgatatttccaataggggatcagcaaaatatcttggaagaggtatttcagacaagtgtacctagggtgttgagttttctcatgattttagtgggtagagaaaggaaattgactcacaaaaaaaaatgactagtgtttgtaatagagatattccttgcacaactgagaattacgtgcaagccaatggttgccagttctcaagaatatgtaacatatgaggtaaggctgcacatacaaacacagattaagttaaacagtcattcataatgctctggttaatcagaagcccagacttcactgaaacaatgtattatactagctagggaaggcagactggagaggagcagcctacccagcactgttctcagctccagtgaactgtcactagcaaactgatttaaaaaagaaatgaatgcatacaatcaatgcataccttagggatatgtaaaaattattttttaaacaaagaaatattctaatagtttcacccaactactctgctctgcttgtttggcagttttcactaatattgaaaatatgtttcaagctgagtaaatattctggaatgatatgaattgaaagtgaatatttctaatcactagttcatacactaattttctttttgcactctcagggtgttctttttaaacaatgtttacatcttaaaaacagcaattctgtccatgttgtatattacatttatttcatgtttatttttggtcagtaataatattacctatttagcatgattttattgtatatatcttttatattcaggcagctttaaaaatattttattttttagtgaaaaacaaaacatcaaacaagtaccaacaagaaaaatataagccagctgggtttttgtttgtttgtttattttgagacagagtcttgctctgtggcccaggctagaatgtagtgataacaatcttagctcactgcaacctctgcctcccaggttcaagcgattcttgtgtctcagcctcccgagtagctgagattacagctgtgcgccaccatacccagctaattttttttttttttagtagattgggtttcaccatgttggccaggttggtcttgaaactcctgacctcaagtgatctgccagccttggcctccgaaagtgctgacattacaggtgtgagccactgcaaccagcaccagctgggttttgaatagtcaccctcaagactttaaccctgttttcacattggaacttgatattaaaaggtgagagttattccagatcattatctccaaaattctccttttctgatcagagacatttcagctacacaataagttttggaggaatttgtttaaaaacagttcctaggcacctacacccagaaattctgattcagtaagtctggaatgaagttcataaaagtattttttacagaagctgcccacttgcttatgacacatagcaaggtttggaaccactgacagcgtatttctcattatgtataatttataatttaaatagtgatagtttctggcttgactcatcattttcctacaatgactgacaaagagaaaaatgaatttatgttttaaaaagtaaaaacttgaactaccatcacccacaagttataaaatcataatgagatgcaaaaaattatgaatatataattacttggaaacattcatttttgactcgttttcttaggagcaaattgcttaatgctgcatacaataaaaataattcagataacatcactaagctgcaaagaagtcatatttggctgaaaatgaytgagaaaataaccacaatagcaaaccaaactataaacaaatatactaaaaaataactgattgccaagtaccaatatgaaaaaaaaattcagtattattcgggatgatcactgaaacatgtgcacttagggaaggattttccagacaatgtcctggtaagacttgactctggcataaatcaagagggaatgaatctttcaataaatatttatgtgacttacagattttgcatctaggtattttaaatcagcctgtttacacccgtatgttgctagaatggctcatcagccttcctgggagaaaggtgaatggatcatcatgagatgtaactccttcaaggttcctttatttaaaaggagggacaaggcatgagtggtttaagtaagggttaaaaaatgaattttaaaattcaggtcactcattgccccattctcccactggagtgtattttcaagccatcaggtcctgccttggccactgggacctgagaa

SEQ ID NO: 673024 - DNA, 2438 bp, Homo sapiens
tctcaatgtgacaggcgactgagtaggggcagagactccagcaactgagtacccctctctccctctcatgctctctctaaggctggtagagcagggagctttcattccttggtggccatgtggcccgtcaggtccaataccctgttgctacaaccaacttcattgccattaccaggtaatgagcttgacaaagtggtctttgagagcaatgccagctctaacatcaaagccagaagggtgggtgtcactgttaaaatcggaggggaaaacctggtgttcagtgtaggccaggatgcacctgaggaagtgccccaatgcctgcttcaccaactttttgatgttatcatatttggcaactctcttcagatagcatgccagttccacaactgacacactggcagtggatacaaaaggccatgttaatgagcttctcattcaacacagagatgaccttgtccatagccttggcagtgccagtaggtgcagggataatgttctggagagccccacggtcatcacccctgtctcccagaggggccatccagcattttctgggtaacagtgatggcatggaatgtggttatgagtctctccatgaggccagagttgtcatagatgaccttggcaaggggactaagcagttggtgatgccagaggcacagctgaaaatcatatggttgttttcataccaattatggttcacacatcacaaacgtaggagaattggygaaagggtcagagataatgacccttttagttctaccttctaagtgagcccaagccttctccaagatagtaaagacaccagtgtattcaacaacatagtcagcaccagcattatccatttgattttggtggaatctcactcctggaagatggaggtgggattcttgttgatgaccaacttcctgttctcagccttgacaatgccctgaaacttgccgtgggtgaaatcacacaggaacgtggaaatcatgtaactgaggtcaatgaaagtgtcattaatggtgacaatatccactttactggagttaaaagcaaccctggtgaccggacatcaacaccactaaattcatttaccctggccttcactgtcactatcgtttctcagggatgcagttggcactgtatgagaagatgtggctatctgttgaacagggaggagaacagagctttgctcataaaacttaatattcagatctataatgagagagattattaacccccatcaggaaacactttgatttttgtggaaaggaaagacttgccagactgacttcagaattatgtaaatgctatgcatacctggtattgattgtctgccctaaagctacctggcacatctaaaaggcaagccttctttagttaattgcaaggcccgcatcagcgtttatagtgaaaataaagagattatattatattatgttatttatattatattatagaggtgaaaacaaagagattatcaatgggctggcaggaacaggcaaagagaaaagccactgatgctataaagccttacacaagtgggtttcatagcactggttctggcttgcatttccttaaatttccagtttcatagacatccccaaatgccaaaaaataggacaagtaattcagaatgagatgctaggtcacctttgcagggcattctaatgggctgcattagagctgcttcacttacaggatgagattggacagcaaagcggaggctgaggattctcctggagcatcaggggcatgaaggggaggaggtgttttccctccgcctccaggtaaagggaaagggggtgctaaggccgctcttcaaaaaactttacatattttctctagagcttgagaagctaacatgtgactcttgccaagaaaagagtcttgatgccaggggagctgtgcctggaactgatactttctggctgcacaagggttaagtctgcattggagtaagctgagcttcccctgctggtgggacaagggtttgcgaatttacctatgaactaatcctgtttgaaagaaccagccctgtctcctccctacagaagactgcctggattcctgaagggacctttaaagaataaagcctgtgggttggaccaggggaggggatctttgaggttctagttacattggactggatgaaaggtattcaaatagttatttaaaaaggagtcaaatggaatgcggtggagaaacgtaacattttattttattttttgcttgtaccatatgtaatccagaggcttttcaacaaaatcgctacaatcagaaagtagttgcgtttgttcttcgatttttacagactagtaacataattttaaggaatattaacaattaagtttactctgtatcatcatatagcaaatatcaaaaaataaaaataaggtgttcaggccgggcgcggtggctcacgcctgtaatcccagcactttgggagacgg

SEQ ID NO: 673025 - DNA, 256 bp, Homo sapiens
gtctaaaattaaatgttgattttgataagacacataattttagtaagggattataggatctttatatatacatagtaggtggtcttggatatttaattccatgatatatgttttaacatcttgctagtaaggtaattttttcccctctaattgaagcaaggcctcacttgaaattaccattcactggtctttccacaaaaataggtaagtggaatatgtaaattacmgttttccccatggaaatatcttggaattc

SEQ ID NO: 673026 - DNA, 3697 bp, Homo sapiens
  misc_feature 410, 411, 412, 413, 414, 415, 416, 417, 418, 419, 420, 421,422, 423, 424, 425, 426, 427, 428, 429, 430, 431, 432, 433,434, 435, 436, 437, 438, 439, 440, 441, 442, 443, 444, 445,446, 447, 448, 449, 450, 451, 452, 453, 454, 455, 456: n = A,T,C or G
  misc_feature 457, 458, 459, 460, 461, 462, 463, 464, 465, 466, 467, 468,469, 470, 471, 472, 473, 474, 475, 476, 477, 478, 479, 480,481, 482, 483, 484, 485, 486, 487, 488, 489, 490, 491, 492,493, 494, 495, 496, 497, 498, 499, 500, 501, 502, 503: n = A,T,C or G
  misc_feature 504, 505, 506, 507, 508, 509: n = A,T,C or G
tcttatggttgacttattcattcaggaagtaagcaaataatgctgtggtgactttaatgccctacaaaggcatttgctcagggttaatttgagtagggtataatctttcagttgctttgtcaataaaacatcccaattttattttccacactgacattttacatacttggctcccatagtttataggcatgatggggactcacaggaccagatgatctaacaccaattatgctgtcaataatgctctgtgctaaggatggaactcaatattccttagttcatctatacattcatttttaagatataaataaaataatagtactgtattttcaaattgttatactacagagtggaatacagatttttaaaattaacgaatttcttttagaaaggggtcttgctatgtaccnnnnnnnnnnnnnnnnnnnnnnnnnnnnnnnnnnnnnnnnnnnnnnnnnnnnnnnnnnnnnnnnnnnnnnnnnnnnnnnnnnnnnnnnnnnnnnnnnnnncatacacaattaccaggttccttcataggatctgagtgtgaatgtgtgaagtcagggtatcctatggccccattaatccaatccctactgaatatagagccaggcctaaaagccaacttttctgtgctaaagggtaaacatatgacttttaacagttaaaatcctagtgtcttcttgaacacatatttaataaagacagacatattctgaccttgtttgctccaaccttaatgttggcatccgtgtgacaccatagactgaatgtctctgcttcatgagaagagagattagcaccagcagggcagtgtgtgacatccttcaaccatttgccaccaccctgccatgggtgatgtcatgtggaggtgagaaaattgtacaattgctccttgtcttctctgctgagcttgcaggtgggtttacatgttcgactaagtaaactagcacttttggatagaaagtagccttagccttcataatataaaggacattataaattactcaaatctggccgggcgcagtggctcatgcctgtaatctcagcactctgggaggccgaggcaggtggattacgaggtcaggagttcgagaccagcctcgccaagatggtgaaaccctatctctactaaaactgcaaaaattagccaggtgcggtggcaggcgcctgtaatcccagctacttgggaggccaaggtaggagaattgcttgaacctgggcagcagatgttgcagtgagccgagattgcaccactgcactccagcctgggtgacagagcgagaccccgtctcaaaaaaaaaaaaaaaaaaaaaaactccacagaatctggagatttacaagcccaattaaccaatgctttttccatcttataaaaggggatcctaagggcgaaggttgttttatagcaacatacttaagagactcattttttttagttcccaaaaggccaaatagaaagagttattgttggtaaggggtgaaaatatgagggatttttttcttctctttccttttttctttgccctggggaataggatatttwaaaacccctccctgcagaaaataaatactttaacatttcctccaccacagccttgtgaataagcagcactaattaaattctgccctatttaaatttcagagtgaagaaatcttctggaaaagtctagttccccaaattgcagcccctcaaggatggctctcaagattccaagaggaccagcgtctcttcccttttctgtgatccctgaatagctttttaaattggctcttgaagttttttgtttttgtttgtttgtttgtttttatcttgataggcttctcattcacagctaactttttttctcactaattttccagccacctactacagcacattttgtgagctaaaatttggtgccaccaatcgggcttggccagtcggcctcacctggaacacagtagacaagctacctttaaattaggatgatccaaatactctaatttacactgataggttttatattgttttattttttgtcttttatttgtgtaaggtttgtttgttttttcaaagccatcactgttgggttgcggataaacaacaagaacacgtgcattgcaattgtaaattgccttagccagggcaatttgtcaatgctgcttaacatgcttataaacgttcataccctctgggcctaaatcagtgcctggaaatttaaagtaaggaaacaattgagaggaaaaacaaaaatagtgtgtgtatgaagctgcccatagcgatattttctataacaataaaaaatggaactaacctaactgttcattagaagaagtctaaattacaatctaactcgtgatatttaaactattttgactatgagatcctttctttaatgaatagtatgcatacactaaatatgcaaattgattttaaatactttattatttaaagagcaattgctctagacaaagcaagagggtagagttaagaaccaagaccggcctgtttgtgctcctgacctgtctccctcctggctccaaaccaactctgagaattctgagggcactgtggagcacaacataattcctgttgtcactaaaaataagtgttcagccacattaaaaaagtatttacaagacaacatttataaagttatgctaaatgagaagagtggagcatgtgtactatacatacataaaactatataaaatatgcataattaagaagatcagaaagaccaatggatagatgtacataatttgccttatcttactatgttgttttagaaatatataactctacttaatgaaaacttgttttatcaaacttactaactagcccaaatgctttaggtaattaacctggccttcctcagcattctcatctgtaaaatgggaataattatagtacctgtatcatggggttatagtgagcatcaaatgaattgatttgtgaacagtgcttaaaagagtgcctccaaaaattttagctgtcattagtaacatgatcattgtcttacactcacttgcaaaatgtttgaagtaaagtggggaaatgagaaaaatttagatttatttagttgcccatctctttactctttttgctaggcaaggtaaatgcccgccctgctcctggtctaagactctctgcagcagtcagtcaactacggtgaacggcgagtatgtgtgcttctaaatcctcaccatcacctatcttttcaatacttgataaaaagtagtatttcccatctcaaacttctaatgcaattaacaaaatcagtacaatttgaaattccatttctcctgcatatgtgctgaatatgggaattttgacttttagttataaatttgtattaatctgatgttctatacacatacaaaccaggggaaatatttcaaagaaggcttcaacatttgaataaattgactaaatatttaatgggaagaaaaagatccatatttacctaatgttatccatcatgtaaacacaagatctgtaggccgttttgtctcttactgtttttcttcttcctgttatttagctgttggttaacatcccttttccatctcctcctccatgcctctaatttctgggctgattccattgtttcagccttacagcagaagcagcatctttttaaatatagtatcactatttatttttgtatcaactttaattggttaaatcagcaaaccatactggcttaactga

SEQ ID NO: 673027 - DNA, 1105 bp, Homo sapiens
taaacagcctctcagcctttcttggagcattctcatttagatataagatactatttaagtaacgaaatatctaatcatatcatttcagtaaatttaaatgaagaatttccattaggatatggaactcacttttttatttttttattatactttaagttctgggatacatgtgcagaacatgcaggtttgttacgtaggtatacacgtgccatggtggtttgctgcacccatcaacccgtcatctacattaggtatttctcctaatgttatccctcccctagtcccccaccccccaacaggccctggagtgtgatggtcccctccctgtgtccatgtgttctcattgttcaactcccacttatgagtgaraacatgcagtgtttgggtttctgttcttgtgttattttgctgagaatgatggtttccagcttcattcatgtccctgtaagagacatgaactcatccttttgtatggctgcatagtattccatggtgtatatgtgccacattttctttatatatatatatatagagagagagactagatagaaactcttaaatcctaatatgcaaatctaacctgggaaaaccattacactggttaaaagtagcccatttgggatgcacaaaattcatttttttccttatgcctgacaggacatccagcaactccagtttgtaaatgagcttattcatttgaactgggatccatagctttactcaagaatgaacagcttggttcatctctccttgaaaattgctgttagaattaaactccttagtcaatcttttaactcaactgtttcaaaactcctttggttttgaatcaataaaagcattgaggatgtggcagttgagcagatgggtggtccacttggtaaagctttgttatctccatgtaagccacaataaaactctgacctgacaaaaagaaagtgtttacacaaatcaaaacagaaacctctatactataagttacacagtgtttccagttggtatctacaagtattaatgcagacacagtgacaggtttcaaataaacttgatagaaaaggccattcatattttatcatgttgggttgatggacttacaattgagaacaat

SEQ ID NO: 673028 - DNA, 664 bp, Homo sapiens
ttccagctcacctggaagatccttagacttgcgaggttctgtgattacctgagacaattccttacaatgaacctttttatagagatggagtttttggtgtgtgtgtgtgtgtgtgtgtgtgtgtgtgtgtgtatttacatatacacatacacgtgtatcctatttgttctatttctctgaagaaccctgactaatacaggtgttgtgtaccagacttccccactatgagaatgccttttcccttggcaattagtatttttgtggaggtactttgaaatataaatgccttctcctaatcagatctcacatttatttctttatgtacttatatcggtatggattaaaagtgtcctattttatttaaggtgtaataatccattctcgcttctattttttcacactgaagcccacrttgttccagatttaacccatgggagccccttccagcaggtgtctgtgtcctttcattatggtgctatcatttcgtgagtgtcttcctgctttctggcagtaaatgttgttccaaaatcatcttgtattttcccaacttggaatataataagcccattcttcaaggtcctcccagtagatgccccagggactacatgcacatctgtgtgtagatgaataacatacttattcacaacaatacttaatttgctac

SEQ ID NO: 673029 - DNA, 664 bp, Homo sapiens
ttccagctcacctggaagatccttagacttgcgaggttctgtgattacctgagacaattccttacaatgaacctttttatagagatggagtttttggtgtgtgtgtgtgtgtgtgtgtgtgtgtgtgtgtgtatttacatatacacatacacgtgtatcctatttgttctatttctctgaagaaccctgactaatacaggtgttgtgtaccagacttccccactatgagaatgccttttcccttggcaattagtatttttgtggaggtactttgaaatataaatgccttctcctaatcagatctcacatttatttctttatgtacttatatcggtatggattaaaagtgtcctattttatttaaggtgtaataatccattctcgcttctattttttcacactgaagcccacattgttccagatttaacccatgggagccccttccagcaggtgtctgtgtcctttcattatggtgctatcatttcgtgagtgtcttcctgctttctggcagtaaatgttgttccaaaatcatcttgtattttcccaacttggaatataataagcccattcttcaaggtcctcccastagatgccccagggactacatgcacatctgtgtgtagatgaataacatacttattcacaacaatacttaatttgctac

SEQ ID NO: 673030 - DNA, 664 bp, Homo sapiens
ttccagctcacctggaagatccttagacttgcgaggttctgtgattacctgagacaattccttacaatgaacctttttatagagatggagtttttggtgtgtgtgtgtgtgtgtgtgtgtgtgtgtgtgtgtatttacatatacacatacacgtgtatcctatttgttctatttctctgaagaaccctgactaatacaggtgttgtgtaccagacttccccactatgagaatgccttttcccttggcaattagtatttttgtggaggtactttgaaatataaatgccttctcctaatcagatctcacatttatttctttatgtacttatatcggtatggattaaaagtgtcctattttatttaaggtgtaataatccattctcgcttctattttttcacactgaagcccacattgttccagatttaacccatgggagccccttccagcaggtgtctgtgtcctttcattatggtgctatcatttcgtgagtgtcttcctgctttctggcagtaaatgttgttccaaaatcatcttgtattttcccaacttggaatataataagcccattcttcaaggtcctcccagtagatgccccakggactacatgcacatctgtgtgtagatgaataacatacttattcacaacaatacttaatttgctac

SEQ ID NO: 673031 - DNA, 664 bp, Homo sapiens
ttccagctcacctggaagatccttagacttgcgaggttctgtgattacctgagacaattccttacaatgaacctttttatagagatggagtttttggtgtgtgtgtgtgtgtgtgtgtgtgtgtgtgtgtgtatttacatatacacatacacgtgtatcctatttgttctatttctctgaagaaccctgactaatacaggtgttgtgtaccagacttccccactatgagaatgccttttcccttggcaattagtatttttgtggaggtactttgaaatataaatgccttctcctaatcagatctcacatttatttctttatgtacttatatcggtatggattaaaagtgtcctattttatttaaggtgtaataatccattctcgcttctattttttcacactgaagcccacattgttccagatttaacccatgggagccccttccagcaggtgtctgtgtcctttcattatggtgctatcatttcgtgagtgtcttcctgctttctggcagtaaatgttgttccaaaatcatcttgtattttcccaacttggaatataataagcccattcttcaaggtcctcccagtagatgccccaggsactacatgcacatctgtgtgtagatgaataacatacttattcacaacaatacttaatttgctac

SEQ ID NO: 673032 - DNA, 655 bp, Homo sapiens
cctgtggccccctcaatccacctcagcctccacagagcatcagttgctgtttcatcccgggttggtccagacagccactgccagtccactagagggagcacttgagaggaaacccatttgctttcattgatctagatctcaaataaaatttcatcttaaaggctgggcgcggtggctcatgcctgtaatyttagcacgtcgggaggccaaggtgggtggagcacgaggtcaggagttcaagaccagcctggccaacctggttgaaacccccatctctactaaaaatacaaaagttagcgtggcatgttggcagtaagctgagatcatgccactgcactccagcctaggcaaaagagtaagactctgtctcaaaaaaaaaaaaaaaaaaaaaaaaatttcattgtagaataaaatccaattcctttcagcttttatcttcaaattttggtcattgtttgcattagtcattgttcttcaggaaaacagaaccaataggatatatgtatctgtgtgtgtgtatacacatatatatgcacacatgtatatatttatatatacaaatatatgcatgcatatatatctacatatacacatatttacaattctgtaaaatcttatatataaataagactcacacatacacatataacgtgca

SEQ ID NO: 673033 - DNA, 620 bp, Homo sapiens
gtgtggtggctcacgcctgtaatcccagcactttggaagacgaaggcgggcagataacttgaggccaggagtttgagaccagcctggccaccatactgaaaccgtctctactaaaaatacaaaaattagctgggtgtggtggcatgtgccggtaatcccagctacttgggaggccgaggcaggaaaatgacttgaacccaggaggcagaggttgcagtgagccgagatcgtgccacactgtactacagcctgggcaacagagtgagactccatctcaaaaaacaaacacaaaatggtgttttgatattaatgtttaagatgtctttcatcaaaaacataagcctagttaactataaaaagcaaaccgaagaagcatttaaagaaaacataaatttttytaagggacaaccttcagaatgacccaaaaaaaccccagaagccataaaagtaaagactaatatatttgactacgtaaaaataaaaactttctgtatttcaacatatgccatacatgatcaaatgacaaattgttggagaaaatatttgcaacacacagtatagaaaaggactcattttcttaatgtgaaaagggctcccacaaataaaaaagacccaaagtc

SEQ ID NO: 673034 - DNA, 1370 bp, Homo sapiens
tggaatgaataaaactagacccttaaaaaaacatgcgaacaagcacaccactcaggaagctgctctctgctctatttctggagaccaaaagagtccctaacatagagcaaatattcaataatgttggaaggagggaggaaaggaggagctaagaatctaagttaaggccacatccttaaataaccaacaggaacaagaggaaccagaagaactatgaagacaaatcaatgtaagatatttgttttaactcagaatgaggctggcttcaaagacagggagccaaataagcatttaggaagcaatatattttaattttgcaaaacaacaaaaaacagtaagcttataaacagaagctttactgagagaaaatgaacagcttgaactacatgggggaaaataatgcataatgtcaggaattgcgagatacaaagacaaaataaaaatttttagagcaatgacatttctggcagatgaggaaaagtttgcaatagatgtagtgagataccacagcaaggacaaagtttggcaggagtaaaagcataaaggtcaaactggagatacatattgagaccacatatttacacagcttactaggaaagcagcattgaagttcatatgcagtgatacagaaagaatcctatgtgcttccacagttgtgaggaaaaagcattaatcacacaggccaatggggtaataataatgcagctgtgtaaaggcaaagataacrttactataggaactttgcttccagttttttctacttattggcaaaattaatattttcttctaaggaagcattaaaaactttttttaaaaaatttaattcacacaatatttccttctaactgcaataactttaaccagtagtttttaaagcatgcttctgtaagagtaagaatatgcaagtaattagtttagttctggacttgcctgagaaactcagaatttattcccggaaaatactaaatctattcaaaagagcttattttaaagaggatatttcattttgaaggcatgtccaacagtaataatgcaactttctaaagaaagggcagctgagaccaaacaaaccatgaccgagggtcactacatctgtgccactttccagtgaggagaattggcatgtcaccccaacctgagtatctggctcctgctcctctcccctctctccatcctgattcaacaaagtgctagcaaatgatctcagaaattctgtggcagaacagcagtgcttacacaggggttaagatttagagtcactaagtctggggcagggccagggtatttaaagtttacaaaggttctgcaggtgagttggaacaaccatttgaaagggtacaatcacttcactgagatgcctactacatttt

SEQ ID NO: 673035 - DNA, 642 bp, Homo sapiens
gaggggagtaaagcaagcttgcttctatgctgccattttggaaccagaagtccctagctgctatattttctaatcattcttctacactgagttcatcatcacctcctttagggaatctttcttgcctttcaactcttggtaagattatacgcctattcttgaatttaacatagtgctttgctgcatcacacaagcttaycacaatggacagtgaatttcaagaaccatttgttattcactttcatttttctttcaaccagcagagtgcccagcatatattatgtgtttaataaaaattggtcaaattaagctaaacagttgccgagcttagacactgaatgataacaacctcaaagccttatgttctatctccttatatgtttcagaactcaactctataaataaatccccattaaattttctttatgttagattccagctgtattttggaaattaaggaggaagatttcagatcctcatcttcccacttttaacttgctgatcaaggtatcaaagtcttaagcagatatttaatcatatgtaaaacttgacacgttcaagagtagaatccccagaatccatatgttcatttaatcagtattactaggcgcctcttcataaagtatttttatttttactaaa

SEQ ID NO: 673036 - DNA, 642 bp, Homo sapiens
gaggggagtaaagcaagcttgcttctatgctgccattttggaaccagaagtccctagctgctatattttctaatcattcttctacactgagttcatcatcacctcctttagggaatctttcttgcctttcaactcttggtaagattatacgcctattcttgaatttaacatagtgctttgctgcatcacacaagcttaccacaatggacagtgaatttcaagaaccatttgttattcactttcatttttctttcarccagcagagtgcccagcatatattatgtgtttaataaaaattggtcaaattaagctaaacagttgccgagcttagacactgaatgataacaacctcaaagccttatgttctatctccttatatgtttcagaactcaactctataaataaatccccattaaattttctttatgttagattccagctgtattttggaaattaaggaggaagatttcagatcctcatcttcccacttttaacttgctgatcaaggtatcaaagtcttaagcagatatttaatcatatgtaaaacttgacacgttcaagagtagaatccccagaatccatatgttcatttaatcagtattactaggcgcctcttcataaagtatttttatttttactaaa

SEQ ID NO: 673037 - DNA, 1072 bp, Homo sapiens
cttgccatggcatccaggagaatggggaggtggtggtaggggagggaagacacacasacacacacacacacacacacacacacacacacaaagacagaaggaatcaaaataagagcaaacaaatgctgagtatccttcctacgcagatacaatggacaaaataaggaagagaatgaggtcaaactaaatacaattattattaaattttaagtgactccactcaatggtttattgccaaaaagatgttaaacctgatccaactttagtcggtcttcttccttgtgagatgcagcaaagggaaggacataaagaattctgcctgaaggtcaacatcagaaccctttacatacattatcttagcatgtgtgtaatgggtactattaatagccccattttatagatgagtaaactgagtttcaaagagttcaagaaatttgcccaattcataaagttagtaaactctggtcattctaataaaagtctgtcttactcaagctttcaaaaatcagacctcgcaacagttccagtgccaccaattattcattgtgtcccctccagcaaaccagatactgaacaaaaacttgttgaatggataaattccaagaagaaactatctggcttctcagactgaggctaattaatcctactttttagagttgctataaaaattaaatgaaaatatcgaatgattagctatagaagaaaatataaaaagacacttaaagggctgaagtaaattcttagtgagttataaggatgatctaggacttttttgtgtgtgtttaaatctgtaacctttgaggcttatgtcagaaggagcaagtattcttttactgtctgttattcgggaccaccattaggagtgagactggccattcctctttgagttgactgtgacactctatcattcttataaatgtgtgcttttaaagtgcttgcatggatttagttccctaaagaaatataagaattcttcattgttgtctcgtgaacctaattatttcccctgcataattcaaacataccagtttaaagatgagtaattacactatcaaaataagtgaggaatcag

SEQ ID NO: 673038 - DNA, 1072 bp, Homo sapiens
cttgccatggcatccaggagaatggggaggtggtggtaggggagggaagacacacagacacacacacacacacacacacacacacacacaaagacagaaggaatcaaaataagagcaaacaaatgctgagtatccttcctacgcagatacaatggacaaaataaggaagagaatgaggtcaaactaaatacaattattattaaattttaagtgactccactcaatggtttattgccaaaaagatgttaaacctgatccaactttagtcggtcttcttcctygtgagatgcagcaaagggaaggacataaagaattctgcctgaaggtcaacatcagaaccctttacatacattatcttagcatgtgtgtaatgggtactattaatagccccattttatagatgagtaaactgagtttcaaagagttcaagaaatttgcccaattcataaagttagtaaactctggtcattctaataaaagtctgtcttactcaagctttcaaaaatcagacctcgcaacagttccagtgccaccaattattcattgtgtcccctccagcaaaccagatactgaacaaaaacttgttgaatggataaattccaagaagaaactatctggcttctcagactgaggctaattaatcctactttttagagttgctataaaaattaaatgaaaatatcgaatgattagctatagaagaaaatataaaaagacacttaaagggctgaagtaaattcttagtgagttataaggatgatctaggacttttttgtgtgtgtttaaatctgtaacctttgaggcttatgtcagaaggagcaagtattcttttactgtctgttattcgggaccaccattaggagtgagactggccattcctctttgagttgactgtgacactctatcattcttataaatgtgtgcttttaaagtgcttgcatggatttagttccctaaagaaatataagaattcttcattgttgtctcgtgaacctaattatttcccctgcataattcaaacataccagtttaaagatgagtaattacactatcaaaataagtgaggaatcag

SEQ ID NO: 673039 - DNA, 1072 bp, Homo sapiens
cttgccatggcatccaggagaatggggaggtggtggtaggggagggaagacacacagacacacacacacacacacacacacacacacacaaagacagaaggaatcaaaataagagcaaacaaatgctgagtatccttcctacgcagatacaatggacaaaataaggaagagaatgaggtcaaactaaatacaattattattaaattttaagtgactccactcaatggtttattgccaaaaagatgttaaacctgatccaactttagtcggtcttcttccttgtgagatgcagcaaagggaaggacataaagaattctgcctgaaggtcaacatcagaaccctttacatacattatcttagcatgtgtgtartgggtactattaatagccccattttatagatgagtaaactgagtttcaaagagttcaagaaatttgcccaattcataaagttagtaaactctggtcattctaataaaagtctgtcttactcaagctttcaaaaatcagacctcgcaacagttccagtgccaccaattattcattgtgtcccctccagcaaaccagatactgaacaaaaacttgttgaatggataaattccaagaagaaactatctggcttctcagactgaggctaattaatcctactttttagagttgctataaaaattaaatgaaaatatcgaatgattagctatagaagaaaatataaaaagacacttaaagggctgaagtaaattcttagtgagttataaggatgatctaggacttttttgtgtgtgtttaaatctgtaacctttgaggcttatgtcagaaggagcaagtattcttttactgtctgttattcgggaccaccattaggagtgagactggccattcctctttgagttgactgtgacactctatcattcttataaatgtgtgcttttaaagtgcttgcatggatttagttccctaaagaaatataagaattcttcattgttgtctcgtgaacctaattatttcccctgcataattcaaacataccagtttaaagatgagtaattacactatcaaaataagtgaggaatcag

SEQ ID NO: 673040 - DNA, 1072 bp, Homo sapiens
cttgccatggcatccaggagaatggggaggtggtggtaggggagggaagacacacagacacacacacacacacacacacacacacacacaaagacagaaggaatcaaaataagagcaaacaaatgctgagtatccttcctacgcagatacaatggacaaaataaggaagagaatgaggtcaaactaaatacaattattattaaattttaagtgactccactcaatggtttattgccaaaaagatgttaaacctgatccaactttagtcggtcttcttccttgtgagatgcagcaaagggaaggacataaagaattctgcctgaaggtcaacatcagaaccctttacatacattatcttagcatgtgtgtaatgggtactattaatagccccattttatagatgagtaaactgagtttcaaagagttcaagaaatttgcccaattcataaagttagtaaactctggtcattctaataaaagtctgtcttaytcaagctttcaaaaatcagacctcgcaacagttccagtgccaccaattattcattgtgtcccctccagcaaaccagatactgaacaaaaacttgttgaatggataaattccaagaagaaactatctggcttctcagactgaggctaattaatcctactttttagagttgctataaaaattaaatgaaaatatcgaatgattagctatagaagaaaatataaaaagacacttaaagggctgaagtaaattcttagtgagttataaggatgatctaggacttttttgtgtgtgtttaaatctgtaacctttgaggcttatgtcagaaggagcaagtattcttttactgtctgttattcgggaccaccattaggagtgagactggccattcctctttgagttgactgtgacactctatcattcttataaatgtgtgcttttaaagtgcttgcatggatttagttccctaaagaaatataagaattcttcattgttgtctcgtgaacctaattatttcccctgcataattcaaacataccagtttaaagatgagtaattacactatcaaaataagtgaggaatcag

SEQ ID NO: 673041 - DNA, 1072 bp, Homo sapiens
cttgccatggcatccaggagaatggggaggtggtggtaggggagggaagacacacagacacacacacacacacacacacacacacacacaaagacagaaggaatcaaaataagagcaaacaaatgctgagtatccttcctacgcagatacaatggacaaaataaggaagagaatgaggtcaaactaaatacaattattattaaattttaagtgactccactcaatggtttattgccaaaaagatgttaaacctgatccaactttagtcggtcttcttccttgtgagatgcagcaaagggaaggacataaagaattctgcctgaaggtcaacatcagaaccctttacatacattatcttagcatgtgtgtaatgggtactattaatagccccattttatagatgagtaaactgagtttcaaagagttcaagaaatttgcccaattcataaagttagtaaactctggtcattctaataaaagtctgtcttactcaagctttcaaaaatcagacctcgcaacagttccagtgccaccaattattcattktgtcccctccagcaaaccagatactgaacaaaaacttgttgaatggataaattccaagaagaaactatctggcttctcagactgaggctaattaatcctactttttagagttgctataaaaattaaatgaaaatatcgaatgattagctatagaagaaaatataaaaagacacttaaagggctgaagtaaattcttagtgagttataaggatgatctaggacttttttgtgtgtgtttaaatctgtaacctttgaggcttatgtcagaaggagcaagtattcttttactgtctgttattcgggaccaccattaggagtgagactggccattcctctttgagttgactgtgacactctatcattcttataaatgtgtgcttttaaagtgcttgcatggatttagttccctaaagaaatataagaattcttcattgttgtctcgtgaacctaattatttcccctgcataattcaaacataccagtttaaagatgagtaattacactatcaaaataagtgaggaatcag

SEQ ID NO: 673042 - DNA, 1833 bp, Homo sapiens
ttatcaatgtgtttaacatcttaaactgttggctacttaaggacagggacctttcctctcttgttccccagtgtccccagtgccttgaatagtgtctgaaactgtgcaaccagtatttgggggaggtaaggagcagagaggaaggaaaataaataaaaagggacaactggagctcaggcaaaagtgggtcatctgcacagttttcgcaacatataaatctaccattcacagaacctttaraaacatcctcattgggggaggaggagaagtgagagaaagagacgatactcaaaaagagaacagagacatacagagaaaggaagtccttactgtgtctcaaaagccaggcaccagtagggttgagggacatctgccaggaaggaggttttcagcagcatgaactgttttagataactagggcagaaaaaaggtgttaaaatgtgacagcaagaaggtcactggtgacctcaaggaagcagtctcatgagtgtagaggtggcagtcagtttgcaaagggttaaagaatgagtgggtgggaggaagtgaaggttttcaaggtatttggcagcagaatgaagggaaagaggaaagagaggagaggtgctctaggggcaacagtgagtggatgggatccttccgttttttcatgggacacaaatctcatcatgttactaccctgcttaaaaacttcaacttcccctaatgcattataaggcccaaaagtaataaagcacataaggccctgcttgaccaggttccttcctgcctcaccagcctccacctttgttctctctgcaccagctgcagggtgttggtcccaccataggtctttggcacatattcgtgcctctcactggaaatcctcctcattctcttggcacagctctttcacacttcagatttccatgtataaaagtgtactgcaggccgggtgcagtggctcatgcctgtaatcccagcactttgggaggctgaggcaggcggatcacgaggtcaggagatcgagaccatcctggctaacacggtgaaaccccgtctctactaaaaatacaaaaaattagccgggcgtggtggcgggagcctgtaatcccagcactttgggaggccgaggcaggcggatcacgaggtcaggagatcgagaccatcctggctaacatggtgaaaccccgtctctactaaaaatacaaaaaattagccgggcgcggtggcgggagcctgtaatcccagccacttgggaggctgaggcaggagaatggcgtgaacccgggaggcagaggttgcagtgagccgagatagcgccactgcagcccggcctgggcgaaagagcgagactccgtctcaaaaaaaaaaaaaagtgtactgcaaagactcccttttcttacaacccacctctgacatctctcccggtactcagcatcactgtaacaaacagtaatataattgctgaattgttttttcaactagcaaggaacttttctaagggcaggagccaagcccatcttgttctcacatacagtgagatctacagagagttgctgaataaaggaacaaacatgaaaacctaagagcatttgtatttcagccagcttgtagatggtaggtggcctgcttcctaaatcacatcaagtgggcttacaatttatgtttgggccaatatgacctcctctgacttcttcctacttccaaccaacccaagtgaatggtcgttctacacaagtaaaaacatgaggttccttggagttaccaccatacatcaaatgattttcccaaaaagataacccgtatactgtgattcgtggacttgccttaagttttacagaatggttttaactg

SEQ ID NO: 673043 - DNA, 1833 bp, Homo sapiens
ttatcaatgtgtttaacatcttaaactgttggctacttaaggacagggacctttcctctcttgttccccagtgtccccagtgccttgaatagtgtctgaaactgtgcaaccagtatttgggggaggtaaggagcagagaggaaggaaaataaataaaaagggacaactggagctcaggcaaaagtgggtcatctgcacagttttcgcaacatataaatctaccattcacagaacctttaaaaacatcctcattgggggaggaggagaagtgagagaaagagacgatactcaaaaagagaacagagacatacagagaaaggaagtccttactgtgtctcaraagccaggcaccagtagggttgagggacatctgccaggaaggaggttttcagcagcatgaactgttttagataactagggcagaaaaaaggtgttaaaatgtgacagcaagaaggtcactggtgacctcaaggaagcagtctcatgagtgtagaggtggcagtcagtttgcaaagggttaaagaatgagtgggtgggaggaagtgaaggttttcaaggtatttggcagcagaatgaagggaaagaggaaagagaggagaggtgctctaggggcaacagtgagtggatgggatccttccgttttttcatgggacacaaatctcatcatgttactaccctgcttaaaaacttcaacttcccctaatgcattataaggcccaaaagtaataaagcacataaggccctgcttgaccaggttccttcctgcctcaccagcctccacctttgttctctctgcaccagctgcagggtgttggtcccaccataggtctttggcacatattcgtgcctctcactggaaatcctcctcattctcttggcacagctctttcacacttcagatttccatgtataaaagtgtactgcaggccgggtgcagtggctcatgcctgtaatcccagcactttgggaggctgaggcaggcggatcacgaggtcaggagatcgagaccatcctggctaacacggtgaaaccccgtctctactaaaaatacaaaaaattagccgggcgtggtggcgggagcctgtaatcccagcactttgggaggccgaggcaggcggatcacgaggtcaggagatcgagaccatcctggctaacatggtgaaaccccgtctctactaaaaatacaaaaaattagccgggcgcggtggcgggagcctgtaatcccagccacttgggaggctgaggcaggagaatggcgtgaacccgggaggcagaggttgcagtgagccgagatagcgccactgcagcccggcctgggcgaaagagcgagactccgtctcaaaaaaaaaaaaaagtgtactgcaaagactcccttttcttacaacccacctctgacatctctcccggtactcagcatcactgtaacaaacagtaatataattgctgaattgttttttcaactagcaaggaacttttctaagggcaggagccaagcccatcttgttctcacatacagtgagatctacagagagttgctgaataaaggaacaaacatgaaaacctaagagcatttgtatttcagccagcttgtagatggtaggtggcctgcttcctaaatcacatcaagtgggcttacaatttatgtttgggccaatatgacctcctctgacttcttcctacttccaaccaacccaagtgaatggtcgttctacacaagtaaaaacatgaggttccttggagttaccaccatacatcaaatgattttcccaaaaagataacccgtatactgtgattcgtggacttgccttaagttttacagaatggttttaactg

SEQ ID NO: 673044 - DNA, 571 bp, Homo sapiens
gtctagactataaaatcatatttccataaggaaaaaatggattgccagcattctttcatacttaacaatgtaactaactgagatgtggttttttcccttttatattttagatgtttctattaaacttaatggtaaacaatttagtaattttgaaatatcaatgtatgtcacacaaaacctaacatttattttttacctcaacaaatgtaaagytagtttgatctttctacacagctaatctgaaaatgttcttagttcatcattatgaaaggactgttgaaaatccactggggagtcttgaaataaaataagttattttagcgactacatcattctttctaaatgttttgatcatttctttaaacatatttttaaattaagtcatctctttgaatatcagtttatattttcattgtgcagcatgtgagttcagcatgaagaattatagttgccaatgtgggaaattaaatttctccacccagaaattgcagacagaattgatgttatttgtcctttcagtcacaaaaataactgttattttttggttgaaattaaatataaaagaaagatt

SEQ ID NO: 673045 - DNA, 1404 bp, Homo sapiens
ttttacacatcctcctaactcctttgagaggaatcggagacagggatttctgaccactaccatggagaatcaagataaaacatcctgtgactgttagcagctcaattaggtatttatattggattagggaacatgaaatcaatgccactgaaagcttgaagaactcttatgcttattaacaagcagctctttatcttttccatctccccagcatgcccaggcagagaatatagaaaaggtaacttggagttaggcataagagaggcatagacagtggatgaaccatattttcattgatccttagttgtcttagttgcattagtaagctcctgagaaggtggctcttggagaaattagtcacagacctgaatgtttcttcctgataaacagcatcacagtaaaagatacaccaagatctcttgttgggcttagatttcagatgcgctacagacgaaacattaagacctgatttctatctcttcttgatattcaatttataatatgaagctatttatattttctccatttctagtatcaaaggcagccagtacattgatttaattctatttaaggaagactagccttctcttgccgtttcctatatgcacaacgatgatgagtacaggttttattattcagcatatattcctttattggtaatgacttaacaaaatgtaaagctttgaacattaaatgtagcttaaataaagtaacatttaaataaaatctaaatacaaataggcaattatacttctacattttgcccaactattcatcaatcataattgtcaccattatataacctgcttaattgagattgtgtactttcagttgaattttgtatttgatgtttagggtgtatacatttttagaaaaggttaatatgatccctttgtaaaataaatattctataatcatgtatataataattattttggctttttctcctctgaatcaggtcatgtcagctkcattttcagagttacaaactactaatggatggtgtatccttctagataaagtgcacagacacccccacactccaatacacacctaaatttcattttaaaataaaggttagtgtgaaacctatactgttttgaacattattttttgctatatatgtatgtatatgcacgaatatgaacatttgtgtctaatcaattcagtgaggtattatttttagtgatgaataccaccatatttttatgtgccacaagagctgtaaaatacagtaactgaaagcatgagttcaagagccagggtgcgtggactttttttttcttttttttgacaatatcttatttcagtccttaagtaagctttctaatatcttggtgtcttggttttctaaaccacaatggaatactactttggaatactacaaagatgagtcagatatcg

SEQ ID NO: 673046 - DNA, 646 bp, Homo sapiens
aatctctgctgttcacaaattttagagtaaataaaagcaaactaatgctacacatcaaataccttaactggcgagacataattcctagttcattttagccgccgggggcaagaagctatcaaagtgattttttttttccagcaccttaatgtgagacaagtatgaaggaaagacaagtatgaaagaaaaagtcccaaaccaatattgcccagtagtaattttcagagtgatttctcttttcagtatagacttggatgtattcggaccccttggagggggcgccggagaagcggcccagaaagtatttytatattaagaaaaatttagtttggatgcaaagtgagttttgcggacctcaatacagcctcgagaaatctgaagtactcctctacagcgttaataaagaaagataactcagattgcctgttaacttgcagcttctcctcctcccccatcggcttcagcctgaactcatcaaagcaccggaggacaggaacggaccttctatcgcttttgtttcctgcgtggcggagacttaaaggaacggccggtcgcctacctgccttccacttccccggccgcagagcagttcgctgccggctcggttcgccgccaacctcacctaccggctggctctccggcctga

SEQ ID NO: 673047 - DNA, 632 bp, Homo sapiens
tgagatcgcaccactgcactccagcctgggtgacagagcaagactgtctcaaaaacaaacaaacaaaaaaccatctatttttctttaaccaatgactcttgggatattcccattacagcagcttcgcctatatccaaatacatcaacttaaaaattttgcatagctcatgatgtttgacagtgtaggaacacgaacgcaagtgtcctggcttccaagtccatgttttctctgctgatgagtaggaaggcagtcttgcaacggctagttcgttatcttcctaaastgtggaatgatgactcatgaagcataatctgccaaaattcatgataccagccaacctacagccacttctgctgattcagatgggactcaataaaacagacagaagtaaggtgaaatataatgctgatgacttttgaaatctcagcctggaaagagagaattagtggtaaagcaaattgaacttgggaaaattaacaaaatgaacataatccaataggtatcggtacatgaggtagcaaggaaattatgactgaaatattataagtcaaggaaattttatctcattcaaaaggaacaagtctacagtaagggagatgagggtgcagagtaacccctgcatcagagagtt

SEQ ID NO: 673048 - DNA, 600 bp, Homo sapiens
ggaagagaaacccatgttgccacctctttgtgttgcagtaagattaaatgagataacagtaccttgaatacaatataaactcaataatttttcttcctttttatacttttgatatttaaaaggaaatttaggtgattcagtaagataaatgatcatttctgatttgccatttgtggaaatccaaattttcgttgagtctggttaaagataattacawctgtacctgaatgaatttttaaatggtgttattcatcttgatgagtcttatatttgtgtgacataaaaagaaaaaaaatctgctgaagaaaaaaggcatccattgaacaaacttgaacaatttttaaaaatactctttgttccttggtattagggaaattcaataaataattttaagcaagttaagaacatgaagaaaataaaccttcacatatgtgatcaaatgattttcaacaagggtgccagaatactcattggagataaggacagtttttttcaacaagtggtgctgggaaaactggatatccacatgcataagaatgaaattggacccttaccctaaaacataaagaaaaaaactcaaaatggatttaaaagctcaag

SEQ ID NO: 673049 - DNA, 379 bp, Homo sapiens
tgcctgcctcggccttccaaagtgctgggattacaggtgtgagccaacgtgcccagcctgcacctggactcttgatcctttggctgacattcctctccacatctagatcacactccacagctcatttcctagaggaaacctgtcatccagagagaagggagaaaacaattaagagacctaaaaacctgcccaagaaattcttaaatccagctataatcaactaacacattattgctttatatttattcatcagccatagtcatttaagtgttaaataaacaatgcaaactctgtcctctcctttagttactttttatagagttaagggraacaagaataaaatactcttctcctcccaccaccaccaccccagcatcat

SEQ ID NO: 673050 - DNA, 3137 bp, Homo sapiens
gtctcttgggtgcctgcctctgtgctggaccctgaggacagagatgagtcagacccacctggaattgcaggtgttcaccaggcaaaagatacggcatttgagtggacaaatgtaatacaaggtcaaaagtgacaagacctaagggaggcagggccagctgcaaaattggaggggcctagtgaaaaaaggaaaatgtggggcccttgttcaaaaattactactaatttcaagacaacaacagcagaggattaaaccgagtgcagggtcctatgtgaggacacaagctgcatgcccatgaagccaggcctggagggagggctatgtaggtcttgccaatttgggaagaatccttggaagaagcaacatttgaattggtctggttaaagagatcagtactgtttaatagataaggttcctttgcctgtctggccagttttctcatcctttgaggcctcactgtatgctctctcctccagaaaaccttccccaccaaacccaggctgggttagggctctcacagccccttccccaatccctctaaccctagacttctctaaaagcccttttcacaccactgcaattgaatctgcatctcccacaaatccacatgttgcctaaggacaaggtcyacacctaatccctgtctgtattcttagtgccccatggaggcactggacaaggtaggtgctcaacagtggttggcagaatgaatgaatacacctgagggagtggattgggcaaaggcctcctttgactgatgcttagggaacacgaaggtgaatttttacctgtaaggctggaaagttaagctggaattccatcagaaagacccctaaatggcaggccaaggtagaaaggcgttactgtctaggaaggtttgagcttttaaagatctatttagccgctatgtagaggacagattggagtggatgatggggtgcagggtaatcagaaagaggcagcgcagttaggaagctgtaatcatgatccaagcagaaggtcaggatggtttggaccagacaacagccacgggaatggagagagagaggaagaggtggatgagagctttgaagctccaactaccctggtggcagcaatactgggtcactagccagctattccaattattcacagaaatcaattccattccacagaggcttagataaaacttgtgttgccagccgacagtaatggatggggagcttagagtaaggagataagaggaggcccagagtgtggggtgatcaggtggggctttgcagggttggggaggagcggtaagaggttatcaaaacatcccttcaaatagcaaaggctcagagctggcccgcccagttgtgatctgtgacgggacaagtaggctcctttccaggcctggagctgtgagactcaggcctagtggtccttgggcattattcccaagcggaataatggggaagctagatcagtcttgctgccctggggcttatactgagatctagtgccttctatcggggaggtggagagacaagggcaaggccatggagtagggaggatgccctctgaggcccctttcagcctggactttctggaattctgagtccatgaatcaccataacgacattttgtctgcaggatcaggaatagaatgttccattctccagcatgggacagagggagtaggaggcagccttcatggtctcaactaagctgggccagaaaggctgtgtccccatcagcctcaaattcctccacatttgctgctaagggatccacagagcatccttcctccggagacataagagaggatgtgaatgtgagagagaaagtttgcccaggggaagagaaagaaagcaaaagacactggggcttcagcagtcagaaggtagaccacagacttatgctgataataaataattgattcttccatagtgtttgccatcatggcaggcactatcctagatgctttatgtgaactcatcatcaccctctcaacaacgctcattttatagaagaggagaccaaggccccaagttgaagtgaacttccccaaagtcacacagctggaggtgcagatgcacttggacctggacagtctgacttcactgcatcccaacactgtgaagatgatctgcttgcaaagggcgtgctatgcaccagacactcatttaggcacttttataagaataatatcacttagcacctagaaggagttatcagctcccttttactgatgagaagctaaggctcacagaagtaatttgcccatcttctgcccatttcagaaaagtagcagaactaggatgtgaacactcatctcagatccttgcatgctcacctctgggtcctccctgctgggcaggggctgtgctgaatggccgtgctcgcgcagctccggatggaggcagagtctgagggaccagcccctcctgccctcctcagacagcttttcctcacagtgtgggtggaggcagctggaggttggccctagcggccccatctgctaacactcagggctgggagaagatagtgctttttatctctgcagagagttcaagagtttatccccacccggggcagtggggagcctggtgcccattcttggagggtgtcccatgacaggagagatggaaggcacttcctctcccctcgagcactcactcctctccacaccccagcatcaccagaggccagcgggaaatgtcttggaccaagcccttggacacgggtgctgggtccagtggaaaatatctgcctcagggtccagggagggctgggtaccaagcagccagagcagcctgtaaaagggtcacagctctggaggtgggcaccccatgggcggtggggatgggggtgcacttctagctccgccaccttctgactgtgtaacctgggacacagtacttcaccatcgagcctgtttcctcctgtcgaaagctgaattcccattcctgctttggagcgttgttgtcagggttaaaacaggaaagatcaagtattcagtacctgcctcacagtctgacttatagatggggctctgaaatgacccctttcctgtatgcaccacatgaatttgacttcaatcaataaaacaaactccactctagtctcccatagatagagtgagcgagctcaccctcctcctccagccaccttcc

SEQ ID NO: 673051 - DNA, 977 bp, Homo sapiens
ttaaagttacaaaagacgaaaacaaaataaataagtcagcttttgatcctgctgctatatttacccacaagaaaggaggcagctctcaggtgggcttttgtctaagtaatgtcctgaaatccaagtgtaaaagaacaatatgaaatctcaattctcccaaacggtttggggcgagttcagcccttgagcccctgggggacttggttcccaaggagactaatcccacttgcacagcattaagcgtcactggggtgaaagagctctagtttggagttctgcagagagcccctactgcaggctggagccgggtccctctgctccataggaagtgaaatgtattgatgtcaaagccactcaaatgaatgtgctcactcagggagtaggaggagggactgatgggcttggctagagctggctactaactttactgaaaccaatttcattccagatagagctcttcctcaaaggaaaggagatcaagggaaaaagcagccaaggccttgaggctgggtctatatgtacaatttagttggacagtggaagctctaaggatttattttggtctcaggtatagaattacttcaagcagaagctgttctttgttgccctattgcctacattttcccataaacaccactgctttcatttagccatgcctctgcccaggctgttctctctgccacagatattgtgtgtttgctttacacagtcagatatatcatttaagtcttagctcaaatgctgcatgtctatgcagccttctccaactcctgtgggcagacttgagggtccttttacttccattggacatgtatcacattatattacaatggcttgtttgcatrtttgtctttccacccaaagggtagaaatcatggcttcttatctctgtatccccagtactagcatagcgctgagcacattgtgggtgtcaatatctttctgttggaaaaaatcagtgactggatggatattta

SEQ ID NO: 673052 - DNA, 508 bp, Homo sapiens
  misc_feature 408, 409, 410, 411, 412, 413, 414, 415, 416, 417, 418, 419,420, 421, 422, 423, 424, 425, 426, 427, 428, 429, 430, 431,432, 433, 434, 435, 436, 437, 438, 439, 440, 441, 442, 443,444, 445, 446, 447, 448, 449, 450, 451, 452, 453, 454: n = A,T,C or G
  misc_feature 455, 456, 457, 458, 459, 460, 461, 462, 463, 464, 465, 466,467, 468, 469, 470, 471, 472, 473, 474, 475, 476, 477, 478,479, 480, 481, 482, 483, 484, 485, 486, 487, 488, 489, 490,491, 492, 493, 494, 495, 496, 497, 498, 499, 500, 501: n = A,T,C or G
  misc_feature 502, 503, 504, 505, 506, 507: n = A,T,C or G
tctcagttctacttgatgtgggcccgaaggtctttcccacccctacaagctacctgccagggtgagctgagagatcagccaagaggagcagagccacttgcagctgagaggaatcattctgggggttggttagtaagcaggagagtaaaaggggcgaataaaccatgcacagaggttgaatgtctccagctgaagaaggcaagatgtagaagtctcttaccacaagggatcatatctgagtcatgcaacaccaaaatatgttagcagtggaacgtayctgagtcacagcaccaaagtatgttaacagcagaatgtatttgagtcatggcaccaaagtatgttaccagcagcgaatccatacagatctgcagcagtctcaactcttgccttctcaaaagaaagaattcnnnnnnnnnnnnnnnnnnnnnnnnnnnnnnnnnnnnnnnnnnnnnnnnnnnnnnnnnnnnnnnnnnnnnnnnnnnnnnnnnnnnnnnnnnnnnnnnnnnnt

SEQ ID NO: 673053 - DNA, 625 bp, Homo sapiens
caatcccaattatcccagaaaaagtaaaaacaaacacttgtatatgtaacaattaatattgtggcctacagctcatcttttatgttgggtgaaacctgaatctggctcttttcttttcttttcttttttttggactgagtcttgctgtgtcacccaggctggagtgcagtggcgcaatctcagctcactgcaacctctgcctcctgggttcaagcaattctcctgcttcagcctcccaagtasctgggattgcaggcatgcaccaccacgctcagctaattttttttttagtagagacagggtctcaccatgttggccaagctggtcttgaactcctggcctcaaatgatccacctgccctgggttacaggtactgggattataggcatgagccactatgcctggccaaatttggcacacttttaagacactcagcagattatttctttttaataagtcctggtagtacacaaaaatgcaggcataaaatgaaacattcttttaagaaatacctactgttctaaatgattatattatatcagcccaggaaataccaaatgtcctatgcttatggtccctagagttggcaatagacaatgagcttttcagagattcactattgttt

SEQ ID NO: 673054 - DNA, 666 bp, Homo sapiens
aaatgtctatgagactagacaatatcattcattcattctttactgaaagcctactgtgagttaggcactacctggtgatgcaaggaggagcaaaaacacttcgctcctctcagcctacttcttggttccttgattttcctctcctccaatgacttttgcaactctgtttcatattagcaaccctcgtgaaatggccttggttcaggatttattatctccgagaatttcaagatgcttgtcttctcaaatttctctagggggaagtaatgattgaagactgcggacactcaaactgaatgcacgctttgctgtcatctcagcttcccagcaactccctttggcttcttgttcctagtttgattcttagcctgctccacataggccatcattccaatcatggtcattagtctgacagaatttccccaggactgctttgcygatcctcaactctaagcactttaccattctttttctctgatttggtccccaaattccagagactttgtatgattatgtggactgaatccacatcaaggtcatatcacccaacctctgcagtgcatattgatacttcttggcagtgctttgctttattactagtggactcctctcatcacagttggctgctccgacctttctgttcttcagcccggtcttaatcccctt

SEQ ID NO: 673055 - DNA, 631 bp, Homo sapiens
  misc_feature 580: n = A,T,C or G
ggccaaattggcactttggtgtcgttctataattataaaaccaaacatctccttgctaaaatgtttgcattccaatcaactgcaaaaagtttcttggatcttttcacatttgggcttgacatccttaaaattaatcagctgagcatggtttatagctcacaaaaatctagggaawttttttttttttttttttttgaggcggagtcttgctctgtcacccaggctggagtgcagtggtgcgatcttggctcactgcaacctccgcctcccgggttgaagtgattctcctgcctcagccctcctgagtagctgggattacaggcactcgccaccacgccctgactaatttttttttgtatttttagtagagacggggtttcaccacattggtcaggctggtctcgaactcctgacctcatgatctgcccacctcggcctcccaaagtgctggtattacagacgtgagccaccgcgcccggccaggaaaatgctatatttttaactgggcaattttacactgatttttcctagagccagctaaaagctggcacattctctttaatgcaatcttctcatcctncccaaatgtccagcttcacatgtccccccaaaattaatcattcaagatgaa

SEQ ID NO: 673056 - DNA, 481 bp, Homo sapiens
gcctgggtgaccgcatgagactccattaaaaaaaaaaaggaaatcaaagcattcagcatggtgtcttcagggatctgcaggagtgtgcagtggctgacctgcgggagtgtaggaggagagtggaagagtggcaggaaatgagattgggcatagtcagatcctcaaggaattttatatggcaaacmaaggcttggagttttagagatgacaaggtgtttaaggaatagttggacatgatttctgtacagaaaaaccattctgagagcattgggaagagtggcttggaagtacagtagaccaactgagagatcagttatggcaaacttgatgcaagcgctcataatgacaactaccagcagaaattatactggaaaaacatagatgtaggcaaaacatcatattcaggagctttgtagtcagagcaaaaacaggttatactagaaaaacataaatgtccattaataggcaatgaatatctaca

SEQ ID NO: 673057 - DNA, 3700 bp, Homo sapiens
ttggcatcttataaaaaatatgtccttgaagacacaactcacattccatctcttaagaagccttttgaggtgtaaggttgaatttgatgttcctctttgatatttttgtttgtaattgtatcaaagacatcctgaaatccaaactttcagatgaatagatatgttatctgtctcccagatggacaaataaatggacatcttcccatccacttatttcatagcttgacaaatactgattccatatttaccaattcttgtttagaagttttcctcaaggtctcagataacatactaaaaataataattaatgaacattattcttgattcaaaaatagattagatagatgatagatagatagatagatgatagataatagatagatagaaggtaggtagcactttcactttctgtttttgttccatgatatgactccccaggttttccatactattctttatttgttcaattttagttcatttccagtctccactttccctaaatgtaaatgttgataatcctcagaattctagcttcagtcattttctagttgtattctacatattctttctgggaccttcattttttttaatcacttcattttaacacaatggcattttatttaggtagaaatatctactgatcattttgaaactcatgactaaagttttaaaatgacatcagaaatttaaataagaagagatcatgtcccagagttgacagcgggactagtagcaatgaataaaatgaaattagagatgggttttagaagagagagagagaaaaggtggcatacacatatctactcaaagatagcaaacatagtctgaaatttgtctagagatgtccgcatttttaagatcagaataagagaagtgacagaagaaacagagaagtagaacacattattattaggttaggcaggacggaaaaattacagaagaaaatattcacttaaatttagtcatgcaaattcaacttctgtgattccatgtaattctagaggcctttagaattatctttaagactttgattttaggtggcttccaaatggtggactaaagattcttgagaaggcaggacaaagaaataataaagaagtcttcatattcttaatcatagtatatgaatcacataaataatatattttatgcacagtcattatatcataaatatatatattaatatgtacatagacacagatatgtacatacacgtacatacacatacgtacaggctgtagtgattcaaaaattatcgaatgcatcatagctcccttagcctagaatgcccttttctacacttcaataatctctggtttcatagccaatccatatttaaacttcatatctcagtttaagtgtgagttcctataggtccacctttattcactgcttacatttcttctttataacactcagcatttttataatcgcttaacaggtccatccatttaaaacatattttatgtctgttttttgtatgttgacgttggcttatgctcaggataaattcgtgttccagatggacagtgacctttatggaatttagtgtctagtggcaaaattctcactaagtgttctctgaaaagtactaagaagaggttcagagtgctatgaaggctcaaaaatttgaaacttttcaagtctagaaggagggaaaaatatattctcagtagagaatataattttaggatataaaacttactcaataatccacatacttataagcaagaaagggaagatttctaagggcttagcctttagatataacctatgactcagcacatgatgataatttgaactttttaagcttttgttcatcatctgttttccaaatctcttcatatgctataacagytttataaaatttgcttttatacaacagatgacctaaattaatatgaggaaatcatataaaatttgtctcccttgatttcacccttaattgtattattaatttagtttttacttttttcagtatgagtaattatcactaattttgtaacacaccatgcaatggccctcagatcaaattatttggagataaaaagacgaaaaaagaaaaccaatactgtgcactcatattcaaatcaatgcagtagctaatttttgcactaaggttttcagtgagttcaagactgctttaggatgttcagatgcagatgtcctcagcatggaatctggacttgctatgactttcaccaaaatactaatggcttgaaaagatgagaatggttatattttacagcaactactgaaaccttccccagctggtgaagcagaaccattaaaaaatacagcaccagaaagacttttagtagagctgtcagattttaacattccagggttgcataattactgtattctctaatgcatgccagaaaagaatagttgggaattaatgagtgaatccaattgcttagtttctctggttatgagcagctctaccaacagagttaggctgtgctcttcctctgttcattcaccagaagaaatgagacctctgaacattttacccacaatatcataatttgaacatcattttgtgttggagtgtcttaaacagaagaactccccgtataccattcactgttcttagtttcatccaattctgtgtaatctctgtttcccaagcatgctacaggtacacctgcttccactcttctgttaggctgttttattctgtgaatgctttcttacttatcctgtattttttttcttcccagcgatacccagtccacatgtcctagttcaagttcctatagtaagcttttatcattttccctcttgctatctttcctctatcattgtcattattattgagcaattatacaacaaacatcatacagagtatatggtgtattaaatcgatgccaactatctacaaagaagttccaaaatcaaatattcatgtatatatgtatgtgtcaacctatttatctgtcagatataacttagagacaaataatacagaaaaggtacaataaagggttatagtaattccaagaaagcagaatttacttcagtctgagtcatataacacaaactagattatatcagtaattatttttaatttatcatttgctttatcaattaatttgctgtctcccacgtaaaagagaagaagtactaggctgggcgctgtggctcatgtctgtaatcccagcactttgggaggccgaggcaggaggatcacctgaggtcaggagttcgagaccagccaggccaacatggtcaaaccccctctctacgaaaaatacaaaaattagctgggtgtggtggcaggcacctgtaatcccagctactcgggaggctgaggcaggagaatcactggaacccgggaggtggaggttgcagtgagccgagatcgcgccattgcactccagcctgggagacaagagtgagattttgtcgcaaaaaaaaaaagaacaagtactctatactttctgaccttaatttcgaggaaaaattttattgcagaatcaaataaaccttattatacacctagcatgagcagggcattattctagataattttactgacattatttattgtttatcttttcacagttaataaatatttgattacaataaagaatagcaaatcacatttgtatactgcttttaagatatcaatgcagattccctgtttgatgttaccttttaatatgctatttcatttatcttacaaggaaatgca

SEQ ID NO: 673058 - DNA, 601 bp, Homo sapiens
ctggcctcaaataatccttccatcttggccctccaaagtacttgtattacaagcatcagcttctagttttaagctttgcatttaagtccgtgattcattttgagttaatttttacagatgttttgacctatggatcaaagttcatcgactgcagaaggatatccttttctcccagcttaatctgtggaaaagaytccattcatagacacagataaacgtaaagaaaaacaacccaacaacccaaaccttacttccaaatagcgaaaggattttcttgaaccctctgggtaactgaggtcacaaggcaaccaactggacacagatctaaggggagagagctcctagaaggagagaggagatacaagcacaggcttacttgggaaagatgcagggagagaccagaaagaagagtcctgcagatttgtgaaggccaaaacttgaagatgataaacacagcaagttctcactctcactctcactctcttgcaggcattttctcgattatcaccactggttcttcaagaaaagttgggaaaagtacttctactcatggagcagatccagtgaaaggaaatagcagcagctgcagtagaagcagaat

SEQ ID NO: 673059 - DNA, 639 bp, Homo sapiens
gagatcgtgcctctgctctccagcctaggcaacagcaccagaaaaccctgtttcaaaacaaaacaaaacaaacaaacaaacaaacaaaaaagtttgaccagaatcttaaartaattataattaaaatactaaaggagttagtgaaaaatatagacaacattcagtcgaggtaaaacttgaatgattcagcaaagtaatttaagcaaggaaatgaaaatcattaaaaaaaagcatctaaagaaagttctaggaaaggaaaacacagtatcggtgtcctgcaaaaatgactttaaataaagcatttcacaaatagcaacattgatagttatttatcctcttatttactccacaagaaattgtaaggcgaggtattaaggcgaaaagaatatactagttaaaaagttggatgtacccaaataaatgaaaagcacaggaaataaaatatgtacaggtaaattaggattcatatcttttcttatttttaattagaccaaaaaatatttgactgtatgaagcaaaagtggtaacactatattatgctattgtagcattcgtaaaagtattctatggcactaatagcacaaagaatgggaattaaaaatacagtgttgtaactgtaaatacattacacatgaaatg

SEQ ID NO: 673060 - DNA, 1246 bp, Homo sapiens
aagaaaacggagggatagatgagttaaggtctcctccaacctagtaagtggtgggacttcctgagaggaagagtggaaagggaacctgctttccttgctcagctggggctcaccctaatgccccaaagacctcctccacctttgggcagcccttctccagcagaaacagaagtgagggcttgccagcagccctggggcaccccagtcactcacccttacctgcgctttttttctcaatgtcaagaaggcctccttgctagcatatctgcctcagtatcccaagaattcctgttgggtcacttgtccagttctgacagcaatgggcaaattgtaacatccaatgccagcgctgcagcaccaggggttaacagaggaaccccttgaaggaaaaggattctgtgctcctaactagcaggatgtactgagtgaagaggccaactggccaaagccttgggtgaggggcttgtgggccagggaggtggccttttacctgtttggccaaaaagaagggaaaggaaatggttataaggccctctttctttttgtaaatgtttactccagattctcagcccaacaaccataatgaccaacaatgaagcatgcagtccactaattttcatccattcatcttataggatwtatgcatcaacaatacataaaaacataggcacatgtccatgatatagtgttaaaggggaaaagcagtatgagcccaacttggagtctgtgtgtgtgtgtgtgtgtgtgtgtgtgtgtgtgtgcgcgtgaggccctgtgctgagcagtagccacaggtaatcttgtgtacccctgttcgtaatcctgtggggtgatagcataattatcctctttttataaatggggaaactgaggctgagagcatttaggtcactcacccaacacagctaatacctggtaaagtcacgattcacatgtgctcttaatcattgccttataatgatcctgtatccttggccaatccttttcaccttacaaaggatattcgtgtttatgatttcaaataaaaatattcacagccactccaacaagcatctaataatgagcccattttagagattaagaaactgacactcaaagaagttaggagacttgcccaaagtcacagagctaatcaactgttgcaaaagaaggactccaactcaggtctgtacagatgcaaaaccctgcactatttcagagaaaaatagaaacagagataagagaagccaacatggacagacatcaa

SEQ ID NO: 673061 - DNA, 1515 bp, Homo sapiens
tagataccattgtgctggatacttgaaatgatctcatcaaaaatatattaagaaaacatttcaagttttactcctatgagtaagatatccaccctcctgtaagagaaactgatcctaaaagaagatgaatggattgagagagagagagagaagaggagagtgggggtgtggaaagaaaagtctacctcaggtgagaactgttctttgcacaatttcaaacttgagaactctgaccaataagcacactaaaaatggtggaatgcctacatgacactgtaatgaacccaagacaaaccaaaatgccatattgaaaataaacattcatcatttagattgcctctggaagactgatgggactgactggcattgccttacccaaagagtaataacaaaatcttatatatttcactcccttatcagggttcataaaaggaatacaaagtaagtaaatgcaaattttacaatcacccaaagatctaatattcataagagaactaacgaagcacagctccaaggtagttttttttttcttcctcaattgcactcctctgcactatgaaagggcaacccagcaacttgtcctccctaaacctctcgcagtcaaatctctgctatcacaaaagagatggacttgaaattcagtggaaaaatacctgccttggataagtttctaattagattttctagatgctgccaggaaccagtgatgtaatgtgcatgatgatattctggaagacaaaagtgctggctccctgtctgagggttctctagactgtcaggctacagcccacagggctgaggacacctagagtccccccaccatgcactggccccattaattctggtgctgatttctgcctgaggcaggaggcaggatggaatacataaaaaggaaaagagttaataacatcacttgaatcaaagtgatatggaaaataagctgtggaggttgcagtcaggtatgataaaaaaagaatctatcaaatcatttgatatttttgctatactttaraaataaaattccacttttattcaaaatcccaatggaatcaattcccagaaaattccaccgggattttcttcattccacagcatttatttgatcaacaaatctgccttaatcaactactgtgtccctggtgctatattaagagtgaatgttgtagaggtgggattggaataatcctcaaggagacaaaaaacataagaaaaaaagtaacaaggaactgagtataatactaatgagagtatcaaagaccagaatcttggtgcaaatagcttatttagatgattccagaatgtgctaagatgaagtggaatagcaagatgggaaagggaggaaagccaataggtgtgttattgagcaagtctctaaaatgagtaatgagctcaatctactggagaccctctgagaggaagtggaacacacctgaagattatcccattgcatgataaacgagttcactatttatcaactcctatgccccatatgttgcaggtagctcctgggacatt

SEQ ID NO: 673062 - DNA, 1540 bp, Homo sapiens
  misc_feature 1115, 1118, 1120, 1122, 1125, 1132, 1133, 1134, 1135, 1136,1137, 1138, 1139, 1140, 1141, 1142, 1143, 1144, 1145, 1146,1147, 1148, 1149, 1150, 1151, 1152, 1153, 1154, 1155, 1156,1157, 1158, 1159, 1160, 1161, 1162, 1163, 1164, 1165: n = A,T,C or G
  misc_feature 1166, 1167, 1168, 1169, 1170, 1171, 1172, 1173, 1174, 1175,1176, 1177, 1178, 1179, 1180, 1181, 1182, 1183, 1184, 1185,1186, 1187, 1188, 1189, 1190, 1191, 1192, 1193, 1194, 1195,1196, 1197, 1198, 1199, 1200, 1201, 1202, 1203, 1204: n = A,T,C or G
  misc_feature 1205, 1206, 1207, 1208, 1209, 1210, 1211, 1212, 1213, 1214,1215, 1216, 1217, 1218, 1219, 1220, 1221, 1222, 1223, 1224,1225, 1226, 1227, 1228, 1229, 1230, 1231: n = A,T,C or G
ttcttctcaattgtctaggcaggtagggccactgcaccagtgacatctgagaggcctgacccgaccagcctatcagtgtatcttaacccctcttgagggtcaaaacaaattcctctgaactcagcactcactagtgagttggaggaggctgatgacagggctggtgtctagagtaggatgagatgagctctgggagccataacagtgcagaggttcctgccatcagcatttcagggtatgggctgagcatttcagcatttcagggactgggcacagcagctcacacctgtcatcccggcacttaaggaggccagggcaggcggatcacctgaggccaggagtacaagatcagcgtggccaacagggtgaaaccctgtctctactaaaactataaaaattagccrggcgtagtggcgggcgcccgtaatcccagctacttgggaggctgaggcaggagaatggcttgaacccaggaggtggaggttgcagtgagccgagatcacaccactgcactccagcctgggtgacaagagcgagactctacctctaaataaataaaaaaatgtgccacggaagcctgctccgtactcacctcaccaaatgtcagagtcagggacacagggcatgccccacagggtgggatgacaggaagtccacctgggccctgaccctcctgaccgcccctcatctgggggtacactaaccctttcggactgcagggtgccctgaacattaggactgtggggtaccccaatcctttaggactgtgaggtgccctgaacatcagggatgtggggtaccccaaccatttaggactataggctgccctgaaatgacggccagggggtaccctgaccttttagggctgtgggacacactgacttcttaagactacggctggtgcctacaggagtccaagggataccaggcctatgtggggagggggcagaggtagaaaagcaatgggggaggtgcggggcatcggctgtccctgccctggagaggatggggccagccaggtaggtgtgcagccaggaccactcaaggactcaagggagagatgcggtcggggagagaggagtgggggacggggagagaggaggggggggatgggnganananganggggggnnnnnnnnnnnnnnnnnnnnnnnnnnnnnnnnnnnnnnnnnnnnnnnnnnnnnnnnnnnnnnnnnnnnnnnnnnnnnnnnnnnnnnnnnnnnnnnnnnnntagcccaggagacctgattaattcttctctggggatgagcacaccctagaaacacatcccattcacataaacacgggcacaacgatgacatgttcttgagtctacaccattctccgtccaactccacgagcccctgaagaccaagacaggctctttcctgcctgtgcaagctctggcccagggacagcctgctgaggaatgggctcagctgggtctgggtgctgggttcatctcttcccctctcctgtcccaaagcaggtccatcaccctgctcaggtctgaacaggagtgtccaggtttgtctggcca

SEQ ID NO: 673063 - DNA, 1540 bp, Homo sapiens
  misc_feature 1115, 1118, 1120, 1122, 1125, 1132, 1133, 1134, 1135, 1136,1137, 1138, 1139, 1140, 1141, 1142, 1143, 1144, 1145, 1146,1147, 1148, 1149, 1150, 1151, 1152, 1153, 1154, 1155, 1156,1157, 1158, 1159, 1160, 1161, 1162, 1163, 1164, 1165: n = A,T,C or G
  misc_feature 1166, 1167, 1168, 1169, 1170, 1171, 1172, 1173, 1174, 1175,1176, 1177, 1178, 1179, 1180, 1181, 1182, 1183, 1184, 1185,1186, 1187, 1188, 1189, 1190, 1191, 1192, 1193, 1194, 1195,1196, 1197, 1198, 1199, 1200, 1201, 1202, 1203, 1204: n = A,T,C or G
  misc_feature 1205, 1206, 1207, 1208, 1209, 1210, 1211, 1212, 1213, 1214,1215, 1216, 1217, 1218, 1219, 1220, 1221, 1222, 1223, 1224,1225, 1226, 1227, 1228, 1229, 1230, 1231: n = A,T,C or G
ttcttctcaattgtctaggcaggtagggccactgcaccagtgacatctgagaggcctgacccgaccagcctatcagtgtatcttaacccctcttgagggtcaaaacaaattcctctgaactcagcactcactagtgagttggaggaggctgatgacagggctggtgtctagagtaggatgagatgagctctgggagccataacagtgcagaggttcctgccatcagcatttcagggtatgggctgagcatttcagcatttcagggactgggcacagcagctcacacctgtcatcccggcacttaaggaggccagggcaggcggatcacctgaggccaggagtacaagatcagcgtggccaacagggtgaaaccctgtctctactaaaactataaaaattagccaggygtagtggcgggcgcccgtaatcccagctacttgggaggctgaggcaggagaatggcttgaacccaggaggtggaggttgcagtgagccgagatcacaccactgcactccagcctgggtgacaagagcgagactctacctctaaataaataaaaaaatgtgccacggaagcctgctccgtactcacctcaccaaatgtcagagtcagggacacagggcatgccccacagggtgggatgacaggaagtccacctgggccctgaccctcctgaccgcccctcatctgggggtacactaaccctttcggactgcagggtgccctgaacattaggactgtggggtaccccaatcctttaggactgtgaggtgccctgaacatcagggatgtggggtaccccaaccatttaggactataggctgccctgaaatgacggccagggggtaccctgaccttttagggctgtgggacacactgacttcttaagactacggctggtgcctacaggagtccaagggataccaggcctatgtggggagggggcagaggtagaaaagcaatgggggaggtgcggggcatcggctgtccctgccctggagaggatggggccagccaggtaggtgtgcagccaggaccactcaaggactcaagggagagatgcggtcggggagagaggagtgggggacggggagagaggaggggggggatgggnganananganggggggnnnnnnnnnnnnnnnnnnnnnnnnnnnnnnnnnnnnnnnnnnnnnnnnnnnnnnnnnnnnnnnnnnnnnnnnnnnnnnnnnnnnnnnnnnnnnnnnnnnntagcccaggagacctgattaattcttctctggggatgagcacaccctagaaacacatcccattcacataaacacgggcacaacgatgacatgttcttgagtctacaccattctccgtccaactccacgagcccctgaagaccaagacaggctctttcctgcctgtgcaagctctggcccagggacagcctgctgaggaatgggctcagctgggtctgggtgctgggttcatctcttcccctctcctgtcccaaagcaggtccatcaccctgctcaggtctgaacaggagtgtccaggtttgtctggcca

SEQ ID NO: 673064 - DNA, 640 bp, Homo sapiens
tccagaaagtataacactctccaccccctgtcccatagagaagccaccctgtgatccactctctccccttgtgtctgaatccaagtctaagctcccccaattccacagtggtggcatcccacatcgtggttcactgccttctcttaggtgggggaaagttctgtggggctaacttctgctggcacagttggcccacttttatgttggtggtgaccaccacaagtaccatttggctacagactgtgtcctggtattccaaggcttttgtgtctggaaggcatcctttagccagcctgctaaaggttgttctggatgtggagtggccctctgtcacatcctccacttgtaaggcatgacatgtagtgcrgttgttactcctaaacagtatatctcacttcagcttccttctgtctttgagaccagggtcttagggacacacacttatgtccttgcctttaacacagtccccacctaaacccctcagggtaactgactacatccaattcacagggctgtccctgcactagaactcccaaggtttgtattcatttcactgtgactttagcttcttcagagccctcatcctcccttttggaacagtcgcagtggggcaccttcttgactaagtgccatgggggcc

SEQ ID NO: 673065 - DNA, 1453 bp, Homo sapiens
aacccttagtacatacatgtggtttggtcacttcatggctgaggtaagaacatgcttgtggaagacaagtctgtggcttggtgagtctgtgtggccagcagtctctgatctgtgcagggtattaatgtgtcagggccgagtgttctggaatttctctagaggctcgcatgggctcctgaaccaattgtttctgtcctgctggtctgtctgtcagggttggaaaagtccaagccataggacccagttttctttcttagctgatgttttcctgctagaacaccatggactgttacttgccttgagttggaagtagtttgcatttatacctgtaaatatatttatccttttaatttatgtaaggttttttttttgtatgcaattctggattctttaaagagatgacaatgaattttggttttctactgttatgtgagaacatcagtccccagcaacatgtcattgtgtaagtagaaataaaagcgctgctgttaaaaaaaaaagagaaaaagaaaaaaaaagaagtatttccctcagtttcctgttgctttttagctttctgtattatactttacaaatagttttattttcccccaaacaatgcatacagttattacaaaagtcaaagtatataaggcttataataaagtggaagtccttcatctcacttctactcactgagttcctgcttcccagaaacaactgttttcatctctcttagctgtttctctggcacttacctccaacttctaaataatatgcttatattactttttttattatatcaattttagacattttctattgacttctgtcaatggatgttgaagatttctctcttttataatagttcctccttcctttccctcatatatacttatgccttctattggctctctatatgtattatttaattttggggtaggtcaacattcagtatttrtattattttgactatttaaatgttatttgtagttgagctgaataatttactgtgattagatttccattcctgtcaactctttgtttttcctggagttaacaatagcctcaggtttttgtttgcttgaaattggtagattggtagtttctgtaggcccaaaatagttgaatattttcaattttatgtgtttcaacttaatacacatctttgactagaatcaagcacattgaataagaatttttgtttgtttgtttttgttttttttttttaagatatcatccgggagcccttcatcctcttacagtagtccttctgtttaggttacatctcaactcaaggaggctgtgctatgcttggtgtcttagaatacagaagtcgactggaataatttcctagaaagtaaacctgtattttttgatagagttgggcaggcatagtcaatttttttgatgggagagaggtaaaaatctggaattttattttatttaattaatttatttatttttgagacag

SEQ ID NO: 673066 - DNA, 539 bp, Homo sapiens
tagaagaattaggtagcgaagctgtgtgattctaaagtctgcaatccatcatttaatttcctatccttgttctgtttgcttcatttcataccatgattttacataatacttcaaagtttgtaatccttaatctattctggatgggtctcaaatacttaaagaatgagctttagaagtcaattcttaccaggcatttaagaggcacaacttaaaactgccaatcagagtcgagttgtgacaactgaggcttagaactatgckcaagccaggccccaaaccaacccagactttttgtgtaaatgtcacactaacgtagtggtcaaatactgtgtaaatagatactgcgttcctccctgagcctctgagccttaaagatccatttctttgcttccccataaccatctttcttaaaagggggaaatgctgggaaaacatttcttccttctgtcttgactcttcgcccagatcttctgcactggggcttcggaaacatattcatccaaaacccaaacacgcaaacgggatgtgaccctccctag

SEQ ID NO: 673067 - DNA, 574 bp, Homo sapiens
ctaacaggcaattcacccatgtaaccaaaaaccagctgcaccccatgaactactgaaataataaaaactatgaaaggaaaaawgagacaaataaagagagtcaaactttcggtaatctttgtggttttgaatggtttttgtttttgaaggggtggccttcgatgtttattattcaaccagttaaaagtagagtccaaaattttttaaccataattaattacagatattttaactaaaatttatctcctctctctttccttatcaccaacatttaacctgtggatagtaataatgtccttatttcaaaaagtgcctgaagtactatcattcctgtaatttctaattccaaaattctaatctaaataacatttcttgatacttagattatcacctctcatcactaaatcatttgtcatcctccaccataaacattatcagcctggctttcatgggcttcattatttgccaactacatgggtatctactgttttctatctcacagacaccattatctcctctcatgcctctgttccatgcttatctttccaaatttgtgttttaaagtcttcattca

SEQ ID NO: 673068 - DNA, 676 bp, Homo sapiens
tttttttgagatggagtctcactctgttgcccaggctggagtgcagtggcactatgtgggctcactgcaatctccgcctcctgggttcatgccattctcctgcctcagcctcctgagtagctgtgactacaggcggccgtcaccacacctggctatttttttttttttttttgtacttttagtagagacggggtttyaccgtgctggtcaggattgtctcgatctcctgaccttgtgatctgcctgcttcggcctcccagagtgctgggattacaggcgtgagccactgcacccagcccaatgtttccattcttttgcactaaacatatcaaactcttttaaccctttctcgtatgctgttattgcaaccttataatcaatgattgactcttggatttgctcatgttttctattttcatatgtgagattactatttcagagtagttcacatattttaactcttggccccattatcatatacaatttttaatatgacctaatatggtatttggctttttttccctccaagagtagtgaaatacttgtttactttcagcctgtaggtccaaaacaatctcatgccatgaaacctaaacggtaatctcctagtctatgttgttggtgttatttgtcccaacatacttacgttttctaaattttaacatgttttgaaaaa

SEQ ID NO: 673069 - DNA, 1889 bp, Homo sapiens
aatgaacaatcaatcaagacaacaagccccgtggtgaagatatgggagaaagtctgaaggcttcagggctagccagcactggttttaattactagttatgtgatattgctagactgctgctttctgagctgtgaagggaggatgacacttatcttagggtgtggcgaagacttaagaggatgatcaagagtttcatggtaccaggaatataaagtttgaagaatttaaggaactcagtcagggttacataagggagtagaagagccaccttcaaatccatatcttctagatgccttcttactgagaaaccacaagcctactgaaatatctagcatgtttagcatagattataaaacttgaatacattataaacaggctagatattattcattaccatagcatggtaatattcctaataaaaggaagcaatatcccccagagtactcaactaacatatttaatgcatgttatcactcatactatcatatcacgtgtgctatcatagcaagaaaagagaaggagtttggaaaaacataccaaactttagttgacctattctttttttattttttagctgtattttttacccatttatttttcataatgaagacacattacttgaatttttactcaaggaatatgatctgaagtaactacattctgagtctcaattttatttttctaaacaagctttttaaaaatttcatttaattttgaaaactgaaatgttcttaaataatttgtattggaatttgattttttttcttctgtggtcatcacttactacaatgatattaaactgatgcctagagatagagcctgccatgttgcaagaaggggaaaagacaagaacttagttatgacaataaccattgccttctaatacccatggcattaattctcaaactttccatgagtctcctgtaagctatttgttaaaaatctagatttcctgacctactctaaggttttaatctggtagatttagggtggattccagactgcatttttaaaaagctccccaggtgattctggttaaagggtcttcaggtctctcaatgaaactttgtcctgtaagaattgaccctccaagtattacagcatctgaataaatataatgttgaaatcatgttataggggcataaagagattgctattcaataagaaacacaggtaactgaagaaaaagacattgaaacatagggcagatattgctatttcaattaggatggatttagttgagttttagtaataaccccagtatgtcatggcttaacacaataattgttcttctcattgattgtataggcacaacataggccagcattagggctgtgctagttgcagtcactcagactctggctgacagaagtgcctagagtcatctcagcagtgggaagagaatttgggagattatacattgacaaagctcctgctagggaagaaaccatcacttctacatatatgaagaagtcacatggccatgctgaaatcaaatagggtgggaaaattcagttaggccatgtgtacataaataaaatacccagaatgttaaccactttaatgactacgtcacatgccaaacttaggcagttacaacatagtgtagatragtctgaaaggtcaggagttaaattctaattttaccatttactagatctctgaatttgaacacgcctcttaacttcaataacccccagcttcctaatcctattgtaactcccaggtttattgtcagaaatcaatggaagaatatgtataaagtatgttacagtgtctgacataacagtatgaactcatgattattagtattattcataactgagttataattgatgcaccaaaatattcatattctaaaacaagtaagtaaatgtaaaaatataagg

SEQ ID NO: 673070 - DNA, 1889 bp, Homo sapiens
aatgaacaatcaatcaagacaacaagccccgtggtgaagatatgggagaaagtctgaaggcttcagggctagccagcactggttttaattactagttatgtgatattgctagactgctgctttctgagctgtgaagggaggatgacacttatcttagggtgtggcgaagacttaagaggatgatcaagagtttcatggtaccaggaatataaagtttgaagaatttaaggaactcagtcagggttacataagggagtagaagagccaccttcaaatccatatcttctagatgccttcttactgagaaaccacaagcctactgaaatatctagcatgtttagcatagattataaaacttgaatacattataaacaggctagatattattcattaccatagcatggtaatattcctaataaaaggaagcaatatcccccagagtactcaactaacatatttaatgcatgttatcactcatactatcatatcacgtgtgctatcatagcaagaaaagagaaggagtttggaaaaacataccaaactttagttgacctattctttttttattttttagctgtattttttacccatttatttttcataatgaagacacattacttgaatttttactcaaggaatatgatctgaagtaactacattctgagtctcaattttatttttctaaacaagctttttaaaaatttcatttaattttgaaaactgaaatgttcttaaataatttgtattggaatttgattttttttcttctgtggtcatcacttactacaatgatattaaactgatgcctagagatagagcctgccatgttgcaagaaggggaaaagacaagaacttagttatgacaataaccattgccttctaatacccatggcattaattctcaaactttccatgagtctcctgtaagctatttgttaaaaatctagatttcctgacctactctaaggttttaatctggtagatttagggtggattccagactgcatttttaaaaagctccccaggtgattctggttaaagggtcttcaggtctctcaatgaaactttgtcctgtaagaattgaccctccaagtattacagcatctgaataaatataatgttgaaatcatgttataggggcataaagagattgctattcaataagaaacacaggtaactgaagaaaaagacattgaaacatagggcagatattgctatttcaattaggatggatttagttgagttttagtaataaccccagtatgtcatggcttaacacaataattgttcttctcattgattgtataggcacaacataggccagcattagggctgtgctagttgcagtcactcagactctggctgacagaagtgcctagagtcatctcagcagtgggaagagaatttgggagattatacattgacaaagctcctgctagggaagaaaccatcacttctacatatatgaagaagtcacatggccatgctgaaatcaaatagggtgggaaaattcagttaggccatgtgtacataaataaaatacccagaatgttaaccactttaatgactacgtcacatgccaaacttaggcagttacaacatagtgtagatgagtctgaaaggtcaggagttaaattctaattttaccatttactagatctctgaatttgaacacgcctcttaacttcaataacccccagcttcctaatcctattgtaactcccaggtttattgtcagaaatcaatggaagaatatgtataaagtatgttacagtgtctgacataacagtatgaactcatgattattagtattattcataactgagttataattgatgcaccaaaatattcatattctaaaacaagtaagtwaatgtaaaaatataagg

SEQ ID NO: 673071 - DNA, 605 bp, Homo sapiens
caatagcttcctcatttaagtctctgggaatcacaatacattatctcctattgtttctgagatttgaaattctgatttctccatcagcttaagtagctcatttctaggctatgaaaaaataccctaactttacttctaaaatccttttttggtttgtttcaaaagaggtttttacatttttttatttcaaaattactgtgatttaaaacatacacttttgaacakttaaactctcaatttactagctctgtcttaaagttcctgccattcaagtcttgccaaatgtctttgtgtttgttatttttaaaatggatgctgtcttttctaatagtaccaaaaaatttgggggtggaggttgtgtttatttgttttgactttacctccccacttttccctaaatcaaatagttttataattttattgatatttacagtttagttcgttccttctaggaataatacatgaaaaaaaacaagttaaaaagaaaaactatagtctttaaaactattattgctagcaatttagaatattgagaaacaaattcattttaattcttaccacccctcctattttgaaggacatataacgtatattgcaacatataa

SEQ ID NO: 673072 - DNA, 1250 bp, Homo sapiens
gccaaatcagcaatgaactctgtatgaggcctaattaataaataatagtcttttttgtccttgacaattttttcctggaaaactcagctcttggaggtgcattatgaagtatgaatcaatatgagaaatgcaattttaactagaaatgaagtaaggactctgcctaaagggtaacttgtctaagtttattattcagatgataaaaaaccattttattgagaataccaaaaaaaawaaaaacctggtaagtctttcccttagaatgaataaagtattgatgtttctacaaaagaaatgtagtagtagaaattttcatcttatatgttgttaattttattaaatcaataaagttacttaggggatttataggtttttagggtatattcactactagggttacaaaatgtctgaagtcacaagttatggatttaggaatcttgtttaataataaatactgttcctgttgaggcactgtaagcccaatgcttatggataagaagtaaaaaaaaaaacaaattctattattcaagggcataatatgcattatgtcaactatataaatatttagtgataatgttctaaaagacatctgaatgggcttttgaatctttctttgtgtacatgtattagtaaccttaatcacagactactgaaatggagactgaaacattctttatgagtaggacataatataaatgactataagaagaaaacaaaaaaagtatgtcagaaagaatgccaattctttaattcctatactatccatgtaaactactacaagtcagaatctgtcagaatcccttaccgatgagtataaaatgagaatagtaaaattcattttacagagttagagtgtggataaaggttacagtggcaataaaagtgtaacccatagaaaatagtgtaaaacagttaggcacaagtccagtgaattccattcctgtcaggtgtttgatctttaggttaaaaagtcatcaaaaaattcaaggacttttgcacaatggcacaattttccaagaactagctgaaatattggcagttgtactcaagttgcaaattggtctaatcctgtcaaagtaaaatcaagttctatgagtttgactattttagatacctcatgcaagtaaattatgtggtatttatcctgtgattggcttatttcacttagcaaagtgttcttcatattcatctatgttgtcaccaatgacagaatttccttttacaatcttttttcttttaatgatacataa

SEQ ID NO: 673073 - DNA, 641 bp, Homo sapiens
taatgagcagtagcgaatggtagagagagtattcattctctcttacatttggcttttttctcagactttcttcaatgtctttattttactcatgtcgttctctgtcttcttgctttgatactcagcaatttctacatccttttcttccaattactttctttttaccctcttcattttcttctttacttgcctagccacagcatcaggccaggatgaaagaagtaaagccagtatctacaactgtctaatggttacagtagcaaagaaattttcttayctaatgaatcaataaatggtggaatttcaaatagtgaacttagtgaaaattttaaatgtaggattttagaaaataaagagaggagtatttcatagtttggacctctatcatgcatgatcataatattttaatcataaaacaattttattgattgcttactaaacaaccactgtgctatgcactatgcatcatgtcatgtgattcccatttttgttgtttttgctttacatatatggaaactaaagctcttattagttatgcaacttgcctaagactcaagagctgggaagcaacccagtaggtgttgaaacccaggtctggctgaaagtccatgatttcctaagctctctgccatgttactctg

SEQ ID NO: 673074 - DNA, 1266 bp, Homo sapiens
atatgtgttttatacttattttactagaaaaatctatttcacagtattatttttctatgttaagttgaatctccctaatagtttgcattgaatatttcacttttcaaaaactgtaaacagggtagcattagctaccaaagaagcttagtccaaaaccttgccttagcacccaggtttatactgaaattactcaaaatctaactgcacaaactaatttgctccgttccttatagataacttatggtcagtgtctgaaattgccctgtttcttgccatttccatgcttttgcttttattcccctttcttagaatagaagggtctctataaatgtgttagaaatccaacctctccttctacattcaagtaaattactactacttatataaaccacacactgacctctacacaaaaagtgatcacttaataccttcaattcccataacaatgtatttgtactttcttataagttttatttattcatttagccagtcggttggatgattgtttgctggggtactaccttttgctacaatattttacagttctcacagtccctacaaaactttgagacagaaagtaaatcttacttattttgtgtctcaatataatttatagttcattcaacaaacatttatttgccagactctgtgtggggctcagaaaatgcatgcaaaagtggtaagatccctacccaattagagtctgtattccagtggctcacaatcaaattataataacaatgaatgtaaacgtgtaattgccacaagagctaaaaatgagcagtatttggtcttatgagagcttacaacagggtattttatcacataaaaaagtcackaaagattttgctaggaaagtctgagtttaatctagaatatatgcactgagagcctcctatattccagagaatgtttcaggcacttaggctgcatcagtgaatccctgtcttccttaggactatattctagggaaggggttcttaaacattttcatgacctacactcatttgttagttttgtaaaacctatggacccattcttagaattatgtgtttgcatgcataaaataaaatacctaggattataaaagaaagccactatattgcaaaacagtatctaaaatatttaaaacaaaattgtgatataataagtttacgtacctttataattttctgaaattatttagatatgaaaagttgattgaaaaaagttatgatagaaattatactgcattttcagttctttcatggattttgtcacttgcag

SEQ ID NO: 673075 - DNA, 746 bp, Homo sapiens
tgtgtatatatatatatatatggacatataaatgtatatacatttaagaatttcagtgaattaatcagaagagactcccttctttattagcaaacataaataaaaatagatacaggtaccaacattcaataacaacttgtttttttgatatataatttatttatatctacttattgaaaagtatgcaatatatgctctgtttattttctttcttctctcactatattaattgtatcccttcccacccccttgaaataatctaaatttataacttccagtgtttcatagagatatactaaaagttttatgagattattctggagttaccatctgtaattttcaaaagtaaactaaaattgctcagcggataatacctgtattccatytggaatatcattatttgtgcatagttgcttattaatcattatcttggaatcagaataattgatcgatacagcaaagatttttgtaaatatcagcagtctttggagaatggagagttaggaaatttgaagattccaaataagtcatattaacagatgattatgttcctactaataattgtattactagtagaacaaattggcctcattcatctttatttttgttagctgtttaggagcattagactggtgggtacacttttgtctttactagtactaactagcaaaaggctgttttcaatctttttaaataaatatctattttagtgaatactgtaggtatatatatcatcagaagcaact

SEQ ID NO: 673076 - DNA, 2824 bp, Homo sapiens
tatattctttttatattttgaattttcaaaatgtcaatcacatgaacccaaaatagtatcaactgtcatggttttcacagataatttctctttttcaattgcattcatctttcttgactatttgccaatagttcatcaattacattagttttctggaaactcttggacaaggttttgttaggtgcgcctttctgctttcccatggatttcctctgggtgggctgcagagcactggctgagtgtgggatgcagggtgaagcagattgggggtacaagcttctgggctgcttcttgctaagcatgatcatggacacatttcttcacctctccaggtcttacttctttgtctacaatctgaggataattccctcccacctttattcactaatgcatgttattcttttggccattcacctgggacatcaatctccaattcctagaagtatccaggagagttggtgcagaagactctccctctttagtgtcctccacagtaacttctgttccctcacatagctgccttctgaggaaatttactcctttaattttaaaaaataggctttattttttagagcagttttaggttcacagcaaaattgagcagaaaatacagagagttctcatatgcccccagtacagagcctgtaccactgataatatccctgtatcagagtggcacctttgttacaatcgatgaactacattggcacaccattatcacccaaagcccatagttccatcgtttatatcagggttcacctttgttgttgcacagtctatggatggcatgtgtctaccattatagtatcatacagaatatagtttcggtgcactaaaaatccgcggtgttccacctattcatttcttcttcccctctaactcctggcaatcagatttttaaaatgtcttcctagttttgccttttccagaatgttctatagttaggatrgtatagtacacaatctttttttttttttttttgaggtggagtctcgctctgtcacccaggctggagtgcagtggtgcgatctcagctcactgcaagctctgcctcccgggttcacgccattatcctgcctcagcctcctgagtagctgggactacaggcgcccgccaccacacccggctaattttttgtatttttagtagagatggggtttcactgtgttagccaggatggttcgatctcctgacctcgtgatctgcctgcctcggcctcccaaagtgctgggattacaggcgtgagccactgcgcccagcccagtatgtaaccttttaagattgatgtattttatttaataacatgcatttgggattctcccatgtcttttcagggctcaatagctcatttctttttagtgctgaataatattccattgtatggatacaccacagttttttatccatatacccactgaaggacatcttggttgctttcaatttttggaaaatataaataaagctgcaatagccatctgcgtgcaagtttttgtgtagagataagtttcagattaatttgggtaaacaccaagaagctcaattagtggattgcatgataaaaaatgtttagttttgtaagaaactcccatcaactgtcttccaaagtggctgcactcttttgcattctcatcggcaattaatgagagattctgttgctccctatctttgaaagcatttggtattgtcagtgttttggatttttggtaattctaatgggtgtgtagtggtatctcattgttttagtctgtaatttcctgatgacatgtgatgtggagcatgactcttaattttcttacttcattttattgatttttggtttggcttagtagtgtctttattgcaaaaaataatacttgcctcatgggattattatgagaaataaggaaagaatctgataatttcaaatacagaggtgaatttatagacttcatttctatatcttgctcaagtttgataaggctagagctagaagccacattggtagaaagttagtgcccagcaatggtgtttaagttgcataggacagtggatttcaaatattttggtctcaagatccttttacagtcttaaaaattacttaggaccccaaagagctgttgtttatgagaaataaatccctttatatttaccatataagaaattaaaaattagaaaaattatatgtattaatttattaataacaataataaacccattacatgttgctataaataacattgtatgagaaaatgtctatattttaaaaacaaaaaaattaatgagaagaatggcattgtgtgactttttttggaaatctttttaatgtccagctcaagacttccagattctcagatctgcttatgcattcaatcagttgctgtatgtttttttgtttcaagcacataaagaaaatttggctgtacataaatatgtagctggaaaaaagatatgtagctccatgaacagctgggaaggatctgcagaactatgaggagttcttgtgtcatgctttgagaaccactgacgtaagtgcatggtatctggtccacacttttacatattctcagtttggccatcaagtccccacagttatgactttgcagcaaagatcttgataaaacaaaaaactggaccctaatgtaagaaatgatgtactgagattctctgagggtttgaagcctaaagagtattacccacaagacccacttaccactttatattatgcccaaaataacgaacagtgctgaataagagcacaggctctggagacaaaagaattgggctctattccaagtcctaccatgtaaaaattgtgtgtattgagaaatggcttaatctatctaca

SEQ ID NO: 673077 - DNA, 3131 bp, Homo sapiens
tgcatgcattctaaaaatagcaatacacatctgggaaggtgtattttttagcagtttacagatactgcagctatcacagacctcttgcaggaattctggattggaaccaatgtcagaaaatagttccctacagcccctgctccggggatctgtttttctcctaccaagaaggcaggagcacctgggccaggaagagtccaaaggattcaatatgttttcaaattttccccaatctgggggactccacaaagataagcaagggatcaattattgtaggactaagctagggattctgacctcttcaggagtaagaatggggtatctgaccaaagctagagttctaggctgtggaaagcaacccattctcaagggcctctccccatcctcagaggcccctagattaactctatagctaggctgggccaaaggcctgtgagcccctgcttttgtgttagtcatagaccgtgcaaagttatgactccaactttgctgcttagagatgtgacctaggatggctgtggtagtcattaatggtagatggcagtacacgccatggccctcttgtggttgctggggccatgtgactaattctggccaatgaatcttgagcagatgagatgacatcacttccaggccagatcatttagttgctactttgagaccctacagggctttctttccctctggaaaaggaaagcatggtattggagatggtggctgttccatcagcctggatctatgaggggcatgatgagtgaagcctctctactgaatagtgatgaacaacgagtattttgggaaatctgcctttgtcgggttcagccaccacaaatctagagttgcttattactgtgtcataacttaacctatgctgaccagataggctaggttactcttcgcagtggttctatattttagattctccaatataatttagtcaaaatggctatttttattttttatactaaccagttgccccctccagcactctcctcctatttctatcagtcccctctgatttgactggaatcaagctggtttacaggactgccagggtacttggctagtgtcatctatctggccaggcttctttcaaaacaaagcctttctcactgttccctcacaggcaatgagccatgcaggcaaggcagaggagggcgggccctcccagaagctcagaaaacacaaaactcatgcctttatgctttatggatgtcaattcagttttctccacaggcacaacctttttttgtgcatgactgtatatgacattttgaatgttggcccatttgaattgttttagtcctgtaccctgatcctctctggggctcttgaatacacttgggcttgtgtttagacagttgcgatgatgtattctcaaacccagtgtttagctgcacactttaatgacaggcaaggagtaattgggcagtttggcacgtgtcatgtcctaaatgtagagatgaaggttctaatggtaacagagggagaaatagatttgtcctgaacttggcaggaatgtcactctgccaagctctgccagcctgatgcttagacacttccagatccaggacccttctgaaaartgcaaaagcaccctgaaatcaccaatgaaacaggaaagaaaaaaaccatctctgctttgcaacacctttagcacacataagtgacttcggtgtgactctttggggtgaaggtttttttaaaagcatgacatttaaactcggcccaacatcattgtttccccattgccatttcccttcctgtgacagacatctcattattaagcatcacattattagcacaaacgctttttgtagaagcataaaggcaaggatgcttattaatcagaaaccaaattttctattcaggcacataatcagggatcttggaaaatgtgaatagcttatttggttggagggactgagagcagcttcctcccatggtacttgatctgccaggataatgatgtcctagggaagtgtactgtgagacccagtagaaactacttgaagctcagcagtcctgtggatgtcaccaaggagagtcttacaggaatggatgagcccctgcaaagtgtgaaataaagagtgctaggagtgctactctgcttaaaaaaaaaaatctccccatcaatttgcctgcattttcaatgtcagagataccttctttcttctcttaaagatttcagatgttaggagaggtaatatagttagtggctaagttcatacgctttgtggtcatgctctctgcatttgaatactagctttgccactgactagcagtatgacttggggtaagttacccaacttctctgggcctcagcttcctcacctatagaattggataataatcattctgcctcatatatttattattgttttgcctcatatatttattatttattattagggttattgtgaagattaaattgaggtgatatatgaaacacacagaactgatctggtaccaaatttctaacttggggttgaagttccactaacagccaatagtggtggttaggtagtcaggttgagaaggagctatttccaggcttggaaagttctccttgggaaggatttgttctggagtttcctgttgctgtatagcctttttaaggtcttgatcagtcctaaattccccaaagacaactccagagagtcacaactatggtggaatgtggacatgagagaatgaaatgaaaacagagctgttcctttctcctgggggtcctgggctgctacggaaatgctgggcccaatctgaatgaaaactggtttcaaaaggtaaccccttaactcagtttgttaagctcattttctgacttcaaatggtagacagagtttctttcttcaaaagtagaaaacactctgtttaaagtgaaagaccactgaaaagtaaacatgattagttcgccttaatcaagaatgttcaaaaaacttttcagaaattgcaggatctaatcccacagggggcagctggttcccaagcccttttcttttcttttcttttcttttctttttcttttttttttgagactgagtctcagagtctcgctccgtcgcccaggctggagtgcagtggcgctgtcccggctcactgcagcctccgcctcctggattcaagcaatt

SEQ ID NO: 673078 - DNA, 2095 bp, Homo sapiens
ttatatgcctttcttccatttctttttctttatactcttaccctgtctgaatgtatcctatttgtttgtttgtcaatggcagttttataaatcatgttccctcaaaagagtgaataatcaatgtgttttattcattcccacacccctagagcacagcctgaacataataagcacgtgcttggaaggccttaggaattgtctattcctgctcccttgttttccgagaataattgagatccagagaagctattggttcgtgatgcaacacacatagccagttaagaatggagccaaagtgagggcatggtcctgtagtttctagacaactgctatttctgctacaccttcttgctgttcatttaaatgaaaattaatcttattttgagtagttttttaaaattgtttaaaataagttcaggtgactctgattcaggaatgccccatctttaggtatgaaaaaagttctgtgaaagttcatccacgcccttctgtgcaaaaacttctttaattcaccatacttccttaaggtattaacatacaagttggtttagacttcaaggtggaaagagttttttctaaactttctttttccattattgaaataaatctgttgacgaaattaacatatcagatggaacaacaaaactagaaataactaagatctctaaagataatttattcattaaattagaacttttaaatacaggcaaaagagaaaataactattattaaaatgttccaaccaaattgctgcttatcttacactatgctaattagtaacagcacccaaaattcactcttccacaataatcagagaaaaccggagattatagaaaggctgtgggaagagggaggtggtggggtgctactagttattagaaaggctcaataataaccattaaggtttgagttcaaattccatcctttggggtttgtgcctggattctgaacacctttatcctcttcccgttactcttaggacagccttttaatatttgcatgataggtttctcatacaattaaatcccctccgacccattctttgcactgcagatagaatgagtctagtaacacacaagtcatatcaggtccttctgctacttccaactctccgaagtcttcccattgcccttytgagagaaaaatgcagactccttaatatgaactgcctgtcccattgcagtcctatcctgctcatttctcaagtgtaatccatcccctgtgctgtctgccttcaccacactgggtctatttagtgctcacctgggagccatggtagatgctcacttctttgctggatgtgtgttcttcttttaaattctggagatagtacatgctgtgaattaaattgtgtctttctccaaaaaagtgtatgctaaaaccctaaccccccagtgtggctatatttggagacagggactttaggagtggtcataagggtggggccctgattcaacaggattagcgtccttattaaaagagataccagagagaccaaccagcacacacattgtctctctccccaccctacctctctctttcatcacacatacacagatccttgagcacacagtgagatggtggctgcccacaaaccaaggcaggagtcctgaaaatgaaacctacattgctggcaccttgattttgaacttttagcctccagaactataagaaatatattctgttgtttaagccactcaatctatgctattttgttatagcagcccaaactgactaagatattatacataatattaagatataatatcactataataataatctactttttgtgttccaggcattgtgatagccattttatatgggttaccttacttcatcttcaagacaacctttaatgtggccattcttgtctccattttccaaataaaataactgaagttcagagaaattatatttttcttttagccatgataagcctgaaattgagaatggttaggtgatgtaaacgaagcacggctgccttcgggtgcactgaggagcagggactgtggcttggctctatctggctgcatgtcctttgcactaagtagctacctgacccagtgtttgccctaaagggggattaaaccct

SEQ ID NO: 673079 - DNA, 617 bp, Homo sapiens
tattttaattatcactacgcagtacttgaccatacaacagacataagtgggtaaaactgcccagatataaaaatagcttgctttgggatgttatggaaacatatcccattagagctgtagaaagacttaggaaatctacagagaagagcaggcgacaaagacaaaagtaaatgttgtggcacagagtgagtgcccaggaaatttgatgagcttaattgaggaaaggagcccaatcgttagcccagactgatagaccacgtttcttcttcacatcttctgtttaattttcacaggcatttcagttcttctgtttccaaatctagtcctcctttagtctcccttaacccaggtaacggcatttgtattcccgcagtggcttcaaccagaaacttcgctccttccattttctcactcccacttccatcaaagctttctattacaatttcccttgtctraaccttccctttctttctccttaaatgtttcgaagggcttctagtaatctccagctctctgcactgattttttttccagtcaatttctcctgaatgctcagagcagtctttaaaaataagataaatcattaaaaataagataaataagtcaaacaactttaa

SEQ ID NO: 673080 - DNA, 622 bp, Homo sapiens
ggagggaggcaggcatggctgaacaggcaaagtgctgaacagggatgcagctgcaccaagagctcagaagccagtgtggccctccccagggaaaaggtggacaaggtgactcgaacactcgcagcagctggggaaattagtgccatcagaattgaaagaagggactgaaacccacactacagtattcagtacataatcccctcctccagaagtattaccccatctacacatagccagaatcacatttaggtgattacttactgactttcactaagaatatttctatgagagtcaaattatttaaaaaygttatagagtacatagtattccattttatggatacaccataattcctttagtgctagcatcatttcaaaggtcagtgattccaattttccctcctaaaaataacactactgtaataacctgggaagcaaatatttatgtacatcttcagtgactttctcaaaaaagacatgagagtcaagaaaaacaaccattaagagtcaatactccaaatactcaaaatctactaaaatttgctttctaataaggttcataatatcctagcaaatgttaccatgtgacttttccagaaaccttgaaaaagggtatcttagtg

SEQ ID NO: 673081 - DNA, 622 bp, Homo sapiens
ggagggaggcaggcatggctgaacaggcaaagtgctgaacagggatgcagctgcaccaagagctcagaagccagtgtggccctccccagggaaaaggtggacaaggtgactcgaacactcgcagcagctggggaaattagtgccatcagaattgaaagaagggactgaaacccacactacagtattcagtacataatcccctcctccagaagtattaccccatctacacatagccagaatcacatttaggtgattacttactgactttcactaagaatatttctatgagagtcaaattatttaaaaatgttatagagtacatagtattccattttatggatacaccataattcmtttagtgctagcatcatttcaaaggtcagtgattccaattttccctcctaaaaataacactactgtaataacctgggaagcaaatatttatgtacatcttcagtgactttctcaaaaaagacatgagagtcaagaaaaacaaccattaagagtcaatactccaaatactcaaaatctactaaaatttgctttctaataaggttcataatatcctagcaaatgttaccatgtgacttttccagaaaccttgaaaaagggtatcttagtg

SEQ ID NO: 673082 - DNA, 622 bp, Homo sapiens
ggagggaggcaggcatggctgaacaggcaaagtgctgaacagggatgcagctgcaccaagagctcagaagccagtgtggccctccccagggaaaaggtggacaaggtgactcgaacactcgcagcagctggggaaattagtgccatcagaattgaaagaagggactgaaacccacactacagtattcagtacataatcccctcctccagaagtattaccccatctacacatagccagaatcacatttaggtgattacttactgactttcactaagaatatttctatgagagtcaaattatttaaaaatgttatagagtacatagtattccattttatggatacaccataattcctttagtgctagcatcatttcaaaggtcagtgattccaattttccctcctaaaaataacactactgtaataacctgggaagcaaatatttatgtacatcttcagtgactttctcaaaaaagacatgagagtcaagaaaaacaaccattaagagtcaatactccaaatamtcaaaatctactaaaatttgctttctaataaggttcataatatcctagcaaatgttaccatgtgacttttccagaaaccttgaaaaagggtatcttagtg

SEQ ID NO: 673083 - DNA, 622 bp, Homo sapiens
ggagggaggcaggcatggctgaacaggcaaagtgctgaacagggatgcagctgcaccaagagctcagaagccagtgtggccctccccagggaaaaggtggacaaggtgactcgaacactcgcagcagctggggaaattagtgccatcagaattgaaagaagggactgaaacccacactacagtattcagtacataatcccctcctccagaagtattaccccatctacacatagccagaatcacatttaggtgattacttactgactttcactaagaatatttctatgagagtcaaattatttaaaaatgttatagagtacatagtattccattttatggatacaccataattcctttagtgctagcatcatttcaaaggtcagtgattccaattttccctcctaaaaataacactactgtaataacctgggaagcaaatatttatgtacatcttcagtgactttctcaaaaaagacatgagagtcaagaaaaacaaccattaagagtcaatactccaaatactcaaaatctactaaaatttgctttctaataagkttcataatatcctagcaaatgttaccatgtgacttttccagaaaccttgaaaaagggtatcttagtg

SEQ ID NO: 673084 - DNA, 1890 bp, Homo sapiens
cttttcaatctaggcctaattgtactccaaaggaaacatcctttgtgtaccctataaatgtgggaatccccccacattgagccctatttattcacattagagcacttattataggtagtaacttttataaataaacgcacatttatatatttcatatatatatatatatatatatatatatgtgtatgtatgtacatttctgtcctccatattgacttcataaataaaaccaggggtcaaaatagctaccacataagaagtaattaataattattatgtaaaagtatcattgaaataatggttccagagaaaactaaaagtcataattatagtggttaaatattacatataaacacacatacacacacacacacacacacacatatatatgtaataaatgttagaaaaattatttttaaaagtaatggaatgaaagctgtatttaatcatgcaaatgaataatttttaatgctatcattatcaactagaaagaacataaattgaataataattcaataaaataataaaacaaacataagaaacaatggaaaatagaaaaatactacagatgaagacagaacattataaattgataaagaaaatatgaatcgatttgataaatacaggtaggaaataataaatataaatattggatctctgcccagaatccttagcacagagcttctatgatccttggatttcttgaaagttaggggttccaggagaatcttttgttctaatatttgatatctgaactggttcttgacacagagctcctaaggcttttataatttcctgagtgatagaagaatctgatacaaagctcttaaatcacttggaatttccttggtgataggagatcttttcgtctaatgggttaactcttggtgtgctcctggatgagtgctcatcactagaaagaccaagccatgattataaacttagagctttcagccctaacctcattttccagagatggaagaaggactagaaattcagttaataatccatcattcatcagctgcctgaatccatccaactgtgaggttcaggagcttccagattagtgaacacggcaagggctaggagggtgttttttgccaactccacagggacagaagctcctgcactccagatattaccagatcttgccctatgtacctcgtcatttgattgttcatctgtatcttttattaataaatcagtaaatgtaagtaaacgttactgagttctgtgagccactctagcaaattaawcaaatccaagaaaggggcaatgggatctcagattatggctcgtaggtcagaagtataggtgacaacctactacttcttgtgactggtgtcagacattgggggcagtcttgtgggactgagcccttcaactgtgggatcttaccctatctataggcagttagtgttagaattgaatcaaattagagacacccagctaacgactgctggagaattgtctggtgtgtggaaaaatactgccgcgcatctggtgtcagaaatgtagtgctgaaggactatattagagagtaggagaaacactttgttttttttttctctctgctcacagataagcaatattaaaattaaaatagaaaacaaaaacaagaaagactggcaaatgaagtgaaaataaagaacaacattcatgtaaccgaagttggaaatgtacggaagataaaacatcagatagagaactacttgaagcatctgagaatactttgtacaattacacaatgtacacaatttgtataattacacaatggtaatgaggcagtgtggaatatctgagattgacctgaaagtatcagctacaaaacaagagcaatgtgaattaagggaaaaaggcactgaagccggagaaatagaacagtgaata

SEQ ID NO: 673085 - DNA, 615 bp, Homo sapiens
ttaaagtttggaaatctctcacggtaataaccgtagatctatgcttcaatactgatgaaggactgagtttccaagggttsttatgaatctgtggtcctggtctctgttgcctgcctttcccagatcaggctcaaagggaagatgactgaaaggaatgttctacgaggtccttttgtcagcttctaaatggaatattctgagaaccatgccgaccccgtccttaaccactttccctagtttattgttctttatagcacataaacaaatgaacaaatcaatttaagtagtagtattatctgtcttcatgagcatagctttttcactactttaccactgcctggaacagtgtatggccctcagtaggtacccaataaatgtttgtcagatgaaagaacctatgtcatgtttcttcttgaagaagaaaaacaccaaatccttgattctgcatatgcgcagagttgcacgagaaatatgcagtggcgataccacctgttttagagacatgttgctgctgttgggtcatctctgctcacaacatacctgctgaaatctcaagctccacattttcttcctgcttttcctgagtggccgtatatctccctggtttgaaacctc

SEQ ID NO: 673086 - DNA, 789 bp, Homo sapiens
gtttatttttatttccctctctttacctccatttctgatcattaagtggtccgaccttgcacataatttgctttagattaagtctttgacctttatccctctgcttcattcattcatttaatacatattgattaatctggaaatgagaaacaagggcactccagaagtctaaaaagtaagaaaaaagacacaaccacgttactgcctaaacaaccagttaaggacaccatgctactgcccccacaccaccagaaaatcacctttatctattccttatgactttggattcaaagtaacttgagagaaggcccagttggctggatttttgtcatttgcctgcctcctagctgcaactggaggctgataaaggaaggatatgactcccttagcttcctcctgasttctagtaagaggcaggacactagttacctttccattgagacacagttggggagttaatttgccaaattggaaataatagtgcaaaaaaaaagtgacaaaaatccactacagtgctagtgctgagtgttggagaataaacactggcaaagggataggggagggtattttaaatactgaacatggcatacgtgtgcagagcaccagtgatttggtgttgctcttggagtttgagagtgggtgtgggtagggatgtgagtggagaggtggagtgctctgtgtgctgctccatggagcttggactaaagtcagcagctgacgggagtcatcgagggatgatggtggtgcgacagaatttccactggaaaggagtttaaagggcatcttacc

SEQ ID NO: 673087 - DNA, 1652 bp, Homo sapiens
gcccgccttggcctcccaaagtgctgggattacaggagtcagccaccacgcccggcgtattacttcactttcaacatccatggaaaatttctaattgtcatctctctggcaaactttgaatatcagcagtgattgtgctgttttgtaatcaaaacttgagcataattttcaagatcctcaaaccactttaagatattagggtaatataatacagtattccattagttaatgagacctctttggttacactgaatacctttttaaaaacaaaaattaacagagaggtagaaaaaattactgtgtcagcaagcatagtttttacctttttttaaaaaagtgccaataaagaggtaaattaatcttccagaggttcctaaataaataaataaaatttaaaaaaggtacattcagtaaaatatctactttgtcttgtaatataagattaattatcttttaaagctaagatggaagatcttaatattgtcatataactttatgcagaattatttgttttttaaaaatttttttgtctttcctgcacagcaatatacgtaattacgtgtttaaatatatatacatataaatattgaaatgaataaagtatgtgtgatgcagaagagaagatgcctggttcaaaattggtctcgaagtttttactctgtttttcaccaaaggtagtaaaaagctatttaccttttgtgtaatctgccaagatagcagagatttcttatgtcaactgaatatttttcttgagaacctgttaatttttagtgcttttgaaacgatcaacaaatgttcttcaaatctaaaagagctatattacattgttacgatgatgatgatgttactttgtgctaygtttgtttttaaatattgcattgttggctgggtgtggtggcttacacctgcaattccagcacttgggaggttgaggcaagcggatcacttgatgtcaggagtttgagatcaacctggccaacatcgtgaaacaccatctctattaaaacttttattttttaattagcattcttattcttgttaatcagctagccaagctaaaccgtttcttttactttttttttttttttttttctgagacagagtctggctctgtcaccgtggctgaagtgcagtggcgagatctcggctcagtgcaacctctgcctcctgggttaaagtgatcctcttgcctcagcctcccaagtagctgggattacaagcgtgcaccaccacacctgactaatttttgtatttttagtagagatggggtttcaccatattggtgaacaggctggtctcgaactcctgacctcaagtgatctgcccacctcggcctcccaaagtgctgggattacaggagtgagccaccatgcccggccccttctctttttttgagaaagggtctcactctttcacacagactggagtgcagtggcaccagcctagctcactgcagcctcagactcctggtctcaagctattctcctgcctcggccttccaaagtattgggattacaggtgagagccaccacacctgaccaatttttttctgtttaaaatactcttgccaaccaatagcaattgtaacacatagtttagtaggtggattagaaggaccttgagatttgtcagtaccttcaaagatcatgata

SEQ ID NO: 673088 - DNA, 622 bp, Homo sapiens
tgaaggatacctggaacagagactggaatatggcaagataaaggataggaacttgggttccaagggctgatcttagctctaccaccagatagcctgggttatcacttgggaaacacactgtccctctaaaatttgttatatgggttaataatactgacttcaggctattgcgagactcaagataatgtactaaagacctttagcacaatgtctgacatctggtgttcaataagtggtgatattgctcaatttcattccaattcaaacttayaaacatccatgggaagtctgctttatagacaagcaataggggagcacagtaattatttgggaggggaaatctcagcagttcttccaagtgacacattctttctttagatatgttaataccttatttaaaaaaattttttttttgagacagggtattgctctgtcacccaggctggagtgcagtggtgtgatcttggctcaccgcaacctctgcctccctggttcaaacgattcttgtgcctcagccttcccaaatagctgggattacagatgtgcaccactatgtccggcagatttttatatttttagtagagacggggttttgccatgttggccaggctgatctggaact

SEQ ID NO: 673089 - DNA, 611 bp, Homo sapiens
tggaaaccattcagagtgaaagcacaacatttttacagcttaattacttggtggttaattgctttaattcataatttcatgaagctaatatggtctgaaccataaattctctaaataagatgagaaaaaccacaatttaaaaattgtatacagaattattgtacaatacaaaaacccaaagaagatgaaagctatatttgaacaagtatgtatttagcattttctttctttytttttttttttttttgagatagagtctaactctgttgaccagactggagtgcagtggcacaaactcagctcactgcaacctccactgcccgggttcaagcaagtctctgcctcagcctcccgagtagctggggctacaggcgtgcaccaccacacttggctaatttttgtatttttggtagagacgaggtttcatcatcttggccaggctggtctcgaactcctgatctcatgatccaccggactcggcctcccaaagtgctgggattacaggcatgagccaccgtgcccagcgtatttaccattttcaaattgatttaaatagtaacttccataagaagattagaattgccctgctggctactttctctgataaaaaa

SEQ ID NO: 673090 - DNA, 611 bp, Homo sapiens
tggaaaccattcagagtgaaagcacaacatttttacagcttaattacttggtggttaattgctttaattcataatttcatgaagctaatatggtctgaaccataaattctctaaataagatgagaaaaaccacaatttaaaaattgtatacagaattattgtacaatacaaaaacccaaagaagatgaaagctatatttgaacaagtatgtatttagcattttctttctttctttttttttttttttgagatagagtctaactctgttgaccagactggagtgcagtggcacaaactcagctcactgcaacctccactgcccgggttcaagcaartctctgcctcagcctcccgagtagctggggctacaggcgtgcaccaccacacttggctaatttttgtatttttggtagagacgaggtttcatcatcttggccaggctggtctcgaactcctgatctcatgatccaccggactcggcctcccaaagtgctgggattacaggcatgagccaccgtgcccagcgtatttaccattttcaaattgatttaaatagtaacttccataagaagattagaattgccctgctggctactttctctgataaaaaa

SEQ ID NO: 673091 - DNA, 801 bp, Homo sapiens
tggattgggtgaaagttctggaaagtcgtttatcctcagcagcctgccaggaactcagtttggcacaggactctgagaaacctatttctaccaggtaggctggggatccacagctcttaaagtttattgtctattatagctgctggcaagccaagctgcttggcaggaccattcccaggggctgtggccagggctaggaccacttgaaggagacagatgcaaagccctgctgtgtggaattggcatttctgcttgccctatcccagggctttcccattcccagctctactccaggagcatatgagctagtgtccctaactaggaagaggggcctgggccaggggcctctggagcccaagagacaaggtcagacgcagagacacagagctcaaggaagtaggatcaagaagctctgatctccagaaaatcaaactgcataatttttttttttttttgagacggagtcttgctctgttgcctaggctggagtgcagtggcacgatctcagctcactgcaacctctacctccygggttcaagcgattctcctgcctcagcctctcaagtagctgggattacaggtgtatgccaccatgcccagctaatttttgcatttttagtagagacaggatctcgccatgttggccaggctggtctcgaactcctgacgtcagttgatccacccacctcggcccccaaagttttgggattacaggcgtgagccaacatgcctggccacactgcataaaatttgtttgcacatcctgctcagcagattcagcctgccacctgctccccagct

SEQ ID NO: 673092 - DNA, 1591 bp, Homo sapiens
gagtatccacttttattggattttggctgtcatggccaattcatcctccaaaaagtctctaccagcattaatctcctctgcaatagtcagtgttcacgtttccaaagcttcaccaacatgagaatttctctcgttttaccaacataaagtatataccataccaatccctttgcatttatttatttactagtgagttttgacctttttaaaaatgtttgtcacttgcatgtattcattggtgattttttaaaaattcttgtcctttatacattttgaaagagtgttatctttttcttcatttttaagagctctctttgaactattaaagaatgagtattttgtgtcaaatatattgcaaacattagttttacaagtttactgttactcttttaaactctttaatcaagtataattacagaaaaagtatatttataaagtatacmgcttgaagaatttttgcaaataacacatctgtgtattagtacccacatatggaaacagggcaacatgacatccagagacctttctgcttcttctagtctttattttcccagtaaagattatcagtattctaacagcgtaagttagttttatgtttgtctgtgtaacctcatatatttcaaatcatattttatgtattctttcaagcctgctttctctcactcaacattatatttctgaaatttgttcatagcattgcacgcattccactgaattcccctgtatttcctctgtgtggtactaatctcatttgtgataggtatttgggtagttttcagtttgggaccagaaaatctgagagatgcaacaaacagaaaaataaccagtaaattaagcaggtgaagtcattttaatcataaataaaataagcaagtttcccccagctgaaaacaaaacaagccttcagatcgaaagggaccaccaagctatagcaggacaaatgaaagcagacctacaattagacatatcaatgtgaaacatcagtatggcaagaaaaaaatcatccagaaagagggagaaaacaggttatgttcaaagcaatgaaaatcacattggcatttcactttccacctgacatactacaggtataacacaatgaaacaatgctttcaaacatgtaggaaatctactttcacccagaaatccatatccatccaccttattaataattctgtaggtaaaataaagatatatgtacaaagtgttacaatatttatctcccacatatcttttttgagtaatttatttaaggattttactctgaaaaaagagtgagggtgtaaatataaaatagagacactggatttaaccaaggagattaatgaagggggttcctagctgtacaattgtccagcaggcctacagagcaaccagggaaaactccaggacagttaaaaacaatacaagatctctggacttcaaacataaagatgctctccaaattggaaaaggaattcaatggccctccatctgggggatcaaatatattccaagtgatacacagatcaaacaggaagaggactcccaaaatttctacctttagaatcagttttttaaggaaaagttataaagatttaattatggttaaaaa

SEQ ID NO: 673093 - DNA, 1242 bp, Homo sapiens
ctgtcactttgcaaatttcatgagttacttaacctccttaggtcaaatatttttctttataaaatgctataggcagtgacacagggtgagttcttctggaagctgaaactaaggcaaggattccagtgaaaaacatattacacactttcaggagcaaattccccagcagcctgatactgctagaagctctagagagtgaatgacacctcaaagttggtcacaaacatgaaggcaaagaagtagagcttttgtactcctgcaccagttattggctatgaaagggtgggagtggggaggcaggggaaatgacctaagaatttccagtgcttccagccaccactgcctacaggtgaggggctctgttggtcaagggcaatcctctgatcactggtatgcacaatcagcaggaaagcacccagaagatgggggatgggtgcatggagctggaatacaggatcctaggggcatttctatgggactccatgcaaccgtgcccactacagtccacccacacattcttacagaagggaaagtgcaggatgatggtgaaggacaaggtggtgttgaactagaagatctcgaagaccttttctaggtgaaaaaaaatctataaaatactgtctgaaacatgctgtttgaatctttgttttctaactgataaatacttaaagattttgttctctctttgcctcaatcaccttttgattcctattttggtaactgcatgacagtttgacaggatactaattaacaacaaaaacttgattatatcaaggaagcttaaggaaataccttaaagctttaataaaggaaggaaaacattcttcaccatggtagttcctcagtcttaccagtcaggatgctatatatttgtaagccaatttggagtcatgtaacatgaccaaagattgacataaatgactagatatgtagaagatatatttttatatttgccacatatttatttaactaattatgtaagaataatayataattcttacataatcagcatggtggctcacgcctgtaatcccaacactttgggaagctgaggtgggtggatcaccataggttgggtgttcaagaccagcctagcaaacatggtgaaaccctgtctctactaaaaatacaaaaattagctgggcatgttggtgcacacctgtaatcccagctactcgggaagctgaggcaagagagttgcttaaaccagggaggtggagattgcagtgagcctaggtagct

SEQ ID NO: 673094 - DNA, 923 bp, Homo sapiens
taggaaaaaagaatcaaaaatataaaattaattgcccaagggggacatagctatttaactttgcagttgagattgaaatctcagtctgactggcttcaaagattactctctttttcactacactgcgcaaggaaaagaagtatgtagctaaaaataaatgartgccacaaaactctttctgccttttctgagatcaaaatttacctctacaaattctggtttagatttatgtgaataagtcaatcctgatgctggtccgtcttatcttctgaaaatttttactttttatattgtaatgtacagagtcattttttagattttctttgaagatgcttcaggaaatgtatgagaaaaaagaaagaaaagttgccacctgaccttgtcctccaactctgttctgagcaagaatggagaggatttgtgagggcttcctgacgtctaaatttctttatgcttggataatgaattccaaaaacaacccactctctttgttacttgtattttgtttccaaaaggggcatagaaaggtataagaaaacattgtttccttgatatttttctagaattcggcagcaccgacataagcatttgtttcttaacaaaaatagacatttacattctctggtgttcagtgttttgaaatgacaactgtaggtgagaaaagaattgttaatcaggattccaagtacaaaaactgtcagtaaaaggagtgatttttgatgtggaagacaggatttgactttatatgtttaatatgcatgtaggtgttctttcttccaaagatgacatcttatttatgtatttttataaataaatttagtttcttccatgctgttctagaagcatattttctttatttgattccactgaggtaaaaagcattttagtgtggaacacagtgatatccataataagaaattcca

SEQ ID NO: 673095 - DNA, 923 bp, Homo sapiens
taggaaaaaagaatcaaaaatataaaattaattgcccaagggggacatagctatttaactttgcagttgagattgaaatctcagtctgactggcttcaaagattactctctttttcactacactgcgcaaggaaaagaagtatgtagctaaaaataaatgaatgccacaaaactctttctgccttttctgagatcaaaatttacctctacaaattctggtttagatttatgtgaataagtcaatcctgatgctggtccgtcttatcttctgaaaatttttactttttatattgtaatgtacagagtcattttttagattttctttgaagatgcttcaggaaatgtatgagaaaaaagaaagaaaagttgccacctgaccttgtcctccaactctgttctgagcaagaatggagaggatttgtgagggcttcctgacrtctaaatttctttatgcttggataatgaattccaaaaacaacccactctctttgttacttgtattttgtttccaaaaggggcatagaaaggtataagaaaacattgtttccttgatatttttctagaattcggcagcaccgacataagcatttgtttcttaacaaaaatagacatttacattctctggtgttcagtgttttgaaatgacaactgtaggtgagaaaagaattgttaatcaggattccaagtacaaaaactgtcagtaaaaggagtgatttttgatgtggaagacaggatttgactttatatgtttaatatgcatgtaggtgttctttcttccaaagatgacatcttatttatgtatttttataaataaatttagtttcttccatgctgttctagaagcatattttctttatttgattccactgaggtaaaaagcattttagtgtggaacacagtgatatccataataagaaattcca

SEQ ID NO: 673096 - DNA, 626 bp, Homo sapiens
cacaaaaacaattataggctttccttatgaatgtctctctctctctctcatatcatgtaaaacagatcacatacgaccagataggtttatcccagcaatggaacgatgtaaggatgggtcaatattaggataggttaacatttcrtatataaatgccattcttcattgatcatctcaatagaaagagaaaaagaatagaaagtctatacaaaaaatttgataaaatgtagcacaaattcttgataaaaattattagtagctaggtgcagtggctcacgcctgtaatcccagcactttgggaggctgaggtgggcagatcatgaggtcaggagatcgagaccatcctggctaacatagtgaaaccccgtctctactaaaattacaaaacattagccaggtatgatggcacacgtctgtagtcccagctactcgggaggctgaggcaggagacagggaggcagaggttgaccccgggaggcagaggttgcagtgagccgagatcgcgccattgcactccagcctgggcaacagagctagattccctctcaaaaaaaaaaaaaaaaattagtaaaccgggaaaacaagaaaacttcttttctctaacctaaaaattctactataaacat

SEQ ID NO: 673097 - DNA, 1646 bp, Homo sapiens
ggaagttccttgaaggcaataccaacattatatttacctattttatcactttcaggacatagtatgatgtattgaacttatacactctaatgtttaaaaactacccatgaagaggacaatagacaagggatataagggctctatcttatttcctcttgtccacaccgagtcactggcctctttctgaaagatcaacccagccccttattgtggctgtgtaatgtttgtgtattggtagcaagagaaggtctccctaatctggggagtggttgctacaaataatcacccgtgaaaagatgttgaagtagaagtctttatgactgagtttcaactgatgggccaatatgatagataccagataccaaagtgactgtgtatgaactttaccaaatacagctttactaaccagttccacagttactggaccccttaatgagatcaagcatatcaaaatggggcagtgtgtggactagaaagaagaatttgtgaagagagtactttagaaaaagctgatgccatggtggaaatccctattatcaccaaaaagggtatgggtatgagatggggctacagccttgacctccagcctacagggcttcagtgaacctcctggagagcttgacatctccttctatagttggagtccatgtgacttactcatttccaaaaaagattggcagggtaaaggagtgagtggagagcgctgcattgggaagcagtcgagtagctttgaagagcaggacaaagaaagcaggtatatggactagaggtgggtcatctgtccagtagggccagttaaggaggcaacagggtttccacagaaaggaagctgggagccaaccaccagattcccgtgggttgcacaggcggtaagagacaaggaggctctaaagataggaatcttcaaggaacccatgaaaacaccaagtaaggaaggggtcccctttaaagagctgccacccagggacctccaacagcagatggcaatgatactttctataccagactgtgctctgcctaccttatctcctctctttctagagtcaaccttggaagagcaataccttgctagtaagtaaagggaaccatgagcatggaaagagggaagctggcctcagccctccttcgcactgcaggttctgatctatagttgcaaagaaggatcagtagaaaacaagcactgagatttaatcctacttgggcttaaaggaactcactgatgtgtaaytgcaagataaatgcatatgttgattttcatgtttactctctatagttttctctctctttaaaaaataacattattgatactattgtggatattctgataaatacagaaaaatacaagacaaaagcgctcaaaatcctactgctattttttaaaaaccatattttttacagtttgaaaacactttaattattcatgtatgtagtcctttagattttgaaatcccatgtcatgacaatagtttatatttactttttttgtgtctttttcatagttcttttatatactgtcacatgttttattctacaaacccattacagagtatggcaaatattaatctcaatttataactggacagtttcaggaggatgaggcaatttgaccaggtccccacaggtgagtggtgaggccagttttgcag

SEQ ID NO: 673098 - DNA, 574 bp, Homo sapiens
taaatttaataagtgatttttcaaagagctttttataattatccctcttttagaaatataacctcaaagctgatttctagttatggcttaatacatttatcaaaacataagttaatatataaaggcacatttatattatctgcaacatttaccttttccagctagagaaactatgttgtttatcagttattgtattaataatagtcattggttaatgttattagggaagttataccattttcatgacatgtcataacaaaataagccacaacagcaacaatagcaccagctctaactctggtactactactactattggtaattctgtgtctactggccctgtgmgataagcctgacagctacacttattcccattttaaggataaggaacctgaagctgagcacacttcagtgacttattttaaggtcaaagcacacacccaaggtagaagcaaggaaagaaaccagtttttctgactttcaagaatacatagttgggtactgggtttttgttatgttaacagcacctgatatatcgggggaagtttgactcttatcaaagcaaaataaacat

SEQ ID NO: 673099 - DNA, 574 bp, Homo sapiens
taaatttaataagtgatttttcaaagagctttttataattatccctcttttagaaatataacctcaaagctgatttctagttatggcttaatacatttatcaaaacataagttaatatataaaggcacatttatattatctgcaacatttaccttttccagctagagaaactatgttgtttatcagttattgtattaataatagtcattggttaatgttattagggaagttataccattttcatgacatgtcataacaaaataagccacaacagcaacaatagcaccagctctaactctggtactactactactattggtaattctgtgtctactggccctgtgagataagcctgacagctacacttattcccattttaaggataaggaacctgaagctgagcacayttcagtgacttattttaaggtcaaagcacacacccaaggtagaagcaaggaaagaaaccagtttttctgactttcaagaatacatagttgggtactgggtttttgttatgttaacagcacctgatatatcgggggaagtttgactcttatcaaagcaaaataaacat

SEQ ID NO: 673100 - DNA, 622 bp, Homo sapiens
agacccctgcccttctcagggctgcttccaatatcttgcatgcagtagacactcagttaacatttgcagctgtcggcgatgctgacgagaactcatcaacaaagtttgggggcagcaggaaccccgggcagtccaggggagagacaaaggacagcccttcttcctgcttctctttstagaatcttttctgaccactccagtggcccgcggtggtcattccctccgagcagactgtctgcacactgggcacacctcacatgtggtcttaggatttggctccgtattcccgtttcacttctatattgctgtggctccccactcatgaggctgcaagcttcttaggggagagcagctagtgttcactgagcacctactgcctgccaggccttattctactcacctggcacacactgtaatcatttctctggatcctgccaatggccctgggcaacaggtgacattattatcctcaatttacaggggagaagccaggacacagagaggttgaataactggcccaaggtcacatagtaaatagtacagtgacgacttgagcccaggcagctcagctccagagttcctgctcttacccacaacactgtgcttataatcaccactccat

SEQ ID NO: 673101 - DNA, 634 bp, Homo sapiens
taagaattcttccatgttttctttaaatactttcatggtttcatatacttttttttttttttttgacagggtctcactttctcacccaggctggagtgcagtggcatgatctcatctcactgcaacctctgcctcccgggctcaagcgatcctcccacctcagcctcctgagtaactggtactacaggtgcatgccactactcctggctaatttttgtatttttggtagagacagagtctcactatgttgcccaggctggtcttgaactcctgggctcaagcgatcctccccacctcggcctcgcaaagtgttgggattacaggcgtgagccactgcacccggcctggtttcatatcattttatagtttcactttttactttttgtttttgagccygttggagtttttcctggtgtagggtgtgagataggaatccattttttttccctcccatactatggttgcccaattgtctccaaatcacttactgactagtccttttcttcatgaaaattttctgttctgtcagtatgtctattcatgtggttttacatcttttagggctggtccaatctcactgtacttctcttttagtcttcatagctattcttgtttatttttccatatcaacttt

SEQ ID NO: 673102 - DNA, 2305 bp, Homo sapiens
tacggcacctcaatgcattcatggggtgtgctctaccctctaccttcgtgatttatttaaagaccaaatcataatgaataacatttcttaggcttaaacccatagcaggggtaggaaatagttcaaaccttctgacttacatgaacaaatacaatcttcaaaaactactgttttctaatctgcatgaatgtactgaactcattgccgccttcatgtaaatgtgatgtatcaaaagtgctttgtaaactgttaaattccaatgttgatattgttatagatatactttattaaatactggataatgattttataagctacagggtgtttaactgtgaaattattctaaaatatgtagaaaaaatttggaataatcttcccattttgaacacaatgattggttttaaagttcccttgatttatatgtttgtatactgaggattctcaattgagtgaactagtgtctttgcaatatagtaagattttggtacagtttttaatctatcaaggaaaaggctagataagtaggatctcatttgtttcatggaccattatttgaaggatgatttaagaccataggaaatactgactcaccttttctaaaaagacaactgattttcttatgcttttaatttcaaatttatcttgtctccttttgattaattaaaataacagttatgaaaaaccttaacagaaaatattatttattgaatcagaagagaaacaggaaatactgtgctttcttgagcctgtttcctataccccaatatcataagaattgttgttgcttctataatgttcagctgcaaattattttgcttgatcaatcaaaatgaattacctgaattttctcctcttgttcaaaatggagccacattcatccacctacccctagccctaggactgtttctttcattccgatagtttgtgatatccttgacttcacagcagaaagctgtgagtctcccaaaccccttcactcaggtcccgtggggcctgccctctaaagtctcttcagtcttctttctttgttcatggccaccttgtcgtttagactcttatccctgactgtaagagatctctcgggtcttcctgcctgtggccatgcctaatttgtacccttcctaaaatgtgatgtgatcatgtcactgccttgcttagaagccctgcactggcgtccaacacgtgcagaatcaagtgcttgctgtttaacatggtctacccagtcctccagattctggcttccagttattttctcagcctcagaaaagcacctcgctctccaaacatatcaaatagcttgtgcccttctgcctcctgcttacacctccattccttcccctctacctggatgctcctcccttcatgcgccccctcgcagtaagctcccatggattcactggttcttgagtgttttattgcactttgcacctcccgtctctcactcctgacttctgtctgtctacctgtcttgaccggccatttgcactgcctctggcttatctgcctcattctgctcgacagtgttgttagcttcatatctactggttctctcaattatttctcagcctccccacaccaggctccttgccccgtgtttataagctgctattggcttgagggtgactgtrcctttctaataaaactattttatagactgatagttacaagggtatagtagaaaagaaatgaatctacctttgagtgtatttcaccatatctagtgatccatgaatatttcttcttattattatcattattgttatttttaaatagacgatcagggaaggcagagtctaggccaccaatgtgaacttggactttcatctttattaagatatttgggatctctgcaagtattatgaattttaaatggcattcaatgatttgataaaataggaaatttgttttactctgaactgggtagcgtttcagcaactggctactgtgtcattatttctataaattcaaaatgtagaaggaacatttaccttttaaccattctcaaccgtttttcttggtgcactcctgcctctgtgatctcatgaagcccaatggcattaaattccatgtatatgtgcgtggtccatgaacacatatttccagctcctacctctcctctaaaatttagactcatatctaattatctgccgattatcaccacttggaagactaatagacaactcaactaccacacatccataagggaattcttgatcctccaccttcaacccctgggcccaacactcctcagtcgtctccgtctcagtaaatagcacttccagtgtaccagccattaggccagaaa

SEQ ID NO: 673103 - DNA, 2305 bp, Homo sapiens
tacggcacctcaatgcattcatggggtgtgctctaccctctaccttcgtgatttatttaaagaccaaatcataatgaataacatttcttaggcttaaacccatagcaggggtaggaaatagttcaaaccttctgacttacatgaacaaatacaatcttcaaaaactactgttttctaatctgcatgaatgtactgaactcattgccgccttcatgtaaatgtgatgtatcaaaagtgctttgtaaactgttaaattccaatgttgatattgttatagatatactttattaaatactggataatgattttataagctacagggtgtttaactgtgaaattattctaaaatatgtagaaaaaatttggaataatcttcccattttgaacacaatgattggttttaaagttcccttgatttatatgtttgtatactgaggattctcaattgagtgaactagtgtctttgcaatatagtaagattttggtacagtttttaatctatcaaggaaaaggctagataagtaggatctcatttgtttcatggaccattatttgaaggatgatttaagaccataggaaatactgactcaccttttctaaaaagacaactgattttcttatgcttttaatttcaaatttatcttgtctccttttgattaattaaaataacagttatgaaaaaccttaacagaaaatattatttattgaatcagaagagaaacaggaaatactgtgctttcttgagcctgtttcctataccccaatatcataagaattgttgttgcttctataatgttcagctgcaaattattttgcttgatcaatcaaaatgaattacctgaattttctcctcttgttcaaaatggagccacattcatccacctacccctagccctaggactgtttctttcattccgatagtttgtgatatccttgacttcacagcagaaagctgtgagtctcccaaaccccttcactcaggtcccgtggggcctgccctctaaagtctcttcagtcttctttctttgttcatggccaccttgtcgtttagactcttatccctgactgtaagagatctctcgggtcttcctgcctgtggccatgcctaatttgtacccttcctaaaatgtgatgtgatcatgtcactgccttgcttagaagccctgcactggcgtccaacacgtgcagaatcaagtgcttgctgtttaacatggtctacccagtcctccagattctggcttccagttattttctcagcctcagaaaagcacctcgctctccaaacatatcaaatagcttgtgcccttctgcctcctgcttacacctccattccttcccctctacctggatgctcctcccttcatgcgccccctcgcagtaagctcccatggattcactggttcttgagtgttttattgcactttgcacctcccgtctctcactcctgacttctgtctgtctacctgtcttgaccggccatttgcactgcctctggcttatctgcctcattctgctcgacagtgttgttagcttcatatctactggttctctcaattatttctcagcctccccacaccaggctccttgccccgtgtttataagctgctattggcttgagggtgactgtgcctttctaataaaactattttatagactgatagttacaagggtatagtagaaaagaaatgaatctacctttgagtktatttcaccatatctagtgatccatgaatatttcttcttattattatcattattgttatttttaaatagacgatcagggaaggcagagtctaggccaccaatgtgaacttggactttcatctttattaagatatttgggatctctgcaagtattatgaattttaaatggcattcaatgatttgataaaataggaaatttgttttactctgaactgggtagcgtttcagcaactggctactgtgtcattatttctataaattcaaaatgtagaaggaacatttaccttttaaccattctcaaccgtttttcttggtgcactcctgcctctgtgatctcatgaagcccaatggcattaaattccatgtatatgtgcgtggtccatgaacacatatttccagctcctacctctcctctaaaatttagactcatatctaattatctgccgattatcaccacttggaagactaatagacaactcaactaccacacatccataagggaattcttgatcctccaccttcaacccctgggcccaacactcctcagtcgtctccgtctcagtaaatagcacttccagtgtaccagccattaggccagaaa

SEQ ID NO: 673104 - DNA, 607 bp, Homo sapiens
aaaaaaataatagccagggccgggcgcagtggttcacgcttgtaatcccagcactttgggaggctgaggtgggtggatcatttgaggtcaggagtttgagaccagcctggccaacatggtgaaacctcatctctactaaaaatacaaaaattagctgggcgtgatggcacttgtctgtaatcccagctactcgggaggttgaggcagatgaattgcttgagtctgggaggtggagggtgcagtgaggygagattacaccactgcacttcagtctgagtgacagagtgagaccctgtctcaaaaataaataaaataaaataaaataaaataataatagccaggaaaatctgaaaacagggacatgaagaagttctagccttacaagatgtcacggcctaccataaagaccctagaattcaaatgatatagtatttatccttttatacaaaactagtaaaatacaaaaccaagttcacaagtaatttaagtaactacaatgacaaacagtgaacctatattcaaactaatgggtaatcctgccatattttcattaatgctagtagaagacttctgggtcagagatgaaagatagtatatttctcacagc

SEQ ID NO: 673105 - DNA, 2062 bp, Homo sapiens
taaaaagcacagtttaaaaaatataaatatagagctgaaataacattatttatgagaatttttctcctgtatacaatgatatgttaccaaggatgcatttttttttttttttggaactcaaaaggcagacaaaagagtgaatgctgacaacattttgtctagatcccctttagccacccattgccctcatgtctaacttctttgggttagtctctaacagctcacagctgctctctcttctgaagaattttccttgactgtatggtaggttcctcacccaggaggtgaaattcaccattcaggggaaacctacaaccaatgactgactgatggaggtataaacagaacagccctcttgtccaaaggggtattttttcccccagagtttgccatgaaattttaatggagctgaacgcactcccactgaaataataattttgtttagtttttattctacttcccttactcttttattccttggattattctctacaaattatgcacacctgaatttctgtctcagccctcgctgctgtagaacctgacctaaaataattaacctatctctctttcactatgagagagaagctgacttaactgaatttgataaatcatcttggttkgtccaaacagctatgaccggaaatgttaagtggtagtgcaataaagcaggtttgaaaggaataaaggacattttgaaaaaatatttcaaggtatattttgaaaaaattcagatcaaattatattatgttttgtccattaaggagataagatactctgatttgagcataagtcatgctttctctttattgatcaattattaattgtattgctaacctactttattcctatgggtctgatacaatattgtctctggatatggaatcttaattttaaatagtttttaaaatgaagaatttttatattaaattttcaaacccaagatgaatgaagagcaaagcaaacacatttttcttccccagtatagaagaaaaagatgaatactaggctaatacccataaattctgttacttttcctagttaagtcacaaatccttagcatgcctttggaatttagcatttttctttaaaatcaaatggtttttttatttaataatatcaaatatttcttcagtgtctgttgtacactgtagcagtattctgacttcaaaattaaatatggtaagaacaggctacagaatcaagataaaaataaattctgtgacagatatattttaaaaaatctcaggaggaattgaatcaaatggaaaaattaaaatctattggaggtaaatggaaacttcagaatgggctgatatctacggtgaatattgaaagtgtgttgcatatcaacagaaaaagaaggaaaaattaatataagattaaggtaacaatagagaaaatgcatgcagacttccaaggacagagaacatgcagtacattattaaagaaaagtataatgaataatgatatatcgatttgtttgtaattaaatctacagttattaacttacatgaaaaataatattgctacattttattattttatttaatttcaaatgcatatgtaacatgattatcattataattaagaaaatataaataaaatggagcatcatctagtttttaagctcatttcattgctatttcagacaccttatgagctggtctatttctagacaaactggccttcttaaaatctcttctgagaagacagcaaaatgaattaacaatggatcatttattgcaaagctttctaggtcagttctgatttcaggtatgagcatggactatggaagctttctttgaaatagtggtttagttacacaaaattaaaacgtgtattataaaatagtgtaatggaaaattatttaactgacatagttgaaacatatctttataagaaaaaaaagaaagcgtttttgttttaaagactttaatgcaaaagcaagactatcctcaaaataatttagtttgaatgctctataaatttctaatgctttttcagtaaaagctttatttagtttaacacaatgcatcatctttcaacagggtctcctttt

SEQ ID NO: 673106 - DNA, 2020 bp, Homo sapiens
taaataaagataaaaggagttaactagaattaatggtaaaaaaggaaaaaaatagatcaaaggggattttccaacactgaatggtacccgggaaaataaaacatttccaccttctctggcgccctcttgtgcttcctagctgcaactgtcaagattgcgatgcttccaggagtgcaggacggtgatactggatctggatttatgttctgcgttgtacacacaaacctttataaactaaacttgtttttcttccctgtatgttactctaatcagtgcttatgtcaggaattgtaaaatatcctttaacctgggtttcctaggctgaaattgtccttatccatttgaagtcccttcagctcctgctcctgaagactcacacaatctatgaaatgcgtttttggaagtatgtctccctgtctgactgtgttatttgataarattgttctcattgcattctctctctctctctctttccctctccctcccctcctccatctaccctcttcctcctttctgaggccaaggctctgaattctttgaggagttaaaactgcaggaaattccttttggaagaataaaatacagccattctccttccacttttcctttatttaaaggcagcctccaagcagtgctgcttgttcttcattgtcttgcagagctttttgttcattccttagtaaaacaagcgttttggtttttcgggttcactgtgtgtgcaccacaggactgttacacaaagccatgggaaactagcagaagctcaggaagtaaatgtcattaagaaacagatcctacgttgtatttgaatcaccctccttcctttctgatggctaaatctttcttatgaggtgaaacttttcgtaccaggatctttcttttgtttggatgcgttatctcccaggaagctcctcagaccccagcaagtagactttgggtgtcctgtcccagtggctggataaacaggctcggatatttcaaattcttagttagaattaaactggaacttgttttatgtttacatgaaactgaataattagtgataatattaaaattaataataattggccgggcatggtggctcatgcctgtaatcccagcactgtgggagacgaggcgggtggatcacctgaggtcaggagatcaagaccagcctggccaacatggtgaaactctgtctctactaaaaatacaaaatgaatccataataatcataattcctgatttataaggatgttcataagtttttttttttttaaaggaggagagttgaaccccagtttgcttcaggccactacatggtctttctaaggtgaagactatgttcattttctttatggatattatatcttaataccatgtccttccacagtgaatttctcctttaactgggcagcagtatgactcaaggagtttttaaaactgctgttcctaattcagtaggtctagggcaaactcaggcatctttatttttctaaagcttcaagggatgtccatgtgtagtcagaattgcaaatcgccaccatgtggccacgtggtatactgtcacagcacacaaccagtgctgtgtggtatctgatttgaactttgctataaacctatgcaataagcaggtttgccattaccctcaacttacagataaaaagactaaaactaagagcttgaccaaacgtacatagctagtcagtatacaaactggggcttatacgtgggtcatatgactcaaaaacttatgctctttccatgttgttggagagaacaagattgattttttaaaaaataaggtctttcatatgcattacttcctcctctttcctgcagtggctacatcggtccatattttcatcatcccgtaggttactttggcaagagctttcaccagaagccccctcctgtctttatctcttccctgaacactaccttcggcttaatctttaaccattaagtgcagagttcatcaagtaactctttcgtttaaaaatgaccaatatttgtcctgtttaccgactatattagtcca

SEQ ID NO: 673107 - DNA, 2020 bp, Homo sapiens
taaataaagataaaaggagttaactagaattaatggtaaaaaaggaaaaaaatagatcaaaggggattttccaacactgaatggtacccgggaaaataaaacatttccaccttctctggcgccctcttgtgcttcctagctgcaactgtcaagattgcgatgcttccaggagtgcaggacggtgatactggatctggatttatgttctgcgttgtacacacaaacctttataaactaaacttgtttttcttccctgtatgttactctaatcagtgcttatgtcaggaattgtaaaatatcctttaacctgggtttcctaggctgaaattgtccttatccatttgaagtcccttcagctcctgctcctgaagactcacacaatctatgaaatgcgtttttggaagtatgtctccctgtctgactgtgttatttgataagattgttctcattgcattctctctctctctctctttccctctccctcccctcctccatctaccctcttcctcctttctgaggccaaggctctgaattctttgaggagttaaaactgcaggaaattccttttggaagaataaaatacagccattctccttccacttttcctttatttaaaggcagcctccaagcagtgctgcttgttcttcattgtcttgcagagctttttgttcattccttagtaaaacaagcgttttggtttttcgggttcactgtgtgtgcaccacaggactgttacacaaagccatgggaaactagcagaagctcaggaagtaaatgtcattaagaaacagatcctacgttgtatttgaatcaccctccttcctttctgatggctaaatctttcttatgaggtgaaacttttcgtaccaggatctttcttttgtttggatgcgttatctcccaggaagctcctcagaccccagcaagtagactttgggtgtcctgtcccagtggctggataaacaggctcggatatttcaaattcttagttagaattaaactggaacttgttttatgtttacatgaaactgaataattagtgataatattaaaattaataataattggccgggcatggtggctcatgcctgtaatcccagcactgtgggagacgaggcgggtggatcacctgaggtcaggagatcaagaccagcctggccaacatggtgaaactctgtctctactaaaaatacaaaatgaatccataataatcataattcctgatttataaggatgttcataagtttttttttttttaaaggaggagagttgaaccccagtttgcttcaggccactacatggtctttctaaggtgaagactatgttcattttctttatggatattatatcttaataccatgtccttccacagtgaatttctcctttaactgggcagcagtatgactcaaggagtttttaaaactgctgttcctaattcagtaggtctagggcaaactcaggcatctttatttttctaaagcttcaagggatgtccatgtgtagtcagaattgcaaatcgccaccatgtggccaygtggtatactgtcacagcacacaaccagtgctgtgtggtatctgatttgaactttgctataaacctatgcaataagcaggtttgccattaccctcaacttacagataaaaagactaaaactaagagcttgaccaaacgtacatagctagtcagtatacaaactggggcttatacgtgggtcatatgactcaaaaacttatgctctttccatgttgttggagagaacaagattgattttttaaaaaataaggtctttcatatgcattacttcctcctctttcctgcagtggctacatcggtccatattttcatcatcccgtaggttactttggcaagagctttcaccagaagccccctcctgtctttatctcttccctgaacactaccttcggcttaatctttaaccattaagtgcagagttcatcaagtaactctttcgtttaaaaatgaccaatatttgtcctgtttaccgactatattagtcca

SEQ ID NO: 673108 - DNA, 627 bp, Homo sapiens
tgaggtgttcacttccccctttatctgagtttaaagagctgtataaaggtcagatataatcacacaaccttgatactcaacaaataagcacaccacattgtaatgctaaacaaaaagagagaatcccctggatacataaaaatattcagcaattcaaaagagggttagtatgaggaatgagaagatgtacatctctaagaaacaaagaaaaattgtaggaacatctacaatttgtattgtcaataacctctaaaagctattgatctataaaacaggatcaaaytggcaacaagaaaaaaaatctgcttagaggaaagttttcttaaagaaaccaaacatgaccaggtgtggtggctcacacctgtaatcccagcactttgggaggctgaggtgggtggatcagctgaggtgaccagcctggccaacatggtgaaaccccatctctactaaaaatacaaaaatcagtcgggtgtggtggcacacacctgtaatgccagctactcaggaggccgaggcaggagaatagctcaaacccaggaggcggaggttgcagtgagccacaatcgtgccactgcattccagcctgggcaacagagcaaggaaagaaagaaagagagagagagagag

SEQ ID NO: 673109 - DNA, 2287 bp, Homo sapiens
ttcatttatttaataattccatattatttggcatttaaattgttttcagttatataacttgcttcaataaatatccttgtgcaaatacatacctgtgtacaaatctggcagtttcttgggatttgttgttgatgtgtgtgtgtgtgtgtaagtgtgtgtgtgtgtgtgtgtgtgtgttttagcaaagtttacttttaatagataatagcatcttgtttttacrgaaggttgttctaatatacacgtccatcagcaatgtataagtgaacctttcatttaaaagcaacaactatgtcaatctttaaaatacttgctgatataatacattaaatacggttttttttttactgtttttattttaatttccctcaccaccagtaatgctgaagagttgtctaatataatttgatggccatcttctttttcttttttgtaaagtatcagtttataaactgttttcatttttattgggatttttatatttttcataagttttcaaacgttcttcgtgtttgtaagtttaacccttgacttattatgtatattttcaactttatgtagtatacacatattttcattttatgcaattatacatgactattttatcttaaggtttcctaagattaagtttgacaactagagaacatgtcaatatttttctttttttaatttgttaattattgcagcacttattataaaaaatttagtaccttgaagtttaataaaaatgattattcttatgaagaatatctagattcaataactgttaacattttcatacattttctttgtttacctaagattttatttgtggaaccatttgaaagttacagaaatcttaacattttaccccaaaataccttacatgcatctccaacaaataaggacatttttcagtagttcattcaattagctgctccatttgacccagaaaatcagctataattccccaatacgatggtattggggaattatactatcaatccatattcaattatacttttattctcaaaagttataatttttttttctaaaccagaacacgtcagtaatgctaaacttgctcactttttaaagaaaatgaccaccagatctttttaagaaaaagactcacttacttttcccacattttttcccctttgcaattctcaggtaatctatgcagtggttctttggaactttacaaatgtctgttctgcagcccttcaatctttggttttagcattcatttctatctgactcacacatacacacacatacacacagatgcatacaaacacccacatattaaggaatcatgaatttttaatcttctccaattacagaaatgatattaataataacaaaatactaattcaggtgtgtcagacttagcctatgggtgtccctttacacttgacttctttgttctttagcatgttctcatgatattttgactacttgctttgctttctgttataagatgtcccaacattacttaatgctttctttttctggtccaggaagtggccatttctccaaagagcctggttccaatgattcttagcagttaatatattcttccttctgattcactgccactatcttatttttgtggccgctttttttccctcctcgcctccacttacctaagggaaatctcctatttccaagtgtttctctttattccagaagtggagcttttgcaacacaaccaccactagcccatgtacttttcaagccccgttatttccaatcttcaggagcaggagcctgactcattgttggtgtagccaccagagttaacatggtctcagaaggcccacttacacgtaaaagcacttgtttagaaatcactgtcaccaaattatgtgtagtatgggttatgggtgatttttccttaccttcttgtcaatctgcattttctggttttgttcatttacttgtttgtttacttgtttggataatgttagagatagtccactttatgtggatactttatgttacaggaagtaactgtatttatatatctatatcaatatcatttatatctatatcaagatatattgctggttgccaatatccatctgtttctatattgtatctctttacaccagtctaatggcaagctctgccaatcattacagggattattacctattttaatatgtgctactcaagtccctcttccatcaccttcttttttcccaacttacttgaaaattaatatgaactatttttgccacatgaattattaaattagcttatccagtttcaaaaagtaattcctattggaaataaatgtcat

SEQ ID NO: 673110 - DNA, 2287 bp, Homo sapiens
ttcatttatttaataattccatattatttggcatttaaattgttttcagttatataacttgcttcaataaatatccttgtgcaaatacatacctgtgtacaaatctggcagtttcttgggatttgttgttgatgtgtgtgtgtgtgtgtaagtgtgtgtgtgtgtgtgtgtgtgtgttttagcaaagtttacttttaatagataatagcatcttgtttttacggaaggttgttctaatatacacgtccatcagcaatgtataagtgaacctttcatttaaaagcaacaactatgtcaatctttaaaatacttgctgatataatacattaaatacggttttttttttactgtttttattttaatttccctcaccaccagtaatgctgaagagttgtctaatataatttgatggccatcttctttttcttttttgtaaagtakcagtttataaactgttttcatttttattgggatttttatatttttcataagttttcaaacgttcttcgtgtttgtaagtttaacccttgacttattatgtatattttcaactttatgtagtatacacatattttcattttatgcaattatacatgactattttatcttaaggtttcctaagattaagtttgacaactagagaacatgtcaatatttttctttttttaatttgttaattattgcagcacttattataaaaaatttagtaccttgaagtttaataaaaatgattattcttatgaagaatatctagattcaataactgttaacattttcatacattttctttgtttacctaagattttatttgtggaaccatttgaaagttacagaaatcttaacattttaccccaaaataccttacatgcatctccaacaaataaggacatttttcagtagttcattcaattagctgctccatttgacccagaaaatcagctataattccccaatacgatggtattggggaattatactatcaatccatattcaattatacttttattctcaaaagttataatttttttttctaaaccagaacacgtcagtaatgctaaacttgctcactttttaaagaaaatgaccaccagatctttttaagaaaaagactcacttacttttcccacattttttcccctttgcaattctcaggtaatctatgcagtggttctttggaactttacaaatgtctgttctgcagcccttcaatctttggttttagcattcatttctatctgactcacacatacacacacatacacacagatgcatacaaacacccacatattaaggaatcatgaatttttaatcttctccaattacagaaatgatattaataataacaaaatactaattcaggtgtgtcagacttagcctatgggtgtccctttacacttgacttctttgttctttagcatgttctcatgatattttgactacttgctttgctttctgttataagatgtcccaacattacttaatgctttctttttctggtccaggaagtggccatttctccaaagagcctggttccaatgattcttagcagttaatatattcttccttctgattcactgccactatcttatttttgtggccgctttttttccctcctcgcctccacttacctaagggaaatctcctatttccaagtgtttctctttattccagaagtggagcttttgcaacacaaccaccactagcccatgtacttttcaagccccgttatttccaatcttcaggagcaggagcctgactcattgttggtgtagccaccagagttaacatggtctcagaaggcccacttacacgtaaaagcacttgtttagaaatcactgtcaccaaattatgtgtagtatgggttatgggtgatttttccttaccttcttgtcaatctgcattttctggttttgttcatttacttgtttgtttacttgtttggataatgttagagatagtccactttatgtggatactttatgttacaggaagtaactgtatttatatatctatatcaatatcatttatatctatatcaagatatattgctggttgccaatatccatctgtttctatattgtatctctttacaccagtctaatggcaagctctgccaatcattacagggattattacctattttaatatgtgctactcaagtccctcttccatcaccttcttttttcccaacttacttgaaaattaatatgaactatttttgccacatgaattattaaattagcttatccagtttcaaaaagtaattcctattggaaataaatgtcat

SEQ ID NO: 673111 - DNA, 2061 bp, Homo sapiens
  misc_feature 743, 744, 745, 746, 747, 748, 749, 750, 751, 752, 753, 754,755, 756, 757, 758, 759, 760, 761, 762, 763, 764, 765, 766,767, 768, 769, 770, 771, 772, 773, 774, 775, 776, 777, 778,779, 780, 781, 782, 783, 784, 785, 786, 787, 788, 789: n = A,T,C or G
  misc_feature 790, 791, 792, 793, 794, 795, 796, 797, 798, 799, 800, 801,802, 803, 804, 805, 806, 807, 808, 809, 810, 811, 812, 813,814, 815, 816, 817, 818, 819, 820, 821, 822, 823, 824, 825,826, 827, 828, 829, 830, 831, 832, 833, 834, 835, 836: n = A,T,C or G
  misc_feature 837, 838, 839, 840, 841, 842: n = A,T,C or G
gagaaaaattttttctccttctggatggtttcctttattttaaggaaaattacatatttcatggtacagaastttacggtgattctgcaatagtgggtttatgcagtataaatttacaaatgtgaagagtttgctgtagtatagcagtcatagaaataatttaaaaaatgataaaagaagttaattctagtagttgaaaggctatttatctgtgttgttttatgcttctcttcaggtaccatctcatccataaattgtcccggattcctcaggctagggtacaccccagtcctgtccttctttcatatcttgtttgtatttatattgcaacatttaatgtgaattgagtctctattggaatatttatatttttgcacttgaataaactaaattattttaggataccaaccacatattagtgtactacatatagaaagtatttaacatgtattttttgaatttaattatcatgaaaaagtgagcatgacctactttttacttgctctgttaagctagtcatctcatatatagttctgttggaaccaaatctataaggcattttatcagtccctgaagcttgctttggctctttagaagtagagagatgctaggaaattatctgggactctgaagttgagtgccacattgagcactcaaccactaattgaagactcttttaattcagccagattatttgcagtgttagcaagagacctcaaaggcaccattgctcatcatacttnnnnnnnnnnnnnnnnnnnnnnnnnnnnnnnnnnnnnnnnnnnnnnnnnnnnnnnnnnnnnnnnnnnnnnnnnnnnnnnnnnnnnnnnnnnnnnnnnnnngaattcattacactgcaagtttcttaggagcagaggttgtatggtatggagtttgcttcctaatccctcccccaccatctaacacagttctccagtagtaaaataatgcagtgctagattgacttggtgatttttcagcgtgtatgcctagcagaaaagacatatttctgaacatggatcatgatctatctatgagagccgagttgaatcaaaagaactgtgttattcacagggaagaagttcaacatagtagtggttcagaacaaggtctccagaagctgactcttgttgtaaatcccatctctgccttttaagggcaaagtattcatgaaatttttacattatcttgctgtgtcttcatttcctcatatggaaaacaagagatagtaataaaagtgtctatttcacataataaggttagtgcataatgagttaaaatatgtaaaaccctcagaacagtgtcttgtacatggctttaaaaaaagtatatgtgttagttattttcattagtattttattagtgtatgtgtctctgttcattttgcattgctataaatgagacaggatattttataaacaaaaaaggcttgtgtggcttatattctcctggctgaaagattgttatctgtagtgtccagccattcatgcctcagctgttatgaattcctcccagttgtggctccagtttcttcctgatctttttcagagcctgtttctctggtcatcacagtgataatgtgaaacaccaaatatctattttacaaatcacagcttcattgagatataaatcatatactatgcaattcatagttatgcaacaattatcacatcaaggttataatatttttatcactccagatagcaacactacacccattagcagtcactccctattttccccaacccttccacccacagccctaggcaagcactaatctactgtctgttactatacatttgccttttctggctatttcgcatacatagaagcgtatcatatgtgatattttgtgattggcatctatcacttagaatatagtattttcaaagtttattcatgttgtaacatatatcaacacttcatcctttttaattgcaaaataatattccattgtacatttatacatttttcctatttattagcaatgaacatttgggttatttccactttcgagaggtaatcttggagaccagtctttgaagtttgttctgactccag

SEQ ID NO: 673112 - DNA, 2061 bp, Homo sapiens
  misc_feature 743, 744, 745, 746, 747, 748, 749, 750, 751, 752, 753, 754,755, 756, 757, 758, 759, 760, 761, 762, 763, 764, 765, 766,767, 768, 769, 770, 771, 772, 773, 774, 775, 776, 777, 778,779, 780, 781, 782, 783, 784, 785, 786, 787, 788, 789: n = A,T,C or G
  misc_feature 790, 791, 792, 793, 794, 795, 796, 797, 798, 799, 800, 801,802, 803, 804, 805, 806, 807, 808, 809, 810, 811, 812, 813,814, 815, 816, 817, 818, 819, 820, 821, 822, 823, 824, 825,826, 827, 828, 829, 830, 831, 832, 833, 834, 835, 836: n = A,T,C or G
  misc_feature 837, 838, 839, 840, 841, 842: n = A,T,C or G
gagaaaaattttttctccttctggatggtttcctttattttaaggaaaattacatatttcatggtacagaactttacggtgattctgcaatagtgggtttatgcagtataaatttacaaatgtgaagagtttgctgtagtatagcagtcatagaaataatttaaaaaatgataaaagaagttaattctagtagttgaaaggctatttatctgtgttgttttatgcttctcttcaggtaccatctcatccataaattgtcccggattcctcaggctagggtacrccccagtcctgtccttctttcatatcttgtttgtatttatattgcaacatttaatgtgaattgagtctctattggaatatttatatttttgcacttgaataaactaaattattttaggataccaaccacatattagtgtactacatatagaaagtatttaacatgtattttttgaatttaattatcatgaaaaagtgagcatgacctactttttacttgctctgttaagctagtcatctcatatatagttctgttggaaccaaatctataaggcattttatcagtccctgaagcttgctttggctctttagaagtagagagatgctaggaaattatctgggactctgaagttgagtgccacattgagcactcaaccactaattgaagactcttttaattcagccagattatttgcagtgttagcaagagacctcaaaggcaccattgctcatcatacttnnnnnnnnnnnnnnnnnnnnnnnnnnnnnnnnnnnnnnnnnnnnnnnnnnnnnnnnnnnnnnnnnnnnnnnnnnnnnnnnnnnnnnnnnnnnnnnnnnnngaattcattacactgcaagtttcttaggagcagaggttgtatggtatggagtttgcttcctaatccctcccccaccatctaacacagttctccagtagtaaaataatgcagtgctagattgacttggtgatttttcagcgtgtatgcctagcagaaaagacatatttctgaacatggatcatgatctatctatgagagccgagttgaatcaaaagaactgtgttattcacagggaagaagttcaacatagtagtggttcagaacaaggtctccagaagctgactcttgttgtaaatcccatctctgccttttaagggcaaagtattcatgaaatttttacattatcttgctgtgtcttcatttcctcatatggaaaacaagagatagtaataaaagtgtctatttcacataataaggttagtgcataatgagttaaaatatgtaaaaccctcagaacagtgtcttgtacatggctttaaaaaaagtatatgtgttagttattttcattagtattttattagtgtatgtgtctctgttcattttgcattgctataaatgagacaggatattttataaacaaaaaaggcttgtgtggcttatattctcctggctgaaagattgttatctgtagtgtccagccattcatgcctcagctgttatgaattcctcccagttgtggctccagtttcttcctgatctttttcagagcctgtttctctggtcatcacagtgataatgtgaaacaccaaatatctattttacaaatcacagcttcattgagatataaatcatatactatgcaattcatagttatgcaacaattatcacatcaaggttataatatttttatcactccagatagcaacactacacccattagcagtcactccctattttccccaacccttccacccacagccctaggcaagcactaatctactgtctgttactatacatttgccttttctggctatttcgcatacatagaagcgtatcatatgtgatattttgtgattggcatctatcacttagaatatagtattttcaaagtttattcatgttgtaacatatatcaacacttcatcctttttaattgcaaaataatattccattgtacatttatacatttttcctatttattagcaatgaacatttgggttatttccactttcgagaggtaatcttggagaccagtctttgaagtttgttctgactccag

SEQ ID NO: 673113 - DNA, 2061 bp, Homo sapiens
  misc_feature 743, 744, 745, 746, 747, 748, 749, 750, 751, 752, 753, 754,755, 756, 757, 758, 759, 760, 761, 762, 763, 764, 765, 766,767, 768, 769, 770, 771, 772, 773, 774, 775, 776, 777, 778,779, 780, 781, 782, 783, 784, 785, 786, 787, 788, 789: n = A,T,C or G
  misc_feature 790, 791, 792, 793, 794, 795, 796, 797, 798, 799, 800, 801,802, 803, 804, 805, 806, 807, 808, 809, 810, 811, 812, 813,814, 815, 816, 817, 818, 819, 820, 821, 822, 823, 824, 825,826, 827, 828, 829, 830, 831, 832, 833, 834, 835, 836: n = A,T,C or G
  misc_feature 837, 838, 839, 840, 841, 842: n = A,T,C or G
gagaaaaattttttctccttctggatggtttcctttattttaaggaaaattacatatttcatggtacagaactttacggtgattctgcaatagtgggtttatgcagtataaatttacaaatgtgaagagtttgctgtagtatagcagtcatagaaataatttaaaaaatgataaaagaagttaattctagtagttgaaaggctatttatctgtgttgttttatgcttctcttcaggtaccatctcatccataaattgtcccggattcctcaggctagggtacaccccagtcctgtccttctttcatatcttgtttgtatttatattgcaacatttaatgtgaattgagtctctattggaatatttatatttttgcacttgaataaactaaattattttaggataccaaccacatattagtgtactacatatagaaagtatttaacatgtattttttgaatttaattatcatgaaaaagtgagcatgacctactttttacttgctctgttaagctagtcatctcatatatagttctgttggaaccaaatctataaggcattttatcagtccctgaagcttgctttggctctttagaagtagagagatgctaggaaattatctgggactctgaagttgagtgccacattgagcactcaaccactaattgaagactcttttaattcagccagattatttgcagtgttagcaagagacctcaaaggcaccattgctcatcatacttnnnnnnnnnnnnnnnnnnnnnnnnnnnnnnnnnnnnnnnnnnnnnnnnnnnnnnnnnnnnnnnnnnnnnnnnnnnnnnnnnnnnnnnnnnnnnnnnnnnngaattcattacactgcaagtttcttaggagcagaggttgtatggtatggagtttgcttcctaatccctcccccaccatctaacacagttctccagtagtaaaataatgcagtgctagattgacttggtgatttttcagcgtgtatgcctagcagaaaagacatatttctgaacatggatcatgatctatctatgagagccgagttgaatcaaaagaactgtgttattcacagggaagaagttcaacatagtagtggttcagaacaaggtctccagaagctgactcttgttgtaaatcccatctctgccttttaagggcaaagtattcatgaaatttttacattatcttgctgtgtcttcatttcctcatatggaaaacaagagatagtaataaaagtgtctatttcacataataaggttagtgcataatgagttaaaatatgtaaaaccctcagaacagtgtcttgtacatggctttaaaaaaagtatatgtgttagttattttcattagtattttattagtgtatgtgtctctgttcattttgcattgctataaatgagacaggatattttataaacaaaaaaggcttgtgtggcttatattctcctggctgaaagattgttatctgtagtgtccagccattcatgcctcagctgttatgaattcctcccagttgtggctccagtttcttcctgatctttttcagagcctgtttctctggtcatcacagtgataatgtgaaacaccaaatatctattttacaaatcacagcttcawtgagatataaatcatatactatgcaattcatagttatgcaacaattatcacatcaaggttataatatttttatcactccagatagcaacactacacccattagcagtcactccctattttccccaacccttccacccacagccctaggcaagcactaatctactgtctgttactatacatttgccttttctggctatttcgcatacatagaagcgtatcatatgtgatattttgtgattggcatctatcacttagaatatagtattttcaaagtttattcatgttgtaacatatatcaacacttcatcctttttaattgcaaaataatattccattgtacatttatacatttttcctatttattagcaatgaacatttgggttatttccactttcgagaggtaatcttggagaccagtctttgaagtttgttctgactccag

SEQ ID NO: 673114 - DNA, 2061 bp, Homo sapiens
  misc_feature 743, 744, 745, 746, 747, 748, 749, 750, 751, 752, 753, 754,755, 756, 757, 758, 759, 760, 761, 762, 763, 764, 765, 766,767, 768, 769, 770, 771, 772, 773, 774, 775, 776, 777, 778,779, 780, 781, 782, 783, 784, 785, 786, 787, 788, 789: n = A,T,C or G
  misc_feature 790, 791, 792, 793, 794, 795, 796, 797, 798, 799, 800, 801,802, 803, 804, 805, 806, 807, 808, 809, 810, 811, 812, 813,814, 815, 816, 817, 818, 819, 820, 821, 822, 823, 824, 825,826, 827, 828, 829, 830, 831, 832, 833, 834, 835, 836: n = A,T,C or G
  misc_feature 837, 838, 839, 840, 841, 842: n = A,T,C or G
gagaaaaattttttctccttctggatggtttcctttattttaaggaaaattacatatttcatggtacagaactttacggtgattctgcaatagtgggtttatgcagtataaatttacaaatgtgaagagtttgctgtagtatagcagtcatagaaataatttaaaaaatgataaaagaagttaattctagtagttgaaaggctatttatctgtgttgttttatgcttctcttcaggtaccatctcatccataaattgtcccggattcctcaggctagggtacaccccagtcctgtccttctttcatatcttgtttgtatttatattgcaacatttaatgtgaattgagtctctattggaatatttatatttttgcacttgaataaactaaattattttaggataccaaccacatattagtgtactacatatagaaagtatttaacatgtattttttgaatttaattatcatgaaaaagtgagcatgacctactttttacttgctctgttaagctagtcatctcatatatagttctgttggaaccaaatctataaggcattttatcagtccctgaagcttgctttggctctttagaagtagagagatgctaggaaattatctgggactctgaagttgagtgccacattgagcactcaaccactaattgaagactcttttaattcagccagattatttgcagtgttagcaagagacctcaaaggcaccattgctcatcatacttnnnnnnnnnnnnnnnnnnnnnnnnnnnnnnnnnnnnnnnnnnnnnnnnnnnnnnnnnnnnnnnnnnnnnnnnnnnnnnnnnnnnnnnnnnnnnnnnnnnngaattcattacactgcaagtttcttaggagcagaggttgtatggtatggagtttgcttcctaatccctcccccaccatctaacacagttctccagtagtaaaataatgcagtgctagattgacttggtgatttttcagcgtgtatgcctagcagaaaagacatatttctgaacatggatcatgatctatctatgagagccgagttgaatcaaaagaactgtgttattcacagggaagaagttcaacatagtagtggttcagaacaaggtctccagaagctgactcttgttgtaaatcccatctctgccttttaagggcaaagtattcatgaaatttttacattatcttgctgtgtcttcatttcctcatatggaaaacaagagatagtaataaaagtgtctatttcacataataaggttagtgcataatgagttaaaatatgtaaaaccctcagaacagtgtcttgtacatggctttaaaaaaagtatatgtgttagttattttcattagtattttattagtgtatgtgtctctgttcattttgcattgctataaatgagacaggatattttataaacaaaaaaggcttgtgtggcttatattctcctggctgaaagattgttatctgtagtgtccagccattcatgcctcagctgttatgaattcctcccagttgtggctccagtttcttcctgatctttttcagagcctgtttctctggtcatcacagtgataatgtgaaacaccaaatatctattttacaaatcacagcttcattgagatataaatcatatactatgcaattcatagttatgcaacaattatcacatcaaggttataatatttttatcactccaratagcaacactacacccattagcagtcactccctattttccccaacccttccacccacagccctaggcaagcactaatctactgtctgttactatacatttgccttttctggctatttcgcatacatagaagcgtatcatatgtgatattttgtgattggcatctatcacttagaatatagtattttcaaagtttattcatgttgtaacatatatcaacacttcatcctttttaattgcaaaataatattccattgtacatttatacatttttcctatttattagcaatgaacatttgggttatttccactttcgagaggtaatcttggagaccagtctttgaagtttgttctgactccag

SEQ ID NO: 673115 - DNA, 2061 bp, Homo sapiens
  misc_feature 743, 744, 745, 746, 747, 748, 749, 750, 751, 752, 753, 754,755, 756, 757, 758, 759, 760, 761, 762, 763, 764, 765, 766,767, 768, 769, 770, 771, 772, 773, 774, 775, 776, 777, 778,779, 780, 781, 782, 783, 784, 785, 786, 787, 788, 789: n = A,T,C or G
  misc_feature 790, 791, 792, 793, 794, 795, 796, 797, 798, 799, 800, 801,802, 803, 804, 805, 806, 807, 808, 809, 810, 811, 812, 813,814, 815, 816, 817, 818, 819, 820, 821, 822, 823, 824, 825,826, 827, 828, 829, 830, 831, 832, 833, 834, 835, 836: n = A,T,C or G
  misc_feature 837, 838, 839, 840, 841, 842: n = A,T,C or G
gagaaaaattttttctccttctggatggtttcctttattttaaggaaaattacatatttcatggtacagaactttacggtgattctgcaatagtgggtttatgcagtataaatttacaaatgtgaagagtttgctgtagtatagcagtcatagaaataatttaaaaaatgataaaagaagttaattctagtagttgaaaggctatttatctgtgttgttttatgcttctcttcaggtaccatctcatccataaattgtcccggattcctcaggctagggtacaccccagtcctgtccttctttcatatcttgtttgtatttatattgcaacatttaatgtgaattgagtctctattggaatatttatatttttgcacttgaataaactaaattattttaggataccaaccacatattagtgtactacatatagaaagtatttaacatgtattttttgaatttaattatcatgaaaaagtgagcatgacctactttttacttgctctgttaagctagtcatctcatatatagttctgttggaaccaaatctataaggcattttatcagtccctgaagcttgctttggctctttagaagtagagagatgctaggaaattatctgggactctgaagttgagtgccacattgagcactcaaccactaattgaagactcttttaattcagccagattatttgcagtgttagcaagagacctcaaaggcaccattgctcatcatacttnnnnnnnnnnnnnnnnnnnnnnnnnnnnnnnnnnnnnnnnnnnnnnnnnnnnnnnnnnnnnnnnnnnnnnnnnnnnnnnnnnnnnnnnnnnnnnnnnnnngaattcattacactgcaagtttcttaggagcagaggttgtatggtatggagtttgcttcctaatccctcccccaccatctaacacagttctccagtagtaaaataatgcagtgctagattgacttggtgatttttcagcgtgtatgcctagcagaaaagacatatttctgaacatggatcatgatctatctatgagagccgagttgaatcaaaagaactgtgttattcacagggaagaagttcaacatagtagtggttcagaacaaggtctccagaagctgactcttgttgtaaatcccatctctgccttttaagggcaaagtattcatgaaatttttacattatcttgctgtgtcttcatttcctcatatggaaaacaagagatagtaataaaagtgtctatttcacataataaggttagtgcataatgagttaaaatatgtaaaaccctcagaacagtgtcttgtacatggctttaaaaaaagtatatgtgttagttattttcattagtattttattagtgtatgtgtctctgttcattttgcattgctataaatgagacaggatattttataaacaaaaaaggcttgtgtggcttatattctcctggctgaaagattgttatctgtagtgtccagccattcatgcctcagctgttatgaattcctcccagttgtggctccagtttcttcctgatctttttcagagcctgtttctctggtcatcacagtgataatgtgaaacaccaaatatctattttacaaatcacagcttcattgagatataaatcatatactatgcaattcatagttatgcaacaattatcacatcaaggttataatatttttatcactccagatagcaacactacacccattagcagtcactccctattttccccaacccttccacccacagccctaggcaagcactaatctactgtctgttactatacatttgccttttctggctatttcgcatacatagaagcrtatcatatgtgatattttgtgattggcatctatcacttagaatatagtattttcaaagtttattcatgttgtaacatatatcaacacttcatcctttttaattgcaaaataatattccattgtacatttatacatttttcctatttattagcaatgaacatttgggttatttccactttcgagaggtaatcttggagaccagtctttgaagtttgttctgactccag

SEQ ID NO: 673116 - DNA, 2076 bp, Homo sapiens
atgaaattattttttagagaaagtgttttactgattgtaatcagttacactcatatttgaatttttcagctgctgccatagattatgatgattatttcactcctatgctttgtctcacccacctgatctgaacaaaatatctcccaacttgacagaaactgattttagtctgtcttcttccctttccacaggtctacagacctcgattcattttaaacttaagcaagcattggaattcagaacagttcctctttaatggcctctcctgagaactgaccactttcagggaaaatcattactggctygacagttagatcatgccacttgatcatcaaatttacctacacctgttgctttctagccaaatgtcctcctccctatataagaagaccccattctgtctaaactttgagataggcatagattttatcctgagaatattctccctttcacaatggtctccctccatttattgcagtagtctatttgaatacaatctcttcttacttaaatttaggtttgttttttatttcattgtccataaggtatttgttagtcaattacatgatacagtcaggaaaagcatgcactagtttatcagaaaaaataaacaaacacttatttcttgttgtttgtgttgctataacaaaacacttgagactgattaatttataaacaacagaaacttatttttttccacaattctggagcctaagaagtccaagatcaaggtgctggcaggtttggtgtttggtgagtgctgctcccaatatggcgccttgttgctgcatcctcaatagccgagggatgaaagctgtgtcctcacgtggcagaaggcagaaaggcaaaaagggcctagctagttccctacagcttttccataaggttgctaatctcattcatgagagcacagccctcattgccctaatcgcctcctaacagcccctcttcttaataatgttgcataggggattcagtttcaacaggaatttcagaaaggacaagtattccaactacaacaacttcaaaaaactcatcataaaaaaaaaaatagctgccagtgccaggtccttaacacacaggatttctacatggctatctagagtatcaagatatatatatatatatatatatatatatatatatatatatacacatatacatacatatatatgtatatatatagccatatatatatagcctgatatagcctgatatatcattagccttattttatagaggagaaaatttatgggttgaccaccaagttagatcggagttctagcactcataaacttaaccactacaccaaacttcttcctagctaccacaaaacaatcttaattctccagaaaatcaaaactgccacatcttcatcaaaatactgctgtaaagggagttttctaaaattctgttcaatttaataattgtgaatgttgaacttttaaatgatttgttaaagttgtattttaccttagatagtggatgttaaaccactttaaagtagtatgcaaattaaatgtgtctgtatgtacatttcagcaaaaaaaaaaaaaaaaaaaatgtgaatgtgcctacctagtgatttcacaaatattttggcagctttaagatagaaatgatggtattagaaaccaacttagttgctacggcttatccctgggttctatgtcagtttgtaaccaaatacaggttcaactgctcaccacatgcaaaactgaataacaaggacgtggtgtggtaaaagaaagtgactttacattttccaaagctagccatgggaaatggatttaggctcttgccctaaccaaacaacctcagaatcccaggcaagatgcaggggtttaagaaggggaagtttggtgtggagggcatttggtgcggtgggggaatgcatctgtgtaacttgttctgtttttcttttttttttttttttttttttgagatggagtcttgctctgtcgcccaggctggagtgcagtggcgccatctctgctcactgcaagctctgcctcctgggttcacaccattctcctgcctcagcatcccgagtagctgggactacaggcgtccacc

SEQ ID NO: 673117 - DNA, 2076 bp, Homo sapiens
atgaaattattttttagagaaagtgttttactgattgtaatcagttacactcatatttgaatttttcagctgctgccatagattatgatgattatttcactcctatgctttgtctcacccacctgatctgaacaaaatatctcccaacttgacagaaactgattttagtctgtcttcttccctttccacaggtctacagacctcgattcattttaaacttaagcaagcattggaattcagaacagttcctctttaatggcctctcctgagaactgaccactttcagggaaaatcattactggctcgacagttagatcatgccacttgatcatcaaattkacctacacctgttgctttctagccaaatgtcctcctccctatataagaagaccccattctgtctaaactttgagataggcatagattttatcctgagaatattctccctttcacaatggtctccctccatttattgcagtagtctatttgaatacaatctcttcttacttaaatttaggtttgttttttatttcattgtccataaggtatttgttagtcaattacatgatacagtcaggaaaagcatgcactagtttatcagaaaaaataaacaaacacttatttcttgttgtttgtgttgctataacaaaacacttgagactgattaatttataaacaacagaaacttatttttttccacaattctggagcctaagaagtccaagatcaaggtgctggcaggtttggtgtttggtgagtgctgctcccaatatggcgccttgttgctgcatcctcaatagccgagggatgaaagctgtgtcctcacgtggcagaaggcagaaaggcaaaaagggcctagctagttccctacagcttttccataaggttgctaatctcattcatgagagcacagccctcattgccctaatcgcctcctaacagcccctcttcttaataatgttgcataggggattcagtttcaacaggaatttcagaaaggacaagtattccaactacaacaacttcaaaaaactcatcataaaaaaaaaaatagctgccagtgccaggtccttaacacacaggatttctacatggctatctagagtatcaagatatatatatatatatatatatatatatatatatatatatacacatatacatacatatatatgtatatatatagccatatatatatagcctgatatagcctgatatatcattagccttattttatagaggagaaaatttatgggttgaccaccaagttagatcggagttctagcactcataaacttaaccactacaccaaacttcttcctagctaccacaaaacaatcttaattctccagaaaatcaaaactgccacatcttcatcaaaatactgctgtaaagggagttttctaaaattctgttcaatttaataattgtgaatgttgaacttttaaatgatttgttaaagttgtattttaccttagatagtggatgttaaaccactttaaagtagtatgcaaattaaatgtgtctgtatgtacatttcagcaaaaaaaaaaaaaaaaaaaatgtgaatgtgcctacctagtgatttcacaaatattttggcagctttaagatagaaatgatggtattagaaaccaacttagttgctacggcttatccctgggttctatgtcagtttgtaaccaaatacaggttcaactgctcaccacatgcaaaactgaataacaaggacgtggtgtggtaaaagaaagtgactttacattttccaaagctagccatgggaaatggatttaggctcttgccctaaccaaacaacctcagaatcccaggcaagatgcaggggtttaagaaggggaagtttggtgtggagggcatttggtgcggtgggggaatgcatctgtgtaacttgttctgtttttcttttttttttttttttttttttgagatggagtcttgctctgtcgcccaggctggagtgcagtggcgccatctctgctcactgcaagctctgcctcctgggttcacaccattctcctgcctcagcatcccgagtagctgggactacaggcgtccacc

SEQ ID NO: 673118 - DNA, 2076 bp, Homo sapiens
atgaaattattttttagagaaagtgttttactgattgtaatcagttacactcatatttgaatttttcagctgctgccatagattatgatgattatttcactcctatgctttgtctcacccacctgatctgaacaaaatatctcccaacttgacagaaactgattttagtctgtcttcttccctttccacaggtctacagacctcgattcattttaaacttaagcaagcattggaattcagaacagttcctctttaatggcctctcctgagaactgaccactttcagggaaaatcattactggctcgacagttagatcatgccacttgatcatcaaatttacctacacctgttgctttctagccaaatgtcctcctycctatataagaagaccccattctgtctaaactttgagataggcatagattttatcctgagaatattctccctttcacaatggtctccctccatttattgcagtagtctatttgaatacaatctcttcttacttaaatttaggtttgttttttatttcattgtccataaggtatttgttagtcaattacatgatacagtcaggaaaagcatgcactagtttatcagaaaaaataaacaaacacttatttcttgttgtttgtgttgctataacaaaacacttgagactgattaatttataaacaacagaaacttatttttttccacaattctggagcctaagaagtccaagatcaaggtgctggcaggtttggtgtttggtgagtgctgctcccaatatggcgccttgttgctgcatcctcaatagccgagggatgaaagctgtgtcctcacgtggcagaaggcagaaaggcaaaaagggcctagctagttccctacagcttttccataaggttgctaatctcattcatgagagcacagccctcattgccctaatcgcctcctaacagcccctcttcttaataatgttgcataggggattcagtttcaacaggaatttcagaaaggacaagtattccaactacaacaacttcaaaaaactcatcataaaaaaaaaaatagctgccagtgccaggtccttaacacacaggatttctacatggctatctagagtatcaagatatatatatatatatatatatatatatatatatatatatacacatatacatacatatatatgtatatatatagccatatatatatagcctgatatagcctgatatatcattagccttattttatagaggagaaaatttatgggttgaccaccaagttagatcggagttctagcactcataaacttaaccactacaccaaacttcttcctagctaccacaaaacaatcttaattctccagaaaatcaaaactgccacatcttcatcaaaatactgctgtaaagggagttttctaaaattctgttcaatttaataattgtgaatgttgaacttttaaatgatttgttaaagttgtattttaccttagatagtggatgttaaaccactttaaagtagtatgcaaattaaatgtgtctgtatgtacatttcagcaaaaaaaaaaaaaaaaaaaatgtgaatgtgcctacctagtgatttcacaaatattttggcagctttaagatagaaatgatggtattagaaaccaacttagttgctacggcttatccctgggttctatgtcagtttgtaaccaaatacaggttcaactgctcaccacatgcaaaactgaataacaaggacgtggtgtggtaaaagaaagtgactttacattttccaaagctagccatgggaaatggatttaggctcttgccctaaccaaacaacctcagaatcccaggcaagatgcaggggtttaagaaggggaagtttggtgtggagggcatttggtgcggtgggggaatgcatctgtgtaacttgttctgtttttcttttttttttttttttttttttgagatggagtcttgctctgtcgcccaggctggagtgcagtggcgccatctctgctcactgcaagctctgcctcctgggttcacaccattctcctgcctcagcatcccgagtagctgggactacaggcgtccacc

SEQ ID NO: 673119 - DNA, 1725 bp, Homo sapiens
ttccctttagtatttagtaggcttatagatgccaggttttgtagaatgaaagggaaatgtaaaggatttctatagatcacaacatgtctttcttccttctctatccccaaaccccatgatatgaggatttttaactattgaggttcatttttgtagtttatatacttagcatgggcccttgactaatggggcttttaataaatattttgatatggatgaatgagtcataaatataatttctgtaaaatgaatagcttggcttagaagtgttcctcartcttggtgctattgtcattttaaggcacattctgggttacacgctagatgccagtagtactcatcacaacccttcgatagtgacacccaaaaatgtcttcaggtatttccaaatgtatcctgggagcaaaatcactccaggtaggaacttctgctctagaagattctaacattttataaaatgaagctatgaacttctcatctactaccctaatggatgatccaggcttcttattctctctcttgctttcctgatttcagccaccaaagatttgctgtcatccacacagaagaataaaaagatgaaatatcagtgagttgatctatgttgctctgattcaaagttaatgatacagtcttcatgtttctgtgcttgttcctcttttatcatctctgccatcaactcactattaaagattttgttttcttattgtatgtgcaaaggtaatatatagactaccaatgcaatgaggtgaataggtttgcaggttgaaatattgaaccgttttatgcatgcaaaagccagtgaaaataaacacttagctttttctgacattatctggttctcaagagactcttgacaaatggaattgctaagaaaacacagcaagagtatcaaatatttggtgtttatatcgtatcttcaaattggtgaaataaaatttagtacaatgtctctgtcaggatatgttatatccattgaatagaatattgcatgtagataaaaaaaactcttttcatcaactactatgtttttattttacaatgttccaaacaattagaaaaaaactgaaactacttcatcagtgaagttcaggctctggagaacatcaatcaagtgactctgccaacaattcaatgtagtgtttctctattatttcacagggaaattggaatgttgctgaaacactttgctaagtacattctggcaatggaaaacatagcacaactctcaagtcaatcatcaacgtgattgacatacaaagcaggaagatttctaccctcatgccccctctttaccttatttctctctctctactacccataccataagcagagcaatccctagtcaaaactgtaaaataaatcaacttggggggtgactaatgctgttttaatttgtaatttggcctctacatccatcaggatagatgagcaactcccacagacttagaagtttgaaacaacaaaagcttgtttatctcatgctaaacatcttgagtcagcaggagagtctgacttggagacctaaagtgatgggatcctcactatctggaacattggtaaaaggaacagagtatgctaaattgtgggttaatacttcaaggctcacatttcgttggccaaatcatatcacataattgcgtctcacttaaagaggagtaaggttgagtaatcctgccatgtgcctaccccatagggagagaatcagaaaacaggtgaaatagc

SEQ ID NO: 673120 - DNA, 1920 bp, Homo sapiens
cttccaaatactcataaaaccatcagatctcgtgagaactcactcactatcaggagaacagcatggaggaacccaccsccatgatccagtcgccccctcccttgacacatggggattacaaatcaagatgaggttgggtggggacacagagccaaaccatatcaagattatttattaggttctttgacatcaaatatcctatcttttcttattttcattttcattttagttcttccagagttggttttacacaaaaatgagttctaacctatactctcgcttctaccaactcagctgtaatgtcacagtcagaattctgacagctttcccatgttcttccaagcatgcccttccttagagaccttttttgtcctggctccattgtgacttcacactcttaggcaactgatatttattataagtcggagaccatcagtaaaaaacagatgaagaataatacgggtcaactccaaggtctggttatatatatcatgttatttggtggttgatgatcctctttcccataaatctgtaaagataatgtgcatcacatgtaactacatagatagaatctcagacatttccatcccccaaggctgcacatttgccccttcacctgagacagtagggcttttagagtcctagcatccattcactcaacttagatggcatttcctttgtcgtttgagttaatggatgtacaataatcttatggaagtgtgaaaggacgtcaaaaggcactccagctttgccactatttctagtgctttcagaagatgacatgactgatgaatcaaacctaaatgaagccataggcattgtcggttacaaatatgcagggcacacactactgctagttctcctgtcaggaccacagtacatttccttagacagtaatttaaagttaacttcaaaaatttctcctggcacaacaaaacagggttaatattaccataaaattacaatctaaaattactattgttttggactgcctagaatatttattagtaacactcagtgtttggagaatagataactatatgtataaatttctcagggatctctgagattctcaaggtcagcctttatatttgatttacataaataagtacagaggctttagagtagagaatataacaggatttgacatcacacaatcatcttcaaatgcaggctatagcattacatctcagtttgagataatatacagaaaataatgcctatctaataagataatttttagaattatgttactatcatagataatataaaataattgtactgcaattagcatatattacattgtcagaaaaactttaagtgcctagtaaataaacaaaaaaatagaaaaaaattaaccaggaaaaatgcaagttaaacaattctataatcaagaatttaattaagaaatgaaattttattcttagaaatttgaaatatatatatttctaaactatgaatatcaaaggcccacaaatttttagcaaaatgagtttactcctagctctgaaaattagtattagcattttggaaaaaatataaatccagatatttttgacatgatagacataaaaattactgtaaagaaactttatactagtacgtatatgaaatgtctttttaaataaaagaaaatataaaataaactatctcattttagtagtataggtagaaaaagtattatatatggatataaggtaaacatgcataaattaaaaattataattatatgaaatatgaaaataaatttatttgaatggaaaatgcctggaaagcggaaaataaaaactataaaaccactatgctgacaactacttaaatagctataagatggcatctaggtaaaagataagtgataaaaaggtttttttcttgtaaaccaggatttttttacttttatatattttttaagtgtttgca

SEQ ID NO: 673121 - DNA, 1479 bp, Homo sapiens
ttttaaaagtgaccttgcttattgaatactcagcattataaaggagtagcattctatacacacacacagcctggaaaatgctgtgcagagaagaaagctctagagaatgataacatgtctgttagcagatatgaaacttgttaaaatgtgacctagaccaacctgccgtcaaatcagtggagcaaaatcctctgtgagccaacagaaagcatcgcgccaacattgaacaagacatcacctagttgcakgtttctgtgtatattctttgtgatccatgcttagaattctgtacatttacaaattctctggtgagaaacttgcaatttgattaaaaaccttaaatctagaattttaataaaaaacatattggatctcccttagcaaaagattatattaaaagaggaacattttgagagtaagttaatatagaatctcatctagtttcaaaatcagatcatttgaccaacttaatatttcaaatttactaatcttttgctaattaaaagtacattgtatttgtgtctgttaacatatttatataaattcttcatcaatctgttgtctatgctctgaaagtttcattctatctaaatactacttgattgacctatttgtaatcaggctgatgtggaataaatgccttttcatattttgcaatgaatctaagtatcactatattccagctatgaggtgtatgtaatatagataatagagtatatacttcttgcaaagttacatgtatttgctataccatcaaatcagtttagccattttggaaccaagctacctagagaggtattattattatatagatatgtgtgtgtttgtgtgtgtgtgtgtgtattacttagctggtaggacttactcacctcgagaagggcagctgtacattattttgttgttattgttgaaatttcagggaagaatgtttctccttcaaacttcaaaagtgttttaaaactattattgtcaaccagtggttctcacaaattttgttctcaagatctctatatatgcattaaaattactaaggactccagagaacttttgtttgtaggtgttgtatttactgatatttattgggttagaaattaaaactcatttaagaatgtttaaattttaaattgattttaaatttaaatatatacatttaccgactatttacaaatatcaataaacacattatatgctaatgtaaataatacatatgttataaagtaataactatattttcgaaaacaaagtgagaatagtgccactgttctatgtttttttaaatatctttaacttttagattaatagtatacagctggattctcatatctgcatttgcatacaatgtggaatgaaatgttgttttagttgaaatacataaaaaaatgaaggctcacatagataagtattttgaaattggatattttgacaacatttttaggtaattttggatattctttataatatgctaccaaaactatcctg

SEQ ID NO: 673122 - DNA, 1144 bp, Homo sapiens
cataggaatattttagtaccttcaactaaaatgttacatgctgtaaaatatggtgcccctttacatagtttaatggaaaacaacctaagagatgtgaaattactacaggaatcaaatgagctaaatatggaacataagcaaaaataatgttaaaatctgaaacctaactaaaaacacttgtataatggaccaatggattacaatacatcaatataaaggtggtatttatctttaaactggtcttgtattataccacgccacccaaagagaatggctagaaataagttacctaaaacagtgtgagcacaataaaacacttccaaatagcaaaaaacgttatgtttcaacttcaaacaaaagatggaaaagcactttaatggctacatagtttaatttttttctttaataactgcgaaatggcaaaacaaacattaacttagtgattttagattaaaaggaaaggagcaagatcatactgctctcataagactccagggattggtatacagtgcaagtaatttaaaaaataaataaataaatatagtctttacttgttttattccttcatctggagattaaaatcttctatgtcaaatgtaagtgaatgtctgcctgacaggctacatgaaacacactttcttataaggaaacagttccatggagactgttcacagctatgtaaacctgaaagtcattgccctgcagtttccaacttacagcacttagaacttcatctctgtgcccttctacgcctccaaatattgccaccagagtgtccgtctggatattccataatcgtaaagcatgatctagtataaacatacaaaaattaggcgaatgttttttatttactgtgaactttcaacatcttgtgaaagaaaaactactaaagtctagatgtaagttatgcacagtaaagcctaaaaatggaatccatattacatagcaacttaaaatgtttacatcagatgtagaattagctaggtaagtgctatagtttgaataggcccccccaaaagcatgtgctagaaactcaatccccaatgcartagtggtgtgagctggggcctaatgggaggtatttaggtcatgggggctccatcctcacaaatggattaatactgattataaaagggcctgaggc

SEQ ID NO: 673123 - DNA, 631 bp, Homo sapiens
ttacagatgagggaaattaagtccagtaaagggaccttaaggcttagaattctaagccttcctcaccacaacctgtaaggcttttaggagacctgtgctgaraaagaaattcccacctataaataagatcaagtcaatgaaatacttatacaatactatatgttactgccggtgaatagacacaggtgaaaatagatctttgcattcaactagttatgtaatctagaattttgtacagctaaactgttttgacatttagttcagtttacacagaaataaatttagactaggggctagtttacagcaaatcttgggctgtggcagtcctgacctggcccagttcaaggaagtttccactgcaactcctggatcttcgtaatttgactgtaagtaaaattatcttgaaaatcaatctgtgagtacatgagttctttaaaacaatttttatggactggcatatactgtagagtggtcctcacggagacagctgagcaaaggcttaaagagggtaaaggagtcagctttagaaaagggaagagcatcctgggcagagcaaatagctagtttaaaggtgtaagcaagaggacttttatctctcctactttccaagctgatcttaaattcaattatt

SEQ ID NO: 673124 - DNA, 631 bp, Homo sapiens
ttacagatgagggaaattaagtccagtaaagggaccttaaggcttagaattctaagccttcctcaccacaacctgtaaggcttttaggagacctgtgctgagaaagaaattcccacctataaataagatcaagtcaatgaaatacttatacaatactatatgttactgccggtgaatagacacaggtgaaaatagatctttgcattcaactagttatgtaatctaraattttgtacagctaaactgttttgacatttagttcagtttacacagaaataaatttagactaggggctagtttacagcaaatcttgggctgtggcagtcctgacctggcccagttcaaggaagtttccactgcaactcctggatcttcgtaatttgactgtaagtaaaattatcttgaaaatcaatctgtgagtacatgagttctttaaaacaatttttatggactggcatatactgtagagtggtcctcacggagacagctgagcaaaggcttaaagagggtaaaggagtcagctttagaaaagggaagagcatcctgggcagagcaaatagctagtttaaaggtgtaagcaagaggacttttatctctcctactttccaagctgatcttaaattcaattatt

SEQ ID NO: 673125 - DNA, 865 bp, Homo sapiens
gccctcatgcagtcaaattaaagattttagccttaaccatccacccttcagccgttaattaatttacttggtaaacatgtcttgaacactggttgtgctagatactcaaacacttaaatacaaaggtagataagacccctgctttcaagaagtttacagtttaattgttaaaatatggttaattttctgattgccagaaggaactatactcactataatagaatttacataaagagccttataccaacaaatccaatataccaactattactttcctattacttgatttatatttggttttctttatttagcatattataaagaagtcagtttttaagttgcagcaatgtgaagatgataatatacaataacacagtagtgttatatatttatagattaatgaacgatattaaaaattcagaccatttattctaagaaagagctaaaaattaatctcttaggcagttcaccagaatcacattacttctgttctccagtgaatgtaattatttgaacatattttttaaaaggccatacatcttccaagaacttggaactccatgagttggagaaaaaaaagtataagaaaacctgyttcatttgatttgtgctttatactgtacttagcataattagcttactggagaaaaggaattcaattgataaaaagtaataactgcaatggtgagtcttcttgagggccataggttctcagcttgtcagttaacaaaccctgtacaaccttggagcctcttgtgttgacggtatgtgaacttccttgggatattagttaatccacttaggatcgtctcattcagggagatgcaccccagaatggcttcttattactgttttgtgcagttca

SEQ ID NO: 673126 - DNA, 596 bp, Homo sapiens
aaaccaaaaaaattaagagaaagcgttcaactacatctagaggaggaagagccacacagacacagccaatataacagcatgatgcagggcatgaattcaaattgcagcgtagtgttctgctttgtgtttgttcttttccctttcaaataaaatctgacatggaatctcaatatttaaaatggaaacaagtgaatggaattcttaggcaatttacattttcacagttaggctgaaaatacaccattgtttgtggaatccatgaagcatcttctctggggctctaagggcctcctaagcaaatccgcaaaccatttttggaagaggacccttacaggaggacagtaggatagcgataaggagcattaactcggccctgagacggccgttcggtttcatgtttttaggaataaattagataacccagtaaacatgattagcacagtgtgaacagatggcaacccacagttttttttaaccctcagggaaggactccagattgggctcttccacttgrcagctggataacttaaagcaagtcatttaaccctgagcatcagctctatcttctgcaagcagatatcataacagaatctacc

SEQ ID NO: 673127 - DNA, 638 bp, Homo sapiens
tgccttccccctcccactccaaatgtggaaggaaaacaatgattcygatctctggattcaataaaattatgtgtaggctatgcatgctctgtggtgctatataaatgtcatgaattacaagtgcaaacactagctggattcttttctcagagaaaataatacgggcagggagggatatgaaaagcattctactctttgaaaagggatccaccaatgaatattattttgaggacagacagcacatcctatacatctgtatttttccctggtagttcattcagctttacctacactagccacccagtattgaatttgagatggcaaagaagacactcattttcctcccacttcaatgagaaatcctgaaagtgaacacagatccactaggccaggggtctgtaaagggtctgatagtaaatattttagtctttgtggggcatatagtttcagccacaactactccacacagccgaatatactatgtaaacaaatggatacggctatgtcacaataaaagtttatttatgaaaatgggtggcaagcaaggcttggcctgaaaactatagttctctacctgatctctgcactaagctgtaatataccagaccttcccttggagatcctgtcagatgccccat

SEQ ID NO: 673128 - DNA, 638 bp, Homo sapiens
tgccttccccctcccactccaaatgtggaaggaaaacaatgattctgatctctggattcaataaaattatgtgtaggctatgcatgctctgtggtgctatataaatgtcatgaattacaagtgcaaacactagctggattcttttctcagagaaaataatacgggcagggagggatatgaaaagcattctactctttgaaaagggatccaccaatgaatattattttgaggacagacagcacatcctatacatctgtatttttccctggtagttcattcagctttacctacactagccacccagtattgaatttgagatggcaaagaagacactcattttcctcccacttcaatgagaaatcctgaaagtgaacacagatccactaggccagggrtctgtaaagggtctgatagtaaatattttagtctttgtggggcatatagtttcagccacaactactccacacagccgaatatactatgtaaacaaatggatacggctatgtcacaataaaagtttatttatgaaaatgggtggcaagcaaggcttggcctgaaaactatagttctctacctgatctctgcactaagctgtaatataccagaccttcccttggagatcctgtcagatgccccat

SEQ ID NO: 673129 - DNA, 1042 bp, Homo sapiens
ataagtatttattgaatgataattatgttctaggcataggggatattacaggaagctaattagacaygagttacataaaacaaatgtcaaattgtaactgtaaagagggctaggaaagagaggtgccctggaccacaagagctattatgagggttcagcatggccagagagagcttgttcggtgatctgagggacagagagttcaaccaggtgaaaggagataggagcattccaggcagagggagcagcttgtgcaaaggccctgtggaggaaaggatattggtgataatgaggggggaatggagacctttgtggttcaagttgggagagaggggactggaagacaagttaattttgaaggagtgggcaggggtcagtcatgaaaggcatccctataaaaatgagaggagcctggcttatcattgtctttgttagaatgtgtgtatccccttctattcctcctcagcttagtaccatagttaagagcctgaattctggagtcaggctgccatgattagataccagctctcctacttaaaagctttgtgaccataagcaagttacttaacctctctgtgcctcagttgccttatctgtaaaatgggaaatataatagtacctacctcataaacttgaaattaaatgagtttatatatgtaaaatacccagaataatgccaggcactataagcaccatatgaatatgatctattatgatgatgttgatgataataaagaacatcactattcagaagatattccccaatgtttatgcataagaaatccataccaaatcatatccagaatatataaatatttgcattatgagcagagaaaacctaaaacaaactgtaggtctcttcagtgttcatttatggtatggaaaaatgcatttctcaagtaaatcatcttggaaaagtcctctttaaagctacgaaaattaaaataaattctactctgcctagtgtgtatttgagatatttggaagacaatgtattcttgatactgattcaggttacactctggactgaggaatggcagaa

SEQ ID NO: 673130 - DNA, 1798 bp, Homo sapiens
catgaacacgctgaagacaattaaatactgatcttgttggttttgtgataaatgttttgtccatcgctgctaatgctaggacttaatattaamttcagtttcatcaaatccaatgttttctctttctttttcaccccagtgctaaccctctttgatcttttggtatctttttgacagtgtcacaactcctctttctttaaattctttctgcccttgtttctgtgacctgcactttcaattcaatttcatttcaaccaatatttattggtcatctatgctgtgccagacactggactatcatcattggtttattaactcattcctccacattaattgagttcctactgggtgttgggcactgtgccagtgacggatacaaagatgaacaagatgtagtccctgaccttagaggctgcacagtgtagtgaaggagtcagctaactatatcatggagtggagaggctgttatagaagtgcacactcagggcctgtggccctcagagaaagaatcgattacttctctatggggggagggggtacatcgcatagcaccatgcctggcacgtgctaaattttcaacaaatatttgtcaaagaaacaaatagtcttccaggtggagataacagcacaaacagggatctctagggagccctcactagctaaagtagtggttttcaacacagtgaggcagagtattacgttctctggaggcatggaaggggatggtgaagggaacaatgtgtatctgaagggggattgcatatgaaaaatgtattcctactgttgcaatttaacttataaattttacaaacatgcatatttaaaaccacattacataaaatattaatttatagattcaattttatacatttatataacaagaatgagaataaaattattgttttcataatatgaattacagaaattaaagctcaaactaggaaaactggataaatataggtaaatatagaagttccagaggttctgcagcaaaaccattgtcttcttgaggatggtggtgagatttttatgtttaacaaaagggggtgtagaataatgggctctgaaggactgtattttgtaggttaaggtttgtcaactggtgtcagaatcaaaatcaaaatcacctggggatcttgtttttttttttccattttattttatttttatttatttattgtttttgttttggggatgttgttttaaaaagcaaattcctggatcctatgtgttacataacaatagggatacattctgagaaaagcatcattaggtgatttcatcgttctgcaaacatcatagagtgtatttaaagaaacccagagagcatagtccactatacacttgggctatatggatagcctattgctcctgggctacacacctgtacagcatgttaacgtactaaatactgtaggcaattgtaacacaggagtatttgtgtatctaacatatttaaacctagaaaaagtatagcaaaaatacagtattatgatcttataggaccattgtcctgtaagacagtgttcgtcattgaccaaaatttcattatgtggctcatgactctgtgtgtgtatacatatatatataatttattataaggaattggcttatgcaattatagaggctcagaggtcccgagatctgcaatcagctagcttgagactcaggagagctgatgatgttaatttcttttatttatttttgagatggagtttcactcttgctgcccaggctggagtgcaatggcgtaatcacagctcaccacatcctccgcctcctgggttcaagtgattct

SEQ ID NO: 673131 - DNA, 1798 bp, Homo sapiens
catgaacacgctgaagacaattaaatactgatcttgttggttttgtgataaatgttttgtccatcgctgctaatgctaggacttaatattaaattcagtttcatcaaatccaatgttttctctttctttttcaccccagtgctaaccctctttgatcttttggtatctttttgacagtgtcacaactcctctttctttaaattctttctgcccttgtttctgtgacctgcactttcaattcaatttcatttcaaccaatatttattggtcatctatgctgtgccagacactggactatcatcattggtttattaactcattcctccacattaattgagttcctactgggtgttgggcactgtgccagtgacggatacaaagatgaacaagatgtagtccctgaccttagaggctgcacagtgtagtgaaggagtcagctaactatatcatggagtggagaggctgttatagaagtgcacactcagggcctgtggccctcagagaaagaatcgattacttctctatggggggagggggtacatcgcatagcaccatgcctggcacktgctaaattttcaacaaatatttgtcaaagaaacaaatagtcttccaggtggagataacagcacaaacagggatctctagggagccctcactagctaaagtagtggttttcaacacagtgaggcagagtattacgttctctggaggcatggaaggggatggtgaagggaacaatgtgtatctgaagggggattgcatatgaaaaatgtattcctactgttgcaatttaacttataaattttacaaacatgcatatttaaaaccacattacataaaatattaatttatagattcaattttatacatttatataacaagaatgagaataaaattattgttttcataatatgaattacagaaattaaagctcaaactaggaaaactggataaatataggtaaatatagaagttccagaggttctgcagcaaaaccattgtcttcttgaggatggtggtgagatttttatgtttaacaaaagggggtgtagaataatgggctctgaaggactgtattttgtaggttaaggtttgtcaactggtgtcagaatcaaaatcaaaatcacctggggatcttgtttttttttttccattttattttatttttatttatttattgtttttgttttggggatgttgttttaaaaagcaaattcctggatcctatgtgttacataacaatagggatacattctgagaaaagcatcattaggtgatttcatcgttctgcaaacatcatagagtgtatttaaagaaacccagagagcatagtccactatacacttgggctatatggatagcctattgctcctgggctacacacctgtacagcatgttaacgtactaaatactgtaggcaattgtaacacaggagtatttgtgtatctaacatatttaaacctagaaaaagtatagcaaaaatacagtattatgatcttataggaccattgtcctgtaagacagtgttcgtcattgaccaaaatttcattatgtggctcatgactctgtgtgtgtatacatatatatataatttattataaggaattggcttatgcaattatagaggctcagaggtcccgagatctgcaatcagctagcttgagactcaggagagctgatgatgttaatttcttttatttatttttgagatggagtttcactcttgctgcccaggctggagtgcaatggcgtaatcacagctcaccacatcctccgcctcctgggttcaagtgattct

SEQ ID NO: 673132 - DNA, 628 bp, Homo sapiens
aatgctctttattaccattcaatccaatccaaccaacatttactggctatgacacgtcagtccctaaattaggccaaagggacctggagatgaatatgtcataatccctgccctcaaggatcttacaaattaaacaataattacaatttagtgattcatgtgtaacaatcaaaatatgttccaaccacagggaatcataagggacagtgattaacttcatttagtctggaggtgggaccgtggccagaaaggcttccaagaaggagtgacacctgggctgggttttaaaggatgagcaggagttcattatgtgcaccagaaatagatcttggcattccaggcaacggaagagcctgaatgtgtcctgacttcttgcttagcaaaattggatcaccctgcactttgggaggccgaggcgggcggatcacgaggtcaggagatcgagaccatcccagctaaaacggtgaaaycccgtctctactaaaaatacaaaaaattagccgggcgtagtggcgggcgcctgtagtcccagctactcgggaggctgaggcaggagaatggcgtgaacccgggaggcggagcttgcagtgagccgagatcccgccactgcactccagcctgggcgaca

SEQ ID NO: 673133 - DNA, 651 bp, Homo sapiens
tctgtaaagaaaaatacattaacttccaactacacacctcttttcacaaaccaaagatcattctattattagaaaaagatacttccccctcactggttatgagaatctgactagtgtccattgttgttttatctctctgcatgcaaccttaaaaaagttaaacatggcaaaatttaaacattcaaaatctgcacagtttgattgcatggtataaatattctacttgtactttttgtttaatatttaagcataccttttcaaaggtacatatgtaaaacacgtagaaaagccaagctaggtttgtcttttccaataagtcataaagacatattccacttaccttactgaccaacaacagaattcctacaccaaagttaacagtatggaatagtatgtatactggatcattgtattatagacagaattttaaaaaaaaactataaacaggtcaatgttccaattgatagaagcctagtargtactatatagctcaaaactgaaactcaagtggggatggatattttcaggtttgaaacaacaacaaaaagaagctttggatgaggaaaaagttgggtaacgaggaaatttaggtaaagattagaatatatgccattttagaagaatcctttacaaatccaaacattttaaaat

SEQ ID NO: 673134 - DNA, 629 bp, Homo sapiens
aggacatcctgtgacatgatgcctagagagtctggaagaatgttctccagaacttttccagccctatccaacagaattcttgggtgggaacttggaggcattggatattatctttaaatgaagagatcaaattaataaattatttttaaaattagtgtttatatttatttattgaacacctataaagagtaraatttgtgtagaaaagaataaaaccagaatggtctgaaatgtgtggaaaaggttaaaggagaaatgagttttctttattagctatctctgtttcagaagactagaatgggaatttcactgctgtgggaaggtaagaaatattaatagatagtgaggatgtagaattccttgacttccattacatgcttaggaagaacagaaaaactgtcacatgtgaaagaattgcagaataaaatctgaatgttttaaaatgaggacaacttaccataccaggtgagcttcactcaagagaatgacagaactcgtgaagagcacgcttgcctcgagcctggaatatagccattctgactactgtgagatgatatctcactgtagttttaatttgcatttctctgatgattagtgatgtgcattttttcatatgtttgttggccgct

SEQ ID NO: 673135 - DNA, 629 bp, Homo sapiens
aggacatcctgtgacatgatgcctagagagtctggaagaatgttctccagaacttttccagccctatccaacagaattcttgggtgggaacttggaggcattggatattatctttaaatgaagagatcaaattaataaattatttttaaaattagtgtttatatttatttattgaacacctataaagagtaaaatttgtgtagaaaagaataaaaccagaatggtctgaaatgtgtggaaaaggttaaaggagaaatgagttttctttattagctatctctgtttcagaagactagaatgggaatttcactgctgtgggaaggtaagaaatattaatagatagtgaggatgtagaattccttgacttccattacatgcttaggaagaacagaaaaactgtcacatgtgaaagrattgcagaataaaatctgaatgttttaaaatgaggacaacttaccataccaggtgagcttcactcaagagaatgacagaactcgtgaagagcacgcttgcctcgagcctggaatatagccattctgactactgtgagatgatatctcactgtagttttaatttgcatttctctgatgattagtgatgtgcattttttcatatgtttgttggccgct

SEQ ID NO: 673136 - DNA, 609 bp, Homo sapiens
ggttatttcctacaattccctcctttttctttttaccctttttggtttcattttcacttaaattgctttttcaaactgttccagaattgtttactttttttttttttagacggagttttgctctgttgcccaggctgcagtgcagtggggtgatctcggctcactgcaacctctgccccccaggttcaagtgattctcctgcctcagcctcccgagtagctgggattataggcgcgctgtaatttttgtatttttaatagagacggggtttcaccatgttkgccaggctggtcttgaactcctaaactcaggtgatcatgagcacccgcttcagcctcccaaagtgctgggattacaggcgtgagccaccacgccaagccagaagttgtttactttcttcctcataggaggaggagtttatttggtttctaataatagtaggttattttgttggaacatcaggggcatctgtttactgagagttgttttaataaaccttagtgttatatatatatatacatatatatatataatatattacatatattatatatagtagtagtgttaaaccccttacacaagtattgatgcaacatcgtatgtcaatga

SEQ ID NO: 673137 - DNA, 609 bp, Homo sapiens
ggttatttcctacaattccctcctttttctttttaccctttttggtttcattttcacttaaattgctttttcaaactgttccagaattgtttactttttttttttttagacggagttttgctctgttgcccaggctgcagtgcagtggggtgatctcggctcactgcaacctctgccccccaggttcaagtgattctcctgcctcagcctcccgagtagctgggattataggcgcgctgtaatttttgtatttttaatagagacggggtttcaccatgtttgccaggctggtcttgaactcctaaactcaggtgatcatgagcacccgcttcagcctcccaaagtgctgggattacaggcgtgagccaccrcgccaagccagaagttgtttactttcttcctcataggaggaggagtttatttggtttctaataatagtaggttattttgttggaacatcaggggcatctgtttactgagagttgttttaataaaccttagtgttatatatatatatacatatatatatataatatattacatatattatatatagtagtagtgttaaaccccttacacaagtattgatgcaacatcgtatgtcaatga

SEQ ID NO: 673138 - DNA, 609 bp, Homo sapiens
ggttatttcctacaattccctcctttttctttttaccctttttggtttcattttcacttaaattgctttttcaaactgttccagaattgtttactttttttttttttagacggagttttgctctgttgcccaggctgcagtgcagtggggtgatctcggctcactgcaacctctgccccccaggttcaagtgattctcctgcctcagcctcccgagtagctgggattataggcgcgctgtaatttttgtatttttaatagagacggggtttcaccatgtttgccaggctggtcttgaactcctaaactcaggtgatcatgagcacccgcttcagcctcccaaagtgctgggattacaggcgtgagccaccacgccaagccagaagttgtttactttcttcctcataggaggaggagtttatttggtttctaataatagtaggttattttgttggaacatcaggggcatctgtttactgagagttgttttaataaaccttagtgttatatatatatatacatatatatatawaatatattacatatattatatatagtagtagtgttaaaccccttacacaagtattgatgcaacatcgtatgtcaatga

SEQ ID NO: 673139 - DNA, 415 bp, Homo sapiens
ggtccctttatgttgcccaggctggtctcgaactcctgggctcaagcaatcctcctgcctcagcctcctaaaatgctgggatgataggcatgagccaccrcacctggtccaccttacatacttctgacagcttcttttctctacttcttcacttgcatccatatcagctctctagacggcagaatcacatttgaggatgatccagaactcctgtacctagtatatatattttgtccttccattctcaccgtggcaattaattttttaaagtgcaaggaatatggatctttttttttattatttctttcagacttgaagagcaaaacaaaaaccaaagagtcagccttacagaatgatatttcgtgggaagaactacattgtggcctaatgatggaaagatttacaaaaggaagca

SEQ ID NO: 673140 - DNA, 415 bp, Homo sapiens
ggtccctttatgttgcccaggctggtctcgaactcctgggctcaagcaatcctcctgcctcagcctcctaaaatgctgggatgataggcatgagccaccgcacctggtccaccttacatacttctgacagcttcttttctctacttcttcacttgcatccatatcagctctctagacggcagaatcacatttgaggatgatccagaactcctgtacctagtatatatattttgtccttccattctcaccgtggcaattaattttttaaagtgcaaggaatatggwtctttttttttattatttctttcagacttgaagagcaaaacaaaaaccaaagagtcagccttacagaatgatatttcgtgggaagaactacattgtggcctaatgatggaaagatttacaaaaggaagca

SEQ ID NO: 673141 - DNA, 574 bp, Homo sapiens
gcatcagtgccagagactaggccaggtgagccaacagagaggcagtcactggtttcctgagtcatggccttcaggaggggtcagtagagtacccaaacagaacaaacaggacatccccaagtgtgcctcaggktatacaagtaccagacacataggaatcagatcagacccaccagatcttgttggggattagcaaagcgtgcacgaggaagagtgcaaacctgaggtccctattgcgtgacaccataaaagcatgaccagaagaggttcaggaatcagtgagaacttccagaacagaagagggtgggctggcaacgatgggtgacccatctatttctcagtaagagacaaaaccaggaggaaactgtattactggtgcaaaactgaatttgtctggtgatttgcaaatctgggctgcttcctgttcaggatccagttatgtaaatcatatatttcagttagtagggccccaacctgtgaatccagggaagttgccacttaaatcaatggccctagcaagggcctcttgtgtctatttggatgaagatttcaggtatgtggcacctaaaggctt

SEQ ID NO: 673142 - DNA, 1070 bp, Homo sapiens
cactgcgcccagctgctaatttttgtatttttagtagaaatggggttttgctatgttggccaggctggtcttgaactcctgacctcaagtgatctgcccgcctcggcctccaaaagtgctgagattataggcgtgagccaccacacttggccttaagtctatatctttaagggcctctttttatatctgtacattaagttttatctcattctttatttaacaaaaatttaaattattattatattttagagatgggatcatgctatgttgctctggctggtttccaactcctcgactcaaataattctcctgcctcagccttctgagttgctgggaagacagtgtaagccacccagctaggctatcttattttttctacaactgcattgcattctactgcatggacataacataatttgacttgtccctactgaaaaatatttcacttgtctccaatttttcattgttataaaattacaccatagtacatcattatacacaaatgcttgtatattcctgtcagtatttcattggctttactagggaaattgatgggttgtggatgtgtgtacactcagcaaatatgggtgcctttccctgcatactcactggatttgatcaatcttcataatttttgccaatataagaggtagaaaatggcttctcaatttgtgataaaatgttgattactctgtaaaatctttaaggatacagaatatatattttatgcattgtatacctggcataacatttttggatgaaggggtttctctgatatttacccttactattcctatccatccattttgggctctgccaacctaaagcaccaatayttcctgttcacaaaaaaatcttattccttagtatttctaacctcacttataaaaagtgctcagaaatagcttaataaattttggagtcagcttaaaaagcaagcagagatgtttagattactgattacagggactagggagatgtttagtttttctttttaaggtaaaaacaagataaatgtcgtatttcaagtggtcaaatctggcagtaacattcaagaagattcagaaaaa

SEQ ID NO: 673143 - DNA, 2026 bp, Homo sapiens
taacaagaccccacttctaaaaaaaaagttaaaaaaataataatgatagcatttctgattttggataccaaagtaagagattatatatttataacatggaagtttaatttttttatattaggcacatcatatagcatgaggaatagaactgaaagtcacaaattactattagaaatccagcctttcacgtttcaagtatmaatcaaaatcataaaggaaatcttggtcaatgtgggaggttgtagtcaatagttggatagagactatttttccaactggcagcactgtttttgttttgttttgttttttaatcttcaactaatcaagctgtttgagaaggacaaggcgtctcttgtggtttttgtgttgcttaaaattctacatgatatcttaaggacagcaacattcaggttcctttctctgattattgaagtgaaaattaatgtccagtagtaatgaaattgttttttccacttaactattcaacagtttttactatcaaaataaaaatattaatggctttaaattatatattcacatgtcaattataggagttttaggcttctatcatacatattttcagtaagacactgctttttaaaactcccatttctaatactgttatagttccaataacatatccctaagtcatagcaattatataactaccatttttatcaagttatttctatcaaataacttattcaaattcatattttcttttccaattacttacattgccagcctttaaaaataaatatcttttggactattgtctgtctgtctaatttcctcataatgttcaatatgacctgtacaatgtttgcaatgttttcccttgaatctaacgaaatagccagttttattgaaatgtatgttcttagactgtgagaggcaaacttccctactcattatagagcaagtttgttccttatctcaaggtgtctctaaggaatttttgaaaagaaccctgcctttgatttcatctaatcatgagaacagtaaatcagactaataaattcaagtatacttgtatttgaaatttttagtaccatatatatatacatataaatacatacacatatagtcaataaatctatgatagttttcaatgcaagtcataaattcccaaaagcaacaaaatgactcattaaataaggtaaggcggtctctttaccttctaccccaaagtatcctttctttttctccatcagagtttcctgctattctgtcacataacacacatacacaaacatacacacacacacacacacacacaatattccaaccgacgtataaaattctttctcacacttctgttcttcttcgttcttttgtctaaccaaccaacaaatccctattcatatttcaaaattcaatttgaatatcaccccttttttgaagcttccccttaatattgcaaggcgtttttcttctttattctcacagacccttttaccggtgtttattttagcacatacattactgatagaaatattttctacttgttctcatccctctcgactgtgaacttttgaaggacaggacaaatgatcaattactctttttatgtaaagcccagcaaaacactgggcacattaaagataatttaataattattataaacaaattcggaagagttatttctcaaaatggtggatttcttaaactcttcatccttaggcatacctcaaactaatattttcatttacttgcaaactgtactcatttttaatcattatgccataaattaatagcttctctttcattataaagggttcttttaaaagtctttctatattctgagattgcttacggaaaatgccttatttttgtcccagtgagaaagaagaacaatacattctttcttcctccatatcattcctatacttatttcttttaaaatgttgcttatgtccaggcactgcttttaacaccaacataaagcaacgagcaaaaaatccaaagtctctatgctcatagagctgatattctagttggatgagacaaaaataaataaatcaaa

SEQ ID NO: 673144 - DNA, 1173 bp, Homo sapiens
aggttaataatagggaataaaatgactatagaccaagataggaagaaaaggagatatgtataaatattcacacatcagaattaatattacacttacagaatatttacattatattaaattttatagtgccacttttccattatgtctactttgaatgtgttcctgataattgctaatttttctataacaaatacaaaaataactttatgagttcatatccctgcctattgtattaaaaacttgacatggatttatgaggttgtatattcaaggtgtaatgtgaaaattatattgttttaatggctaaaaacatgtcacttgacttgaagagcttcttcaaataatttctttgtaatacgaaagatctactattttaagaaggtgtgagtacaccaaaacatcgagataacatatttgtggtgcatgtgtgaggacagccacatttaccttaatgttattatacatttgtctgatcatcagcctctaacatagaaaatccttacaacttgttaaccttcaggattagctgttatgctaaattgcctgatgagtatggagtattagcttttattcacctttcactgataacacagaatatatttttcagcttcagacattcattaatgaatcaaatttagggactaaataaaatccttattaagmctgacaaatggtagcctcaggtaaacccaacgtatttttacactaaatcaaagtgagttctgctctagatgctctttatgttgccactatccttgcaagtattctgaggtcacatcagagaacagaacatctccttaaggaattaacagaagaatctagccctgaggtattatatttctgaaatgaataaacaagaacataaaacacaggggataattagagtatctcatattatagacttagtgccaatattatgggtaggaaaaaccattagctttttatagacaatatacttaaggataaatttttgaatttagaacgtttctgagtgaaattcacagtaattagtccactgtgagtatgggtatctttttcagaattataattaatttcaacatgtttgtttttccccatgaattaatcaattcagatttgtttagcctaattgccacaaaagtgcccaagtttgtattcatgttttttttttcctatggcttagaaagttttatt

SEQ ID NO: 673145 - DNA, 1384 bp, Homo sapiens
cctcactgagcgttagatcttcaggggccccataactctccaaggatctgctagtcctctacagttgcaaaagtcagagtgtgctctggggtctttttgtaggggatcaggtgatgtggtgacagaaaggcttagatttctagggcctggcagtaagccacagtgggtacgcaaacagcgtggtgtgcatcgtctcagttcaggcctgagggggagagccagtgtacctgtccaagctggctacttggtgctctgtctctgggaagttcacagatcaccactgacagtgttgcccagggtcacaaaggcagactttctccccgacaatttggtggtaagcatattgttgcaggggtaaggggagcagagaagcacccccacctacccttcccacagggctccaagtccctcaggggactgtctctgccagagcctttctgcttcccttttctgtgccctgacttcttcccatgggctgtctgacaggacctggctctcctccctcagctttccattcaaatcctgaccattcacctaccactttgatcttcttcttaagaactggcatttgaactaagcattccctagtcagccatcttgagaaaaaaataatgccaggtacatttttcagcactatgcatgtattaactcataaccaacctatgatgtaagtaccactactaccccttttacaaataaagaaattaaataactcgtccaaagtcatatcaggctaaatatttcagctcagggaatcttccctcaaagtctgaaatatttaccactttaccacattttaaaccccaatactgagttaaatacagtggaaatctgccaggcgtggtggcttatgcctgtaatcccagcactttgggaggccaaggcaggcagctcacttgaggtcaggagttcaacaccagcctggccaattaggagaaactccgtctctactaaaaatacaaaaattagccaggtgtagtggcacaagcctgtaatcccagctatccgggaggctgaggtaggagattcacttgaacccacaaggcggaggtgcagtgagccaagattttgccaccgcactctagcctggttgacagagcgagactctgtctcaamaaaaaaagaaaagaaaagaaaaaaagaaaaaaaaatacaatggattttcttcaagggatgtaagatttccatatgttttagatattaaaattattaagcatattcctaaaactggattgaatgtagcgatacttttagggacaatatttgagaatagaacacaattttcaggttaagttcattgtgcttgaagtttaatgtaaatttaatgcccaggcagatatattgaaagaacacacaaaaaaaattaaatatgtgcatatcagga

SEQ ID NO: 673146 - DNA, 1043 bp, Homo sapiens
gaaaaacataatttgaaatgtttgacatttttattttgttttgattatcttcctgaatttcatgaagcaaaaacatggaatataaaatattacttttcaataaaaaaacttccatagagagttacactgagaatcaagaactttttttttttaaatttcaaaaagattatctacttttttactttagtttccctaaggcttttttcttctgaatgagagtgcttaaatatattattaactttacatagaactttactatttaaagacagtgttttgcagcctcaggagacaacataaaactagtgtgaggaggttgtgaagactcagactgaagaaatggttacacaaggtcttgagttgtccttaccattcctattgttttcattcatctaacttctggaccctgaagctactgctttttttctccaagtaatactatctttatgagaagtataggatgatgtaagcaaagcattcagaggcagaattgcattagaaaattgttttaaaaatatgaatcattgttaggaagctctctaacatacggtcacttcaggcattctagcaaaggaggtcttatttgcttgaattgtacagaaattgtttctcatctaataattttatctttagacaaagtgtctcccttctccttttaaaaatgaaatctacttatttttctacttatggaagctatctacaaatataccaactttatatatgttttaaaatattaattatgttaaaataaaattagatgagtatcaattccacaagggcagcgatgttttatttttctatctccggaaacttatggacacaaggttacttaataaaactagacccagattattgcgataaaacattctgcacatttctcagtatggtgtttctttgttcttgttttagttttataaagtttgaggaattaaaaaattttaaaacagtttgataaccatggaaacttttctaagttaatagtctgtccacaaattatcattttcctctatagtatcctaaactgagagctctaggaaagkgtggga

SEQ ID NO: 673147 - DNA, 621 bp, Homo sapiens
ccctgcgtgatggtgggcaggtctgtggctgtgagatcttaaggcagaggtttttgttacccactcagaacagaaacaaggatatttcaatgtcctttctcatgggtaggaaaaattttgactggcccatctttttactgttggtagccttttgagggtcctgattttatgtctgcagatatcaattacaacttaccaccctgaatggaacagagaccctatttctgctattcatatgggcatgaagcccaccctcctcaattatcaagaccggcaatccccctctgcccccccagggcagccacagtgaacccttgttataaccctgagtttcagatgttccctatgtttttcactccaaactcagcaaagtattaagaaggaagattgtgatattttattcagtactttaagttttcgttttctgtttttccaaaagtaacgtcaggttatctagtttgtcatattgccctgttctccacattctgaaacatatggtctttttctgttcttacattagagcaaaacacacacacacacacccacacacacacacacacgaagaaatgstgcatatggtagttatggcatatgctagccatttcaacattaaatatttaa

SEQ ID NO: 673148 - DNA, 1069 bp, Homo sapiens
ttacaatacaccatgccttctctggcaagtagattccacccaagaatgctgctttatttttctaaacaaagtaatatataagaatgcaatttgaagaaacctaagaatatgtatttctcaatgtgagtggaaatgcagtggtggtggtggtacaggtggtgcaaggagggctccaggagagaagcaaattggagcaatgcaggcttggcaatgctgtgtagaggtgaagaggaaagttaaaagagactgagaaagagccaccagagtggggagaaaaagagaacttaactggccgaaagaactggtgtaatattttaggatgcaatgtgtgcartaatactctcctctacttttctcaaaagctcttgtaaaaatttacatttggctttgagttcataaaacttcatttgtaagtgttttggggaagggacttgggagtgagttgcagcaaagtgctgagaatagccttggagtaggagcagggctgaagcataagctgccttagggaacacagatataatccatgtacactgacaccaagatgtgtgtttgtccatttagctacctatttatctatttaacacgagtaagaatgaataaagatataaaaactgaactacaataacattttttgctatttacatactatttcaaaagtaaggatcttagaacagtgaatattaacctatcaatccatgatttatttgtagtgaaagaaccagttcaatttcttatttgatttatggaatgggtctctggcattaggagatctatatcactcacccagacaaatttactgcttttgtgaagttttccttattatttgctacatccctccagttcattaatagactctgcagcttccctctgcctaaacattttacctctttaatcaacaaaatatagtcaagagtgtagttttctggagcaatgacatagattgagatagagctacagacatttcacaggcttcaatttcaaaagttagtatgtaaatcagttgttttgaactgtggttgcattttttccattgaaattataagttgtatggaagacttcataaatctta

SEQ ID NO: 673149 - DNA, 2416 bp, Homo sapiens
ctttacatgttctgcctttctatatgattaaaataccaattttgacactgcattaatttcaaccaaaattcactcattttatgaaatattctttaaaaatgaagtattattctaagacttaaaatgtgaaaaagaattayttatcagtgttattggctcacataacatttataaaaaatgaagagacagcttgaaatgattctgaggtcacacagtagagactttaagctgtccagccccaattcacacttggcacctggcaaacatttaaaccacacatctgtgaaacacttagccattctttgagtaataggaatgcctcatacagaatctactctggtagaggaaccagctgggcagatgtgccattcatcacaaagtggaggcccagcattttcatggggtgtggaagaggcaccagcagtattttctagcctcaattgtctctttgcctacagctttctatcatttacttaacactcaatttcctttcacctttcaccatcaccatcattgttttcagttcttttagctcagaaagtgtgggcctaatattaatatctggattggtcagttccagaagttaaaggtccttgccagccttaatctaaagtaaaacacacacacccacacacacatgcatacacacagatagagtgattgcttgtgagcaatgtccattcaatctgggatctatgagatcctttagacactttatttcctgttttgttctcttaatttccctggtttggtttcaatgtagactcaggtctggtcaatagataatgtagataccgtatcactggcttctgagagtaattgttttaatgaggcatctgacaggctcctgttggtccccaggaagcacagcagaagggattgtgtttataatcgactctaatccgttctaatctttcactttaacctcaccaagaattaagtgattgatttttggtctcttgaaagaaaataaagacctcctgagacaaaacttggcagctgtccaaagacaaagaaacaattgagggctggcaccatttgtacttggatatggggaactgtcttggtctaagtaggtcatttccctcccaccagttcttggttcctatttgagcactcgcattgtcctgggtcaggaaagttagacagaatttcacaataatttatctacctcagcgtcagacacctgtaagacaaaatatggcaaatatggctaggccaggttattccttggcattctgcttcctctaagacgtatctcactcccttgacctaaagtccaaaggctgtagttcccagattactgctgtcagacagcaggaactaccctttttctcactccactcagaaagacatgttagttcccctctaaaaaagtttattttccctataagttggtgttggctggaacaacaatgtgctgttggggtaagaagtagctgactactaaattggatgttattcacacaagtgctcatcttttaacctactagtgaaattggggctgaaatgataaactaatgaaaatagagaacaatacgtaagcattgagggaaagctgacctcctccttccttacctctcttgtcccctccaaacttcctattctcaccattcctcagccacttttttagtttctatttttccatatagttcaaatatgcagtgccagaggagtggtgtgcacagagactgaacttcaagtcagaaggcagagggagaggattctttggagaacaaaaaaagagaatgagagatagcaagagggggaagcaattaagtatatttgacaatagaccccattgtcagcatatttaattgtcttcacgcatctttttgtacctaggcacctcagcctcctaacatcaccacctggccaagttgcagcctcctatccagcattctcctatcttgctccctaacaccaggtactgttgatttcagtccaaagtcagcccttcatcttcagtcacactttcacctatgctcagaaatattttttttttgcctcctgtcaccatcctcccactaactagtccaaaattccctgttccactttccttagggctccttcctcactgattttcacaaataacccatcttcccttctatttatacataaggttggaggttcaagtcagaacttcaactttcttactctccacatctcaattttaccataatttctctgataaccaccctgctatagagcaaaaacttccctattcagtctgcgtaccccatcagtgctctattgcactctcttaatctcccaaatacttccctgtgagttttttcctgtttcttgaattattagtctcttcctcttcactctctgcttcctacaacctaatataaatttcgtcttatgaaaaaagtctcatcccaataatacttaactgcttccccctcttgct

SEQ ID NO: 673150 - DNA, 2416 bp, Homo sapiens
ctttacatgttctgcctttctatatgattaaaataccaattttgacactgcattaatttcaaccaaaattcactcattttatgaaatattctttaaaaatgaagtattattctaagacttaaaatgtgaaaaagaattacttatcagtgttattggctcacataacatttataaaaaatgaagagacagcttgaaatgattctgaggtcacacagtagagactttaagctgtccagccccaattcacacttggcacctggcaaacatttaaaccacacatctgtgaaacacttagccattctttgagtaataggaatgcctcatacagaatctactctggtagaggaaccagctgggmagatgtgccattcatcacaaagtggaggcccagcattttcatggggtgtggaagaggcaccagcagtattttctagcctcaattgtctctttgcctacagctttctatcatttacttaacactcaatttcctttcacctttcaccatcaccatcattgttttcagttcttttagctcagaaagtgtgggcctaatattaatatctggattggtcagttccagaagttaaaggtccttgccagccttaatctaaagtaaaacacacacacccacacacacatgcatacacacagatagagtgattgcttgtgagcaatgtccattcaatctgggatctatgagatcctttagacactttatttcctgttttgttctcttaatttccctggtttggtttcaatgtagactcaggtctggtcaatagataatgtagataccgtatcactggcttctgagagtaattgttttaatgaggcatctgacaggctcctgttggtccccaggaagcacagcagaagggattgtgtttataatcgactctaatccgttctaatctttcactttaacctcaccaagaattaagtgattgatttttggtctcttgaaagaaaataaagacctcctgagacaaaacttggcagctgtccaaagacaaagaaacaattgagggctggcaccatttgtacttggatatggggaactgtcttggtctaagtaggtcatttccctcccaccagttcttggttcctatttgagcactcgcattgtcctgggtcaggaaagttagacagaatttcacaataatttatctacctcagcgtcagacacctgtaagacaaaatatggcaaatatggctaggccaggttattccttggcattctgcttcctctaagacgtatctcactcccttgacctaaagtccaaaggctgtagttcccagattactgctgtcagacagcaggaactaccctttttctcactccactcagaaagacatgttagttcccctctaaaaaagtttattttccctataagttggtgttggctggaacaacaatgtgctgttggggtaagaagtagctgactactaaattggatgttattcacacaagtgctcatcttttaacctactagtgaaattggggctgaaatgataaactaatgaaaatagagaacaatacgtaagcattgagggaaagctgacctcctccttccttacctctcttgtcccctccaaacttcctattctcaccattcctcagccacttttttagtttctatttttccatatagttcaaatatgcagtgccagaggagtggtgtgcacagagactgaacttcaagtcagaaggcagagggagaggattctttggagaacaaaaaaagagaatgagagatagcaagagggggaagcaattaagtatatttgacaatagaccccattgtcagcatatttaattgtcttcacgcatctttttgtacctaggcacctcagcctcctaacatcaccacctggccaagttgcagcctcctatccagcattctcctatcttgctccctaacaccaggtactgttgatttcagtccaaagtcagcccttcatcttcagtcacactttcacctatgctcagaaatattttttttttgcctcctgtcaccatcctcccactaactagtccaaaattccctgttccactttccttagggctccttcctcactgattttcacaaataacccatcttcccttctatttatacataaggttggaggttcaagtcagaacttcaactttcttactctccacatctcaattttaccataatttctctgataaccaccctgctatagagcaaaaacttccctattcagtctgcgtaccccatcagtgctctattgcactctcttaatctcccaaatacttccctgtgagttttttcctgtttcttgaattattagtctcttcctcttcactctctgcttcctacaacctaatataaatttcgtcttatgaaaaaagtctcatcccaataatacttaactgcttccccctcttgct

SEQ ID NO: 673151 - DNA, 1146 bp, Homo sapiens
atttcagtagttatgtactgtatactaccatattctcaccctattcctctcctctctagataccaagacataagttcataaggattaggtcaggagacaaatatgaaggagaggcaacaagatgtccaaagaattcccactgcctcctgaagctgagacttcacttcacagtcaagtctgactgtctctttccttccctgagacaaattctccccaagattactcttagtcccacaaaattctggcagatccaatcctgagtcggctagcattgaccagatttgtctgagccccagccaagaaggaacagagtttaggttcaactgagactgccactatctttcatttcaataaaaagtataattgtctcttggatcatggcaaataactctttcattgttttctcattctgaaatttcagttttataaatccccaaattaattcagagaagctgaagatgaatctgctttagaagactacatgcttcccaaagtatcccagttgatttaggggctaatttattgtaggtttgtgggctcactagcttttagcctcattttgcttcccatatcagcatctgtatttgtttgacagccactggctgaatgactctgagagttatgaagccatttggatggcccaggggccacatggctcatctgaggtgacactgtgtgtgtttattatttgtcatcaggttaagatgtgtctcacataaattaagctcagggactgagtctaccagttctctggaaaaataattccaagtttttagtgatgtaagattctccccaaacacrtcaatgtcttttgcttgaagtccaaacagagatgatgccacttcctgatagaaaggaggctattgctaccatgcaccaggcacagcactaggaacaggggtcaccgaagaatatgccagtctctattctcaactctaggagcctgcctctctaaaggagaaagacaggaacccccacctggcagagtaaatactaaatggaggtatgctcaaagtataaggctagattctcgtggatgggcgattaagtttgactctgcaggaaggagtagcttatggtagagcagaatgaggtgatgatgcttaactgccctcttttatattgtatctgtgccatgaggtgatg

SEQ ID NO: 673152 - DNA, 673 bp, Homo sapiens
taataagtacattaaatataattggtccagacagaccaattaaatgatagagaagaacagattgaataaaaatggaatattgaactataacctatcagcaacccattttaaatataaagacataccttcattaaaagtaaaaagaagggaaatatataccatgcaaaagaaatcaaaagaaaktcagaatgattatgtcaatactagacaaagcagaaattggagcgagaaatgttaatagggataaagacagacatcacttaatgataaagggttatttctctaaagagacataacaatcttaagtgcatatgcacctaaaaacagagcttcaaaatacaggagacaaagttgacataaaagaaaggagaaatagaaaaatccaaaattatcattggagattttatactcatttcttaatatttcatagaaaaaataagcagaaagtcagtaaagatatagaataactgaacaatgctatcaagtaacttgactaagttacatttacagaacactccacccaacagcaggaaagtacataatttgaaactgtattaattctatctactatatttctctctctgtgaacaccatgttcttctccacttactcatctcttgtggtctcaaagaagttttataacattttctttgatgattctttatattccttg

SEQ ID NO: 673153 - DNA, 673 bp, Homo sapiens
taataagtacattaaatataattggtccagacagaccaattaaatgatagagaagaacagattgaataaaaatggaatattgaactataacctatcagcaacccattttaaatataaagacataccttcattaaaagtaaaaagaagggaaatatataccatgcaaaagaaatcaaaagaaattcagaatgattatgtcaatactagacaaagcagaaattggagcgagaaatgttaatagggataaagacagacatcacttaatgataaagggttatttctctaaagagacataacaatcttaagtgcatatgcacctaaaaacagagcttcaaaatacaggagacaragttgacataaaagaaaggagaaatagaaaaatccaaaattatcattggagattttatactcatttcttaatatttcatagaaaaaataagcagaaagtcagtaaagatatagaataactgaacaatgctatcaagtaacttgactaagttacatttacagaacactccacccaacagcaggaaagtacataatttgaaactgtattaattctatctactatatttctctctctgtgaacaccatgttcttctccacttactcatctcttgtggtctcaaagaagttttataacattttctttgatgattctttatattccttg

SEQ ID NO: 673154 - DNA, 1407 bp, Homo sapiens
tatatatatatatatatataaaagagtttcttaatttttaaaaatatttactagcagtttccatttacttcttggcaatagaaacttaattggcctggatattttaagttaaaattttgagagataatattcctgagcatccttatctatgaaggggttggactgatacaggtcaagacgtctttcagctctactctttttcatgtttatttggttcaaatacacacctaactttgggaatagtaargaataaggaaacatatttcaatcactctcttctgctccatttccctctgacatcatgcccttgctctgctactactactagtaatagcaattatcaactgagtgctcaatgtgtgcaagctttgactaagcccttgctttcatcaactcatttgctagcccagtgaccctctgagatcctttagtgctattacaaacctaagtaaactgaagcacagttaggcaaccctcgaagtttgcacagctgtgttagagcagggctagaggttggcattgccttctggagctcctgctcttaactattcactggtgggccctttgccagtgggctgcagaggcaagtgggctattgctttgggcagccagataaggagctgctgcccctccttccatcttaggcaatttcagtctgaggtccctaactttgccacactaccacacgtggctacctgttgacaaaagcaaatgtaacaagaggttaaaaagccaaggcgaggcctctgagactgttcctgctgtcatagttatgaacccagttgctccggggctatggattggcctataggtaatcctgtacccaaggagggaaagacacaaatgggcacaggagccacatatttacaatttttctccaggtttctgctccactgcttttgagacttattagtaggttttaaaatgaagttagaggtttgcaactagcattaaaaaatagaatagaattaaaaattctagagttcatcatgaacagtggagatagtactatttcttgaaatgagtgtttcagttgtgtatttaccaggtcatcattttataaaaagatattctcactgaataatcaataattctcattgaatagtttggaaagtatctatgttaaaatgaaagggggaaaatgtgtgagtatcaagcttagtatgtttgttttgcaatgagtgatcagcaatgttctatttacataccatgatactttaaatatgaataataatgccctctccagatttaaattcttgctcaagtgatgtcatttcaacaatcttggtcaaaagaaagcaaaacatcattattctcctaccaagtggacttggaagatctaaaaatcccactctccttctaaaccattttgtcttaaagaaagattctttattgttcaggcatttt

SEQ ID NO: 673155 - DNA, 508 bp, Homo sapiens
gaatctataggttattttgtgggaattggcctgtttacaatattgaatcctctaatccataaaaatgatatactcctccatttacttaatttttttcartttttcttaatgttttggtttccagtgtacagactgaacacatctgtgattagatttatcaccaagtattcagcttgttttgtgttattgtaaaaaacaattgtctgtaaatgaattaaaagaagtttgaaaactgttgctatagaataaaaaatgtacaaaactagagtttgtaacaattacgtgtgtatacctatatatctccccttatggtcaaactacatttacttttataaaaagtaaattcacaagaagggtcatctatggagtgtgtgtgagtagagtagatctgaattagaaaggatacccagggactttaagtgtggattgtttgttctttaaaacaagacagaaaattcagatttagaagcagatatgataaaaaaaaaaaaaaattgggtaggtacat

SEQ ID NO: 673156 - DNA, 835 bp, Homo sapiens
tttatctatgcattggtagccatgtaagtaaataaaataattgaaggcatatgtgtaaagagagaagatctaagcttgtggggcaaacacccagagaggacccagaggaaggtccaccaaagaatggagtcagtgcgagattctgaaagaaaaaagtrcaaatactgaaaaaaaatacctaaaatacatcatttaaagcctaaaggcaaattgagcagtacgttcacaggcaatcatgcataaacatctttctgtaaatgtgtagagatgaacgttagatttcagcaagctaggaagaaactgatggggaagaggaagggaaactgatacggaagaggaagcagcgcttgcacatacgaactctagacagtatgagagcaaattctgggagtgataaaaaatgcagcatttttttcagaggaatagaaaacatatttgtccttgaaaatgactataggagccaagctggcacatgtaaatacatgaactggtcctgctatagaataatagagcatggtgaaggctgaaccaaattagagcatgcagggcttatataaagacagcagctgactcaagtctgtaagattactgcctcaaaggaatgagaaccaagtactgtcaaaatttccaggtttttttttttttcaagaaaaagcaaaaatctggatatgtatatgaaatttgctgcattggggtaaaaacatcccatactcaacttgtagagcaccacttcactctctctggtctaaaaggaatctgagttatcaaacaataaattggactgcagaacagaactaagaatgtggctaacttcaaagttctaagtatgcaaaca

SEQ ID NO: 673157 - DNA, 596 bp, Homo sapiens
atatcttctttatataaaattatccatagactcacattactaaagaaaataaatctgaaaaaatagtattattcactttggcttttctttgagttttttgaggcatttgccatatatttaatataaattttctgtatgacaggttcagatttggggctcatgggaactccagaaagtcacatttatcaaagggtatccattggccttcagccaaaagaagtgacctaaagcatcagctaatgggacagttgtgatgtgcataaggtgtttgaatgcatgccagcaagagtgctgtgggggaagaaagagagagaaaaggarcagcttttattctctccccaatcttgcttcacagtattgtgtttttcaccttcattcaactctcctaaacttgtgtacatatttacttttcctactggattataatatccttgagggcagagttagtttatcttttttttttcgtgaaagcactttgcaaatgctccctgtataaatttcagccaataactcaggagcagaaagtgactttattatttgtcatacttaagctgaatgatgagtatgcttcgtaaatcaccatggttagaggaaaa

SEQ ID NO: 673158 - DNA, 608 bp, Homo sapiens
tacaaagcatcacagagaaaaatcacctccgatttggtttatctacataagctactgacctttattttaaagcagaaacagaagtcatgagcaaagctgattccaagtagtaaaaaacccggaaaagtaacttttttatgtatttaaccttctgaattcttgatttgcaaatttgctttctgtctttggtttcctttgtttgcttgttttaaagttgtaggccaggcacggtggctcacgcctgtaatcccagcactttgggaggccaaggtgggcggatcatgaggtcaagagatcgagaccaccctggccaacatggtgaaaccccatctctactaaaaatagaaaaattagcggggcgtggtggtgcctgcctgtaatcccagctactcaggaggctaaggcaggagaatcgcttgaacccaggaggtggaggttgcagtgagcagagattgtgccattgcactccagcctgggcaacagggcaagattctctctccaaaaaaaaaaaaaaaaaaagaaaaaaaaaaaagaaaaaaaaagttgtaaaaggctaayaacaaaaataaaccagatgattaaaatatatgatttcaaatgaactgaga

SEQ ID NO: 673159 - DNA, 601 bp, Homo sapiens
tggctcactgcaacckccacttcccggattcaataaattctcttgccccagcctcctgagtagctgggactacaggcgcctgccaccatgcatgggtaatttttttgtactttcattagagatgagatttcaccctgttggccaggctggtctcaaactctttacctcaagtgatcctcctgcctcagcctcccaaagttctgggattacaggcgtgagccaccgtgccctgcctgaactagctttatgtcccactttccagttatacacttatttgtccccatgcttcaaccaaagtgttatgccataaatatggcatacctttcttgctaagactttataatttaattggagagattgaatggatatagaaataaatgcaaccggcccgggcatggtggctcacatacgtaatcccagtgctttgggaggctgaggggggcagatcacctgagatcaggagtctgagaccagcctgggcaacatggcgaaacccctacatggtgaaaccccgtctctaccaaaaacacagaaattagctgggcgtgatggtgcatgcctgtgatcccagctacttggaaggctgaggcggcagaatcgc

SEQ ID NO: 673160 - DNA, 601 bp, Homo sapiens
tggctcactgcaacctccrcttcccggattcaataaattctcttgccccagcctcctgagtagctgggactacaggcgcctgccaccatgcatgggtaatttttttgtactttcattagagatgagatttcaccctgttggccaggctggtctcaaactctttacctcaagtgatcctcctgcctcagcctcccaaagttctgggattacaggcgtgagccaccgtgccctgcctgaactagctttatgtcccactttccagttatacacttatttgtccccatgcttcaaccaaagtgttatgccataaatatggcatacctttcttgctaagactttataatttaattggagagattgaatggatatagaaataaatgcaaccggcccgggcatggtggctcacatacgtaatcccagtgctttgggaggctgaggggggcagatcacctgagatcaggagtctgagaccagcctgggcaacatggcgaaacccctacatggtgaaaccccgtctctaccaaaaacacagaaattagctgggcgtgatggtgcatgcctgtgatcccagctacttggaaggctgaggcggcagaatcgc

SEQ ID NO: 673161 - DNA, 601 bp, Homo sapiens
tggctcactgcaacctccacttcccggattcaataaattctcttgccccagcctcctgagtagctgggactacaggcgcctgccaccatgcatgggtaatttttttgtactttcattagagatgagatttcaccctgttggccaggctggtctcaaactctttacctcaagtgatcctcctgcctcagcctcccaaagtkctgggattacaggcgtgagccaccgtgccctgcctgaactagctttatgtcccactttccagttatacacttatttgtccccatgcttcaaccaaagtgttatgccataaatatggcatacctttcttgctaagactttataatttaattggagagattgaatggatatagaaataaatgcaaccggcccgggcatggtggctcacatacgtaatcccagtgctttgggaggctgaggggggcagatcacctgagatcaggagtctgagaccagcctgggcaacatggcgaaacccctacatggtgaaaccccgtctctaccaaaaacacagaaattagctgggcgtgatggtgcatgcctgtgatcccagctacttggaaggctgaggcggcagaatcgc

SEQ ID NO: 673162 - DNA, 601 bp, Homo sapiens
tggctcactgcaacctccacttcccggattcaataaattctcttgccccagcctcctgagtagctgggactacaggcgcctgccaccatgcatgggtaatttttttgtactttcattagagatgagatttcaccctgttggccaggctggtctcaaactctttacctcaagtgatcctcctgcctcagcctcccaaagttctgggattacaggcgtgagccaccgtgccctgcctgaactagctttatgtcccactttccagttatacacttatttgtccccatgcttcaaccaaagtgttatgccataaatatggcatacctttcttgctaagactttataatttaattggagagattgaatggatatagaaataaatgcaaccggcccgggcatggtggctcacatacgtaatcccagtgctttgggaggctgaggggggcrgatcacctgagatcaggagtctgagaccagcctgggcaacatggcgaaacccctacatggtgaaaccccgtctctaccaaaaacacagaaattagctgggcgtgatggtgcatgcctgtgatcccagctacttggaaggctgaggcggcagaatcgc

SEQ ID NO: 673163 - DNA, 600 bp, Homo sapiens
tctagtgccttcaagaagcattcaaattttcatattttccgagaagcaaattggtcaattcaactcatctttgtaaccataaattttatatggtcatattcatcaacattctctaacataatttctttcttttatatttaaaaaaatgaytttcttagcctgtgtttgcataaatattcatctgtggttttctcttgtcaaaaaaaaaaaaggtaagcaggacaaaaaagaaaaaacaaaacaaattttactacttctcttaactgaatgccccactccttaggacaccaaaattgagagtcattagaccagaatacagtcattaaagataacagtgaagacaacgcagaagcacatggagaaaaaatgttgagaaaaaagaatacaaattatatttatacaatgattacaaatatgtaaaaataggtatgcaggcagccaaggtggtaaatttatgtttatccaaaaccaaaaacagtgtgttggagtactttgatatttttcagcacaaaaaaatttgaattttcattgctttattcagcatcatgaaagcttttaagatggtcatccaaaaattggctaacacaactgacaaaaatc

SEQ ID NO: 673164 - DNA, 382 bp, Homo sapiens
tgtgtgtrtatatatatatatatatatatatatgttggacataacgcttattacattacactattagttagctttatgtcttatctaccccattgcactgaaagcttgttagaggcagggataatgtctcattctttgctgtatccctagctcttagcaccttcaatgagcctatattgagcacacataatgtactagttaatttacatatgttatctatctcccattttccagatcagaaatctaaagcttgcagaggttttgcctgaaaaaaaaaaaaatacacatggtagaaccaacattaaaacctaagttgaggccaggcttggtggttcacacctgtaatcccagcactttgggaggccgaggtgggcggatcaca

SEQ ID NO: 673165 - DNA, 532 bp, Homo sapiens
tagagacagggtttcacatgttggccagactggtcttgagctcctgacctcagatgatccatctggctgcttattaaaaaaataccgtttccattcacagtatgtaaaagaagaactgaaatgtcctggggaagtagatgcttcaaatctccctgtccactggttccagggcctggggaagttcyttctttgtttaaatctcagctcttcctgttgcctatgatattccttattgttcagtcctctaaggaggctgtacagcagttctgtatccccttttctttgtttaatataatatcctttcagagataaaatgacaattccatttccccccaacctgtttttggagacagagtcttgctctgtcacccaggctggagtgccgtggtgcaatcttggcttattgcaacctctgcctcccaagctcaagcaattctcatgcctcagcctcccaagtagctgggactataggctcatgccacaacacctggctaatttttatatttttagtagagacagggttttgccatgt

SEQ ID NO: 673166 - DNA, 1198 bp, Homo sapiens
aacttttgaaattgttatatcttgctcagggagtccttcccttttttttgatgaaatattagctgcttgatcattcctatcttaatttcactatatcatacaatgagaagcttattcataatgacataaattttattctctaattgccttcacttagaattttactatgtgttaattggttctgtttcatatagcttagtacttgcttatttataaattatttcacacatatttacttgctgtctccaaatacattatcaaatccttaaatcagatattttaagtctttgtttttcagtgtgagcaaaagaagaatttgatacataagcaatacataattgtcagaattggactataaatataaattgatgtaaagaataatgcatgagaatacatcttgagcttttaattaaatacagagtctaattgccattacagtttggttcagtttgaatgtactattgcataacatggggtaaagtacctcattatatgctgatgctagtgaaaaggaagataagcctcattgcgttaaaatatattaattttatcctgtgctcctgactttgaaagtcttgatagaagatagatccataccccctccagttcagaaaagccataatcacttatcatgcagctgatttctattctggtgcaatcaatctagttaatgtcaagtaccactgacaagagtgttcatgactcagtcatctggaggcatttgaagggttggtgcaatgacttggattgaaaaataaatagaaataaaagtcttctagcgtgaactttcctgtaatttgagtggtttccctagagccataactcagagacacagacagtgrggctctttccttctgaagatgatatcaccaactcacctacacaaaatgggtaggaatagtccatgcctggctggagggggtcctctgctttcagcttcagcacaggaatggtagacctggcccaaagttgctagttatttttttactgcacaacctcactgtcccctgtaaccttgccccatctcactggaccaaatttcccaccagggcaggcatcatgtttgtctccactgatgtttcccttgcacctagcacatggatgtctggcttgtagaggacctcactctattacatttaatgacagtctactgatatgtggctgaattcttgaaggtgctaacttgaaagtttgctat

SEQ ID NO: 673167 - DNA, 1198 bp, Homo sapiens
aacttttgaaattgttatatcttgctcagggagtccttcccttttttttgatgaaatattagctgcttgatcattcctatcttaatttcactatatcatacaatgagaagcttattcataatgacataaattttattctctaattgccttcacttagaattttactatgtgttaattggttctgtttcatatagcttagtacttgcttatttataaattatttcacacatatttacttgctgtctccaaatacattatcaaatccttaaatcagatattttaagtctttgtttttcagtgtgagcaaaagaagaatttgatacataagcaatacataattgtcagaattggactataaatataaattgatgtaaagaataatgcatgagaatacatcttgagcttttaattaaatacagagtctaattgccattacagtttggttcagtttgaatgtactattgcataacatggggtaaagtacctcattatatgctgatgctagtgaaaaggaagataagcctcattgcgttaaaatatattaattttatcctgtgctcctgactttgaaagtcttgatagaagatagatccataccccctccagttcagaaaagccataatcacttatcatgcagctgatttctattctggtgcaatcaatctagttaatgtcaagtaccactgacaagagtgttcatgactcagtcatctggaggcatttgaagggttggtgcaatgacttggattgaaaaataaatagaaataaaagtcttctagcgtgaactttcctgtaatttgagtggtttccctagagccataactcagagacacagacagtggggctctttccttctgaagatgatatcaccaactcacctacacaaaatgggtaggaatagtccatgcctggctggagggggtcctctgctttcagcttcagcacaggaatggtagacctggcccaaagttgctagttatttttttactgcacaacctcactgtcccctgtaaccttgccccatctcactggacmaaatttcccaccagggcaggcatcatgtttgtctccactgatgtttcccttgcacctagcacatggatgtctggcttgtagaggacctcactctattacatttaatgacagtctactgatatgtggctgaattcttgaaggtgctaacttgaaagtttgctat

SEQ ID NO: 673168 - DNA, 648 bp, Homo sapiens
agccactcttcttgaggtgccaatctcagttgtgttgacatgacaaaagcgtttgcaagcccagtgcatttttcaagctcaacattattcattcattttcctgcagatctgcatagtaagtcatggccaatttgctcagcaatagaaatgctctatgcatgtccctttctcccaagagccctgacttcagcaaagttgcctcaataatggctttggaatcatagtacgtgcccmaaatctccacaggctgtgttctacttcctgccagctctcccctgaaatcaccagtagagtccattgtaggtgaaatgtctgggcattcccacttcctcacaaggttctaaagcttcatctgttaattgagagtggattgaggggaacagagttcttgccatgctttttgctagaaccaggaaattactctgtagttgaaagaataactggctagcatctgtcagcttcagtttgggctttggcactggcatttctaggttgccttaaatgaataaagaagtaataaaaatggacattcatggaaaccaatggtttgtatgggacacattccattaaaaacaggaaaaaggggtggggcacggtggctcacgcctgtaatcccagcattttgggaggctgaggcgggtgaatcca

SEQ ID NO: 673169 - DNA, 602 bp, Homo sapiens
tcactggcctcctcagcctcttaaaacactgtgattataggtgtgaaccaccatgcccagccctctaattttttaatgtgactactagaaaatttaaaattacatatagtcttatgagatatttttattggacaacactgctctgcaggattcttggcatagatggagctacgcagttagtgtaaaccaagaagaaacagaattatggagatataattgctgatgtggtctacacaaccaggcaaaagctaaagggtaaaactggctgctagtgctacttttagtgtgatccacaggatgacatgagcctacagactgccactggtcccttaaaagcaactcaattgaaggtacatcttcagaaacttttataaaatttgacagtaattctacatctgttgcatctaatatctttttttaaggtgggtttgtattttgcatatycttgtgtccttttccttcatttctattaatttacttttatattttataaaattatcagtttgcaatattggaaataagatctttaccacagactgaaaagcattgggatatacaattttggtgacgcaaacgtttagttttgatattcatgggaacag

SEQ ID NO: 673170 - DNA, 889 bp, Homo sapiens
atgtaaccctgtaacagaatacacagaataaggtaaagaaaaaaatgttatgatctaaggaagggctattgaacttcactagctgtagcaactttgctcaccaaaataactcaaccgtgctttcctgagaatacacttccaattgataagaaaacattgggaaggaaacagttaatgacaggtctgcaatctaattttttcctctaccagggatacatgaaagaggtgactcagtcaaatccccttgcatacatactaataactagacatcctgatagaaatgctaacggtatttataagtaaaaagataatggagagcccttatctgtgaaatgctttcagcagctattctagttatctattgctgtgtgaaaaaccactcccaaactcagtggctgaaaacaataatttgttattatctttacctttcagtgggttaacatggctcagctaggtgatttttttgcgtggagcttctcacacaactttagttagtgctgcaattgcagacatctgaagagatatctcccccatgctgccagctgataagcctgggttaggcttttcaggccatatggtctctgttgcaactactcaactctgttgttgtagtgtgaaaacacccatgtacaatacataaacaaatgagcatggcgtcattccaatgaaayttaattacaaaaacaggtggcaggctggatttggcccatgggccatagtttgccaccctctggactatgatgtctgcaagggaagaatgcttgtcctctgtcctgctagtgaatcattagtaaactcggtgttaggtaagacatataaactgtgtggtttgattgatcatcgaactcacttcttcccttagagtctctcgaatgttaaacacaatgtg

SEQ ID NO: 673171 - DNA, 686 bp, Homo sapiens
gtcaatatgagtggaaaggagagagaaggagaattaaaggagagcagaaaaggtcactctaggtaggacttgagaagagcaattcagagtagggcattggcagtaaccaagaagtctgggcttcacagtcagtgctggtgtaagagagggcagcctcatagtggcctcttggtcttatccaaaccctgagtgggcagctactgtacctcattgctaggtctcccagaggtatatgcactgtggacatgctccagatgccagckgggcacataacagtggacaataccatctcttcccacaaggagagggagacagacttcatacaagtctctgagcatttgaaacatgaataactgtggggtggccttggcctgcccaaccgggagactggagaacaaagacaagcaggcatcaaggaggggaggggagcaggcactgatagaaggcacggaaggatactgaagagaaattttctgatcctgtttcacctctttttgactccatgcctgagaaataatgcttgaagataataaagtattttccactgtcagttctgctttaaaaaagccatggtcctaccctgtgaacaaataatcatatgtgctagtaatgcctacagtgaggttcctgtgtgctaggaaagatggatactgagaaaccatgaagaagctttaagaaaagttctt

SEQ ID NO: 673172 - DNA, 578 bp, Homo sapiens
tccttttacaagttggaagctattgaataattcatgccaagcgtggaaaggctgtcttttccctggrtgatgtataactaagcaggagagagcttcgagtgggttcacacatcagccaccactcctgcttctgagcacagggtgtctccttcttgagctcagcttctgcttttgagccaagcattcttgctgctgctgcctgcctgcccacccgcctggcttgcagcgccactttactttctccagccctgataccagctgagaagtctccctgcagctgctagttcctgcccaggaccatgtgtgtggatgctgcttgggagaagcgggcacttgctcctggcactgatcccagctgagtttctcctgttgatttctggaccactgatgctgttgctgaggaggtatttcctggcatccctccccctgagacaccggctaaggaccagcctaaacgcaaggtaaccttcacctctttcccatgggattttccccagctgggatatctctgctttctcctggaactaggtcctccagctggcaacatatctctctctctctctctctctctctctcgc

SEQ ID NO: 673173 - DNA, 1439 bp, Homo sapiens
ttaaaacatcataaccagttatgaaacttaagatattcttactatctckagtaactattagttattctagtaattcttagtatctctagtaactcatagctgtctttacccttggaattgaggcaagaaattttcagaattatcttgctgttttatttatataaccttactcataatacacaaggtaacatgaagtattgggtcatattactgaggaatagaaattatgaacagtttaacaacaatggccactgagttaaactagtgttaaaggagtcatcattgccagtgcttcaaatgttgcagttttatattgctggtcaccagtgccgaggttaaagatttattctgttttgtggtcaccagttgacttctgtgtctgtgttcagggagtgaatggggtcataaaagtcaatgcagttgcctattaagagaatcctaccttgcagaatgggacctttggtgtcagggtgtgaacaataactttatttcaacataaatacatagtaaacattactaaaatttaaaaaatccaaaccctatcactaccggaacttaaaatatattaaaagtggatataagcagaaattctatctagatacataacactatcatagtatatcatttgaattagaatttaaaattttgattctctttcttattggtgttcagtttagctcttaataatttagtgtttgcctagtgctctagttaatcttcagaaataaacatgcactgtaggggcttactctttctggtatgctgaggtaaagtctttgtaagagaggaagcttttataatactacctatcatctttgaattcatttctggtagattttacacaaatgcattaagtttagtccaaacagacactgagagttcagcttgctggttcatgtttctgtcctatgttaagccaaggcaaattatttttcactttttagtcacaatcccataatttaagagtagcaacacatagattaagtttcacagttaaattttaactattttctaatattactttgtttatacttgattaaagctaattttaaaacatgcactctgacagaaaagacatctgagaaacaaaacaagcaaatttgttttccattttgcacctgccccccccccccaaaaaaaagtctcaagaaccagaactgggtaagaacagtgataaagggaatcaatctatatattcatgactttctttaaaattcattacaaacaagttcaagctgaatattggtaaaagttctgaaaactccaaaattactgcttgccctgaggaagagctcctacatggtaactctaaagagggatgaacaaaaaaggagtgccctctagtctgatgaatcatgtccctgattgtgaggagaaaaatgtatctggagggtctagctctgtggcagtccaggcagcgcctgaacagaggaagccca

SEQ ID NO: 673174 - DNA, 1439 bp, Homo sapiens
ttaaaacatcataaccagttatgaaacttaagatattcttactatctcgagtaactattagttattctagtaattcttagtatctctagtaactcatagctgtctttacccttggaattgaggcaagaaattttcagaattatcttgctgttttatttatataaccttactcataatacacaaggtaacatgaagtattgggtcatattactgaggaatagaaattatgaacagtttaacaacaatggccactgagttaaactagtgttaaaggagtcatcattgccagtgcttcaaatgttgcagttttatattgctggtcaccagtgccgaggttaaagatttattctgttttgtggtcaccagttgacttctgtgtctgtgttcagggagtgaatggggtcataaaagtcaatgcagttgcctattaagagaatcctaccttgcagaatgggayctttggtgtcagggtgtgaacaataactttatttcaacataaatacatagtaaacattactaaaatttaaaaaatccaaaccctatcactaccggaacttaaaatatattaaaagtggatataagcagaaattctatctagatacataacactatcatagtatatcatttgaattagaatttaaaattttgattctctttcttattggtgttcagtttagctcttaataatttagtgtttgcctagtgctctagttaatcttcagaaataaacatgcactgtaggggcttactctttctggtatgctgaggtaaagtctttgtaagagaggaagcttttataatactacctatcatctttgaattcatttctggtagattttacacaaatgcattaagtttagtccaaacagacactgagagttcagcttgctggttcatgtttctgtcctatgttaagccaaggcaaattatttttcactttttagtcacaatcccataatttaagagtagcaacacatagattaagtttcacagttaaattttaactattttctaatattactttgtttatacttgattaaagctaattttaaaacatgcactctgacagaaaagacatctgagaaacaaaacaagcaaatttgttttccattttgcacctgccccccccccccaaaaaaaagtctcaagaaccagaactgggtaagaacagtgataaagggaatcaatctatatattcatgactttctttaaaattcattacaaacaagttcaagctgaatattggtaaaagttctgaaaactccaaaattactgcttgccctgaggaagagctcctacatggtaactctaaagagggatgaacaaaaaaggagtgccctctagtctgatgaatcatgtccctgattgtgaggagaaaaatgtatctggagggtctagctctgtggcagtccaggcagcgcctgaacagaggaagccca

SEQ ID NO: 673175 - DNA, 1439 bp, Homo sapiens
ttaaaacatcataaccagttatgaaacttaagatattcttactatctcgagtaactattagttattctagtaattcttagtatctctagtaactcatagctgtctttacccttggaattgaggcaagaaattttcagaattatcttgctgttttatttatataaccttactcataatacacaaggtaacatgaagtattgggtcatattactgaggaatagaaattatgaacagtttaacaacaatggccactgagttaaactagtgttaaaggagtcatcattgccagtgcttcaaatgttgcagttttatattgctggtcaccagtgccgaggttaaagatttattctgttttgtggtcaccagttgacttctgtgtctgtgttcagggagtgaatggggtcataaaagtcaatgcagttgcctattaagagaatcctaccttgcagaatgggacctttggtgtcagggtgtgaacaataactttatttcaacataaatacatagtaaacattactaaaatttaaaaaatccaaaccctatcactaccggaacttaaaatrtattaaaagtggatataagcagaaattctatctagatacataacactatcatagtatatcatttgaattagaatttaaaattttgattctctttcttattggtgttcagtttagctcttaataatttagtgtttgcctagtgctctagttaatcttcagaaataaacatgcactgtaggggcttactctttctggtatgctgaggtaaagtctttgtaagagaggaagcttttataatactacctatcatctttgaattcatttctggtagattttacacaaatgcattaagtttagtccaaacagacactgagagttcagcttgctggttcatgtttctgtcctatgttaagccaaggcaaattatttttcactttttagtcacaatcccataatttaagagtagcaacacatagattaagtttcacagttaaattttaactattttctaatattactttgtttatacttgattaaagctaattttaaaacatgcactctgacagaaaagacatctgagaaacaaaacaagcaaatttgttttccattttgcacctgccccccccccccaaaaaaaagtctcaagaaccagaactgggtaagaacagtgataaagggaatcaatctatatattcatgactttctttaaaattcattacaaacaagttcaagctgaatattggtaaaagttctgaaaactccaaaattactgcttgccctgaggaagagctcctacatggtaactctaaagagggatgaacaaaaaaggagtgccctctagtctgatgaatcatgtccctgattgtgaggagaaaaatgtatctggagggtctagctctgtggcagtccaggcagcgcctgaacagaggaagccca

SEQ ID NO: 673176 - DNA, 1439 bp, Homo sapiens
ttaaaacatcataaccagttatgaaacttaagatattcttactatctcgagtaactattagttattctagtaattcttagtatctctagtaactcatagctgtctttacccttggaattgaggcaagaaattttcagaattatcttgctgttttatttatataaccttactcataatacacaaggtaacatgaagtattgggtcatattactgaggaatagaaattatgaacagtttaacaacaatggccactgagttaaactagtgttaaaggagtcatcattgccagtgcttcaaatgttgcagttttatattgctggtcaccagtgccgaggttaaagatttattctgttttgtggtcaccagttgacttctgtgtctgtgttcagggagtgaatggggtcataaaagtcaatgcagttgcctattaagagaatcctaccttgcagaatgggacctttggtgtcagggtgtgaacaataactttatttcaacataaatacatagtaaacattactaaaatttaaaaaatccaaaccctatcactaccggaacttaaaatatattaraagtggatataagcagaaattctatctagatacataacactatcatagtatatcatttgaattagaatttaaaattttgattctctttcttattggtgttcagtttagctcttaataatttagtgtttgcctagtgctctagttaatcttcagaaataaacatgcactgtaggggcttactctttctggtatgctgaggtaaagtctttgtaagagaggaagcttttataatactacctatcatctttgaattcatttctggtagattttacacaaatgcattaagtttagtccaaacagacactgagagttcagcttgctggttcatgtttctgtcctatgttaagccaaggcaaattatttttcactttttagtcacaatcccataatttaagagtagcaacacatagattaagtttcacagttaaattttaactattttctaatattactttgtttatacttgattaaagctaattttaaaacatgcactctgacagaaaagacatctgagaaacaaaacaagcaaatttgttttccattttgcacctgccccccccccccaaaaaaaagtctcaagaaccagaactgggtaagaacagtgataaagggaatcaatctatatattcatgactttctttaaaattcattacaaacaagttcaagctgaatattggtaaaagttctgaaaactccaaaattactgcttgccctgaggaagagctcctacatggtaactctaaagagggatgaacaaaaaaggagtgccctctagtctgatgaatcatgtccctgattgtgaggagaaaaatgtatctggagggtctagctctgtggcagtccaggcagcgcctgaacagaggaagccca

SEQ ID NO: 673177 - DNA, 1439 bp, Homo sapiens
ttaaaacatcataaccagttatgaaacttaagatattcttactatctcgagtaactattagttattctagtaattcttagtatctctagtaactcatagctgtctttacccttggaattgaggcaagaaattttcagaattatcttgctgttttatttatataaccttactcataatacacaaggtaacatgaagtattgggtcatattactgaggaatagaaattatgaacagtttaacaacaatggccactgagttaaactagtgttaaaggagtcatcattgccagtgcttcaaatgttgcagttttatattgctggtcaccagtgccgaggttaaagatttattctgttttgtggtcaccagttgacttctgtgtctgtgttcagggagtgaatggggtcataaaagtcaatgcagttgcctattaagagaatcctaccttgcagaatgggacctttggtgtcagggtgtgaacaataactttatttcaacataaatacatagtaaacattactaaaatttaaaaaatccaaaccctatcactaccggaacttaaaatatattaaaagyggatataagcagaaattctatctagatacataacactatcatagtatatcatttgaattagaatttaaaattttgattctctttcttattggtgttcagtttagctcttaataatttagtgtttgcctagtgctctagttaatcttcagaaataaacatgcactgtaggggcttactctttctggtatgctgaggtaaagtctttgtaagagaggaagcttttataatactacctatcatctttgaattcatttctggtagattttacacaaatgcattaagtttagtccaaacagacactgagagttcagcttgctggttcatgtttctgtcctatgttaagccaaggcaaattatttttcactttttagtcacaatcccataatttaagagtagcaacacatagattaagtttcacagttaaattttaactattttctaatattactttgtttatacttgattaaagctaattttaaaacatgcactctgacagaaaagacatctgagaaacaaaacaagcaaatttgttttccattttgcacctgccccccccccccaaaaaaaagtctcaagaaccagaactgggtaagaacagtgataaagggaatcaatctatatattcatgactttctttaaaattcattacaaacaagttcaagctgaatattggtaaaagttctgaaaactccaaaattactgcttgccctgaggaagagctcctacatggtaactctaaagagggatgaacaaaaaaggagtgccctctagtctgatgaatcatgtccctgattgtgaggagaaaaatgtatctggagggtctagctctgtggcagtccaggcagcgcctgaacagaggaagccca

SEQ ID NO: 673178 - DNA, 1090 bp, Homo sapiens
tgaacccgggaggtggagtttgcagtgagtggagatgacaccaagacactccagcctgggtgacagaatgagacactgcctcaaaaaaaaaaagaaaaaaaaatgtggtatgaaccacagctaaactacaatcaattagagagtaagccaaagcatctcaaagtatatcatcagttatcaggcaataacatgcaatttctaaaacctaacttaaatgcagcttttaaagacatttcaaacgtgtcagtttagtcacatttattgaataaagttagcaaatggatatctcttgaaaatgagagctccagggaattaaaaaatgtaaagttcccatttcctttctgtgttaacacagctaattatgatctttacttcacatgcaaaagtcaacagaacaactcagtatttcaccaaattataaacaagaattacgctagagaaatgaaaccctaaagagaaacggtcatataactaacctcagtcaagtagttctggcagttatttgaagtctgaggtttgaagtaggaattcttaygggcatttggggaatatattttctgttgagtcctatactagtaagattttcaacacaaggtgactctcgacctcgccttgtaggaagagtgctgagaaaatatttcacctgctctttctccataaagagctgatactgatcattgctattttcttattcgatctgtaaagatagcaaagacaaatgcttaatatttcatttttccttaaatgattcttaatgacttgcagtttttaaaaacttaccctgagagtaaaccaaattacccactaaatagtgttttcacacagaagatgtgtaagagcatatctgttgtaaggaattataattttaaaatcgttctaaagaagcaccattgtttctaaggtgatttctactgaacaagcagttcaaacaaagtagacagggaagagaaatggctatcagtgatgtatggctcaacaggtaaaacttcctgccttctaaaatggctctacttgtaagattctgaagattccattagaaatacttgtatttaaagggtaataatgtgggaaaatgaatatgttgatttgc

SEQ ID NO: 673179 - DNA, 1090 bp, Homo sapiens
tgaacccgggaggtggagtttgcagtgagtggagatgacaccaagacactccagcctgggtgacagaatgagacactgcctcaaaaaaaaaaagaaaaaaaaatgtggtatgaaccacagctaaactacaatcaattagagagtaagccaaagcatctcaaagtatatcatcagttatcaggcaataacatgcaatttctaaaacctaacttaaatgcagcttttaaagacatttcaaacgtgtcagtttagtcacatttattgaataaagttagcaaatggatatctcttgaaaatgagagctccagggaattaaaaaatgtaaagttcccatttcctttctgtgttaacacagctaattatgatctttacttcacatgcaaaagtcaacagaacaactcagtatttcaccaaattataaacaagaattacgctagagaaatgaaaccctaaagagaaacggtcatataactaacctcagtcaagtagttctggcagttatttgaagtctgaggtttgaagtaggaattcttacgggcatttggggaatatattttctgttgagtcctatactagtaagattttcaacacaaggtgactctygacctcgccttgtaggaagagtgctgagaaaatatttcacctgctctttctccataaagagctgatactgatcattgctattttcttattcgatctgtaaagatagcaaagacaaatgcttaatatttcatttttccttaaatgattcttaatgacttgcagtttttaaaaacttaccctgagagtaaaccaaattacccactaaatagtgttttcacacagaagatgtgtaagagcatatctgttgtaaggaattataattttaaaatcgttctaaagaagcaccattgtttctaaggtgatttctactgaacaagcagttcaaacaaagtagacagggaagagaaatggctatcagtgatgtatggctcaacaggtaaaacttcctgccttctaaaatggctctacttgtaagattctgaagattccattagaaatacttgtatttaaagggtaataatgtgggaaaatgaatatgttgatttgc

SEQ ID NO: 673180 - DNA, 1090 bp, Homo sapiens
tgaacccgggaggtggagtttgcagtgagtggagatgacaccaagacactccagcctgggtgacagaatgagacactgcctcaaaaaaaaaaagaaaaaaaaatgtggtatgaaccacagctaaactacaatcaattagagagtaagccaaagcatctcaaagtatatcatcagttatcaggcaataacatgcaatttctaaaacctaacttaaatgcagcttttaaagacatttcaaacgtgtcagtttagtcacatttattgaataaagttagcaaatggatatctcttgaaaatgagagctccagggaattaaaaaatgtaaagttcccatttcctttctgtgttaacacagctaattatgatctttacttcacatgcaaaagtcaacagaacaactcagtatttcaccaaattataaacaagaattacgctagagaaatgaaaccctaaagagaaacggtcatataactaacctcagtcaagtagttctggcagttatttgaagtctgaggtttgaagtaggaattcttacgggcatttggggaatatattttctgttgagtcctatactagtaagattttcaacacaaggtgactctcgacctygccttgtaggaagagtgctgagaaaatatttcacctgctctttctccataaagagctgatactgatcattgctattttcttattcgatctgtaaagatagcaaagacaaatgcttaatatttcatttttccttaaatgattcttaatgacttgcagtttttaaaaacttaccctgagagtaaaccaaattacccactaaatagtgttttcacacagaagatgtgtaagagcatatctgttgtaaggaattataattttaaaatcgttctaaagaagcaccattgtttctaaggtgatttctactgaacaagcagttcaaacaaagtagacagggaagagaaatggctatcagtgatgtatggctcaacaggtaaaacttcctgccttctaaaatggctctacttgtaagattctgaagattccattagaaatacttgtatttaaagggtaataatgtgggaaaatgaatatgttgatttgc

SEQ ID NO: 673181 - DNA, 1090 bp, Homo sapiens
tgaacccgggaggtggagtttgcagtgagtggagatgacaccaagacactccagcctgggtgacagaatgagacactgcctcaaaaaaaaaaagaaaaaaaaatgtggtatgaaccacagctaaactacaatcaattagagagtaagccaaagcatctcaaagtatatcatcagttatcaggcaataacatgcaatttctaaaacctaacttaaatgcagcttttaaagacatttcaaacgtgtcagtttagtcacatttattgaataaagttagcaaatggatatctcttgaaaatgagagctccagggaattaaaaaatgtaaagttcccatttcctttctgtgttaacacagctaattatgatctttacttcacatgcaaaagtcaacagaacaactcagtatttcaccaaattataaacaagaattacgctagagaaatgaaaccctaaagagaaacggtcatataactaacctcagtcaagtagttctggcagttatttgaagtctgaggtttgaagtaggaattcttacgggcatttggggaatatattttctgttgagtcctatactagtaagattttcaacacaaggtgactctcgacctcgccttstaggaagagtgctgagaaaatatttcacctgctctttctccataaagagctgatactgatcattgctattttcttattcgatctgtaaagatagcaaagacaaatgcttaatatttcatttttccttaaatgattcttaatgacttgcagtttttaaaaacttaccctgagagtaaaccaaattacccactaaatagtgttttcacacagaagatgtgtaagagcatatctgttgtaaggaattataattttaaaatcgttctaaagaagcaccattgtttctaaggtgatttctactgaacaagcagttcaaacaaagtagacagggaagagaaatggctatcagtgatgtatggctcaacaggtaaaacttcctgccttctaaaatggctctacttgtaagattctgaagattccattagaaatacttgtatttaaagggtaataatgtgggaaaatgaatatgttgatttgc

SEQ ID NO: 673182 - DNA, 1090 bp, Homo sapiens
tgaacccgggaggtggagtttgcagtgagtggagatgacaccaagacactccagcctgggtgacagaatgagacactgcctcaaaaaaaaaaagaaaaaaaaatgtggtatgaaccacagctaaactacaatcaattagagagtaagccaaagcatctcaaagtatatcatcagttatcaggcaataacatgcaatttctaaaacctaacttaaatgcagcttttaaagacatttcaaacgtgtcagtttagtcacatttattgaataaagttagcaaatggatatctcttgaaaatgagagctccagggaattaaaaaatgtaaagttcccatttcctttctgtgttaacacagctaattatgatctttacttcacatgcaaaagtcaacagaacaactcagtatttcaccaaattataaacaagaattacgctagagaaatgaaaccctaaagagaaacggtcatataactaacctcagtcaagtagttctggcagttatttgaagtctgaggtttgaagtaggaattcttacgggcatttggggaatatattttctgttgagtcctatactagtaagattttcaacacaaggtgactctcgacctcgccttgtaggaagagtgctgagaaaatatttcacctgctctttctccataaagagctgatactgatcattgctattttcttattcgatctgtaaagatagcaaagacaaatgyttaatatttcatttttccttaaatgattcttaatgacttgcagtttttaaaaacttaccctgagagtaaaccaaattacccactaaatagtgttttcacacagaagatgtgtaagagcatatctgttgtaaggaattataattttaaaatcgttctaaagaagcaccattgtttctaaggtgatttctactgaacaagcagttcaaacaaagtagacagggaagagaaatggctatcagtgatgtatggctcaacaggtaaaacttcctgccttctaaaatggctctacttgtaagattctgaagattccattagaaatacttgtatttaaagggtaataatgtgggaaaatgaatatgttgatttgc

SEQ ID NO: 673183 - DNA, 1521 bp, Homo sapiens
tgctctccaccacactgaccaaagaataggaatctcctcaaattaggaaccctggaactgactccggctggccaccctgtccacaagtacatagccgaaagctgactgccccgtgcaaggctttcctaataataaaacagagcatgagaatctaaatacggaagctggtaaagatttccccaacaagccacatgtaaaccaggaaacacaaaaccacatacaacactctatactgaattccataccctcagataagcactgggggctgtgcaaaaacaacctgaatccaaaacccaaatgctgagagcagaaaacgacaaaaccatgaagactaaaatgaaaagccaaagaaaaacaccaaatcatgtaagaaatgaagattaaattataaggtgttccaggaagactataatcaaatgaaaatgtaatcaggggcattaaagaaagaaggcaaacaggaggccaaaaacagctgagtagtaaaaacaagccagaaagaaagtggttgaaatggaagccaggccagtgagactcaacataaagagatccgtgaaatcgtaaaatataacaaatactcaaaactctgatccaagaaacctttctggactcaaaagaagatacaatgctacatgttaggcccatggatacccaagggatacctaggaatatcttagtaaaactattagactctgaagataaatttgtaaaaccctccaagcctgtagcaaaatgatcaaataacttcaaatgtaagagaacggggctgccatcacacatcccacacacacatacagctgaggccacaatggagtaacaccttcatgaaacccagagaaggtacgtgtgaaccaagggtgtattaggaagcaaagtgtcttgtcaaatgttaaggatgtagaacgcagctttaaacctacgaaagctcaggggtactgtacccaggagctgatcttgggctctcaaagattagcttcacctgtcaaaaggcaggaacacttcagcaaaagggccaatggtgagcatccaataaacttaatcacggatctaagagaaacaagcatagaacaatggggggtggaggaaaaaatgaatgatgttatatgttttgaaagmagaaatacttcaattagtaagtgcgtggagaaagaagggaagagaaaagtactgtagaataaacttatcagtggtcatttaggcaagaggtagaagtcaaaggttatcattaaagatagacaaacaaggtataaaagactacgtaagaaaacagaagactaaaggcaagtgaaaaagcataagaacaaaggtaatcactagatcaaaatacaaatctttcaaattgcaaagaaacattttagaaaataagagagcaaaaaagatatacacatagagaaacacagcaactaaaatatacataaaacctataatatggaaaatgtgtgagtcatatcaataaatgtgagtggactaagttcatttattaaaagaaaacaatacttttattttgattcacaaagcaagtcc

SEQ ID NO: 673184 - DNA, 1470 bp, Homo sapiens
catctcatgcctgtgagctttgccctaatgatttgccacaacataactcgcatcacaagctttccagcttgcaaatgcctgtgtctttgctacttgcctttagactgccgagctgatgctgcagggtttagcttctgccatgtgcagcgctctgctttcaggaggcgcaytcttcactgtttaagattcaggttcccctgcatgtaatggagatccatctcaacagtggctgagagagacgaagaacatttcttcttcatgcaattttctggaagcagacggccaagtgctggattcaccttcttctttttattttattttattttattatactttaagttctagggtacatgtgcacaacgtgcaggtttgttacatatgccctgtcccattcctccagcttttgctctggtctctcctcttcaggatgtccctagcaggacagaagtagcacaaatcacttcccttccactccgctgtcccaaccccatcacacatccatgtctggccacaggagagctggagaagattctctctatctccaggcccatgtgctgagcgaagcattgtggttccattacagtacaaccggagtcaggaaattgcagtctaatccggctgctgcctctttctttgtattgagaagactgttttcatgcagttttaaaccatttcttttttaacaagaggaagatgtgacaaagacagcattgggcccataaagtctaaactatttttatttatttatttatttatttatttatttatttatttattttttgagctggagtctcgctctgtcgcccaggctagagtgtagtggcatgatcttggctcactgcaacctctgcctctcagattagagcgattctcctgcctcagcctcccgagtagctgggactacaggcgtgtgccaccacgcccagctatttttttgtatttttggtatagacagggtttcaccatgttggccaggctggtctcaatctcctgccctcaggtgatccacccgccttaggctcccaaagtgctgggattacaggcatgagccactgtgcccagccaactatttattatctggtagttatgatctagtatcttattacagcaagagtttgcagacgccagctctagagagggcacagctgacagatgctggcagcttctgccaatgtgtgcattccacgcacccagcttaaccagaaggctgcatgaactttttttgagaactcaacccactctttttaagaaagcaaggaaaaaagctgaccctcttcaaataaaagacaaacagtgcctaccctctcctggccccaaaacctaagagaaggaagaccctgcaggcagaagctccagacaccctggagggagagctccattgttctctcttcccaagtgaaaagtaagggcctttaaagaagcttcagaacctccctgatctgtcctatttgtactttgctcccgtgttga

SEQ ID NO: 673185 - DNA, 1470 bp, Homo sapiens
catctcatgcctgtgagctttgccctaatgatttgccacaacataactcgcatcacaagctttccagcttgcaaatgcctgtgtctttgctacttgcctttagactgccgagctgatgctgcagggtttagcttctgccatgtgcagcgctctgctttcaggaggcgcactcttcactgtttaagattcaggttcccctgcatgtaatggagatccatctcaacagtggctgagagagacgaagaacatttcttcttcatgcaattttctggaagcagayggccaagtgctggattcaccttcttctttttattttattttattttattatactttaagttctagggtacatgtgcacaacgtgcaggtttgttacatatgccctgtcccattcctccagcttttgctctggtctctcctcttcaggatgtccctagcaggacagaagtagcacaaatcacttcccttccactccgctgtcccaaccccatcacacatccatgtctggccacaggagagctggagaagattctctctatctccaggcccatgtgctgagcgaagcattgtggttccattacagtacaaccggagtcaggaaattgcagtctaatccggctgctgcctctttctttgtattgagaagactgttttcatgcagttttaaaccatttcttttttaacaagaggaagatgtgacaaagacagcattgggcccataaagtctaaactatttttatttatttatttatttatttatttatttatttatttattttttgagctggagtctcgctctgtcgcccaggctagagtgtagtggcatgatcttggctcactgcaacctctgcctctcagattagagcgattctcctgcctcagcctcccgagtagctgggactacaggcgtgtgccaccacgcccagctatttttttgtatttttggtatagacagggtttcaccatgttggccaggctggtctcaatctcctgccctcaggtgatccacccgccttaggctcccaaagtgctgggattacaggcatgagccactgtgcccagccaactatttattatctggtagttatgatctagtatcttattacagcaagagtttgcagacgccagctctagagagggcacagctgacagatgctggcagcttctgccaatgtgtgcattccacgcacccagcttaaccagaaggctgcatgaactttttttgagaactcaacccactctttttaagaaagcaaggaaaaaagctgaccctcttcaaataaaagacaaacagtgcctaccctctcctggccccaaaacctaagagaaggaagaccctgcaggcagaagctccagacaccctggagggagagctccattgttctctcttcccaagtgaaaagtaagggcctttaaagaagcttcagaacctccctgatctgtcctatttgtactttgctcccgtgttga

SEQ ID NO: 673186 - DNA, 1470 bp, Homo sapiens
catctcatgcctgtgagctttgccctaatgatttgccacaacataactcgcatcacaagctttccagcttgcaaatgcctgtgtctttgctacttgcctttagactgccgagctgatgctgcagggtttagcttctgccatgtgcagcgctctgctttcaggaggcgcactcttcactgtttaagattcaggttcccctgcatgtaatggagatccatctcaacagtggctgagagagacgaagaacatttcttcttcatgcaattttctggaagcagacggccaagtgctggattcaccttcttctttttattttattttattttattatactttaagttctagggtacatgtgcacaacgtgcaggtttgttacatatgccctgtcccattcctccagcttttgctctggtctctcctcttcaggatgtccctagcaggacagaagtagcacaaatcacttcccttccactccgctgtcccaaccccatcacacatccatgtctggccacaggagagctggagaagattctctctatctccaggcccatgtgctgagcgaagcattgtggttccattacagtacaaccggagtcaggaaattgcagtctaatccggctgctgcctctttctttgtattgagaagactgttttcatgcagttttaaaccatttcttttttaacaagaggaagatgtgacaaagacagcattgggcccataaagtctaaactatttttatttatttatttatttatttatttatttatttatttattttttgagctggagtctcgctctgtcgcccaggctagagtgtagtggcatgatcttggctcactgcaacctctgcctctcagattagagcgattctcctgcctcagcctcccgagtagctgggactacaggcgtgtgccaccacgcccagctatttttttgtatttttggtatagacagggtttcaccatgttggccaggctggtctcaatctcctgccctcaggtgatccacccgccttaggctcccaaagtgctgggattacaggcatgagccactgtgcccagccaactatttattatctggtagttatgatctagtatcttattacagcaagagtttgcagacgccagctctagagagggcacagctgacagatgctggcagcttctgccaatgtgtgcattccacgcacccagcttaaccagaaggctgcatgaactttttttgagaactcaacccactctttttaagaaagcaaggaaaaaagctgaccctcttcaaataaaagacaaacagtgcctaccctctcctggccccaaaacctaagagaaggaagaccctgcaggcagaagctccagacaccctggagggagagctccattgttctctcttcccaagtgaaaagtaagggcctttaaaraagcttcagaacctccctgatctgtcctatttgtactttgctcccgtgttga

SEQ ID NO: 673187 - DNA, 440 bp, Homo sapiens
gaatcatgtcaatacactggctcgttcatgtgtgagagctctggtcacatgtagacaatgcctccacctttacacaggacacttacagggtggtcatcagaaacagttgaaacggcactagatgcacctgccacaggtttggtcactgatgcttcaaagaccctggacaccagctggaattatctgggttttttttttagccaaatatctatagaaaagcccatgctcttgtaggggagaaaatataatttcttttccttccctttttacattcttagttgagacactatcctgaaaacgaaagttggaataacatacaaaaaamcaacagaagcttactaacgggcgctgcacccatcatgctggagagttcaaaaagtacttatctctcaaggacggggagctttacttaaatagtattggaacaaagagccctaact

SEQ ID NO: 673188 - DNA, 1062 bp, Homo sapiens
gaacatcaaaactttcaaaggaataatatttatctaaaattagagtaaaaatagaaaaacaagattaatatgaaaagaaaacttaatatggagcaaactaaaaagcttcctggatgtacmcttggtattcacttgaagttgtctattgtgcttaatacaattatacagtatattcagtcctgaaataatgttagatataaattagccaaacaatcctgtgagatgtaaaactgtgtagacctgagttaaatacagatattcactttgggaagactctgcatctccaaaacaagacatacaagaaactagggggcctttgagagcatccactcagctccgcattgtgaagattaaaaagagcatctgtgaaaatgaattctgagtggtacctatagcaggagctaaattagtttggcagaggccttataaataaatctgactgaaagaaaaaaaaacacagaaaggatatattagaattcttttgcatatcatgttgttgtttcctttagacttccctctgaaatattgtttttctaatctaattactagcataatatgtatcactctcatttgtattcaaaaggaatattggattaagtatggaagtgtgcgttttctatattggctttctatccaccctgcctttacagctgagaagtttatgcttcataccttctactctcttgctcatgaacctgtggctcagtggcatgcaaagtaagatcacttgcaggatgaaagcagcatttatgattgctgggcaggtttcctgaggtccttcctagagcagaaaagtaatgaaagtttttagacatatattgagaaaaattgattaagtgaactaagataattttaaaatacatttcttctattaaccattcctaggaatcataaagaaatttatcaagattcttttggtaatttttaaacagtagttaattctatcataggctattcatagcagagctgttctttacattcgcttaaatgaaataaactggctttacattttttttttcaaatacaggcagcattttttcagagaaaattagagaaataaaa

SEQ ID NO: 673189 - DNA, 1062 bp, Homo sapiens
gaacatcaaaactttcaaaggaataatatttatctaaaattagagtaaaaatagaaaaacaagattaatatgaaaagaaaacttaatatggagcaaactaaaaagcttcctggatgtacacttggtattcacttgaagttgtctattgtgcttaatacaattatacagtatattcagtcctgaaataatgttagatataaattagccaaacaatcctgtgagatgtaaaactgtgtagacctgagttaaatacagatattcactttgggaagactctgcatctccaaaacaagacatacaagaaactagggggcctttgagagcatccactcagctccgcattgtgaagattaaaaagagcatctgtgaaaatgaattctgagtggtacctatagcaggagctaaattagtttggcagaggccttataaataaatctgactgaaagaaaaaaaaacacagaaaggatatattagaattcttttgcatatcatgttgttgtttcctttagacttccctctgaaatattgtttttctaatctaattactagcataatatgtatcactctcatttgtattcaaaaggaatattggattaagtatggaagtgtgcgttttctatattggctttctatccaccctgcctttacagctgagaagtttatgcttcataccttctactctcttgctcatgaacctgtggctcagtggcatgcaaagtaagatcacttgcaggatgaaagcagcatttatgattgctgggcaggtttcctgaggtccttcctagagcagaaaagtaatgaaagtttttagacatatattgagaaaaattgattaaktgaactaagataattttaaaatacatttcttctattaaccattcctaggaatcataaagaaatttatcaagattcttttggtaatttttaaacagtagttaattctatcataggctattcatagcagagctgttctttacattcgcttaaatgaaataaactggctttacattttttttttcaaatacaggcagcattttttcagagaaaattagagaaataaaa

SEQ ID NO: 673190 - DNA, 1062 bp, Homo sapiens
gaacatcaaaactttcaaaggaataatatttatctaaaattagagtaaaaatagaaaaacaagattaatatgaaaagaaaacttaatatggagcaaactaaaaagcttcctggatgtacacttggtattcacttgaagttgtctattgtgcttaatacaattatacagtatattcagtcctgaaataatgttagatataaattagccaaacaatcctgtgagatgtaaaactgtgtagacctgagttaaatacagatattcactttgggaagactctgcatctccaaaacaagacatacaagaaactagggggcctttgagagcatccactcagctccgcattgtgaagattaaaaagagcatctgtgaaaatgaattctgagtggtacctatagcaggagctaaattagtttggcagaggccttataaataaatctgactgaaagaaaaaaaaacacagaaaggatatattagaattcttttgcatatcatgttgttgtttcctttagacttccctctgaaatattgtttttctaatctaattactagcataatatgtatcactctcatttgtattcaaaaggaatattggattaagtatggaagtgtgcgttttctatattggctttctatccaccctgcctttacagctgagaagtttatgcttcataccttctactctcttgctcatgaacctgtggctcagtggcatgcaaagtaagatcacttgcaggatgaaagcagcatttatgattgctgggcaggtttcctgaggtccttcctagagcagaaaagtaatgaaagtttttagacatatattgagaaaaattgattaagtgaactaasataattttaaaatacatttcttctattaaccattcctaggaatcataaagaaatttatcaagattcttttggtaatttttaaacagtagttaattctatcataggctattcatagcagagctgttctttacattcgcttaaatgaaataaactggctttacattttttttttcaaatacaggcagcattttttcagagaaaattagagaaataaaa

SEQ ID NO: 673191 - DNA, 820 bp, Homo sapiens
ggtgagtagggaggcctaatgtaagaataaaggctttttccattagggtggcagctgtggctttcgcacacaggcatggaggcatgcctgatgtcacagggttgatcgaaataagaaatatgccataaaaagtaattgagagacaaacggctgttctagaatactagcaacaatctcattaatttcatggcaatattgttgaaaaggtttgtcaaaattggataaactgagagctgggggtgtagataatgcttattttaatgcttcaaaggaggccagtgtctcagagggccataaaaggggttctgaggttatacctgagaggaaaacatataaaggcttggctaggatggcaaaattaagaatccattgatggcaataaccagctgcctctaaaaatttctggktttttttctttcttcttaagaaaagattgtcaaaattccttcaagatattttactgtgagttttttagtgctccgagatgctttatggcctaaataagtcagttgtctgtacccatggacatttagatttggaggctttgtagccttgctcagtcagtaccttcagaaggattagggagtctatacaagcattctattcagtttggttgcaaagtaggaggtcatcaacaaatttgacaagcgtggagtcctggggtatgattatagtgtctcaattcctttgaagacttgggaaatattgagggtgacttcacaactcttactggttcgagattcttggctctccatataatagcaattaacacgaggccaaacaaacttttcccaggtaaggtttattaaaacttatgccc

SEQ ID NO: 673192 - DNA, 628 bp, Homo sapiens
ctaaaggcaaggaatatgtattacacttttatgtatgcttcaatattttcctcaccrcctcctaccccaataatacttagcacaatatactaagcagttaataaggacattacaggtcaatgttcaaggataatgctaagaagagggggtgtgggaatcaaactagaaaaaccttcaagtcttcaccattttctttatttcaaaaatgaataaggcttaattttcttatttactatttgtaaaatggggattaggtacttgctctttctacctcacaggaatgaagaaagaattaaatcatgcaaagcatgtaaaagtagtttgcaaactataaaacattgtgctttttaaatgtaaatgattattacttttagcaagttaatagctaaccagctataaaggctagtgtttcaaatgattgatgagagaggcaaacttccaaaggaatgaatgcacgattaggccatgaaatttgaaaaagtagtaaggaaaacacttgaaagtttaaagaattttcaatgaacaaagcatttggacatcttctattatcttgtgttcctattttaaaaacatttaaattggttagaaaaagcaggccagtttaaagcctaacaaacacacacttgaa

SEQ ID NO: 673193 - DNA, 888 bp, Homo sapiens
caggtgtgagccaccgcgccccgccaagcaaattcttataataactcaaagacatctccactggcctcagtttacatacctcctggctagtggaagacagctacattgaatgctaccaactttaaggatctgacaacaaaccttctgtaccttagaaatggcttctaaaagatctggaaaacaattttccaggaattaaggaagcaaccaaagttattgtaaaaggtacacctattttccacaacattkatgaagaattaaataatcaatataaaatacctagctcagtgcctgatgctgacatcattcagtgggggtagctcccttctcccttatattcagatgcatatacatcatatataattatattaaacatgcagagttataaataaaaattatacataggcttaattataaatatattgcatatgttaaatgtatagcaacataatatagattgtgcttttggaaacttaactgagaacaaaatctacatgcttttaattatagtaaatatgccatgcattaaggaaaattaacatttctcaaaattcatatgcaagagagttgctgcctaagacaatttgctggaaaacgaattgtgatctgtacagtgtctttgtgcttgttgtgaattgcagatatgggagtgttctgagtatttattttatgaacttgtcctaggcattataattacttgtaaactcaatctctatagaccttataaagaagctttaagaaaaaagatcattgaatcagttgacaagaaatgagaattatagataaccagctaaaaggtatctttatattcttgtaaacatctcacgaataatgggaaattgaggaaggcatcagactaaatccatctacaggctagatttgagtgaa

SEQ ID NO: 673194 - DNA, 888 bp, Homo sapiens
caggtgtgagccaccgcgccccgccaagcaaattcttataataactcaaagacatctccactggcctcagtttacatacctcctggctagtggaagacagctacattgaatgctaccaactttaaggatctgacaacaaaccttctgtaccttagaaatggcttctaaaagatctggaaaacaattttccaggaattaaggaagcaaccaaagttattgtaaaaggtacacctattttccacaacattgatgaagaattaaataatcaatataaaatacctagctcagtgcctgatgctgacatcattcagtgggggtagctcccttctcccttatattcagatgcatatacatcatatataattatattaaacatgcagagttataaataaaaattatacataggcttaattataaatatattgcatatgttaaatgtatagcaacataatayagattgtgcttttggaaacttaactgagaacaaaatctacatgcttttaattatagtaaatatgccatgcattaaggaaaattaacatttctcaaaattcatatgcaagagagttgctgcctaagacaatttgctggaaaacgaattgtgatctgtacagtgtctttgtgcttgttgtgaattgcagatatgggagtgttctgagtatttattttatgaacttgtcctaggcattataattacttgtaaactcaatctctatagaccttataaagaagctttaagaaaaaagatcattgaatcagttgacaagaaatgagaattatagataaccagctaaaaggtatctttatattcttgtaaacatctcacgaataatgggaaattgaggaaggcatcagactaaatccatctacaggctagatttgagtgaa

SEQ ID NO: 673195 - DNA, 1012 bp, Homo sapiens
ataatcagtataaaaatattgatgttttgcatctgcatcagccaacaatctttttgtggcaatagtacactaccttgagaaatacagggacataataagatacttttctggcctcaaagatcctccaccctggatgaggagtcaaagttgaagacagttgaaaaaaatagaacagtgattcttaacactggggaacattcaggaaatttcaggggacagtgactggggagtactcctggtgcttggtgrgcagaggccagggaggctagatgtcctgggatacatgggacagcctttcaccagggaggtttgctgtgtgtcccacacaacttccaaaaagtcccagcagctattcacataggtgaaaaaacaaaatgcatttataattctctgagcctagaacccaactactttttacgtataagtattaaatatttttacatggttttaatccacaccaaattttctagtaatgcagcaatagtgtatattgtgaagatggcactttgttacatttgaaacctttcaaagaatcattcatcatatcaggaaaaaggaaaatttttctaacataacacccctgtattcattttcatgctactgttacttttgtggtaattctccccataagagaaatcatagcaaacccttagatagcacttactgttctaagagccttatgtatatgcactaatttaatcctcacaacaaccctgtaaggtagaaactattattctcattttccatgtgagtaaactgaagtatgggaaatttaaatagcttccccaaggtcacacagctaatcagttatagtagtttttgactactttttaaaatgtagttgtgtacaagtatttatattttgtagtatttgatagaaattactcatttctcctttatttcactgataagccattatactgattttttttttaaatctatgtagggagtatttagcctatatgtattcagtacagtattatgaaggaagtgtatttaggaatttcatttc

SEQ ID NO: 673196 - DNA, 594 bp, Homo sapiens
ggattgtttcaggggcaaataatagcaggttcaactaaaatggcttaaataataactagttattatcttaataagtttcaaagtagggctgattagttcagcagctcaaacacatcttcaaagactcatgtgctatctaacttctgctttgccattttcagtatgttgtctgtgtattcagatagttcctttcgtggcctcaagataatagcctaaccatgacatctttgaaaataatttccaaagccccgaagaaaaaatgttctgttctctcttttctttgtaagagttggggatattttcccagaagtcaacctgtgtctcactgtctactattgcagcacggcaagcctgtcctaacctaatcactggcaagggtagaggaattaccataaaaggctcagaattagcctacagaactgaggagaggctggatctccctggaagacttgacttcacacgacctgaacaaaatcccacttatgtatgccaggaataaagtgggggtggagggttggtaataattaagtaggcaaccaagtgtgtctttaataacgagtatggatraaaattcccagacagtgaagtgtctgt

SEQ ID NO: 673197 - DNA, 586 bp, Homo sapiens
cttcttgaccctcatcctaccttattaccttatgcttctcttacacctggagtattaaatcattctgtttcaatctagcctcattgctttccaagctagcaggaattccaagagagtcactcatagcctttttaaaaaaggtattatgtctgaaactacttttatgttaacctcatattttgatagcttgtttatagaaatttatattgraatttcttactgtcaatgttcctttgttatctagcttacgagtttaagttgagaaagctgacattgtcttggtctgttttgtgcttttataatggaatactacagactgggtaatttagaaagaacagaaattactttctcatagttcagaaggctggggagtctaagatcaaggtgccagtatctgaagtctggtaagatccaagtctccgcttccacgatggtaccttgaacaatgcatcctctagaatgggaaacactttcttcttcacatgacagaagagcagaagagtgagaacctactcccctaggccctttctatagcatcattaatccattcacaagggcagagcccccacgacttaaacacctccca

SEQ ID NO: 673198 - DNA, 586 bp, Homo sapiens
cttcttgaccctcatcctaccttattaccttatgcttctcttacacctggagtattaaatcattctgtttcaatctagcctcattgctttccaagctagcaggaattccaagagagtcactcatagcctttttaaaaaaggtattatgtctgaaactacttttatgttaacctcatattttgatagcttgtttatagaaatttatattggaatttcttactgtcaatgttcytttgttatctagcttacgagtttaagttgagaaagctgacattgtcttggtctgttttgtgcttttataatggaatactacagactgggtaatttagaaagaacagaaattactttctcatagttcagaaggctggggagtctaagatcaaggtgccagtatctgaagtctggtaagatccaagtctccgcttccacgatggtaccttgaacaatgcatcctctagaatgggaaacactttcttcttcacatgacagaagagcagaagagtgagaacctactcccctaggccctttctatagcatcattaatccattcacaagggcagagcccccacgacttaaacacctccca

SEQ ID NO: 673199 - DNA, 680 bp, Homo sapiens
gtaactgatacaccgtctctaagcagtggcaagacagctgccaagaactctgggatcagaaatcccagtggacacaaaacacctcttcccttcatttcgggagaagtgcaagcattgagggatggactcacttgttttattgagatggagtttcactcttgttgcccaggctggagtgcaatggcgcgatctcagcgcgtcggaacctccgcctcctgggttcaggcaattctcctgcctcaacctcccgagtatctgggattacaggcacgtgccactatgccctgctaattttgtatttttagtagagatggggtttctccatgttggtcaggctggtctcaaactctgaccttgtgacccacccgcctcggcctcccaaagtgctgggattacaggcgtgagccactgcgcccggccttgactcacatttaatgagtgcaagtcacttgctcatcttggaactcatcactgtggccagggagtgaagaccagcccagagatgtgtgcccatccctgaagcgagtggggagtggggtcagtcccactgaaacctgtgacctgggatgagggaaggcarggagaaaaatgaggctgtcattagcagaaaagggggcagcggagacagcagaaaccaccacaggtctcccctgtagggagtgtgtgagatggtgaaaggg

SEQ ID NO: 673200 - DNA, 680 bp, Homo sapiens
gtaactgatacaccgtctctaagcagtggcaagacagctgccaagaactctgggatcagaaatcccagtggacacaaaacacctcttcccttcatttcgggagaagtgcaagcattgagggatggactcacttgttttattgagatggagtttcactcttgttgcccaggctggagtgcaatggcgcgatctcagcgcgtcggaacctccgcctcctgggttcaggcaattctcctgcctcaacctcccgagtatctgggattacaggcacgtgccactatgccctgctaattttgtatttttagtagagatggggtttctccatgttggtcaggctggtctcaaactctgaccttgtgacccacccgcctcggcctcccaaagtgctgggattacaggcgtgagccactgcgcccggccttgactcacatttaatgagtgcaagtcacttgctcatcttggaactcatcactgtggccagggagtgaagaccagcccagagatgtgtgcccatccctgaagcgagtggggagtggggtcagtcccactgaaacctgtgacctgggatgagggaaggcagggagaaaaatgaggctgtcattagcagaaaaggggrcagcggagacagcagaaaccaccacaggtctcccctgtagggagtgtgtgagatggtgaaaggg

SEQ ID NO: 673201 - DNA, 600 bp, Homo sapiens
aagtcctcacatttggtttaatgctctgccatcaccaacttaaaattcttgatgatttttgaaaaagggcctccgtattttcattttgcatcggatcccacaaattatttagctgttcctgatcagtagttttgtcacagttttatacaaagctttaattattagaactctccccagtatcctgccttctaggccgtggcttattctgcctctcattctgcctcagaagctgctagaaggcagaggtggaaggaggagccaaaaatagctccaccacattaagctaaggaaactgatggaattatcaaccacaataccaaaaatatgttaacccaaggaaggagaataaattccatggagtttgggggktttgttctgtttgctttcattttgctttgcgttcgggttttcattggctttttgttgtttgtgtttgtttgtcttgctatgtttggttttttgttgttgttgttttgttttggttttggtttggttttgcttcttggagtaaaaattggcccttcagttaaaataactgaagaagaagaagcaaatttgaattgaaggatgggagagattaggggaaaaaataatatatga

SEQ ID NO: 673202 - DNA, 597 bp, Homo sapiens
cataatagcttttctgacaacaaaaagagaaaaagattaaggtgacagcatcgtcttctgcattacaaaactgagtatttctgctataaccatcattacaactaatggcgaaatattagacagcttcttctttattttgttattctgaagaggagggctgaaaaaaaatttaacattaactatataagttttactttctatttattctgaaactattttcaggtgtaatctccaaatattaattgttaaatctagaatctacttaggaagcctgacttccaaatgaacagggaggtgaagggggcaagaggggcaaaaatcaatgaggcagaatgttattcaaaagtcatgggcaacagttttaatgtataygtaaaataccacaggatacatttttaaaaccaattgatgaccctgtgatcccacagaagaaaatgaataatcactcaagagctcagaagagacagcctggtagagctgattacttcccttgatattaagttgatgattttgtctggaaggggccacctttgggtcacaagtcattgcttccagaagcaacttaattatgcctgctagtatctttatagagaagct

SEQ ID NO: 673203 - DNA, 920 bp, Homo sapiens
gtttttcaccctcagatgggcctcttctaagcatgccagaaaggtaaacatgtattcaatttaaaaragtattctaaaatcatttcctctaacctttcccattctttcacaatttttactgtttataacctgtctttatgtctacatttaatatttcatgcttccggggagcttatttcttcttgaaagatctttagtagcattcaagattgctattctctatattatcctttcacagaaaatacttaaaaagccattgttattctctttgtcgattgttaatgaaactacagttccattgattctgagtataagtgtgctagtaggggttcagttcattgtaaacacttacttagcaacaactaaattccattcacattttccccttccactctcttccccattcccctcctttctcctcccttccctccccctcttccctttccttctcttcccttcttctccctttctgctgccttcccccttccctttccttttttcccctcttccttttacttctttgttctctggcatgatcatcagaggtaagaagatcaaggttccagggggaaaatggagaacgaagtgactctgagatctccttaataaaatgctggccatgaggagggccattcaatgtctacactaatttctcagagggatattgccagagtaccacctggagagaaagtatacaattgtaaatatttgaaatgtacactggctggtatggttttatttcttaatttcccaccagggaggtgcaaatggaatcgctaatgatttttataagttgtgaggacattgtaatgtcaacagacagagtctcaaacagcaggaagagcactgtgatttactcctaaatgtacagccacagcatgtggactgctttcaccaacacctttctatcctttctgtaa

SEQ ID NO: 673204 - DNA, 477 bp, Homo sapiens
  misc_feature 16, 37, 74, 77, 80, 84, 139, 199: n = A,T,C or G
cagcagactatcttgntttaaaacttagggttcctancaggatttttatttgaaaaaggacttttctgcttatnctnctngctncgaacatcctttagattggctggggatgttcctcgctttcttccccctccgctcncggacggtgggtggcccagctatgttatgctttaaaaatcctttttaaggccaggcatgngtggctcacgcctgtaatcccagcactttgggaggccgaggcgggtggatcacgaggtcaggagatcgagaccatcctggctaacatggtgaaatcctgtctctactaaaaatataaaaaatcagctgggtgtggtggcaggcgcctgtagtctcagctactggggaggctgacgcaggagaatggcgtgaaccccggaggcggaacttggcagtgagctgagatcgcrccactgcactccagcctggaagacagaacgagactccacctcaaaaaaa

SEQ ID NO: 673205 - DNA, 1045 bp, Homo sapiens
  misc_feature 319, 334, 337, 355, 356, 357, 358, 359, 360, 361, 362, 363,364, 365, 366, 367, 368, 369, 370, 371, 372, 373, 374, 375,376, 377, 378, 379, 380, 381, 382, 383, 384, 385, 386, 387,388, 389, 390, 391, 392, 393, 394, 395, 396, 397, 398: n = A,T,C or G
  misc_feature 399, 400, 401, 402, 403, 404, 405, 406, 407, 408, 409, 410,411, 412, 413, 414, 415, 416, 417, 418, 419, 420, 421, 422,423, 424, 425, 426, 427, 428, 429, 430, 431, 432, 433, 434,435, 436, 437, 438, 439, 440, 441, 442, 443, 444, 445: n = A,T,C or G
  misc_feature 446, 447, 448, 449, 450, 451, 452, 453, 454: n = A,T,C or G
ctttttctaagtaagagcaaagtattttatactaaagcattttaatacatccattaatgaaacattaacaaaataataaaaatataacttaccaatgttggaataatattcacttaatattttgatttcatggcaaaattgatacaaaatattaacttaaatttctgtatttatttacaaattcacaaaaagacagctgcaaacaggaagagaaaccacgcagacttcccaagagcctcttttccttattgaaacttcctttaagcatgcataattaaagcaatccrtattcccttgtagcagaaaaagctaagcaacnccgaggctagttacntancagtagctttttaaaaannnnnnnnnnnnnnnnnnnnnnnnnnnnnnnnnnnnnnnnnnnnnnnnnnnnnnnnnnnnnnnnnnnnnnnnnnnnnnnnnnnnnnnnnnnnnnnnnnnntcaattttatagaggatgaaatagagattaatgggagagagagaagaacaaaggactgaacccatacctggctgcaaggatttgacagagataggaaattgggtgaaagaattttcatagtgccagtagaatatctatgtatctatctatgtatctatctgtttatctggaggtaaaaattagcaatagttgttattaagaaaaaataccacacaagatttaggtagtgttaaattattattatttgaccttacaacactattgaaagtattgaaagtcaaggaagctttgtggaggagtttgggcttagcctaagaacagtgaggaaccactaaagggagttacttacatttgtattttaggcaaatgactcactgcagattgaggaatgagaaacagggctgaatctgaagaccagaagactttgcagtagtctaagtgcaagacgatggtggtgtgggctggtaatagcaaggatggagaaaagtggatgaatttgaaggatatttaaatgatagaagagatgaaacttaatgtttgattggaaaagtcttatagaaatcacactctttccatatggatgtcatttac

SEQ ID NO: 673206 - DNA, 618 bp, Homo sapiens
ggaaacattgatcagaattgggaaccacagtgatttacttattactgggagagacattttcattttggctaaaatgcatactttgaacagaaaacatctttttttcaattaaaagaataaacaggtaactcttaatctacaatactttggcctaataatattaccatgaatcaactttttagaccgtctgtgtcctaaagtatttttcatggggagttttgattgaactgggacttttggctgaaatgccaccatgctgagaacagagaaaacagcaacttggggttcaaactgaaaattagctgcaagttgagatctacatcatttatagttggtgaaagttctaattcacaatagaatagttccagatagcagatcaaccctatgcttctggttttgaaagaytctggtgaaatgtagtgaatgcaaccttagctactttatcaagaactgagacttacttaatcaagattggaaataagggtttatgatagtccgagaagtaatgaagtttctattttcatgtaaactacataagcaccaagagcagcaaaccagaaaaatgccccccaaaacagaagaatggcttctaaatatatgtttttttctaagtttcat

SEQ ID NO: 673207 - DNA, 1099 bp, Homo sapiens
attggcaaaattgttgagaaaagttgcacagttccaagttcaaccagtctgagaaagatacacaggcctctgaaactttaattttaacctaaagcccccactgccttcttttaaatattaaagcagactgtaaggaggaattgtcaaaacaggcatctctaaaagagaaaggaccaccaaactggatcacttttgtagcacagcctcgatggtatgtttggaaaaacattatctacatggtcatcagtcctttcatttttttctatacacacagcagccccatagaccagagcagggacgggaaaaggaagggctaggcctgcagggggcagatgagaggcggcccatgcattgacgaagagatttgcagctgattttcttcaaggggaaaattgatacattgataacttcaataaccatgggcagggggggtcattgaatgctaacatcattactcaaaaaaggacttgaattcaattactccatttaattgtttcttattaaattgtattctatgataaatctgagttaacgaaccctatgaaaattatccctagttagttcattaataagtcatggaaatgatttttctcaagacacacaagatttttctcaagttggaatacttgggaatattgctggttcaatgtttgtttggataagatggagcagaagacaggcttggataaaggaacacgtggccaaatcctcaaaaatcaataaaaattcacacctggattcaaggtagcatcactcctaattacttctgaaaagaaatgaaaatttgataagtgatctagcctcaagagaattagaatataatggccatgttcaggaaatccgtaggaagamgactttttttaaaaaaaataactttctaagttctctttttagataggctagtcgatctgaaggttcgaaacacattttttgaaataaagttgggtaactaactagccaacacagccagcacagagtctacatgcagcaaggcccactggcccaccccatattccagtcctagctccccaacagccagccagccagccccacatttactgcctctaggcaaatggacacaagcatctgcctgccccag

SEQ ID NO: 673208 - DNA, 634 bp, Homo sapiens
gggaagaaatgctggattcctgatttacacattgtaaagtcatgtgtgaggcaaaacagtgaaattctaaaccataagtttgtagtacatattttaagggaggactctttaacctcaaataagctattagtggttttggaggacttaacaaatgtccacaataccgctttcatcttacatctaggataagctggtttttaataccaatgccttatcaatgattctaatctttcttttcacgtttacttttgaggtrgccctatcttgttcagtatagcttttttttttttttttttaaataaattttattggctgggcatggtggctcacgcctgtaatcccagcactttgggaggtcgaggcgggtggatcatgaggtcaagagattgagaccatcctggccaacatggggaaaccgtctctactaaaaatacaaaaattagctgggcacagtggcacacgcctgtagtcccagctactcaggagcttgaggcagaagaatcgcttgaacctgggaggtggaggttgcagtgagctgagatcgcaccactgcactccagtctggcaaaagagcaagactccatctcaaaaaaaaaaaaaaaaaaaaaaagtttgtatatttaaggtatacaac

SEQ ID NO: 673209 - DNA, 634 bp, Homo sapiens
gggaagaaatgctggattcctgatttacacattgtaaagtcatgtgtgaggcaaaacagtgaaattctaaaccataagtttgtagtacatattttaagggaggactctttaacctcaaataagctattagtggttttggaggacttaacaaatgtccacaataccgctttcatcttacatctaggataagctggtttttaataccaatgccttatcaatgattctaatctttcttttcacgtttacttttgaggtggccctatcttgttcagtatagcttttttttttttttttttaaataaattttattggctgggcatggtggctcacgcctgtaatcccagcactttgggaggtcgaggcgggtggatcatgaggtcaagagattgagaccatcctggccaacatggggaaaccgtctctactaaaaatacaaaaattagctgggcacagtggcacacgcctgtagtcccagctactcaggagcttgaggcaraagaatcgcttgaacctgggaggtggaggttgcagtgagctgagatcgcaccactgcactccagtctggcaaaagagcaagactccatctcaaaaaaaaaaaaaaaaaaaaaaagtttgtatatttaaggtatacaac

SEQ ID NO: 673210 - DNA, 667 bp, Homo sapiens
gaaaaaagctgaaccttgacttagtaggattatcactcaggtggcagatgtccaaacgttatcagcccagtcgatgggtgcaccagcaataatcattctgttttcaatgcaattgtctaggtagatctaactgctggtcttattaggccmccccttcatgatggtgtttattgagcctgatagagcattctttttttttttttttttttttttgagatggagtctcgctctgtcgcccaggctggattgcaatggcacgatctcagctcactgcatcctctcctcccgggttcaagcgattctcctgcctcagcctcccgagtagctgggtctacaggccccaccaccatgcctggctaattttttgtatttttagtagagacaaggcttcaccgtgttagccaggatggtctcaatctcctgacctcgtgatccgcccgcctcggcctcccaaagtgctgggatgacaggcgtgagccacccaaccagccaagcattcttatttgttagacgttacctggctttttctgagtttagtcttgcttactaaacattatttaatttgtgaattgccaaagttgagaataccattggggaatcaaatttctgtgctttcttatttgtaagtactttcttctggagtcattatttaacacataaaatttaa

SEQ ID NO: 673211 - DNA, 667 bp, Homo sapiens
gaaaaaagctgaaccttgacttagtaggattatcactcaggtggcagatgtccaaacgttatcagcccagtcgatgggtgcaccagcaataatcattctgttttcaatgcaattgtctaggtagatctaactgctggtcttattaggcccccmcttcatgatggtgtttattgagcctgatagagcattctttttttttttttttttttttttgagatggagtctcgctctgtcgcccaggctggattgcaatggcacgatctcagctcactgcatcctctcctcccgggttcaagcgattctcctgcctcagcctcccgagtagctgggtctacaggccccaccaccatgcctggctaattttttgtatttttagtagagacaaggcttcaccgtgttagccaggatggtctcaatctcctgacctcgtgatccgcccgcctcggcctcccaaagtgctgggatgacaggcgtgagccacccaaccagccaagcattcttatttgttagacgttacctggctttttctgagtttagtcttgcttactaaacattatttaatttgtgaattgccaaagttgagaataccattggggaatcaaatttctgtgctttcttatttgtaagtactttcttctggagtcattatttaacacataaaatttaa

SEQ ID NO: 673212 - DNA, 630 bp, Homo sapiens
tttagttggtgcaaagaaacaggttaatatgcagaagaaatccatataggatctttgagtatttgcaactcagcctagaagaggtatgttttcaacatattattatttcagccatcggtctctgggcctgaactacactatatgtgaacctacctcacagtgtagttctgtatgtaattcaattattgaatattgtaattcagtattgaaatcactatgggtagctcccaagtaggcctgcctttcactcctcagcctttatttcatcagttctaagatatgtgtttgcaatcattccacagaagattcgaggggtttttctgagtacttcttttctcattaagattttagattgttaggccgggtgcgggggctcacacctgtgatcccagcactttgggaggccaaggcaggaggatcacctgaggtcaggagttcgagaccagcctggccaacatggtaaaaccctgtctctaccaaaaatacaaaaattagagtggttgctcatgcctrtaatcccgactactcaggagactgaggcaggagaattgcttgaacccgggaggtggaggttgcagtaagccaagatcgtgccattgcactccagcctgggtgacagaatgaaactct

SEQ ID NO: 673213 - DNA, 1318 bp, Homo sapiens
taatatctttattttacagttcttctgcccagacatcttctgaacttcataattctatatctaactgcctatgtcatttatttttaatatagtgagccaccacgcctggccagtttttaaatttttttgtagagactgagttttgccatgttgctcagactggtctcgaactcttgggctcatccgcccaccttgacctctcaaagtgctggggttagaggcatgagttastgagcctggaacaatccttttaagatttaagcctggccaacacagtgaaaccccatctctaccaaaaaaatacaaaaattagtcaggcgtggtggcacgtgcctgtagtcccagctactcaggaggctgaggtgggagaatcgcttgaacccaggaagcagaggttgcagtgagcagagatcgtgccactgcactccctctgggtgacaaagtgagaccctgtctccaaaagaaaaaatctaaggtagattgtgccttttgtgcctttcctctgctcaagacctttcagtggcttcccacttcactcagtaaaaggcaaaaagtccttttaataacctacaaggcattatgttacccacattgtccctgctcccctacattgtactcaagtctatgatctttttaccattccttgtacaaaggattttcactggctgttctttctgcctggaatgttgttctctcagttatctgcaagtcagactcactgatttccaggtctcagcagttacctcttcgttgagacctactgtgacctcactatgtaattgcagtctgcctccctttccccagcacttatcacccactatcatggaatttactgtgaatgcctccagcagaagataggcttctcttatgatcatggatccttgtgttttgttccctgaggtagcccaagcatcttgaacagtgcctggtacatagtaggcactcagtaatgtttattgcatgaataagtgacgaaaattggtatatgggaaaggtaagcaatttggtgaaaggccaggccatacagctaataaaaggtggaggtagattttgaactgatagttatttattgtgcctctaatattagaagatgatacccaaaaaaatgtgttaggattagtaaaattgtgagtaacttcccctttatcctccttcccaaatttagtttttgttttattgtaagtaaaaatataattaggccaggtgtagtggcttacgcctataatcctagcactttggggaggctgaggtgggagggtcacttgaggccaggagttcaacaccagcctgggcaagatagtgagacttcgtctctaca

SEQ ID NO: 673214 - DNA, 628 bp, Homo sapiens
catcatccttcccttcattgaacttacaaatgggagggagatgagtgctaaagcagtaattacaaataaataacagacaagccttcaaacatcctgtgaaggaatgcagcgtgagcttgtaatgcagaggccactgtctctgccttcaccatctgctaactrataagctaggtgggccaaaatatgagcctattagctgggcatgatggctcatgcctgtagtcccagctattcaggaggctggggtgggaggattgcttgagtccagaagtttgaggctgcagtgagctatgattgccactgcactccagcctgggtgatggaacaagaccccatctcttaaaccaacaacaacaaaaaaccctgagatttggggcctgtaaggccccagagtcttcactacccttggtggctgtacttttaagggaatgaaaaggagagagagattgagattgagactgagagggtgagagagagtatgattggttttagttagtatacaaagaagcttctcatgttccatacaatggagtgattctagagagaatgatgttcccgagccttcccttgggttatggctcgctaaatcaagcatcagatgaacgcttggcataaatctaacgtgtgt

SEQ ID NO: 673215 - DNA, 628 bp, Homo sapiens
catcatccttcccttcattgaacttacaaatgggagggagatgagtgctaaagcagtaattacaaataaataacagacaagccttcaaacatcctgtgaaggaatgcagcgtgagcttgtaatgcagaggccactgtctctgccttcaccatctgctaactaataagctaggtgggccaaaatatgagcctattagctgggcatgatggctcatgcctgtagtcccagctattcaggaggctggggtgggaggattgcttgagtccagaagtttgaggctgcagtgagctatgattgccactgcactccagcctgggtgatggaacaagaccccatctcttaaaccaacaamaacaaaaaaccctgagatttggggcctgtaaggccccagagtcttcactacccttggtggctgtacttttaagggaatgaaaaggagagagagattgagattgagactgagagggtgagagagagtatgattggttttagttagtatacaaagaagcttctcatgttccatacaatggagtgattctagagagaatgatgttcccgagccttcccttgggttatggctcgctaaatcaagcatcagatgaacgcttggcataaatctaacgtgtgt

SEQ ID NO: 673216 - DNA, 989 bp, Homo sapiens
caggctgaattgcagtggcacaatcacagctcactgcagcctcaacctcctgggctcaggtgaacctcccacctagccctcctgggttaatttttgccaccatgccaggttaatttttgttttcttgtagagatggtgtttcaccatgttgccaggctygtcttaaaattctgggctcaagcattccattcacctcagcctcccaatgtgctgggattacaggcatgatccaccatgcatggcctctcttaattatgtctctttagtctatttcaatctgcaacaattccacagtctttccttgatttccctgactttaacaccttagatcacaaggcagttatgtggtaaagtttcacctcatttgggcttgtctgaatagtcaggtatcaatggcaagtcacagactcttccctgtattggtaggagctatatgccaagggcacatataataaaagggtctataaagatgttcaaaaataataataaaagcagtaaaaattggctttaaaaatcactataaaaaaggcttctcccagccagcaagtacactgatcccattgtcttgccctctttccctctatcctctcctccttcactggatacaccattggaggtaataaaccactttcattacaattcgattcaggatgctgtgctctttatgctgcgttctgtcaggtagaaggttaagacttctatctgtcccattgctcttgaagttaaataatcatttgactaaggtggtacctgtcagacttctccagtataaaagtaagtatcttttttttctttataattagtgttttgtggctagggattttagacaatgcaaatatgcctcactggacatttaaactttttattcatatatttctatgaggatgatctgttttatcggtgtgaatccaaggtttcttattttggtaaatgagttataatacatttgctatttattcgatgctttcaaatggcttgcctttggcatg

SEQ ID NO: 673217 - DNA, 989 bp, Homo sapiens
caggctgaattgcagtggcacaatcacagctcactgcagcctcaacctcctgggctcaggtgaacctcccacctagccctcctgggttaatttttgccaccatgccaggttaatttttgttttcttgtagagatggtgtttcaccatgttgccaggcttgtcttaaaattctgggctcaagcattccattcacctcrgcctcccaatgtgctgggattacaggcatgatccaccatgcatggcctctcttaattatgtctctttagtctatttcaatctgcaacaattccacagtctttccttgatttccctgactttaacaccttagatcacaaggcagttatgtggtaaagtttcacctcatttgggcttgtctgaatagtcaggtatcaatggcaagtcacagactcttccctgtattggtaggagctatatgccaagggcacatataataaaagggtctataaagatgttcaaaaataataataaaagcagtaaaaattggctttaaaaatcactataaaaaaggcttctcccagccagcaagtacactgatcccattgtcttgccctctttccctctatcctctcctccttcactggatacaccattggaggtaataaaccactttcattacaattcgattcaggatgctgtgctctttatgctgcgttctgtcaggtagaaggttaagacttctatctgtcccattgctcttgaagttaaataatcatttgactaaggtggtacctgtcagacttctccagtataaaagtaagtatcttttttttctttataattagtgttttgtggctagggattttagacaatgcaaatatgcctcactggacatttaaactttttattcatatatttctatgaggatgatctgttttatcggtgtgaatccaaggtttcttattttggtaaatgagttataatacatttgctatttattcgatgctttcaaatggcttgcctttggcatg

SEQ ID NO: 673218 - DNA, 989 bp, Homo sapiens
caggctgaattgcagtggcacaatcacagctcactgcagcctcaacctcctgggctcaggtgaacctcccacctagccctcctgggttaatttttgccaccatgccaggttaatttttgttttcttgtagagatggtgtttcaccatgttgccaggcttgtcttaaaattctgggctcaagcattccattcacctcagcctcccaatgtgctgggattacaggcaygatccaccatgcatggcctctcttaattatgtctctttagtctatttcaatctgcaacaattccacagtctttccttgatttccctgactttaacaccttagatcacaaggcagttatgtggtaaagtttcacctcatttgggcttgtctgaatagtcaggtatcaatggcaagtcacagactcttccctgtattggtaggagctatatgccaagggcacatataataaaagggtctataaagatgttcaaaaataataataaaagcagtaaaaattggctttaaaaatcactataaaaaaggcttctcccagccagcaagtacactgatcccattgtcttgccctctttccctctatcctctcctccttcactggatacaccattggaggtaataaaccactttcattacaattcgattcaggatgctgtgctctttatgctgcgttctgtcaggtagaaggttaagacttctatctgtcccattgctcttgaagttaaataatcatttgactaaggtggtacctgtcagacttctccagtataaaagtaagtatcttttttttctttataattagtgttttgtggctagggattttagacaatgcaaatatgcctcactggacatttaaactttttattcatatatttctatgaggatgatctgttttatcggtgtgaatccaaggtttcttattttggtaaatgagttataatacatttgctatttattcgatgctttcaaatggcttgcctttggcatg

SEQ ID NO: 673219 - DNA, 623 bp, Homo sapiens
agtccctgccatctggaagcttaaagcatagtgaggaagaaacttcagtttcttatgacttctataaaagttaccaaaaatgttatggcttaaaacagtacatatttattttcttagagtcctggaggtcagaagtccaaaatgggattcacggggctgaaaaaaggtgcaggcagagccatgctcagtccacagatagaggggagaatctgtccccctgcctttcccagcatctagagcttccttcatcacaccccatggctcatgatcccttcctcagtcctgargtctagcagtgcagcatcttcacgtctccctctgctctgctgcctcattgccttcccctctgtcaggtctaactctgcctccttcttacaatctggatagtccagggctattttaatctccccatctgaagatctttaacttaatcacatctgcaaaatccactttactgtatcaagtagcactcacaggttccaggtattaggacctagatatcttttggggccattatttagcctgtcatgcatatcaatgaaacagttaaaaagtatataattattaactgtatttcctaattaaatgggccttcattttcttctaatattttaaaaatacta

SEQ ID NO: 673220 - DNA, 1090 bp, Homo sapiens
catgtgtttttaagtcttttagattttgtgtgagtacttagtacttattgtccccagctttggggctctaagtcaaaattctaagacagtagggaacatcccatcttgttctgtgcatgtttgagaccttgtgtttttagatcatagttcttagcctcactgaggaatctaaacatcccttaagccagtcaatcccagccctactgaggacctgaattctaccattatagagttgtctggtgagaactgtagttgggtaaaactggttatatgtttgacttgagatttctggtgccytctttacaggatctaaggatttagaatataccactgtggcatgtttgggatcttcattaaaattttggaaaaggaaaatcagagcaatacatcttacagtgtcttcaccttgggcttggacttcctcccaggcaagctgtgtgtcacatggacttagtagtaaactattaaagaaggtggcgtgaatgagacaagctcccggaaagtcaggataatggccaccatagccattaagggcaaagccgctgatgtctagtggtttcacaaaattccccatccagaggtttcccaaaagtgttagggaagtcttggggaggcttcagcagctcaaagtacattgagctgtattgtaactacctgattaccactcaagcattattaaactctagaaatgtttgagttctggtaagatttctaaacacagatatctaaggggtaacagtttggagtgtctgtcatcttattctaattttctgagtgctcaccactactccacagccatatttttgtgcgatgcagttctctgtgtttgtttgtttgtttgtttgtttgttttttgtgacagagtcttgctctgttgcccaggctagagtgtagtggcatgatctcagctcactgcaacctccacctccagggttcaagcgattgtcctgcctcagcctcccaagtagctgggattacaatcgcctgccactgtgcccagctaatttttgtatttttagtagcgatggggtttcaccatgttagccaggatggtctcaaactcctgacctcatgatccgcctgcctcggc

SEQ ID NO: 673221 - DNA, 668 bp, Homo sapiens
taagcacttaacaatttcagtaacttactcctccaatcctttcaaaatgagccactcctttttttaagtctatgacatctccattgaaaaaccatacaaataccacttcaatggaggggtcatgggacacctggcatggtagcactatactctcgccaactgtaacatccattttggaaggtgggacggtaatgacagttctctctgttgagaaaaaaaattattttttaaagcttatgaaatgctagcctatggttataaaatacatatttctgaatactttwtcattcatttgaaattatataaatgcaacctggagttctacaatgtccagtatgaaatattcctttgcctgtttttaaatgtcttgtatttattattgtagcttattacttatactaaaattaaaaatatattcacaccttatatgaaaatagtttacagaaaactgtagacctcaaaaaatggcattccatatatacaggatgcactgcattgtttttgttatattttattctaacattttagtcataacattacaattgacacactggtaacagctctaaatgctctctgttaacttcatataccatgagacaaaccatgtttctaagattatgaccaccatagtttctatagagatttagacatacgtttatatttaagag

SEQ ID NO: 673222 - DNA, 2215 bp, Homo sapiens
tcagctttttagataatctttctaaaacataaataaagtcatttcagtatctgtttctggtttcctcttccacagaggatcaagtaaaagatgtttagcgtgaaacataaggtccttcatgacttgacatctgctttaatctccagtctcattcccatatttatcctttttcatatttaccttgagcccccatacatatactctttaccccacttattcaaccttctgtggatttgcggatattctttgcctttgcagaggctctgctttctgtctggactaccagctaacttcaatttattttttcaaaacatgacaccttggagaaagctctctcttactcagtcttcctcttttggaattcatggtcctcttttggattgtgatgtatacattcatctttttaacatcacaatattcttacatctatttccattgataaattaatagaggatcactaattgtgtaagttytgatgaaagaaaaagcttttgcatcgctgtagagctaaaacagtcagatattcatgttcctagcctgccttgaagctagggtacagtcattaattcagtcttggctaatcagacatacctatcaggaatgaaacaagatctagggacacaaaaaaggctggggcgatggaaaacccattttgttgacagtaacagcagtagcagtaaaaaccacttgtcacagatagatgtggtatccagcatcagctgggtgcagtagaacaatctccagcttccctctttcagaagaaactgcagcattgcccagtaagcttggtactgtggatttttttttttttttttttttggctttgattctgaccaccgagcctcctttgtttctgcttattttctgattttgtttccctggccttcagagggattctgtttattatccctcataacttaaattatttttctgcttaacctagacagaattgacttctgttgtttgccttcaaccttcatgaatataaccagggttgtctctttatgagttccacagcaccctatttaaactctatcatggactttgttgtatttcattgtaatcatctgcctagttatcccctctcactagagagtaaaattctcgaggctagacagtatgctacatttgactttcaacactcgatacccagagcagtgcccaacacagactaggtttaataaatgcatgttgaatttaaaaataatgtgttaatgatacaagtggttatgtctttgaggttgtagtgggtacagtaaagcagttgaaagtttttctaatttgaattttctgaagtgatcattgatctgctataattaactttataggagggaaaaaagggacaagaaatctggtgatatgacttgtacttatgcaatatgtatctgaatggtaggtactatttcagagtaccttctttatagcaggtactatttcagggtaataatgataaataataattctagtagaaacaacaataggacaaaaaaaaacccctctgttttcaaagagtagaattacatatttagagtaatgaacacagcctggttagggcatactacaaggaaagattctgaaagaaggtagatcttaactaaatcccaaaggtaagtagatgttaaccagacaaagctgacctaaagtggtttgtggatgacatactaggaagagagaagcatgttaaaagtccaaaataaaattgcttgatagcgtttaaatacttgaatgttgcaagagaaatactattgctttgaaaacttgtgtgaatcttgaattaatgtgatggaaaattgtcttccaagcaatgtggtagccattccaaaaaactttctggcttttaaaccaagaacatcgggttctggccctaatgcctccaataactcactgggaactaccatattgtttctctgggttggaaagtcatcacatattaatggagaaaactagtctttcttgggtcagacaaatctcagatgtttatcttcctaattacaaaggatgggtttctcccaggctatggattgtcatttttgccatgggactagaaatagatagtgacaaggtatttttgctggatgagaaaatagtgaaaaatcatgtctcagcgattcctcctcatctcttctgcctgccatcattgcacttgataaatttgagagggtatgaaaagatctgaaggtgaagtgaactctttctttacttgcctatgtagaaa

SEQ ID NO: 673223 - DNA, 626 bp, Homo sapiens
gaagactggatccatcccctaactatgtcatcttaaggaattcactgtcctaatgcttctgagttttctcatttataagctkaggataacctttaaaaaaatgcagattttatggatcttttattctttgttgatctgtgttttcctaatagcattagctaaagtgttgacatacataaaatatatgaaaggaaaaaagtacataatttcttttgaaccaaagaatggccttccagactgctatttgaacatcaaaatacctttaaaggaaatctctttgtgtaaaatgctttgtgtaaaaaggttctgttgtcaatttatagttgctttcagaaatgtgatatatcctgctcaccattggccatttaaagagcttgatggcacatttttatgctgaaagatttaagaaatcctaccctaaagaaaactgattttgtttgaccaagcatttaaaagtgatagaaaataggagggtttatttatttatttttttgacaataataccgattaatttctcacaaatcaaattgagcctttgagaaacattgccttaagaatatttacttatgtggcctacaaataaccctacctttggtgtatatggagtgaagacatagccaactttc

SEQ ID NO: 673224 - DNA, 1986 bp, Homo sapiens
agcacaagtcctggggaatcggactggagaggcaatgcccctgtccccagtagagattgtgaatcctaggctgggggatgtgccctggattcagtagaaacaggaagcccacaggatgtctgtagctagggagcgatggaagcaaagccgcactccaggaagttgcatctggaggcagtttgaaggatggttgggcagagggagggcctggagttgaaaagacccctaaggaagctaccaaaacatcccagggggtctgaaataggaagccaaggcccacattgcagtggtaaaaatccaccaagcggtgactataggcaggtgggggagatgaagtgtttggaagatgttagaacctgctcattcaggagcagcagggcaagctgagctgagacacctgaaagtgagctactactgggacttgaaggtcccctgcgaaagtgcaaacacgctctggaaaaagcggggcctggggcctgcattcccaaacactaggatcctgtattaattttctacagccactataacaaattactacaaacttagtggcttaaaacaacacatataattacctcagtgctccttaggtcagaatgtgggttggctcagctggtttccctgctcctggttcatgaagctgaattcaaggtgacagcggactgggctcctatcaggaggttctggaaggatcctcttccaaacttattcatgttgctgaattcagttccctgcagctgtaggccggcggtccccatttctctgttggctgttagctaggggccaccgttagcaaccagtctctccctccagttcctacaagtgggccccacatttcagagccagcagtggcacatcaactccttctcacacttacaatctttcatggcatyttcttgatcacagtcggagaaaacctctgcctttaagggcccgtgtgattggattggatccacctggataaccaaggatactctccctattagaagtcaattgattagtaaccttaattacatctgcaaagtcccctttgccatataaagtaacatattcattcataggcataacatcagagattagggcatgggcatctttagagggccattctgtttaccagagcttctctgcttctccacaggaaacaggttgagacatcacacaataaatcataaggggtagagagccctgccacagaaggaggcctgggttctaaacatcatggagaaggactttacccagcctcagtgaggggtggtggaaaagacgaaaatcaggaaacatttcccaaaagaaaaatgagattctctgatggaaactggaattgagcagagcaaagggatgtgttgccagcagagttgattaggctacaggtcattggaagaacatatttagaagaaaccaaagctagagtgaactccaagtaaacaccaaagtttacttttttgtccactgcaagtgcacagcattgcaggagctagcctccgagtgccaagctgctgccattcctgtctcctggggggccgattctgcctttccagaagcaacacagtgagccttcatggaaaccccatcccacaagtgagagaagctaagtgaatctgcacatgctggtctaggaagacatccgtgataccgtaaataaaaatggcacacttatcaataccattgcaagtttccatttcctgcctccctcaaaacaaagtacaaaaaagcaaacgttgtgagcatgtatgcacttgcaaaagctgattgttaaatattcaagaaatttgcgaactcgtttttaaagctttggttgcctgaaatcggctgcggtgggatttcaccattgaaattgacaaacctacaattcagggtttttgtttctcctcttgagaagtttaacagtgcaccactacatttgcataaattaccaaactgacaacagggattatctcaagaaggggcgggatgggtttcaagcttgtgttggttactttcccgtcttta

SEQ ID NO: 673225 - DNA, 1986 bp, Homo sapiens
agcacaagtcctggggaatcggactggagaggcaatgcccctgtccccagtagagattgtgaatcctaggctgggggatgtgccctggattcagtagaaacaggaagcccacaggatgtctgtagctagggagcgatggaagcaaagccgcactccaggaagttgcatctggaggcagtttgaaggatggttgggcagagggagggcctggagttgaaaagacccctaaggaagctaccaaaacatcccagggggtctgaaataggaagccaaggcccacattgcagtggtaaaaatccaccaagcggtgactataggcaggtgggggagatgaagtgtttggaagatgttagaacctgctcattcaggagcagcagggcaagctgagctgagacacctgaaagtgagctactactgggacttgaaggtcccctgcgaaagtgcaaacacgctctggaaaaagcggggcctggggcctgcattcccaaacactaggatcctgtattaattttctacagccactataacaaattactacaaacttagtggcttaaaacaacacatataattacctcagtgctccttaggtcagaatgtgggttggctcagctggtttccctgctcctggttcatgaagctgaattcaaggtgacagcggactgggctcctatcaggaggttctggaaggatcctcttccaaacttattcatgttgctgaattcagttccctgcagctgtaggccggcggtccccatttctctgttggctgttagctaggggccaccgttagcaaccagtctctccctccagttcctacaagtgggccccacatttcagagccagcagtggcacatcaactccttctcacacttacaatctttcatggcattttcttgatcacagtcggagaaaacctctgcctttaagggcccgtgtgattggattggayccacctggataaccaaggatactctccctattagaagtcaattgattagtaaccttaattacatctgcaaagtcccctttgccatataaagtaacatattcattcataggcataacatcagagattagggcatgggcatctttagagggccattctgtttaccagagcttctctgcttctccacaggaaacaggttgagacatcacacaataaatcataaggggtagagagccctgccacagaaggaggcctgggttctaaacatcatggagaaggactttacccagcctcagtgaggggtggtggaaaagacgaaaatcaggaaacatttcccaaaagaaaaatgagattctctgatggaaactggaattgagcagagcaaagggatgtgttgccagcagagttgattaggctacaggtcattggaagaacatatttagaagaaaccaaagctagagtgaactccaagtaaacaccaaagtttacttttttgtccactgcaagtgcacagcattgcaggagctagcctccgagtgccaagctgctgccattcctgtctcctggggggccgattctgcctttccagaagcaacacagtgagccttcatggaaaccccatcccacaagtgagagaagctaagtgaatctgcacatgctggtctaggaagacatccgtgataccgtaaataaaaatggcacacttatcaataccattgcaagtttccatttcctgcctccctcaaaacaaagtacaaaaaagcaaacgttgtgagcatgtatgcacttgcaaaagctgattgttaaatattcaagaaatttgcgaactcgtttttaaagctttggttgcctgaaatcggctgcggtgggatttcaccattgaaattgacaaacctacaattcagggtttttgtttctcctcttgagaagtttaacagtgcaccactacatttgcataaattaccaaactgacaacagggattatctcaagaaggggcgggatgggtttcaagcttgtgttggttactttcccgtcttta

SEQ ID NO: 673226 - DNA, 736 bp, Homo sapiens
gcaccatggtcagcagtgtcccgccggtagagatggtgccagagtcagcccccatctctctgccaggagaactaggcagccgtttgagctggcctccaggcctgttgccagtggggggctaccgaatcatacacaggtagccaccagcacaatcccacatgagaccccaaatttgttactgcccaaggggttattcctgcccactgcataaagaaagaccayggcattgtagtagaaaaagaatttaatagacacgaggccggccacgccacgtgggcgatgaagttcgtactcatcttattcaaagctcataggttagggatttttcaaaggcagtttgggggaaggggtgggggtggacaggtaacaggtgcttgctgctgagtggttggggcagagatgaaatcgtaatgggttgaagctgtcctcctgttgggctgaattgcttctgggtggagccataaggtccaggtggagtcatgggtgtcagacatgcaaaaaacctggaaagatatttcaaaaggccaatctgtaatagtagtgttattcacaggagcaattgggaaagttgcatatcttataaccttcggaataatgtctgcagcttagtaggattcaggctcttctcctccccgcaccctgatggccccctaacagctttacaaaagtggctgagttttgggcaaggcctattatcatttaaactgtagcctaaatgtcttccaaagttagcttg

SEQ ID NO: 673227 - DNA, 609 bp, Homo sapiens
actgatgaagaggagcagcagaagacaatttcacaccgagtgcttacaaagtgccaggaascatattatctctaatataagacacgctgccaggtagttatcatcttcatcattttaaaaacaagtaaagtgaggcacagaatgttatgtaacctgtgcaaggtcacacaaccagaacatggcctctctacctccactctacatgtactaatctccatccccagggccgagaggccgcaaccggatggtgaggtttagtcttagccctgatggtggggtggggaggggacaagggtgacttgaaaagctctccgttccccttggcagctgtctttccattcgcaccccctcctgcacccctctgccaggcctgttgatcacagaggcaccatcccatctgctccgcctagaagttcagaatctcccgagatttctgaagcctccagcactgttctttgtgacactctaaacacagcagcttctcctcctggggatgagagagggtcagccagagccctgggcctctgttcccaacccctgagcccagccctgttcccaaggctgcacactacaattccagccccaaggacatggtggggcggggggaag

SEQ ID NO: 673228 - DNA, 609 bp, Homo sapiens
actgatgaagaggagcagcagaagacaatttcacaccgagtgcttacaaagtgccaggaaccatattatctctaatataagacacgctgccaggtagttatcatcttcatcattttaaaaacaagtaaagtraggcacagaatgttatgtaacctgtgcaaggtcacacaaccagaacatggcctctctacctccactctacatgtactaatctccatccccagggccgagaggccgcaaccggatggtgaggtttagtcttagccctgatggtggggtggggaggggacaagggtgacttgaaaagctctccgttccccttggcagctgtctttccattcgcaccccctcctgcacccctctgccaggcctgttgatcacagaggcaccatcccatctgctccgcctagaagttcagaatctcccgagatttctgaagcctccagcactgttctttgtgacactctaaacacagcagcttctcctcctggggatgagagagggtcagccagagccctgggcctctgttcccaacccctgagcccagccctgttcccaaggctgcacactacaattccagccccaaggacatggtggggcggggggaag

SEQ ID NO: 673229 - DNA, 609 bp, Homo sapiens
actgatgaagaggagcagcagaagacaatttcacaccgagtgcttacaaagtgccaggaaccatattatctctaatataagacacgctgccaggtagttatcatcttcatcattttaaaaacaagtaaagtgaggcacagaatgttatgtaacctgtgcaaggtcacacaaccagaacatggcctctctacctycactctacatgtactaatctccatccccagggccgagaggccgcaaccggatggtgaggtttagtcttagccctgatggtggggtggggaggggacaagggtgacttgaaaagctctccgttccccttggcagctgtctttccattcgcaccccctcctgcacccctctgccaggcctgttgatcacagaggcaccatcccatctgctccgcctagaagttcagaatctcccgagatttctgaagcctccagcactgttctttgtgacactctaaacacagcagcttctcctcctggggatgagagagggtcagccagagccctgggcctctgttcccaacccctgagcccagccctgttcccaaggctgcacactacaattccagccccaaggacatggtggggcggggggaag

SEQ ID NO: 673230 - DNA, 609 bp, Homo sapiens
actgatgaagaggagcagcagaagacaatttcacaccgagtgcttacaaagtgccaggaaccatattatctctaatataagacacgctgccaggtagttatcatcttcatcattttaaaaacaagtaaagtgaggcacagaatgttatgtaacctgtgcaaggtcacacaaccagaacatggcctctctacctccactctacatgtactaatctccatccccagggccgagaggccgcaacyggatggtgaggtttagtcttagccctgatggtggggtggggaggggacaagggtgacttgaaaagctctccgttccccttggcagctgtctttccattcgcaccccctcctgcacccctctgccaggcctgttgatcacagaggcaccatcccatctgctccgcctagaagttcagaatctcccgagatttctgaagcctccagcactgttctttgtgacactctaaacacagcagcttctcctcctggggatgagagagggtcagccagagccctgggcctctgttcccaacccctgagcccagccctgttcccaaggctgcacactacaattccagccccaaggacatggtggggcggggggaag

SEQ ID NO: 673231 - DNA, 1570 bp, Homo sapiens
tgcatagttagagactgagctgagattctaacctctatctgtaagactccaaagcctgtgatttggaggaaccaggctgttggccaggtctcaggtttcctgatgcttaatcaagcccccttttcctgaatgaccttgtttctagatgattagataattccaagtggtctcttctttttctactttcaagcacagtccttcttcctttcctgtttgacttgctaattaattcaatgacttttccttgattcctattagtaggtaactccatgattgataccatctggaaaacatttatccaagtcttcagtggaaagtttcacagaacaggagatgtaaaaggagacccacaagaggtgctgtgtttgcataagtgataaattaccagcccttggattatctgccaggagctctccctccaggtttaggggcagcacctttcctgctgtggtgccagctgtattatttaccacatgtttagtaaagcttgtgccttctgaatgaagtgaggagggtggaagcactaagcttacataaactagctttcaatagagtctattttcctccaattgtctcacgtgccttttccctgggtagtcatgcttcatacttttagaagctcagatcccaacagctggagataaaactcccagtgtaatggaagaaaacatgttgatagttttaattggtccctaaagtgaaacccaaggaatgatttattggttgatggttttgaggcttccaacttagcagagctgggaaacatatgggaaagataaacacgctagaaatttgtggctatttgttagaaagttaattttagttcattcagtttatgataatcgaaaaatctctttaaattttatttattattattgaagttaatgatgcatctacttacctgcaggcatgaacacctgcatcttagascatgctgtggttttctaccagtcttgaatcctccaaaggtcctaaacctattgacccaaatagccaaaatgtctattcccaaccatacaacttcattattcaagtgggaaatatctggtgaggctgaggagctctgtaagcactgagaggctggccatcaaagacacatgagaacttccaatactgtatacccacattcatcaacaattgttgccataacaccacataaaaatcaactcccaaagcttcctgggttataacagcaaatgtttatggtttactcatgagtatgcacatcgatttcttgctcacaggactgcaggccagctggtcccaactctgtctgcttcaggttaaaaatcaggttcatgtcagctccttgtacctttccttccagaacctaagatcaagatgcagaatcatggtcatgttcatcccatggcaaaatgcagaaacacaatagggctagagaaaactagctgtgattttttttttttttttttttgaggcggagtctcactctgtcgcccaggctggagtgcaatggcacgatctcagctcactgcaagctccgcctcccaggttcacgccattctcctgcctcagcctccctagtagctgggactacaggtgcccgcga

SEQ ID NO: 673232 - DNA, 1570 bp, Homo sapiens
tgcatagttagagactgagctgagattctaacctctatctgtaagactccaaagcctgtgatttggaggaaccaggctgttggccaggtctcaggtttcctgatgcttaatcaagcccccttttcctgaatgaccttgtttctagatgattagataattccaagtggtctcttctttttctactttcaagcacagtccttcttcctttcctgtttgacttgctaattaattcaatgacttttccttgattcctattagtaggtaactccatgattgataccatctggaaaacatttatccaagtcttcagtggaaagtttcacagaacaggagatgtaaaaggagacccacaagaggtgctgtgtttgcataagtgataaattaccagcccttggattatctgccaggagctctccctccaggtttaggggcagcacctttcctgctgtggtgccagctgtattatttaccacatgtttagtaaagcttgtgccttctgaatgaagtgaggagggtggaagcactaagcttacataaactagctttcaatagagtctattttcctccaattgtctcacgtgccttttccctgggtagtcatgcttcatacttttagaagctcagatcccaacagctggagataaaactcccagtgtaatggaagaaaacatgttgatagttttaattggtccctaaagtgaaacccaaggaatgatttattggttgatggttttgaggcttccaacttagcagagctgggaaacatatgggaaagataaacacgctagaaatttgtggctatttgttagaaagttaattttagttcattcagtttatgataatcgaaaaatctctttaaattttatttattattattgaagttaatgatgcatctacttacctgcaggcatgaacacctgcatcttagaccatgctgtggttttctaccagtcttgaatcctccaaaggtcctaaacctattgacccaaatagccaaaatgtctattcccaaccatacaacttcattattcaagtgggaaatatctggtgaggctgaggagctctgtaagcactgagaggctggccatcaaagacacatgagaacttccaatactgtatacccacattcatcaacaattgttgccataacaycacataaaaatcaactcccaaagcttcctgggttataacagcaaatgtttatggtttactcatgagtatgcacatcgatttcttgctcacaggactgcaggccagctggtcccaactctgtctgcttcaggttaaaaatcaggttcatgtcagctccttgtacctttccttccagaacctaagatcaagatgcagaatcatggtcatgttcatcccatggcaaaatgcagaaacacaatagggctagagaaaactagctgtgattttttttttttttttttttgaggcggagtctcactctgtcgcccaggctggagtgcaatggcacgatctcagctcactgcaagctccgcctcccaggttcacgccattctcctgcctcagcctccctagtagctgggactacaggtgcccgcga

SEQ ID NO: 673233 - DNA, 1570 bp, Homo sapiens
tgcatagttagagactgagctgagattctaacctctatctgtaagactccaaagcctgtgatttggaggaaccaggctgttggccaggtctcaggtttcctgatgcttaatcaagcccccttttcctgaatgaccttgtttctagatgattagataattccaagtggtctcttctttttctactttcaagcacagtccttcttcctttcctgtttgacttgctaattaattcaatgacttttccttgattcctattagtaggtaactccatgattgataccatctggaaaacatttatccaagtcttcagtggaaagtttcacagaacaggagatgtaaaaggagacccacaagaggtgctgtgtttgcataagtgataaattaccagcccttggattatctgccaggagctctccctccaggtttaggggcagcacctttcctgctgtggtgccagctgtattatttaccacatgtttagtaaagcttgtgccttctgaatgaagtgaggagggtggaagcactaagcttacataaactagctttcaatagagtctattttcctccaattgtctcacgtgccttttccctgggtagtcatgcttcatacttttagaagctcagatcccaacagctggagataaaactcccagtgtaatggaagaaaacatgttgatagttttaattggtccctaaagtgaaacccaaggaatgatttattggttgatggttttgaggcttccaacttagcagagctgggaaacatatgggaaagataaacacgctagaaatttgtggctatttgttagaaagttaattttagttcattcagtttatgataatcgaaaaatctctttaaattttatttattattattgaagttaatgatgcatctacttacctgcaggcatgaacacctgcatcttagaccatgctgtggttttctaccagtcttgaatcctccaaaggtcctaaacctattgacccaaatagccaaaatgtctattcccaaccatacaacttcattattcaagtgggaaatatctggtgaggctgaggagctctgtaagcactgagaggctggccatcaaagacacatgagaacttccaatactgtatacccacattcatcaacaattgttgccataacaccacataaaaatcaactcccaaagcttcctgggttataacagcaaatgtttatggtttactcatgagtatgcacatcgatttcttgctcacaggactgcaggccagctggtcccaactctgtctgcttcaggttaaaartcaggttcatgtcagctccttgtacctttccttccagaacctaagatcaagatgcagaatcatggtcatgttcatcccatggcaaaatgcagaaacacaatagggctagagaaaactagctgtgattttttttttttttttttttgaggcggagtctcactctgtcgcccaggctggagtgcaatggcacgatctcagctcactgcaagctccgcctcccaggttcacgccattctcctgcctcagcctccctagtagctgggactacaggtgcccgcga

SEQ ID NO: 673234 - DNA, 1570 bp, Homo sapiens
tgcatagttagagactgagctgagattctaacctctatctgtaagactccaaagcctgtgatttggaggaaccaggctgttggccaggtctcaggtttcctgatgcttaatcaagcccccttttcctgaatgaccttgtttctagatgattagataattccaagtggtctcttctttttctactttcaagcacagtccttcttcctttcctgtttgacttgctaattaattcaatgacttttccttgattcctattagtaggtaactccatgattgataccatctggaaaacatttatccaagtcttcagtggaaagtttcacagaacaggagatgtaaaaggagacccacaagaggtgctgtgtttgcataagtgataaattaccagcccttggattatctgccaggagctctccctccaggtttaggggcagcacctttcctgctgtggtgccagctgtattatttaccacatgtttagtaaagcttgtgccttctgaatgaagtgaggagggtggaagcactaagcttacataaactagctttcaatagagtctattttcctccaattgtctcacgtgccttttccctgggtagtcatgcttcatacttttagaagctcagatcccaacagctggagataaaactcccagtgtaatggaagaaaacatgttgatagttttaattggtccctaaagtgaaacccaaggaatgatttattggttgatggttttgaggcttccaacttagcagagctgggaaacatatgggaaagataaacacgctagaaatttgtggctatttgttagaaagttaattttagttcattcagtttatgataatcgaaaaatctctttaaattttatttattattattgaagttaatgatgcatctacttacctgcaggcatgaacacctgcatcttagaccatgctgtggttttctaccagtcttgaatcctccaaaggtcctaaacctattgacccaaatagccaaaatgtctattcccaaccatacaacttcattattcaagtgggaaatatctggtgaggctgaggagctctgtaagcactgagaggctggccatcaaagacacatgagaacttccaatactgtatacccacattcatcaacaattgttgccataacaccacataaaaatcaactcccaaagcttcctgggttataacagcaaatgtttatggtttactcatgagtatgcacatcgatttcttgctcacaggactgcaggccagctggtcccaactctgtctgcttcaggttaaaaatcaggttcatgtcagctccttgtacctttccttccagaacctaagatcaagatgcagaatcatggtcatgttcatcccatggcaaaatgcagaaacacaatagggctagagaaaactagctgtgattttttttttttttttttttgaggcggagtctcactytgtcgcccaggctggagtgcaatggcacgatctcagctcactgcaagctccgcctcccaggttcacgccattctcctgcctcagcctccctagtagctgggactacaggtgcccgcga

SEQ ID NO: 673235 - DNA, 1493 bp, Homo sapiens
cttacactagtcttaaggttgttgtatcccaatgaattttgactatattgatttgttagaacaggaaataagctgtaagactggacactgtctagaaagcatgtggattcacttagcacttgtatctatagtctaggctttacaaaggcagtccagtacattttacctaatatttggtgcctgttttctgagcttccataagtgtactttcagttagaaattttttaaaaaggccaggcatggtgactcacgcctgtaatcccagcactttgggaggccaaggtgggcagatcgcgaggtcaggagttcgagaccagccagttcaagaccagcctggccaacatggtgaaaccctgtctctactaaaattacaaaaattagctggccttggtggcgtgggcctgtaatcccagctattcagtaggctgaggcagcagaattgcttgaacccaggaggcagaggttgcagtgagccaagatagtgccactgcactccagcatgggtgacagagtgagactgtatctcagaaaaaaaaaaaaaagaaattaaaaaaagtccctttaaagaagtttgtattatatctaagagttttcttattaggctatctgacttttgactttcttaaaaaataagctggggaatggaaaaaatggaccttggtaactttcttgagatcagctcacataatctcagctatcttggccaaaactcatgtaaaggaaccaaaactaataatgttgcaatattgaaagacacagaaatgtgaatcattgtagaggcatctcattgggacttttggcaaagttgtaagcaaataaatttaagggccatattaagaagatgttatgtaatgtttctaaatctatcacatttccatttataaaatgttatataagaatgatcaaaatgtgcatataatatatggttattcataattaattgaatagaaaaactaagtagtataaaatgtggtccactttagaaataaatgcttaacagtttcactggcatgttatttccttattcaaaaggctaaatgttagaaagtctgcttactatttagaaaacataaccaaataaaatttgaaagcaactcttttctctaaaaaactataaactatgaatgcatattttaaataccagaaattccatttagagtttttcttctttattccaaaatactgcatgtttttcatacattatgtattagtctgttctcacactgctaataaagacacacccaggactgggtaggttataaagaaaaagaggtttaaaggactyacatttccacaggttggggaggactcacgatccatggcagaaagtgaaaggcatgtcttacatggcgacagacaagagagaatgaaagccaagcgaaaggggaaaccccttataaaatcatcacatctcatgggacttattcactaccacaagaacagtatggagaaaactgcccccatgattccattatctcccattggcccctccc

SEQ ID NO: 673236 - DNA, 2371 bp, Homo sapiens
ttcaggaattcaacttagagctgatctgttgagagaaccatcaaatgaatcaagtggagaaaatttgagattaatttatatataaaatatatattagaaaatagccaagaagtagctcatactatcttatggattaatacttaaaattaacataagtacaaccatgacaaaagtgttaaggaaaaaatatgccacatgaacaggtggtctaataagaaaaatttcatatttcattcatagataggcttcaacttttaaagaaaatttggtataattccatcaaacttttatcatcatttaatccataaacattatgcaaaaactaaatatttttctaaaacaattctaggcattaaagtatcattttggaggaaatgtattgcaatattatttttactttctttaagcatttttcatgatgtgtaaagtgatgcccattacttctctctgggttttctctgctaattttttggtttaaaaaaatccttcaaattgtcactgagaaagccccaaattccgtgagaagaacaggtgttttcaagaaggaatttgaggcatgaggcaccagggagacttggcttatttcagcaaagcaaatgaagtggatgaggtttttgaaccctgctttcaccagaataaagcaagtttctccatgcattagtgtttctgagtcagaagggccttttctgcaacagttggcatagggctgctttatggttgcagtaaactccctttttaaaaaccttcatttatccctaaaaataaaggcacagaaaaggaaactataatgcgttttaaaggtattcttagtctatcagtttggcatttagctcgaacataacagctatttcaatgtgtaaatacacacacacacgcacacacacagatattaagaagttataggtacttaacaaagtcatcttttctgttaccctcaacatttctaggacaaagccaaaaaagtatctggagccatattttaaaacaaatgttattctctgaattataggcctgaagtctgttccggaaatagtctcatggccagtgtaattatggcttatatgagtcacggggcctactctaggcactgttcatcctatttataatctatccctggaacaaaaattcagaagctaaggaaacaatgataaagaacaatgtcaggtggagttcaacagacacagcctcctttcttataactcaatctcaaggatcccagcagacaggttagggagacgtcctgcttccttggaatccctcgacagttatgaggggacattcgggtaggtcactgcttcatttgaggtgtgaccttgctgggttattatagagaattggatcctactgaaaaatttggccacagcaatttactctgcagcagaataacgcacttcaccagagaagtgtcagattattgaattctttgtgctgaaatgtggtttgtacaagggtgtatatattggagtctacaagcctaatacagttcctacacattctgcctgccttcagtttacgagtcatcttgctgtgcgggaatttttgtacagcaacaatgtgttagctgaatgcgatggattttttttctattttctctcttttttattaaagactttttttttttttagagcagttttaggttcaccgcaaaattgagaggaagatacagagatttcccatctactccatgccttcatacattatctactcctgtattatctactttctctttagttagcagatcaaaagaaataaagatcaagatggtgaaaattattgctttaaatgttgcaaaaaaatttaaggtccaatttgcccgtaagaaaacgccagaaatatgtttggaatttcgtgtctgcatcatgtctctttctataattatgtatggactgcattaaactataagctcatggagagatggaactatgcataactgttgtgcacaattrgatccttaaacaggagatagcaagtattaaaaagtatcttttggtatgaatgaaatctgaagcttaaaatattctttcagaatgtaaggtattgcgccgctctcattgtttcactgtatatatcatttatctccagcaacttcacagcacctgccattgacaattttctatgatatcttagaatgaacgtctcaaaattccccacagatctaaaaggaagaagcttgtttgttctgctgaattttttagaaaaggggctatgcgctcataaatgaatgaactaagctggtaatataatggaagcctagcaaacactattttacttcttactcatttcatatatttatattcttcctggtcccttgataacacttcattttgtgaactggctgctctttctctatttctccttgtgttcctcctgc

SEQ ID NO: 673237 - DNA, 2371 bp, Homo sapiens
ttcaggaattcaacttagagctgatctgttgagagaaccatcaaatgaatcaagtggagaaaatttgagattaatttatatataaaatatatattagaaaatagccaagaagtagctcatactatcttatggattaatacttaaaattaacataagtacaaccatgacaaaagtgttaaggaaaaaatatgccacatgaacaggtggtctaataagaaaaatttcatatttcattcatagataggcttcaacttttaaagaaaatttggtataattccatcaaacttttatcatcatttaatccataaacattatgcaaaaactaaatatttttctaaaacaattctaggcattaaagtatcattttggaggaaatgtattgcaatattatttttactttctttaagcatttttcatgatgtgtaaagtgatgcccattacttctctctgggttttctctgctaattttttggtttaaaaaaatccttcaaattgtcactgagaaagccccaaattccgtgagaagaacaggtgttttcaagaaggaatttgaggcatgaggcaccagggagacttggcttatttcagcaaagcaaatgaagtggatgaggtttttgaaccctgctttcaccagaataaagcaagtttctccatgcattagtgtttctgagtcagaagggccttttctgcaacagttggcatagggctgctttatggttgcagtaaactccctttttaaaaaccttcatttatccctaaaaataaaggcacagaaaaggaaactataatgcgttttaaaggtattcttagtctatcagtttggcatttagctcgaacataacagctatttcaatgtgtaaatacacacacacacgcacacacacagatattaagaagttataggtacttaacaaagtcatcttttctgttaccctcaacatttctaggacaaagccaaaaaagtatctggagccatattttaaaacaaatgttattctctgaattataggcctgaagtctgttccggaaatagtctcatggccagtgtaattatggcttatatgagtcacggggcctactctaggcactgttcatcctatttataatctatccctggaacaaaaattcagaagctaaggaaacaatgataaagaacaatgtcaggtggagttcaacagacacagcctcctttcttataactcaatctcaaggatcccagcagacaggttagggagacgtcctgcttccttggaatccctcgacagttatgaggggacattcgggtaggtcactgcttcatttgaggtgtgaccttgctgggttattatagagaattggatcctactgaaaaatttggccacagcaatttactctgcagcagaataacgcacttcaccagagaagtgtcagattattgaattctttgtgctgaaatgtggtttgtacaagggtgtatatattggagtctacaagcctaatacagttcctacacattctgcctgccttcagtttacgagtcatcttgctgtgcgggaatttttgtacagcaacaatgtgttagctgaatgcgatggattttttttctattttctctcttttttattaaagactttttttttttttagagcagttttaggttcaccgcaaaattgagaggaagatacagagatttcccatctactccatgccttcatacattatctactcctgtattatctactttctctttagttagcagatcaaaagaaataaagatcaagatggtgaaaattattgctttaaatgttgcaaaaaaatttaaggtccaatttgcccgtaagaaaacgccagaaatatgtttggaatttcgtgtctgcatcatgtctctttctataattatgtatggactgcattaaactataagctcatggagagatggaactatgcataactgttgtgcacaattagatccttaaacaggagatagcaagtattaaaaagtatcttttggtatgaatgaaatctgaagcttaaaatattctttcagaatgtaaggtattgcgccgctctcattgtttcactgtatatatcatttatctccagcaacttcacagcacctgccattgacaattttctatgatatcttagaatgaacgtctcaaaattccccacagatctaaaaggaagaagcttgtttgttctgctgaattttttagaaaaggggctatgygctcataaatgaatgaactaagctggtaatataatggaagcctagcaaacactattttacttcttactcatttcatatatttatattcttcctggtcccttgataacacttcattttgtgaactggctgctctttctctatttctccttgtgttcctcctgc

SEQ ID NO: 673238 - DNA, 2046 bp, Homo sapiens
gttcactagtcctggaaagactttggctgaatataaagttctcagttcatactctttctccttaagtgtcacatagaaattgcttctctcttatttttggttggattttgatgtagggaaataggctagctttaaccttctcccttaaaattcttgttttgttaagtcactattgttgttgtttttgtttaagatgtatcttgatgttgaccattctgtgtcaattattcctcacacgtggtctatcctcacaatatgcttttaaagttttgttttgtttttcttgaaatacatcatcagttttatcctcacatatttttacactctaagcaaactataattaaatcatatttttgttttttaatctgggtactacagttgtgcttatgttgaacctcctttatctcctgtcactatgttttttcttctcgctccctttgttacagcactttttatttcttttcaacctgtattacaatttttcttcatgctcctcaatccttcactttatttttgtaatgagtttgtttcttacctttcatcgcaacrttaccacttttgtttcatctcatcctattgagaggtgacagcgtgctggcagccctcgcagcccttgctcactctcggtgcctccttggccttggcgtccactctggccacgcttgaggagcccttcagcctgctgctgccctgtgggagcccctctctgggctggccgagactggagccggctccctctgcttgcagggaggtgtggagggagaggcgcaggtgggaacccaggctgcgcatggcgctcacgggccagcatgaattccaggtgggtgtgggctcagcgggccacacactcagagtggccagccagctggtgccgccggccccaggcagtgaggggcttagcacctgggccagcagcggcagagggtgccccggtcccccagcagtgccagcccgctggcgctgcacttgaattctcgctgggccacagctgccccaccatggggcagggctcgggacctgcagcccaccatgccccagcctccgccccgccgtgggctcctgaacagccggaggctccccaacgagtgccgccccctgcttcatggtgcccaggcctgtcgaccacccaagggctgaggagtgcaggctcacggcgcgggactggtgggcagctccacctgcagccccggagcgggatccactaggtgaagccagctgagctcctgagtctagtggggacttggagaacctttatgtctagctaagggattgtaaatacaccagtcagcactctgtgtctatctcaaggtttgtaaacaaatcaatcagcaccctgtgtctagctcaaggtttgtaaatgcaccaatcagtgctctgtgtctagctaatctagtggggacttggagaacctttatgtctagctaagggatcgtaaatacaccaatcagcactctgtgtctagctcaaggtttgtaaatgcaccaatcagtgctctgtgtctagctaatctagtggggacttggagaacttttgtgtctagctcagagattgtaaacacaccaatcagcatcctgtcaaaacggaccaatcagctctctgtagaatgaaccaatcggcaggatgtgggtggggccagataagggaataaaagcaggctgccagagccaacagtggcaacctgctgaagttctcttccaccatgtggcacctttgttttttcaggctttgcaataaatcttgctgctgctcactcattgggtctgcactgcctttatgagctgtaacactcagtgcgaagatctgcaacttcactccggaggccagtgagaccacgaacccaccagaaggaaaaaactacgaacatatccaaacatcagaaggaacaaactcctgacgcaccaccttcaagaattgtaacactcacatgagggtctgcggcttcattattgaagtcagtgagaccaagaacccaccaattctggacacactgttatctagcatcacattcttgagattttgcatctttgctgcttggtttttcttcaa

SEQ ID NO: 673239 - DNA, 2046 bp, Homo sapiens
gttcactagtcctggaaagactttggctgaatataaagttctcagttcatactctttctccttaagtgtcacatagaaattgcttctctcttatttttggttggattttgatgtagggaaataggctagctttaaccttctcccttaaaattcttgttttgttaagtcactattgttgttgtttttgtttaagatgtatcttgatgttgaccattctgtgtcaattattcctcacacgtggtctatcctcacaatatgcttttaaagttttgttttgtttttcttgaaatacatcatcagttttatcctcacatatttttacactctaagcaaactataattaaatcatatttttgttttttaatctgggtactacagttgtgcttatgttgaacctcctttatctcctgtcactatgttttttcttctcgctccctttgttacagcactttttatttcttttcaacctgtattacaatttttcttcatgctcctcaatccttcactttatttttgtaatgagtttgtttcttacctttcatcgcaacgttaccacttttgtttcatctcatcctattgagaggtgacagcgtgctggcagccctcgcagcccttgctcactctcggtgcctccttggccttggcgtccactctggccacgcttgaggagcccttcagcctgctgctgccctgtgggagcccctctctgggctggccgagactggagccggctccctctgcttgcagggaggtgtggagggagaggcgcaggtgggaacccaggctgcgcatggcgctcacgggccagcatgaattccaggtgggtgtgggctcagcgggccacacactcagagtggccagccagctggtgccgccggccccaggcagtgaggggcttagcacctgggccagcagcggcagagggtgccccggtcccccagcagtgccagcccgctggcgctgcacttgaattctcgctgggccacagctgccccaccatggggcagggctcgggacctgcagcccaccatgccccagcctccgccccgccgtgggctcctgaacagccggaggctccccaacgagtgccgccccctgcttcatggtgcccaggcctgtcgaccacccaagggctgaggagtgcaggctcacggcgcgggactggtgggcagctccacctgcagccccggagcgggatccactaggtgaagccagctgagctcctgagtctagtggggacttggagaacctttatgtctagctaagggattgtaaatacaccagtcagcactctgtgtctatctcaaggtttgtaaacaaatcaatcagcaccctgtgtctagctcaaggtttgtaaatgcaccaatcagtgctctgtgtctagctaatctagtggggacttggagaacctttatgtctagctaagggatcgtaaatacaccaatcagcactctgtgtctagctcaaggtttgtaaatgcaccaatcagtgctctgtgtctagctaatctagtggggacttggagaacttttgtgtctagctcagagattgtaaacacaccaatcagcatcctgtcaaaacggaccaatcagctctctgtagaatgaaccaatcggcaggatgtgggtggggccagataagggaataaaagcaggctgccagagccaacagtggcaacctgctgaagttctcttccaccatgtggcacctttgttttttcaggctttgcaataaatcttgctgctgctcactcattgggtctgcactgcctttatgagctgtaacactcagtgcgaagatctgcaacttcactccggaggccagtgagaccacgaacccaccagaaggaaaaaactacgaacatatccaaacatcagaaggaacaaactcctgacgcaccaccttyaagaattgtaacactcacatgagggtctgcggcttcattattgaagtcagtgagaccaagaacccaccaattctggacacactgttatctagcatcacattcttgagattttgcatctttgctgcttggtttttcttcaa

SEQ ID NO: 673240 - DNA, 1970 bp, Homo sapiens
ttttataaatcacaatcaaacaacaaagctgttttattataaatctatctttagatacgataatctggttaggaagtaaaattattaacaaatgtagatttgggagttagttgtccatgaaaagttttcatagagattttgtagaataataaattatacaaatactagggagatatattctcctagtttataattttttttagtttcttatatcacaaaattatttttacctacattttatcaaattagaaataatagaggttaatcacaataattccaataaatctcagagaattatctttaacctagaaccagctaagaatttttggtgaattatttaccctaaatgacttgtgaaatagaaaaattctgggaaagatctttgtcttctgtataaaagaagaaaaatagaaaaagaaaaaatagattgagaggcattgtcctttattatattaatagaaggaagaatatggagaaatggcaaagagaaggtctaaaataggattcaataagatcttatgtctgcatgtctgttttgggaagaggaatgtgaataaagataattttgagaatgagcagccagaaatgtagataaaatcctgtgtagtctagtctcagaaagccaaggaaacccaagtgtttcaagattgagactgtaaacaatgccaagtctggaagatagctggtgtaacatattggtgatattgatgaaatctggtttatgaaatgttgtgggtgggaatgagcttgcagtcacataaaaaagagtgagaaatgagattcagtcagggaatgactcagtgtcattaggacacagtagtaatgaatgtgggctactctttccaaaacttttgctataaatagaagagttaagataacagtaaattcaggggaatacgaagtttaaaaatttttcttatttttgttttttgtggctgatgtttgtacaattagagagatataaaaaaagtttgaagtttgaatggaaattttcagaaagaggagaaccaaaaagcatagtccgtggaaataagtctttggtagaactgcaagaagctgtagtaggaaaccagggaattaaatttatacaagggagttacagtaatttcagtgtgattcaaatgaggaagaaagtaatatttttggaagcagctgaatttgtatgtttagtcacaaaagtagacaaatctcatctgtaaagagaggagagggttgtcaggtgaagagtttagggcaataaagatggcatgaaattgttaatgtgatgaacgtggtagaaacccaaataaggaacctaagtcttagagggagagatttgtgaatgaaagaataatgctgaaatataattgcttcctgtattctctctcttccaacaattaaatcacagaatgattctgctttctgaattgtttgtggttctactaaattttcagcccttatgaaatcaaataataaaatgaccttttatatcgattgtgtatcacagaccttcagtacaatgctggtacttggtgattaatatattcttttttttttttttttttttttttgagacggagtctcactctgtcacccaggctggagtgcagtggcgcgatgttggctcactgcaacctccgacttcgggttcacgccattctcctgcctcagcctcccgagtagctgggactacaggsgcccaccaccagacccggctaagtttttatattttttagtagagacggggtttcaccgtgttagctaggatggtctcgatctcctgaccttgtgatccgcccacctcggcctcccgaagtgctgggattacaggcctgagccaccgcgcctggcctaatatattctttttagattaaaaataaatgtgtttatgtacactatagatctcaattcgtttgacaaacaattgcaaatgactgagacatttgtcatagtaggaaacagcagtcagagaatggagaggttaaatctga

SEQ ID NO: 673241 - DNA, 620 bp, Homo sapiens
ttccacaaatcctctgaactagatattactttttagtattttacagatgaggtgactaaggtttggagtaggtagatgattctgccaaaatcttacaataagcatgtggaaacactgggaattcaaccttgcttgactcactttaaaacatatatccttagcattatcccctgtaacttgtctatgattacaatgctatgctcatattacttagkttacaatacaggactgaataggtagtcagatatttgacaaaagggccataaattataacctctatagtaaaataaaggaaaggttgataaggaaatttgttattgaggatgaagagttgaagactaatagcaaatgagcaagaacaaaagaaatggcattttacatgaaacgaaactgacaaatatccacagtgttcaaattaaaaatctaacagatgtgattattttgaattcccgaagaagcagattccgagacaaagatatgaatccaaataatttactttggagattttcccatgaaatacccgcagacgagtgcaaaagtgaaaacaaaaataaaggaatataatagaaaatatgttatcaagcaacttattgtgagcaagtaggactcaatgcttctgg

SEQ ID NO: 673242 - DNA, 620 bp, Homo sapiens
ttccacaaatcctctgaactagatattactttttagtattttacagatgaggtgactaaggtttggagtaggtagatgattctgccaaaatcttacaataagcatgtggaaacactgggaattcaaccttgcttgactcactttaaaacatatatccttagcattatcccctgtaacttgtctatgattacaatgctatgctcatattacttaggttacaatacaggactgaataggtagtcagatatttgacaaaagggccataaattataacctctatagtaaaataaaggaaaggttgataaggaaatttgttattgaggatgaagagttgaagactaatagcaaatgagcaagaacaaaagaaatggcattttacatgaaacgaaactgacaaatatccacagtgttcaaattaaaaatctaacagatgtgattattttgaattcccgaagaagcagattccgagacaaagatatgaatccaaataatttactttggagattttcccatgaaatacccgcagacgagtgcaaaagtgaaaacamaaataaaggaatataatagaaaatatgttatcaagcaacttattgtgagcaagtaggactcaatgcttctgg

SEQ ID NO: 673243 - DNA, 636 bp, Homo sapiens
agatgagtcacttatctcagtaaatcctgccttaacacaaccatgtaggtttttctgggttttttgttttgttttgtttttgagacagagtttcgctcttgttgcccagcctggagtgcactggcgcaatctcrgctcactgcaacctccgcctcctggcagttgctcccttcaagcaatcctcctgcctcagcctcctgagtagctgggattacaggcatgcgccactatgcccagctaattttgtatttttagtagagacagaatttcttcatgttgatcaggctggtctcgaactcctgacctcaggtgatccgcccgcctcagcctcccaaagtgttgggattacaggtgtgagccaccgcacccagctgggatgtttgttaaaagtatatatattcttgaaaataaagttaattcattaaattaaaaaagtttgtttctaggctctactccaaaattacagaatcagattctccagaatcttccttcaaataggaaacacctaaataagatgcaaacttaatttttctacaatgcaacaattttgttaaatataggatgcacatgaagtataccattaagccatcttcccttaagtgtaataacttattacagtctaacgacttcccagtt

SEQ ID NO: 673244 - DNA, 2704 bp, Homo sapiens
  misc_feature 2650, 2669: n = A,T,C or G
tagatcacattttgttcattcatccattgatggatacttgggttgcttcccgattagctattgtgaataatgctgctatgaacatgggtgtacaaatatcgctttgatattctggtttcagttctttggggtatataccccgaagcacagttgtgggatcctatcttgtctcttgttttctctttgcttccatgttttttctcattgtttcgtgggaatactgatattatatattcaagtatttgttgattacatgcactgtacctgacttgtttaaagcctgatgtcttgagtactgtgcacccctgtgcctggctgagtagtggaggaactttgaaagggtctgttctggagagggggtgctgctctggagaggcggtgctgctttggagatggattaatcaggaacttgggtgctgattctaggaggtactgcatctagaaagatgggaggtggggagtgcaacttccccaattttgcctttaacttcagatccttggggtgggtgcattgcttctcctgggatggaggggtgccggggagcccctgaccaggacctggagcaggtccacacaggcactggatttgtcctttactttgggcccaggctgcactcttgattccacctcctcacactggcttcagctttctcaccctcagaatggaattcaaagcctctgcccctcccaggcagacaccaaggtatgattttcaagtggttggtgtcttgtgactggcagctgataaacgggtgatacagtgtttctatacaggagtctgcagtgccaggctgcaggggcggacgggagggggtcgtggtgggtagcctgtggagcctgagggtgggaacagagagacttcttttgctgtaggtggaagcctgtctggctcctttccctcaaaggtcagacagcttgagagatgtttccatcctcccatgcatgaccytgaggcagttagctggtcagttactcactgtgctctctgccaactctaatgagccaggaagcctccccgtgcccaggcgtgctgtgatcacagtgttcaatgatggggtgaggctgcagcgtccagccagggactgtgccgcaggggccagaagatatctgacctactgtcactgcctcttccactctgttccacctgcactggagcgatgctatccgatgaacagatccatttattaattcaacacgtttgtattgagagcctgctgggtgccgggcactattgtcaacatgggtaatacagcagcaagcaaaacaagagaaacatctttgcaagcaggggagggggcctgcagtgttgggtgtgtggagttgttgctgggaagtagagaagctgagtaagagctggacaaagaggccaggcacagtggctcacccctgtaatcccagcactttgggaggccgagtttggcagatcacttgaggtcaggagttcgagaccagcctggacaacatggggaaacgccgttcctactaaaaatacaaaaattagctgggtatggtggtgcatgcctgaaatcccagctacttgggaggctgaggcacgagaattgcttgaacccgggaggtggaggttacagtgagccaagatcacacaccattgtaccccagcctgaatgacaaagcaagactttgtctccaaaaaaaaaaaaaaaaaaaaaaaatagagaaaaggaaagctggatgaaaagagatagccaagcccatgtctacggaaaagcattcttgactgagtgaacgaaagtacaaagcctcaaaggagggagcatgcctaggtagccccctaaacctggtgaggctggtgcgtggggcaccctccatggaaaggagttgggcaaggagggaggaggtgctggccagtaaagcacgtgtgtctttgtgcgtcaaagcaaggacccgggctctccccgtaagtgagaagagtccatggaggttttggggctgaggaggagttttacagatgaccggtctgttcttggcacttgcaattagcggaccgtctgtatccgagtgttgatcgggtggattctaaccctgtgggagaactccccagcccgtagcctgcgctcactgtacctggcagttgtattaatgacgtcaaatgcacagtccagcttgagtcccctctagaacgtgggcagcggacactaagccgagaggaatcgctgtgggttggcagacactgtggagactgactcctggacaggctgtggaatgtgtggaagcaggtacagcccaggcccgcgctgaagttcggcagggaagccagaggagtccgcagcccgggagacctggcctacagcggagagagtcagtccatgccagtggtgggatgtggctgcaaaaaatggtcggattcatggaagtctggtgtccatctggcaggcgttagtggtcccacgaatacagctgtgtgccttgaacacatactgcagagcttccagagagcaccagggctgtgggggctagagactgtgtctcgtgcggaagcgtggctgaggaggggcttgacaggctcttcgtcactgtgcggagccttcgaaggacttggatgtgcttgagaccccttcccctaattgctgtgtagggcaggggtggacatcccggggatcgtggagtctagggagccagtctgacgggnatggttttagaagccgtangatgtgggggtttctggctgaagtagccagaattc

SEQ ID NO: 673245 - DNA, 614 bp, Homo sapiens
ctcttaaacactaggaactgcagcagctatggagaggcagcgagcccaaggtgcccagtctgggattcggggagggtgaaccaccatcacacatccattcagtaactcctacttcgtatrtgcctggcacacagctcagcgctttcactaaacctgttccatttaattctcagaacaactctgggaggcatctcatccccttgactgcacccttaaggaaaccaaggctgggaaaagtcaagagcatccagctaatgagtagaaaagccaacattttaattcatccatatgcttcctaaagtcatggcttttcccctaatctgtgaattaattgtaactctggtaactatggcgcccacataatttagggagaaaagaaggattaaacagaatcaaactgctggggctagaggaaaacactcaatgatgctacccaccattgaggtctctgagcccatatttcctgtgggatgaggaacgactgggcatctatagtgggcaagggcgcagtttttgtttaagttgctcaacatcttagatatggtttggatttgtgtctctgtccaaatctcatgtcgaattggaggaggggcctagtaggaggtgactgaatc

SEQ ID NO: 673246 - DNA, 1608 bp, Homo sapiens
gcccagaaagcaaactcactcctggaattctagcctttgcaaaatttatggcttgagcaaaaagtcctttgcttgttgcaacagttcagctccacatgactactggagtagactccaagttttattgatcagatattgcaatgtattatttcttcctaaaataacatattggctgtttcagacgtacacactggggagtgaaagagcaacagaccataygctaactggaatataaatacagaaagaaggcatccagttgaaacagctttgccacaagattctctcgtagaaaattctttccaaaactcttctcttttatgctgagaagaggaggtctacagcctagggttaagaggtcagaaggactcagagataagaagcatctaggtttctgggctgggcgcggtggctcacgcctgtaatcccagcacttggggaggctgaggtgggtggatcacgagatcaggagatcgagaccatcctggctaacacggtgaaaccccatctctactaaaaatacaaaaaattagccaggtgtggtggcacatgcctgtagtcccagctactcgggaggttgaggcaggagaatcgcttgaacccaagaggcggtgattgcagtgagctgagattgcgccactgcactccagcctgggtgacagagtgagactctgtcaaaaagaaaagaaaagaagcatccaggtttccacctcagttccaccacgtaatcactgagatcttggatgaatcacttaacttccctcagcctcagcgtccccatctgtaaaaggaagataaagatggtatagaactcccaagctgttgtgaaaataaaatgagattttgcatgtagagaatacagcaaaatgcttgctatctggtagagattcagtaatgccctcccttccctaacatagttcatggttctacaaattgctttacacatagacggctagtcctgagaaaaatgaggtggaaatcaatgtaatgtttagacagtctaaggctttgctctttcagttattcattccaccaacattaattctcaaactcactttatgccacacacagaaccaagtgtgggggctgcaagaatgattcctgctagcaagaggcccttagctaaaaaaaacacctggccaagagaaagagaacgaaaaagagacaataagcagatgattgcaatgagatgtggtaagcacaacagaagctgtatcaacatttgcctttcaacagttaattatggctagctgtggtggctctcacatgtaatctcagcactttgggaggccaagacgagtggattgcttgaactcagagttcaagaccagcctgagcaacatggtgaaaccttatctctacaaaaaaaatacaaaaaaaaatttagccaggcacacgcctgtagtcctagctattctggaggctggggtgggaggatcgcttcagcccaggaggcagaggctgcagtgagctgagattacaccaatgcactctagcgtgggtgacagagcaagatcctgtctcaaaaaaaagttaattacagcagttaagcagttagatgtcagcctgcctgggtttaaatgttgtgtctaccacttattggccatatga

SEQ ID NO: 673247 - DNA, 1608 bp, Homo sapiens
gcccagaaagcaaactcactcctggaattctagcctttgcaaaatttatggcttgagcaaaaagtcctttgcttgttgcaacagttcagctccacatgactactggagtagactccaagttttattgatcagatattgcaatgtattatttcttcctaaaataacatattggctgtttcagacgtacacactggggagtgaaagagcaacagaccatacgctaactggaatataaatacagaaagaaggcatccagttgaaacagctttgccacaagattctctcgtagaaaattctttccaaaactcttctyttttatgctgagaagaggaggtctacagcctagggttaagaggtcagaaggactcagagataagaagcatctaggtttctgggctgggcgcggtggctcacgcctgtaatcccagcacttggggaggctgaggtgggtggatcacgagatcaggagatcgagaccatcctggctaacacggtgaaaccccatctctactaaaaatacaaaaaattagccaggtgtggtggcacatgcctgtagtcccagctactcgggaggttgaggcaggagaatcgcttgaacccaagaggcggtgattgcagtgagctgagattgcgccactgcactccagcctgggtgacagagtgagactctgtcaaaaagaaaagaaaagaagcatccaggtttccacctcagttccaccacgtaatcactgagatcttggatgaatcacttaacttccctcagcctcagcgtccccatctgtaaaaggaagataaagatggtatagaactcccaagctgttgtgaaaataaaatgagattttgcatgtagagaatacagcaaaatgcttgctatctggtagagattcagtaatgccctcccttccctaacatagttcatggttctacaaattgctttacacatagacggctagtcctgagaaaaatgaggtggaaatcaatgtaatgtttagacagtctaaggctttgctctttcagttattcattccaccaacattaattctcaaactcactttatgccacacacagaaccaagtgtgggggctgcaagaatgattcctgctagcaagaggcccttagctaaaaaaaacacctggccaagagaaagagaacgaaaaagagacaataagcagatgattgcaatgagatgtggtaagcacaacagaagctgtatcaacatttgcctttcaacagttaattatggctagctgtggtggctctcacatgtaatctcagcactttgggaggccaagacgagtggattgcttgaactcagagttcaagaccagcctgagcaacatggtgaaaccttatctctacaaaaaaaatacaaaaaaaaatttagccaggcacacgcctgtagtcctagctattctggaggctggggtgggaggatcgcttcagcccaggaggcagaggctgcagtgagctgagattacaccaatgcactctagcgtgggtgacagagcaagatcctgtctcaaaaaaaagttaattacagcagttaagcagttagatgtcagcctgcctgggtttaaatgttgtgtctaccacttattggccatatga

SEQ ID NO: 673248 - DNA, 1608 bp, Homo sapiens
gcccagaaagcaaactcactcctggaattctagcctttgcaaaatttatggcttgagcaaaaagtcctttgcttgttgcaacagttcagctccacatgactactggagtagactccaagttttattgatcagatattgcaatgtattatttcttcctaaaataacatattggctgtttcagacgtacacactggggagtgaaagagcaacagaccatacgctaactggaatataaatacagaaagaaggcatccagttgaaacagctttgccacaagattctctcgtagaaaattctttccaaaactcttctcttttatgctgagaagaggaggtctacagcctagggttaagaggtcagaaggactcagagataagaagcatctaggtttctgggctgggcgcggtggctcacgcctgtaatcccagcacttggggaggctgaggtgggtggatcacgagatcaggagatcgagaccatcctggctaacacggtgaaaccccatctctactaaaaatacaaaaaattagccaggtgtggtggcacatgcctgtagtcccagctactcgggaggttgaggcaggagaatcgcttgaacccaagaggcggtgattgcagtgagctgagattgcgccactgcactccagcctgggtgacagagtgagactctgtcaaaaagaaaagaaaagaagcatccaggtttccacctcagttccaccacgtaatcactgagatcttggatgaatcacttaacttccctcagcctcagcgtccccatctgtaaaaggaagataaagatggtatagaactcccaagctgttgtgaaaataaaatgagattttgcatgtagagaatacagcaaaatgcttgctatctggtagagattcagtaatgccctcccttccctaacatagttcatggttctacaaaytgctttacacatagacggctagtcctgagaaaaatgaggtggaaatcaatgtaatgtttagacagtctaaggctttgctctttcagttattcattccaccaacattaattctcaaactcactttatgccacacacagaaccaagtgtgggggctgcaagaatgattcctgctagcaagaggcccttagctaaaaaaaacacctggccaagagaaagagaacgaaaaagagacaataagcagatgattgcaatgagatgtggtaagcacaacagaagctgtatcaacatttgcctttcaacagttaattatggctagctgtggtggctctcacatgtaatctcagcactttgggaggccaagacgagtggattgcttgaactcagagttcaagaccagcctgagcaacatggtgaaaccttatctctacaaaaaaaatacaaaaaaaaatttagccaggcacacgcctgtagtcctagctattctggaggctggggtgggaggatcgcttcagcccaggaggcagaggctgcagtgagctgagattacaccaatgcactctagcgtgggtgacagagcaagatcctgtctcaaaaaaaagttaattacagcagttaagcagttagatgtcagcctgcctgggtttaaatgttgtgtctaccacttattggccatatga

SEQ ID NO: 673249 - DNA, 670 bp, Homo sapiens
  misc_feature 199: n = A,T,C or G
atgatggcaagctttctctgtgccagcccgttccatgtacgaactcacttattactggatatatttgagggttttagtgtcatgggtgtatttgacctgaaactaaacctttgaagggtttcaggtcacccagtcccaatattcagacaataattctgggtcagagctgatcagggaggaagatgagttttctaggcanagacctaacacatagcagggaatgaggatggccacaacccgggaaggaaagggaaagaaaggaacagagagggccatgcacggtggctcatgcctataatcccagcactttgagaggtcaagacaggtggatcatgaggtcaagagatcaagaccatcctgaccaacatggtgaaaccccgtctgtactaaaaaatacaaaaaatatccaggcgtggtggcacacacctgtagtcccagctactcaggaggctgaggcaagagaattgcttgaacccagaaggcggaggttgyagtgagccaagattgcgccgctgcactccagcctggcaacagagcgagactccgttgaaaagaaaagaggaacagagaggaatgagatgtcggggtttgatggcagcagaggctgtcagccagtccatgctggtggactcacccccttcctgcactggcagggttagggctctggaaa

SEQ ID NO: 673250 - DNA, 670 bp, Homo sapiens
  misc_feature 199: n = A,T,C or G
atgatggcaagctttctctgtgccagcccgttccatgtacgaactcacttattactggatatatttgagggttttagtgtcatgggtgtatttgacctgaaactaaacctttgaagggtttcaggtcacccagtcccaatattcagacaataattctgggtcagagctgatcagggaggaagatgagttttctaggcanagacctaacacatagcagggaatgaggatggccacaacccgggaaggaaagggaaagaaaggaacagagagggccatgcacggtggctcatgcctataatcccagcactttgagaggtcaagacaggtggatcatgaggtcaagagatcaagaccatcctgaccaacatggtgaaaccccgtctgtactaaaaaatacaaaaaatatccaggcgtggtggcacacacctgtagtcccagctactcaggaggctgaggcaagagaattgcttgaacccagaaggcggaggttgtagtgagccaagattgcgccgctgcactccagcctggcaacagagcgagactccgttgaaaagaaaagaggaacagagaggaatgagatgycggggtttgatggcagcagaggctgtcagccagtccatgctggtggactcacccccttcctgcactggcagggttagggctctggaaa

SEQ ID NO: 673251 - DNA, 2756 bp, Homo sapiens
tctgatgttgggtaacatgggcgcttctactgaaggctttcccacactcctgataatcaaatggtttctttccagtatgaaccctctgatgctggataagagatgaactctggctgaaggctttcccacagtctttacaggtgtagggtttctctccagtgtagacttttgtatgttttgtaagagttgagctctggctgaaggcttcaccacattctttacacttgtagggtttttctccggtatgagttctgtcacataaatgtggcaaaactttcgtgtagttcagccctcattagacaccagagacttcacagtggagaatctccctgaatgtctggacaaatccactcagactcttcattttgttaaatgccaaagattatacttttataggttgttacagtggcgatgctttattatattttaagggatgaaaatccctcctctcctaccccggttattttctcttgcaacaaatccaagtgaagaaacactgaactgaaatctggactagcctaatagactctaaagctcaatttttatatgtatatgtgtgtatttttatctgtacctgaaatgactgctgtcaccatgcagtgattttaccccccttccctggcctcaggaataagccaagaaattctagttgtgcagaactgagcttgttgccccttcttgtactgatggaaatagtgccatgtccaaacaaaataaagaagctcatagctaattacatatcctaataccaccttcctataaaactttgccttaatctgtagtcattcctgcccccagctcataccctcctgtgggcagcttttgttcgctttacctcatcccactgttttgtgatcaccccccgggagatgagggacccagttaataggccagatgtcaagactgatgacatttcacacactaagagaacttgaaagtttactattcatacacagggtttctggggagagcargatagatgaaagctggtccaaaatggcaagaacagagaggaggctgggcctttaaagtagctagggagtggggctggagagcattcgatctgtgggcttgagggattcaagcttcctgccagtgctgggagctcaggagatgcccatggatttctttatctaaagcaccaggtgtgcggtggggcagtgtggaggaggggagaatagaaaatggtggaaacttaaatgctgtcaatggccagacatcaaaaatggggccaaactctgttacatctaccttttcagaaatcttttttcacttatctcaaaatagctctttaatgttattgtgtcttttttttttttttgagacagagtcttgctctgtcaccaggctggagtgcaatggcatgatctcagctcactgtgacctccgcctcccaggttcaagtgattctcctgcctcagcctcccaagtagctgggactacaggtgcccgtcaccacgcccggctaatttttgtattttttgtagagacagggtttcaccatgttggccaggatggtctcaatctcttgacctcatgatccgcccgtctcagcctcccaaagtgctgggattacaggcgtgagccactgcgcccggactattgtgtcttccgttgatgaggaatctattttgctttttccatctccactttcttagaattttcttttttttccctttccttaagcctgaaattataacagttctcagaaagtaagaaccatttaccttggaaactgtcagccttacatagtaactattatgcaatcccaacagaagagttagggaagattgagtcaacacttttagaaaacattaaaaaaaaaaggtcatatgaatttgtatcagactatcaccagattaagttacttgaggctgcctgatgaaaattcctgtatatggctctaagaaattttatgtgtacctaataaagccaggcattattttttggttgctgtgactcaacacttacatgcaaacttttttttttctttcaaatcttcctaagcttaaattgatgttagagtcacttttttggtttccatgaattattttccctgccttttttttttcttcctgttttagatgcatttcagttacctgagagtaatccaattgtataggattggagtcccttgactttcccatatcattcccagtgtactagccagaacctgagatttccctgctttctatttttctcactaaaagggctattctgaactctctcttctcacctgctttcctatccttctcttctgtttaaagaagtcggtgttagtacagcttgaaattcaatagggcttgaattacagaaggcacaactgaagttagagaagaaaggatttttgttctgaaaattagcggtgagacagaccactctgaataaatggtgatatctggaaataatttttgaaatgcccaaaatccttcgtaactttaagaaattgaaaaggggtggggagggtcgtctataagagtgtctgtcattagaataggacttcttaaagtaatgtttgttaacaattggtaacaaggtcatttccaaacatagttcctggagccagttggctttggattggtagaaaccattgttgttccttcagagtcctcatctttggtaatttattttagaacaaaagactgaagacagatgtccttgaacaaaaggtctgtcctctaatgggtggattgcatgaattcgtggattgtactgtagtgaattggtataattctcttgtagcctaaatataattt

SEQ ID NO: 673252 - DNA, 575 bp, Homo sapiens
ctcaggaggctgaggcaagagaatcgtttgaacctgggaggcgggggttgtggtgagccgtgatcatgccattgcactcgagcctgggcaacaagagtaaaactccatttcaaaaaaaaaaaaaaaaaagcaaaaacagaaacgaaaacaaaaaacaggagacaattatgtgctatgaaatgaatcctaatttgggctaatattcatgatgaacagattttatacttttactaggatattcagccttccttggttatcagaaaaatgcaaactaacaatgagacaccatgttttccaatcatattgatattttatttaaaaaataggargtattggcaaatgtgaagaaaaaggcattttcatacacttgttaaatgaaattgatgaatcctttttgcagggtaatttagtagcatgtatcaaaatttcaaatatgtcacttctttaacctaacaacttcacttttgggacaagatcctacaggaaaatatgacttgtgtaaacacatacacatatgtgttaaggacatttattacatgtagtatgtaacatacaataggctaataggttaaata

SEQ ID NO: 673253 - DNA, 592 bp, Homo sapiens
tgccctgtgtgtttgaccagtgttttataaccagaatcctacaagaaacttaaattagttctttttgtgcatttttagtagggatggggtttcacaatgttgcccaggctggttccaaactcctgagctcaagccatctgcctgccttggcctcccaaagtgctgggattacaggagtaatctggccaagtatttaacttctttatgcctgtttcctacatttggaaaatggggatgctttaagtacctagcatatagaattattatgagaatcaatgcctcacatatttacatgttgataaaattatactcatagracactactggaagcaaagataatattagttaaaatttagtgattactgcaaatatcattactattacaaacaacatagtatagacattactactactatagttatcttaaaaatctaaaataaaaattttacgtaatagcctaaagtaatctctcctgctctgccctggctcagccctagtgccggctctgcccctagtcctactacatccctggccctgacccttccctggtccagccactgccctggcccttcccatcttcaggccttaccat

SEQ ID NO: 673254 - DNA, 811 bp, Homo sapiens
tgaaaaatgatatcaaaaacgrcatgaaatgaaatgagatgatatgaaatgacataatgaaataaatgaagttagatgaaatgaaatgaaatagtgaaatgaaatgatgaaatgaaataatgagaatgaaatggaaatgagatgagatgagatttgatgaaatgatgagatgaaatgatgagacgatatgaaatgatgagatgagatgggataagatgaaatgatgagataaaatgatgagatgaaatgatgagatgaaatgaaatgatgaggtgaagtgatgcactgtcacgtgtgtgtctttttcccaaccaacaaaaattataattcattaattttaattttattatttaagaatattcttaagagttgaaggaaaaataatatctgtacattatgggttacaattaagtataaataatacataaatatattaaaacttacaaagaatatgtttcggaatcgaatataccatgcttctgtgatgacagttatttcatgctggttgtcacaattttacatgaaaaactaatgaaaaaatgtttttaactgtttctgaaaataagtttccaaaacagttttacattcaaaataggagaaagatgtctttgtgttccttaatctgatgagattttcacactctgcacatgataattgttagatttttattgtgttgataaattgtatatcaaataaaaagtgttattacctcttaaattaggatttttaggtgatataggcagaaaggaaggcaagtttttataactttgtctaaatgaactttctaaatgtctgagtattaaaagatagc

SEQ ID NO: 673255 - DNA, 542 bp, Homo sapiens
ggcatgcaccaccatacccagctaattttgtatttttagtagagacggggtttctccatgttggtcaggctggtctcgaactcccaacctcaggtgatccacccgccttggcctcccaaagtgctgggattacaggcgtgagctaccatccctggccccaacaatttaaaagtacaaaataatccaggaaatatgtggaaagctagaaatgtattagcaagggataagaataaaataaacatctatttgcttatatttgcaggaaaaaactaagtatacaaaagaaactaatataaaggactaaaaaggaagcayatcttttattgtatgtatttttatgttttttgatttttttcaagcaagttcatgttaacaggtaaaaaataaagcagttggttagttatataattcatcgagctaaaatggttgtcattaccatagaggctttacgttccaagcacttttcttatatatttatctttgtctgactctctgattgcaattttcacagaacaatacaactcttttcatggaaagaaaag

SEQ ID NO: 673256 - DNA, 651 bp, Homo sapiens
cagatgaatctgagtatccccctatgtgtcaggtcctgggctattcttgaatacagcatgatgcatacattatgcatatcttaaggatactacagcccagtcatcagaaaaccacttcagtgtgttccatgtagtaataggggaaagaatacggtcctatagaatcttatagacaagacacctaatccaatattggcaaatcagaaggctttgtaagggsgacatctatgttgaatccggaatactgaataagacttaagtacagacaagactgggtaatgaagaaagaaataggagaaaagttattatggtattacttaaggaactgtacattgttcagtatgacaggctggaggatatactttgacaagtgaggttgaagaggtgagtgagaaggaactcaagaaatgacatgcataatgcaattgttcattttcctcagggcaccaagtacgcttcaagatgagatgaaactatctaatttgagttttagtgtgactattgtgttgctgtttgaagaatggactgaaaggggaaaggctaaagaaagatcgtttatttattcaacaaatttttatttagtgctaactgtgaactaggtacaatttgggagacctgtagtaattccagtgacaactgaacgtattgaaa

SEQ ID NO: 673257 - DNA, 2382 bp, Homo sapiens
tttttagtagagatggggtttcaccatattggtcaggctgatctcaaactcctgacctccagtgatccacccacctcgacctcccaaagtgctgggattacaggagtgagccaacatgcccggccagacctctttgctttctaatctacacactttctgtgaaaggctttatttaggttgctggcttcaactatgacctgcatgcagatgaatctcagacccacctttccatcccagatttctcttctgggcctttgatcccgactgtgctacaggcacctcaaagccaacgtgttcaaaactgaagtcwccactgagtctggtcctcttctgggtgctttcttgttcagtggatgagcagctagccagttaaccaagataaactgggacacagtcttggtttcaacgtaccgtcttcacattatgtctaattagtggcagagtcctgtaaatgttatatttttaatatctctgatccatccccttcttttgtcactggctgaatttagaaacagttaccctactactctttttaaatccaaccttgatcccattaaaatccattcttcagcttaaaaaatagtaagtttttgaaaacacaaaaccagatcatgtcattcattgtccagtttaacacctttaataactcttcattgcctttagagaaaaattctaactcattagcatggtagagcaagtcctttctaatttgacccctactgactttccaaactcatcttgtaatacactctgccatttattacctgcagccatcactcaaattttagcagaccaccctcagtttgtggaaaaggccaagtgctctcctgcctctatatttttacacactctattattgctgtttggtacatccttcctgtccctttcacatttgtatatccttcaaaactcagggcaggcatcaactcctcagagaaatgttccagtttggtttcattgtctgtcttgtgagctcactgtaaatcctgtgcttagctcatagggctttttcatttatattaaaattattttgctccccaaactcctggagagcagggacctttatctctgatttctcagtgactgagaacacagtaattgttgttcagtaaatggaaaagaatgaatgaagatgaaaagaaaattagctgttgtgttacagcctaagaaagaacttgagattctgttctagctcatagtgagatttgagagagccactcagttttggtacttagaagatagaatcaattgtgatgatgatttctatttttcctttggacagattttgataatagaatatcctaggtatagaattttaggactagaatatatgttagaaattaaggatgtgtctactagccacatatattttagattttgtaatgtcaaagaaatataaaagtatatatacatgactaaaagacaagatgcaacatcctctgataattactcttgaagcaatcttgcttattattttcagtggtgtaatgtatataaaaatggacccattgtaataaagcttttcctaagatattcttctagaaaaattaacatttccttggctttattgtaatctgtaatgtttttgaaacatgactgttgtataagttcttaattaacaaagtacaaaataagaatcattgtaactatataatttcaaaatcaaaaggagaaaagtgctttcctttttttttttaccaattcagaaaattatttaccaattcagaaaatttaacaaccataagcaagtaagtttccattgccatttttagtctctaccttgtcaaaagtaatgattgaacagtaaactaattcagtcaactgagtgttttatctccttgacctataataatgggtttggcttttgcctgtatttcctggaattgtaaaaaaatcagccagtaattttgatatcctggaattattaggagctaaaatgtattatcaggcactacagttgcaaagttttacacaactattctttagacatttttggacctgtgtggaatggtaaaaacaatagatatataattcaaagtaaatttgaaaaccagtctaataaactgacatgtctaaagatgctttaatctaaaaagtcaaaagtaaacaaatagccaaaatataaacattagtactcccacaaaacctgcaaatccttctcaaatctaccacctaaatatttctcgtttgtgagaatttctacctgtaacctcgttcattggctcttgttctacctacttatggaggactctagcctcataaattcctggaacgtctgaaagtcctcacatatatatacacacaaacaagtctcatcaattactgagtggccttacccttgctctcctacactctccctcccctgtcctattttcccacctc

SEQ ID NO: 673258 - DNA, 2382 bp, Homo sapiens
tttttagtagagatggggtttcaccatattggtcaggctgatctcaaactcctgacctccagtgatccacccacctcgacctcccaaagtgctgggattacaggagtgagccaacatgcccggccagacctctttgctttctaatctacacactttctgtgaaaggctttatttaggttgctggcttcaactatgacctgcatgcagatgaatctcagacccacctttccatcccagatttctcttctgggcctttgatcccgactgtgctacaggcacctcaaagccaacgtgttcaaaactgaagtcaccactgagtctggtcctcttctgggtgctttcttgttcagtggatgagcagctagccagttaaccaagataaactgggacacagtcttggtttcaacgtaccstcttcacattatgtctaattagtggcagagtcctgtaaatgttatatttttaatatctctgatccatccccttcttttgtcactggctgaatttagaaacagttaccctactactctttttaaatccaaccttgatcccattaaaatccattcttcagcttaaaaaatagtaagtttttgaaaacacaaaaccagatcatgtcattcattgtccagtttaacacctttaataactcttcattgcctttagagaaaaattctaactcattagcatggtagagcaagtcctttctaatttgacccctactgactttccaaactcatcttgtaatacactctgccatttattacctgcagccatcactcaaattttagcagaccaccctcagtttgtggaaaaggccaagtgctctcctgcctctatatttttacacactctattattgctgtttggtacatccttcctgtccctttcacatttgtatatccttcaaaactcagggcaggcatcaactcctcagagaaatgttccagtttggtttcattgtctgtcttgtgagctcactgtaaatcctgtgcttagctcatagggctttttcatttatattaaaattattttgctccccaaactcctggagagcagggacctttatctctgatttctcagtgactgagaacacagtaattgttgttcagtaaatggaaaagaatgaatgaagatgaaaagaaaattagctgttgtgttacagcctaagaaagaacttgagattctgttctagctcatagtgagatttgagagagccactcagttttggtacttagaagatagaatcaattgtgatgatgatttctatttttcctttggacagattttgataatagaatatcctaggtatagaattttaggactagaatatatgttagaaattaaggatgtgtctactagccacatatattttagattttgtaatgtcaaagaaatataaaagtatatatacatgactaaaagacaagatgcaacatcctctgataattactcttgaagcaatcttgcttattattttcagtggtgtaatgtatataaaaatggacccattgtaataaagcttttcctaagatattcttctagaaaaattaacatttccttggctttattgtaatctgtaatgtttttgaaacatgactgttgtataagttcttaattaacaaagtacaaaataagaatcattgtaactatataatttcaaaatcaaaaggagaaaagtgctttcctttttttttttaccaattcagaaaattatttaccaattcagaaaatttaacaaccataagcaagtaagtttccattgccatttttagtctctaccttgtcaaaagtaatgattgaacagtaaactaattcagtcaactgagtgttttatctccttgacctataataatgggtttggcttttgcctgtatttcctggaattgtaaaaaaatcagccagtaattttgatatcctggaattattaggagctaaaatgtattatcaggcactacagttgcaaagttttacacaactattctttagacatttttggacctgtgtggaatggtaaaaacaatagatatataattcaaagtaaatttgaaaaccagtctaataaactgacatgtctaaagatgctttaatctaaaaagtcaaaagtaaacaaatagccaaaatataaacattagtactcccacaaaacctgcaaatccttctcaaatctaccacctaaatatttctcgtttgtgagaatttctacctgtaacctcgttcattggctcttgttctacctacttatggaggactctagcctcataaattcctggaacgtctgaaagtcctcacatatatatacacacaaacaagtctcatcaattactgagtggccttacccttgctctcctacactctccctcccctgtcctattttcccacctc

SEQ ID NO: 673259 - DNA, 672 bp, Homo sapiens
cagatctagaccatttctgttttcatagaaagtgttgacagtgttgttcaagagctttctgcgcagccatttcaatgtgttgtaaattttggccggcttcatgcagatacaatcagacagcacttgcttctggcccctattactcaccctttctgcaggacattgtgtggaatgcaggtgagaatatattatgcactcatacatgcccaacctggaattgtagggagttagcgtctgtatggcaacccttgagcaatgagggatgggagtcaaggggtaaatgctttgctcctattattccagtgtatttagtaatattcccagaatatttagtaaggcttctcagaagatccagggtaattctgcaaaggttgcccatgggagtggttgacttgaaagcatatttatgtattgactttctctcctcccaggtgtcacttaccacttaagaatgcctgtttcttgggctcacatttccaaatacattcaagcttttatcccaggttctgctttmagagaatgcaggctataacagaaagtatataataaaatgttagctcatatctttactgccaattagtaggaaaaatgacagaacaattggtaagtggtatttaagtatcagcagaccattctgcttttcattttcatagatgaaaaaattacatttat

SEQ ID NO: 673260 - DNA, 676 bp, Homo sapiens
cacagcgagtctttatccacttcatctggtttatctgctgagagtcctcaaggttcagttgtttctccattgttatttgcaatttatctgattctaaacctgacattatatctcactgtgatatacagttatctggctattgtttgtccaatgcaagtatattattttgcatccactttttttcttgcttttcgaagttgggaaccatgtctgtaacatcacaaaatctgatgtctgcaaatcatccccgtaactgcagagataagacaggactcattaccattcatgttatcctcacttggggagaactcaggtcaaatttctttacccttggataacacttttctttaattttaaacttgtcctttctctctctctctctctyttttttttttttttttgtatcttttttgaattcaagacattcattcacctcccacagcttgcttctctgattggaagaccatttctactggtggcaggcatagtgtaaatatttcatttttgaggtttgttcagcaaggactattcggactgaagatgaaatgccagctaaagtccctgtgtgtgaagaacatcatgttcagcctttttctcccaaggcaaattatttgcttaactaagggtttcttccttgattacagtccttattattgagatcttgtctgaatttccc

SEQ ID NO: 673261 - DNA, 1217 bp, Homo sapiens
aggcaaatctgacagataagtgctccagggagtattgaagaaggaatgatttacaccaatggcatgaactagagaaaacttcttgaagacaacttttgttccgagctttgaagaatgagtagcayttctcaatgtgagaaaggggagagagaattccatacagaggtaaacgtatggtaaacagagggttaaagtgcacagcattttttggggaaaacatcacccagggtagttggagtgtagggtgtgttatgggaagtagaaaaggaagtgaggccagcttgttaagacctttgaatgtgatattaaagggcttacatgagggctttaaaggcccttgattaaaacattctcatgattataactattttagaagtgtcattctggcttctggatactgacacaatggggacccaacaggggctcctggctatctctgtcaacctagttctgggagtgtctcagaaatggtgcaactgatggatctgagaatctaatgtgataattgtgagaagtttctagagggacagcaaatggttggagcccagtgtatgtgtttgcgactgcagactgcaggggaaaagggacagtgctgtaggtggggaagattttatcttagactattttcctcccttgtatttccatgggcagattatagtcttccccaactccactgcaagacagaacagtatcactagtcctgcaccagcaggagatgaagcttgtgggtacatcaggggaaaggaaggagataacaggtaaagatacacccacattccttctaagaactgccactcctcagcatagtattggaggtcctggccaatgtgataagacaagaagtactaggtataggatttgaaaggaagtagcaaaactgtcgttatgtacaggtgatctgattatctacatagaaaacctcacagacttaatagaaaaacttttagaactaatacttacgttcagcaaggatgtcaagaagaagatctgtttagaaaactcagttgcattcttctacaacagaacattcaaccaggaaacctaatagaaaataagataattttcagaagagcaacacaactaaaaaatcaacttaatattcaaaataaatttttggagaaaaatataaaactatcaaaggacattagacttaaggaaagagatatgccacattggtagacaagactacttaacatgtaaagataacaattctccca

SEQ ID NO: 673262 - DNA, 1217 bp, Homo sapiens
aggcaaatctgacagataagtgctccagggagtattgaagaaggaatgatttacaccaatggcatgaactagagaaaacttcttgaagacaacttttgttccgagctttgaagaatgagtagcatttctcaatgtgagaaaggggagagagaattccatacagaggtaaacgtatggtaaacagagggttaaagtgcacagcattttttggggaaaacatcacccagggtagttggagtgtagggtgtgttatgggaagtagaaaaggaagtgaggccagcttgttaagacctttgaatgtgatattaaagggcttacatgagggctttaaaggcccttgattaaaacattctcatgattataactattttagaagtgtcattctggcttctggatactgacacaatggggacccaacaggggctcctggctatctctgtcaacctagttctgggagtgtctcagaaatggtgcaactgatggatctgagaatctaatgtgataattgtgagaagtttctagagggacagcaaatggttggagcccagtgtatgtgtttgcgactgcagactgcaggggaaaagggacagtgctgtaggtggggaagattttatcttagactattttcctcccttgtatttccatgggcagattatagtcttccccaactccactgcaagacagaacagtatcactagtcctgcaccagcaggagatgaagcttgtgggtacatcaggggaaaggaaggagataacaggtaaagatacacccacattccttctaagaactgccactcctcagcatagtattggaggtcctggccaatgtgataagacaagaagtactaggtataggatttgaaaggaagtagcaaaactgtcgttatgtacaggtgatctgattatctacatagaaaacctcacagacttaatagaaaaacttttagaactaatacttacgttcagcaaggatgtcaagaagaagatctgtttagaaaactcagttgcattcttctacaacagaacattcaaccaggaaacctaatagaaaataagataattttcagaagagcaacacaactaaaaaatcaacttaatattcaaaataaatttttggagaaaaatataaaactatcaaaggacattagacttaaggaaagagatatgccayattggtagacaagactacttaacatgtaaagataacaattctccca

SEQ ID NO: 673263 - DNA, 439 bp, Homo sapiens
atggcctagattacagcttgatggtggaatgcctcatcagagaacacctgggccccgctcctccaaggctcaacatctcagagccagcttggtctatcctttgcccttagtgggtcatggactcccatgcttccatgggttaggccctcgccatgtcacactgcaaaggcttcccacaggcaaccagccccagccttccttgttacactgccaggctggctctcctgcagtaaccagatcaatcttgtcatagcctggcttgggtggcaccaccccaccacccatcygtacactccctttctccctagcatgccctgccccaccccaacaagacaaagcacagcctagctgtttttcatggccttgaagtgccccaacctgtcaaagtcttcaaaggcccccacatcccgccccagcctgccccatgcttcagccagct

SEQ ID NO: 673264 - DNA, 597 bp, Homo sapiens
caaatttgagaaacaaactcatttgtgacatattcctaaccctgtttaatgtggacgccctgaaaatatattgtttccaaatccacaaaattacactagatcatgaaaacagcagggatatgtgtcctgtggaaacagatgcacacagaaaagtgtttacagaaaatgaagggggtataatttgctgaagacaagttcaatgactaaaacacagactgttcaaaacattattgtgcctaattggtaggccctcaatttccatctcatcatgataaaaattatgctttttcatatttgaaaactattatattctgtttaaatatattttcatttatattttctaaaatggctattatccctttaaaaagcgagagcagatgtggaagaaaacacaaagcatgttagacacaccaagaagggaatataaagcagaaattwagagtcatactgtccttattttggtgatgtgttgagaaggaaagtgatcaatttagaatcattctggcctcacctgacaaagcactctggcgtaagtctgcatcctcagggaagaagcgagaagctgtctttcattatgtgtgcacatgtacacacaca

SEQ ID NO: 673265 - DNA, 645 bp, Homo sapiens
tgatgatgaattttattaaattaataacccttataacaatttcaaatgtaatactatctggatttgaacttcaatacttttcctaagtaaaattcttaaccatggtagaagttatgtttgttgatgttcactcatctataccctccatattctcagcaaagttggcataaatctgacctgaataaayagggttataacattatcaggcttgtaaaatactttatcaaatcaatgcatcagttaaagcaggggtccccagccctgggctgtgtgtggcctgttaggaatcgggccacacagttggtgagctgagaggcaggtgagtgagcattactgcctgagctccacctcttgttagatcagtagtggcattagattctcataggagtgcacactccattgggaactgcacatgcaagggatctaggttgcactctccttatgagaatctaactaatgcctgatggtctgaggtggagcagtttcatctcaaaaccataccttcttcccccatggaaaaattgtcttccacaaaaatggtccctgatgcaaaaaaggttggggactgctgagttaaagggtagggtttaatattctaattaaacaataataatagatgactacactatgcaaggcactgtctta

SEQ ID NO: 673266 - DNA, 629 bp, Homo sapiens
tttttttttgagacacagttttgctctgttgcccaggctggcgttcagtggtgcgatcttggctcactgtaacctctgtctcccaggctcaagcgactctttgcttcagcctctgaagtagctgggattacaggcacgtaccaccacatgcagctaacttttgtttttgtggtagaagtgggattttgctatgttgcccaggctggtcttgaactcctgggctcaaattatccacccaacttggcctcccaaartgggattacagaaatgagctgccatgcccagcttaatcccaatcttatagctgtttctgggccacgggaaggttccatgtgagcactaagttttgtggaaaatccgaccagggattcaggccttcccactgattacaccccagtggcactaagacactggccatccttgtcaatagggtgtctcggctaattagagtacagagtagctgcaagatccatatactagttgctacaatcagtgccctgctctttgtccccactttaccccagatagttcagctctcctggctctccctgatgggacgggagtgggctccctgggaagattcccagaccagtgaggagactgaatacacacctccaattccttcctct

SEQ ID NO: 673267 - DNA, 629 bp, Homo sapiens
tttttttttgagacacagttttgctctgttgcccaggctggcgttcagtggtgcgatcttggctcactgtaacctctgtctcccaggctcaagcgactctttgcttcagcctctgaagtagctgggattacaggcacgtaccaccacatgcagctaacttttgtttttgtggtagaagtgggattttgctatgttgcccaggctggtcttgaactcctgggctcaaattatccacccaacttggcctcccaaagtgggattacagaaatgagctgccatgcccagcttaatcccaatcttatagctgtttctgggccacgggaaggttccatgtgagcactaagttttgtggaaaatccgaccagggattcaggccttcccactgattacaccccagtggcactaagacactggccatccttgtcaatagggtgtctcggctaattagagtacagagtagctgcaagatccatatactagttgctacaatcagtgccctgctctttgtccccactttaccccagatagttcagctctcctggctctycctgatgggacgggagtgggctccctgggaagattcccagaccagtgaggagactgaatacacacctccaattccttcctct

SEQ ID NO: 673268 - DNA, 519 bp, Homo sapiens
tattcaacagcttaccattttccatggaaatgatctgaaatcaagaattttataggcaacctgcacttcctggattaaaacctatatatctacaatgtttaaaaataaagaagtgaataaaaactataaatctacaatgtttaaaaataaaaggaagcctaagttgtttgccttagcatttttatttaaacctaactggcacattagctgtcatataattgaagacttcccaattaacctaacatactattggcaatgtcagcttttttttttttwaatttttttttttttttagacagagtctcactctgtcacccatgctggagtgaagtggctcaattttggctcactgcaacttccgcctcccaggttcaagtgattctcctgcctcagcctcctgagtaactgggattacaggtatgggccaccatgtctggctaatttttgtatttttagtagagatggggtttcaccatgttggtcaggctggtctcgagctcctgacctcatgatccgccc

SEQ ID NO: 673269 - DNA, 519 bp, Homo sapiens
tattcaacagcttaccattttccatggaaatgatctgaaatcaagaattttataggcaacctgcacttcctggattaaaacctatatatctacaatgtttaaaaataaagaagtgaataaaaactataaatctacaatgtttaaaaataaaaggaagcctaagttgtttgccttagcatttttatttaaacctaactggcacattagctgtcatataattgaagacttcccaattaacctaacatactattggcaatgtcagcttttttttttttaaatttttttttttttttagacasagtctcactctgtcacccatgctggagtgaagtggctcaattttggctcactgcaacttccgcctcccaggttcaagtgattctcctgcctcagcctcctgagtaactgggattacaggtatgggccaccatgtctggctaatttttgtatttttagtagagatggggtttcaccatgttggtcaggctggtctcgagctcctgacctcatgatccgccc

SEQ ID NO: 673270 - DNA, 982 bp, Homo sapiens
agtactttgctgaaataccctccctttctctgtagcagattataaagtataggcaaaactctaaaagcaaagtagaccmaagtatattttaagccagtgtctaacttaggtataaatactatattttaaactgcgtataaatgctattaagttctatgaatacttcactatgttcaccacatgagatctacttcatgctttacactttacacacaagatcctttcaatatgtaaagttaatgtgttgtttcttacagtggcattgaaatgaggtatttttaggtgaagtcctcaggtatagcaatataatagtgtttaaataatttgtggtctcagaaatatggaaataagaactatgcagtcatctaattccacaattagtcaaagtttggatttaacttaatacaattcgggataaagtactggcattgttggttgccagcctggcatatttcccacccctcatttcttaatagtatccagattgggttagtgtatatattactactatacagtcagttcctctagggaaacagaccttatttccagatcaaaaggtggggccctgaatagtgtaagaatccaagttcatagtgattggttctggagacaatgagatatgaggaaatatatactgaaggctttggcaataggaagcttcctactcttaaggcagagcccaatgggaagacatttcaggctcccagagaatgagagtatatggaggcttaagtgctatgagcaacgattccattaccacaggaatgaagccaataaacttcattattgtttaggccgggcttagtgttacttgtggccagaagcatcctggttgatatatgatacatatgcaggatactccatgaaatttaaaaacctaagtaatttttaagcaattactacttataaggaaaaagagataaaacttaaatacattgtgggataaaaatgtgactttccatcctgtaataagtaaacataa

SEQ ID NO: 673271 - DNA, 982 bp, Homo sapiens
agtactttgctgaaataccctccctttctctgtagcagattataaagtataggcaaaactctaaaagcaaagtagaccaaagtatattttaagccagtgtctaacttaggtataaatactatattttaaactgcgtataaatgctattaagttctatgaatacttcactatgttcaycacatgagatctacttcatgctttacactttacacacaagatcctttcaatatgtaaagttaatgtgttgtttcttacagtggcattgaaatgaggtatttttaggtgaagtcctcaggtatagcaatataatagtgtttaaataatttgtggtctcagaaatatggaaataagaactatgcagtcatctaattccacaattagtcaaagtttggatttaacttaatacaattcgggataaagtactggcattgttggttgccagcctggcatatttcccacccctcatttcttaatagtatccagattgggttagtgtatatattactactatacagtcagttcctctagggaaacagaccttatttccagatcaaaaggtggggccctgaatagtgtaagaatccaagttcatagtgattggttctggagacaatgagatatgaggaaatatatactgaaggctttggcaataggaagcttcctactcttaaggcagagcccaatgggaagacatttcaggctcccagagaatgagagtatatggaggcttaagtgctatgagcaacgattccattaccacaggaatgaagccaataaacttcattattgtttaggccgggcttagtgttacttgtggccagaagcatcctggttgatatatgatacatatgcaggatactccatgaaatttaaaaacctaagtaatttttaagcaattactacttataaggaaaaagagataaaacttaaatacattgtgggataaaaatgtgactttccatcctgtaataagtaaacataa

SEQ ID NO: 673272 - DNA, 630 bp, Homo sapiens
tatttgtggaagggaaaggggtgaagagcgcaggagagaggaggaaatgtcattatttactcagcttggtttctgcagcgtgggccctgccgtggggcagctggagagggggctctaccacccctatcccagcctctgggtcacttatgggacccaatttggtaggtagggggtgagggtctgccgagggagcagcggcgttcagctggggtagccaccttgctgcgtcctgagggtacagattggagagactgctcctggggtctcaaaggcaggcgcacatccctgctgctggccagccatgtggttgcataagccactgtacccctggatgccaaaaaccagaaatagacctcacttttctgggggatgagaaggaattcagaactaacaataatagtaataacaggtgggcatgctggctcaaacctgtaatcccagcatcttgggaggctgaggcaggaggatggcttgaggccaggagtttgagaccagcctgggcaacatagcgagaccccatctcttaaaacaataacagcagtgacactgggtaacatgactgagcactcactgtggacctgcagtgtgctaaacatgtcaygtacagtactgtatctcatttaatcccca

SEQ ID NO: 673273 - DNA, 1298 bp, Homo sapiens
atcaagtcatgcgtgtattgtttagtttcagtggttctttcattcatggcacaaagtatggcaacatgaagggtagaattgttactgtctctgattgtttgctagtcttctatctttcaagtcacttgcacccatttagctaaattgctacaaaagaactaaaaggaataacctataaagcaagatttctgaggtggtgaagatacctcttttattcttggctatcagaaaaaaaggtttgtaccttcttatgcaaaaccccacaggctggagaagatttgatcagagaggtttcaggtaactggaaaggaaacagcactttatatcccatatcacttcttagtcaatgaagtagttgctagccactttcttattgtggcacctattcctttgacaatgtcatgtctgtgaatagattagtcttcccaggagcctcaactgacagatgatgaatatgcagggtccacccccagattaatcatcttgagatactaggaggtgaaacacacccactcagcccaggtaaaagtggctaagctgccctcttctccaccctctcttgcctttcttcctcagcgttttgattgcatttttaactatatgttcctcactacctgagggaaacagaaaacgtcaaatgatgtcagagtcaaaaaagtcagttattggacacaaaatgatacaactaaaaatagataacttactaaattacagggggatattttgtgtataaggcatcttagaattggtgactaatgactactgtcaaataactggatttttggaatctgtacaataaatttagatrcaacttcccctctctccacaatttctccaatggtatctggtcttacataaatgcttatcttccttctctcccctcttgaggcaccatacaagttctcagtttaattatattccattaactcctcccctaattcaacatcctggaatcttaattctttcacaaactattgtcacaaggaccaacaaaacctaacccaagtagctactgagtgaagtccagtgggagacacttgaaaaatatgacaaaaaccagccacgttgagcaaacatgcaacaaagggcattagggaaattggttaatatactgagttacttaaaattataatgttgaaaaaaataattgtggcagcagggaaatgatgccaattaagcagtccagtaatgggaaagaggcaggagagaagtcactttgccgttcataattcagccccttcacttccccggcggtggagcctgctttctgccacagtgctgaacagtttggaagatgt

SEQ ID NO: 673274 - DNA, 600 bp, Homo sapiens
acaagagcgaaactccatctcaaaaaaaaaaaatcaccttgactgggcatggtagcatgtgcctgtaatcacggtgactcaggaggctgagacaggagggcagcttcagtccaggagtccaagaccagcatgggccttatagggagactgtatctcaaaaaataaaaaagaaagatcaccctggctgtcgaataaagaacagattagaggaagtcaagagaggaggcagagagtccagtggggggactctttcaggaataggatgaaggccaggaggggcagtgggagaagggacttcacaagagttggagactgatagatcaggaagtaaaggagagggaagagtggagggccactcccaggtttctactttggatcccartggggagagacataaagggtctgtaatcccagaaatttgggaagcctaggtaggcagatcacttcaggtcaggattacgagaccagcctggccagcatggtgaaaccccgtctctactaaaaatacaaaaaaattgtcaggtatggtggtgcatgcctgtaatcccagctactcaggagactgaggcaggagaattgctttaacctgggaggtggaga

SEQ ID NO: 673275 - DNA, 1279 bp, Homo sapiens
acagacagacagatagatgagaggggatttattaggagaattggctcatgcagttatggaagctgaggcctcacgacatgctgtcgaaaggcggaggaccagggaagcaggtagggtggctcagtccaagtccagagacttgagaaccaggggagtcaatggtgtaactctcagtccaaggccaaagacctgagaacataggggtctgctggtgcaagttctacagtccaaagactggacaacatggggttctgatgtgcaaggcaagaaaagatgggtgtttccgttgaaggggaagagggggagttctttcctctgcctttttgttcgatctgggtcctcagttgattggatggcgcctgcacacattgggtgagggcagatcttccttactccgtccactcattcaaatgccaatctcttccagaaacatccttggagacatacccagaaataatgctttacccgctatgtgggtatccccttaatccagtcaagctgacacctaaattagccgtcacactcaacmaacttctattgatctttcaagactgagatcaatccatttcctcctctgtggaacttctgatctccacctggggatttaattcttctttggcttcataccagttcttaatcttttgcatagttttatagcaagctgcacatttccgtttataaatttgtctccctactaaaacagtctctcacttaaaaaataattggaatttttgttttctttgagacagagtttcacttctgttgcccaggctggagtgcaatggcacgatctcggctcaacctccacctcccaagtagttcaagtgattctcctgcctcagcctcccaagtagctgggattacaggcgcccaccaccacgcccagctaattttttgtatttttagtagagatgggagttcaccatgttggccaggctggtcttgaactcctgactcctgacttcaggtgatccacccgcctcagccttccaaagtgctgggattacaggcgtgagccaccgtgcccggcctgagatctctttgaataaacataaaaaatctcatggctcatgcagattctgaaactgcccaccaaatctattgcaatattgaatatgccaatcctgcaagccaccactacctatccaaagattctgatttacttttttttctttttttgagacatggtcttgttctgttgcccaggctggagtgcagtggcatgatctgatctcgctgcaacctctgtctcccaggttcaagcgattctcctgcctca

SEQ ID NO: 673276 - DNA, 1716 bp, Homo sapiens
ctgcgccattgcactccagcctgggtgacagaacaagactccatctcaaaaaaaaaaaaaaaaaggaacaaaattattttgttcatgcctctgaaggctaggaagttcgggagcatggtgtcagcatctgctcaacattatgtaarggccttctagcccattatcccatggcagaaggctgaaaggaaaaagagcactcacatgtgcaagagagaaattgaactcacagcctcaagcctttttatagttgacatgaatccattcatgaaggtgaagcccttataacctaaacacctcttcttagccctcaactcccaacactgttgcattggggattcagtttccaacacatgcttttgggggacacattcaaaccatagcatagcctcaggtagcaaagccgagaaggcaatcaaacctagagcccagagttagtgattgttgtttattattattattattattttatttttagtagagatgggatttcagcatgttggtcaggctggtctcgaactcctgacctcgtgatccgcccacctcggcctcacaaagtgctgggattacaggcgtgagccaccgcgcccggccatgattttttattgttgttgttgttttctgtttttgttttgttttgtttttgtttttgtttttgagatggagtttcactcttgcttgtcacccaggttggagtacaatagtgcaatctcggctcactgcaacctctgcctcccgggttcaagtgattcacctgcctcagcctgctgagtagctgggattacaggcacccaccaccacgcctggctaatttttgtgtttttggtagagatggggtttcaccatgttggccaggctggtctcgaactcctgacctcaggtgatcagcctgcctcggcctcccaaaatgctgggattacaggtgtgagccaccatgcccggcagtgattgtttgctttgcaacagatgcagcagcaaagagaagcaaaaggaccacactgctgcaaaaaacaagcaatcctaatctaaaaggaacaattaattaagcatctattaatgaatacatttgcatggccagattaatgtcaaggttcagcactctaactcggtccttatcagtcatggccaagtaatgaggctcctgttagaaaaaaaaacatccatattgacaagatgggacacttacttcttattaattcaattatttggctttggtcaatgctaatgatggtaatggttgatggctacatacactagggaaccgtcagaaatggaaataaaaatctacagcatgtcatacatgtaactgcagaagagtgagtaaagagcaatggaaactgagagaaaatagcacttccaggtgcctacaggtggcattcagatccagaatagccatccaggcttacagaaaactcaatccaactttaaaaggaattaccaggcagagtgttgcagctctatccagccacttatacactgtgtataagtgtatacacagttttataaattcattcattcaacattatttattgaagactcttatacacttatacactgaatataaattagtctagccactgtggagagcagtttgaagatttctgaaagagctaagttatgagccaggcacggtggctcatgcctgtaatcccagcactttgggaggctgaggcgggtggatcacgagatcaggagatagaggccagcctggccaatatg

SEQ ID NO: 673277 - DNA, 641 bp, Homo sapiens
tttaggcaaggcccaaagcaaagcagtatcatagaaggaaaatcaggctttaaatgagtcaaaaggaagggggcttattctaaggaaakgttgaggacagaaagcgtgtcctgctgtttccccagcacccagcatgatgcctgagatccaggagctacacaccatgcatttgccgaatcaacaaatagtaagtggatggaaggacttcaaggaaggcttgagggaggaagggcaagtcgaagggtttgaaggaaggaccatgtcaaagaaatggggacatactggctggtcagttagagcgtttgccccttggacagaggtctcagatcacagcgaggagggaagccagtactggttgaaggacagtttcaggcatcaagtcccagaaaagaaaaggcagaaatatcgcttagagagaaaccatctgaaacaacaattggcctgtgtccattttacaggtccgctagcagaagcagttctcaaggccttccatttcaggagagccatatcattaacaccatgaaagaatacaatttcatcctcagacgcctacagctctcaagtccacccagggactcctgaggggggacacaagtcatcttgtagggtgaggtttactctgcctgactcataggaaagcc

SEQ ID NO: 673278 - DNA, 1541 bp, Homo sapiens
aggggcatgaggaaagtgctataagaattcggaagtgtgccaggcacagttgctcatgcctgtaatcccagcactttgggaggacaaggcgggtggatcatccgaggtcaggagtttgagaccagcctggccaacatggtgaaaccccatctctactaaaaatacaaaaattagttgtaattctagctactcgggaggctgaggcaggagaatcgcctgaacccaggaggcggaggttgcaatgagctgagattgtgccattgccctccagcctgggcaacaagagcaaaactttggcacaaaaaaaaaaaaaaaaaaaaaaaaaagaattcagaagtgggattttcttctacctgtcaacaatcaggtaatgtttcaagccaacatagcattgataatagttgggttgggccagagctagcatgtgcgaaggggactagtgggagatgagttgaaaggggaacttatgggactttaaattcttaaagggaccttaggggaccttatttttgatcaaggagtttggatcgccttcagtggacagaaggagctactctagatttagaagcagaggagagttaaacaaatttatagaagtcccttgatttggactgagctccagcagtaggccccaacagaccaaaccaaaatggagtcactcatgctaaagttccaagttcgaagttatttatctgaccttttgagaaatcaagagggcaagatatagccaactccccacacaggccagttttagctggcaggataaggaagtcccctcggctgtaacccttacagggtgagtaacctaagtagcctaatactaactgatccactttttgttccctgttcctgctttcttcagccttttcctgcctaaaaagccaaactcctctgctcagcaacttggggcgcctttcctaaatgtttcaaggagatgccaccctcattcatgaatcagaaataaaagccaatttgatcatttaacaaaatttgttgtaattttgactcttgacaggagtgtcatgaattgttcctgaggatggagattcatgtctcaacgtggaaaacaatgaattgcagcggagagaaagtagagctgagatagagcaaaagccaaggtgttgctggtgtggcaagaggaagcaaaccacaggagagaggagcagacactgcacttagacaaccagagaaataaatgacttcgaaggaacaycatgaacaacatcagtgtgggcttgtctaaggtatttctaagaccctcattaagcagggaaaggtatagaaaaatgtactttttaaataaaatatctttcttaattcaaattttatctcccaaataaacttttaatttacttttttgtaatgccaaattaggcacttcagatttgaagttaatctttaaatctgggtttttcccccctctgccatcttcttaagcacataccaatggacaaatccaaagttttttctcagaatgattcaaaaccagtactttgtatttcatttacttctatttaaactttattttaaaaaatctactg

SEQ ID NO: 673279 - DNA, 633 bp, Homo sapiens
tctctgcctgaaatctccctctgcctctctcttatatggatactagtggtggcatttagggcccacctacrtcattcaggacaatcccccacatttcgatccttaacttaatcacatttgcaaaatctttcatctgaaaagtaagtttcacagatttgagggattagagtgagagcaggattggacaggagtgaggccattatttatcttactacaactaatgcgaacatttaccacctgaagtatggaaactgcacttgcatttagggccctttaccccttcaactttttgaaattattatctgaagtaccagacgctgttctaattgttgtttcaatcattaagtaagatttatggaactcatggtaagcaaaatagtccagtttatattgtatagattcctcttgttttttctcttttgaaaacacaggtaaaagtttcttttcttttctccttcatttcttttcaagaagaatgttcttgagccaaccattaagggcaggtctaccaactactctggtttttttttttttttttttttttttgagatggagtctcgctctgttgcccaggctggagtgcagtggctaatctgggctcactgcaagctccgccttctgggttcaaagcac

SEQ ID NO: 673280 - DNA, 633 bp, Homo sapiens
tctctgcctgaaatctccctctgcctctctcttatatggatactagtggtggcatttagggcccacctacatcattcaggacaatcccccacatttcgatccttaacttaatcacatttgcaaaatctttcatctgaaaagtaagtttcacagatttgagggattagagtgagagcaggattggacaggagtgaggccattatttatcttactacaactaatgcgaacatttaccacctgaagtatggaaactgcacttgcatttagggccctttaccccttcaacttttkgaaattattatctgaagtaccagacgctgttctaattgttgtttcaatcattaagtaagatttatggaactcatggtaagcaaaatagtccagtttatattgtatagattcctcttgttttttctcttttgaaaacacaggtaaaagtttcttttcttttctccttcatttcttttcaagaagaatgttcttgagccaaccattaagggcaggtctaccaactactctggtttttttttttttttttttttttttgagatggagtctcgctctgttgcccaggctggagtgcagtggctaatctgggctcactgcaagctccgccttctgggttcaaagcac

SEQ ID NO: 673281 - DNA, 633 bp, Homo sapiens
tctctgcctgaaatctccctctgcctctctcttatatggatactagtggtggcatttagggcccacctacatcattcaggacaatcccccacatttcgatccttaacttaatcacatttgcaaaatctttcatctgaaaagtaagtttcacagatttgagggattagagtgagagcaggattggacaggagtgaggccattatttatcttactacaactaatgcgaacatttaccacctgaagtatggaaactgcacttgcatttagggccctttaccccttcaactttttgaaattattatctgaagtaccagacgctgttctaattgttgtttcaatcattaagtaagatttatggaactcatggtaagcaaaatagtccagtttatattgtatagattcctcttgttttttctcttttgaaaacacaggtaaaagtttcttttcttttctccttcatttcttttcaagaagaatgttcttgagccaaccattaagggcaggtctaccaactactctgktttttttttttttttttttttttttgagatggagtctcgctctgttgcccaggctggagtgcagtggctaatctgggctcactgcaagctccgccttctgggttcaaagcac

SEQ ID NO: 673282 - DNA, 633 bp, Homo sapiens
tctctgcctgaaatctccctctgcctctctcttatatggatactagtggtggcatttagggcccacctacatcattcaggacaatcccccacatttcgatccttaacttaatcacatttgcaaaatctttcatctgaaaagtaagtttcacagatttgagggattagagtgagagcaggattggacaggagtgaggccattatttatcttactacaactaatgcgaacatttaccacctgaagtatggaaactgcacttgcatttagggccctttaccccttcaactttttgaaattattatctgaagtaccagacgctgttctaattgttgtttcaatcattaagtaagatttatggaactcatggtaagcaaaatagtccagtttatattgtatagattcctcttgttttttctcttttgaaaacacaggtaaaagtttcttttcttttctccttcatttcttttcaagaagaatgttcttgagccaaccattaagggcaggtctaccaactactctggtttttttttttktttttttttttttgagatggagtctcgctctgttgcccaggctggagtgcagtggctaatctgggctcactgcaagctccgccttctgggttcaaagcac

SEQ ID NO: 673283 - DNA, 1039 bp, Homo sapiens
taactttttactatataactgcttattattttatttttaattacwatttataatttttgaaacagtataaaactattacagcaataaaaaaataaataccaatatatgtatatagatctccaagattcacatagattcagtctatatatcaaaaatcatagtcactggtttaatattaagcaaaacgtttgacattcagtgtgacagattgtgtgtatagatctgattatcacaaaatgtgtggaaaaacactaagaaaattaaataagttgttgagattatatatgttttctttctttgattagttcatgctatttcacacttttcaaatatttccatgaggaacatgtgtttcttttatattaaaaccccaaacaaaccaaagccaaaggctcgttggctattagatagattaagtataagaagcaaagtattataaaatttacactcagaattttcggtgataataaacctgtatgtagtgacataaacttgccttccattgattgcaaagtcctgtctctaaggccttgatcaatcccttttgacccttttataattaagaaattgtcctggtatgtaccttactgagtcatagtgttggttaaatgaggaaacggatgcaccaaacattctacttagatcaaaataacaatttacagatattagctaacagctatattgcagtctgttttatgtgacttcataatcaaatggttattatttataagtttagctttcctataatattttgtttatcattggtacccaacacatattaatagtagatataaatgttttaaaagcacgattgacctgagaaaagttcagctgatttatagtcataatttcaaaatgggcataaggtcaagtcacaaatttcagctggcatttgacattattggatcaatagtatctctaaagttacttttacattaattataaccatttaaatcagtttcccattataaatcaattatttatttgacttattgaattttagatttaataaacataatagaaaaacaatgttgccaaa

SEQ ID NO: 673284 - DNA, 898 bp, Homo sapiens
gatgaaatgacacctggagctataaactgtacctaaataagaggctctcgtaattcaggggacaagtgaaaccacttcagttttaaatagatgagaggctgtgaagagataggattggaatttagtggtagaaaagggctaggaaaatgtcattattgtaactttctagaacaatttttaaaatctttttgttttcctgcatgctatgtgagtaatgtagtttaagcccccgtaaaaatagctttaactgttcaaaaaccattattgaaaactatttttattatatgctaactggaaatgtttttgtatattttggggagtacaaagaatgaacgcagcccttgaaatactgtatttaccacttttcttgttttttattgtttgaagagagaatagcaggtataggagacagcatcagagttgaaagaagtaaaccgatttggaagattatatgattttcttaaatgaataaatttcaggagaatttagcaacccacaccttcaaagccagtctctattgttgacacccattgaaattttggaaaatatgcctatctctcctggttccagcatagtgtactgcaatctatgaaacaggctttttttttttcttctttttttttaatggagctggaatgcagtggcaccatcttggctcactgcaaacctctgcctcctgggttcaagcgattctcatgcctaagcctcccgagtagctgggattggaggcgcactgcaaygcccagctaatttttgtattgtttgtagagacggggtttcactatattggccaggatggtctcgatctcttaacctcgtgatgcacccgcctcagcctcccaaagtgctgagattacaggtgtgaaccaccgcgcccagcctaaaccagatctttaaa

SEQ ID NO: 673285 - DNA, 669 bp, Homo sapiens
gaaaagaggagaagaaaccaaagagaagcattaaatgagggtgggaaaaaaagataaatagtatcaaagaaagaagaatgtttttaaaagggagtagtgagcaaacgtatagtatctactgagtatcaaatatatagtatctatggaggtgtagtatgataaagatgaaaaacatatttattgagtttgataaagtgtaaatctgatgatttttttagaagtctattttagggtagcactcggaattaaagccaggtttgagagagttaaaataaatgagtggtaagaaggcacatttagcaaaaaaagacaaccattttaaagtgagaaaaataagatatggactttgaataaagaatttatggacctagcatatttctgyttatgtcttgttagccagaatagtgtctctgaccattcttggcagaagtttgttttaaagcagtggtttaaaataattaggttcagacaatcctagaatagtgtctggataggaaaagaggaagccaaggaaatgaacattggactggatattcctacagataatgagtcactaagaataaaaactggaataagggtgaaggggaaaaccaaaagccaggaactcacgtcttgcaatgaaagaaggaagtaaaggcaatgaggaagagaatagtataccacaaggaa

SEQ ID NO: 673286 - DNA, 563 bp, Homo sapiens
gagaaacacaaaccaatctacaggagaaaaatgttgaaactcaaggctaaatatggcatttatcactactttcctttgttgtcaagggtaacagataatcaattaaaataataaactttcgttaaggacaagaatactgtatgtgctgcaggggcaccatgctaagtgtctcatgtacataatctcattaacttcttgkgacaaccttaaggcaagtattattatcatcacgattctagagcagggacaacagagacctggagatgtcagggtaattcacctaaggcctcgcttctccaaactgccaccgttggcatttaaacccaggtctcctgactccaaatgtgtgcactatgctgaatatgtatgaatacagacatacacgcatattgtgtacacttacaagtgtagcaaatatccagtgccctaatatggtggtgaatatgtttagttactaatgtgaatccaaacaccaatgaaagattagaaggaaacaaggtttttaggaccacaagttaaagaggtaggagaacattaacaaaaaggttacaaatatcttgcca

SEQ ID NO: 673287 - DNA, 1249 bp, Homo sapiens
acactagccagtgagtctgctcctttgcctccctgccatggtgcggtccctcctcatctctcccaccctgaagcccccaccattcatgctgcctcttgttactcttagcataaaatgggccttaactgcagaaatgtcaaatcagaacagtagctgcctagtaatgcccagtgatgggggacccttgtgcccttggaaaacctcactccaagtagaggctgtatctggagtgagtgtctacagagaggggaattggtcagtgcatggcagaacttgacatggcagaactgttccgtgggccccagagcagggccgtgccgtgccttcctacttggtcatcctgtggctgtaggtgcactgtcccaactgctcacacaccttccagtcccctccctccattctcaccacagttacagtcggagcagggagagacaggacaccaagagacatgggcagggccacgtgtagtctggacagagcccacccrgcccagacttggcctcctgtctctctgtgaggggcaagcatagtccgaaggcctggattataaatattagaacataatgaaaaggaaactgtgtggcaaagggataaagggatacagagaaaagaaacaaggaagagatgaggtgacagtttggaccaaggaaaatgccaagagaagacttcacactaccttttttttttctggttttgccattcttttattcatgttgttacactcagtataggatagtttattaaaatcattatgtctgtagacattctatttgtgatatagaaattgtgttatttctgacctctattttttcctattatgtgacaaagaacataggtcctcagaccaacatgtggaaaccaagggccaaatggcttctaaggtccctcccaactgaataattctggtaaattccatttccatgtgctcactgacggatggtcctaataaccgctcttatttcttttatgcttgtgaaagtcatagtttttacaaaattacttgagggtgtattataaagattcaacagagcaaagtaaaggccaagtgacttgacatagtcatagctggaagaggagccttaccaagacaggtgtttctagttgccattatacttattctaccttatgaggacccattgtatgaggctagatggaagtgagtaaacagacgtcctacctttgcatgtgactgccacttggtgtgctgtgtcccaggcgcaacacatacactatctgattttctactcat

SEQ ID NO: 673288 - DNA, 1427 bp, Homo sapiens
aagtatcagcctaccgcatgaaagatgttcagaaaatctttatgcaattatggaatgaattatcttgtccatgccaggagagagtgaccaaagaccaggttctgtcattgtgccaagcttcttattggtctcattggaactgaacttggttctcttttgttttaagctgctaacagcaaacaactcaagaggaaatgcagatggttgcaatgcctaagagaagatcaacctcactagagtttcagggaaagcaaatgcaggctgggcacggtggctcacatcagtaatcccagaactttgggaggccgaggtgggcggatcacttgaggtcaggagtttgaaaccagcctggccaatatggcaaaaacccctctctactagaactacaaaaattagccgtgcgtagtggtgcacacctgtaacccyagctactcgggaggcttaggtaggagaatctcttgaagccaggaggcggaggttgcagtgacccaagatcacatcagtgcactccagcctgggtgacagagcgagattctgtctcaaaaaaaaaaaaaaaaaaaagcaaacaaacgataccattttttcacctatcaggttggcaacaattttaaaagatttggcaacatccaaatgctggcaaaattgtaaggaagtgtacactcttcctgtatagctccagggactgtgaaatgtgaattgctgcaacctttgggggaaagtcttctggctgtatttattaacaataaaaacacacatttattaacaataaaaaagcaatcctattttggggattttattccacaggaataaaactgtcggtacataaggatatatggataaggctatttattgcacccttatttaaagtaggaaaacactggaaaatccctgaatgttcaggaataggggaataattgataaattatggcacagatgttctatgaaacattacacaactaataaaagaatgagttagatgcagatatataggtctagaggtgtatttgtgacaaactattaagtggaaaaagcagattgcaaagtaatatatgtgacacgatcccattttcataaaaagtaaaaaaaaaaaaattcccttagaaatgtgtctttaagttgtgttggttggtatgagtctggaggaaagagagtgattatctacaaccacgtgtgaactttggttatctcagtggggtagagggaagagtattccccttttcttggtatatttttatagctggcattctgtacttttgtcatttgcaatgaaataaatccaataaagtttaggttatacagggaaaaacccttcatgtgatatgactgggtgatgctccttcctgtataagaatgcacaagtggctgtgagggttataatgtattgatcaccacctttggagtcaggcactgtgctaagaactttccct

SEQ ID NO: 673289 - DNA, 636 bp, Homo sapiens
agtagagacagggtttcatcatgttggccaggctggtctcgagctcctcacctcagttggtctgcccgccttggccttccaaagtgcacggattacaagcgtgagcgactgcatccgctcatcaacagtatcttaatagaaattctcaatattggcctgaggtcattgggtcagcaatcaggatcaatttttgagattaggaaatgaggctcaaagagttaaactatgttggtcaaaataatgcaattagagggatggcaaagccagccagaggcatctttctaaggagcctcctgaattcatgctcgggctctggagtcagaaggacctgagtttgagccatgtactaactgagagattggagatgtcactgcacacctctgagttttacctaattacagcctaagaataataacagtatctactttaggtggttgttctgcggattatgtgaaataatgtaggtaacgacattcattgtaacaatatgttgcatgataatacacattataacatgttgctcakgagttttgctttagcagtatttgtggtagttccaaaactcagttcacgtgtcttaagacttctcttattatacactctcatctcttccctgctttctactcttcctttttt

SEQ ID NO: 673290 - DNA, 1143 bp, Homo sapiens
tctgaataaagtcacatccccaggttctaggaatttgaacctgaatcttttgggaggccatttttcagtctaccrtgcagaaagatgccagtggcacatgaggtgattcattcaataagagtctttccaattttgcagatctgcagggatcattatagaattaaaaaaatatttccaccattccatatccttttttgaaaccagtgagtatcaaaccaatatttaagaaactctcaccaaatcctgccacttagtaagtgtcacatagtcctcacaggtaccctgcaacagagatactgttcttcctcactggacaggggaagaaaataaaactaagagaggaagagaggttaagagccttgcctaagatctcacagccaggaatgggtaaatgtgggattgaactttcagtctttcaggctctggagtcttgagtttttatgcaggatgctaaaatgccttttcttggaaatgtaggacttggttaagaagctgaggtttggaaggaagtggaggtctggggtgatgggacaatttatgctatgtttagccaagaattattcctgcacagaatttccagaaaggctgaaagcaggcttttgattgggaaggtaatccacaagttggttcacctgatcacctgatgaagctgaggatcactcccctcagcactcggtgtctctctctctctctgtctccctctccctctttctctctctctctcatggctgaaactggtaccttccagcagagacaccaggaagttggaggcaaatgagaaaatatccattttcactgtctcacagatttcagttcagtaacatctgccagtcatatattcttatcacagggatatttcatttttgctgtgcaatcatctgactcaagagactgggtagatggaaggtaaaaccaaagatgcttacttgaggatggctgcaaatggcaggtgacttctcctggcatctggcgaccacatccaccgattcaggctgcatggtgaacaagatacaatttctcttacagtcagagctgctgagggctaagtgcttagagctcctcagcaaccctgtgaagtcagatcaataatgacctgatctggtactcagggaggccaagtcacacacccagaactgacgaacg

SEQ ID NO: 673291 - DNA, 682 bp, Homo sapiens
ctaatttttgtatttttagtagacgtggggtttcaccatgttggccaggcttgtctcgatctcctgaccccaggtgatccacctgcctcagcttcccaaagtgctgggattataggcgtgagccactgcgcctggcctggcccggcccacattttaggtggtgggttgatgttcagcaggctcacgccaatgtgactacgccaggttaaatatttgatcacctccatattgattggtaaacagtgagggcccagagcccaccgagcggccccctccctacctcctctctcttggatctctgcccacttccccacgatgcagacactaaagggttaacatttggcacagcaagargctctgggactctgccccattcctgctctttagtccctttcagttggtgctggtgccctacagggtgacacgtattttgatttttttaactcctgggctggggagcagttgagtaagacggcacgtaggcctgggacatgctggcagtcaccatggctggaaaacaggaagccacagaagtgctggaggtgaggctgcaagactcagaatgagcccctggggaaggaccttgtgtgacatatgagggagaatagactaccttgaggataacgtggagatattggggtttttgtaagcatgctattttttattgatgtataattataca

SEQ ID NO: 673292 - DNA, 682 bp, Homo sapiens
ctaatttttgtatttttagtagacgtggggtttcaccatgttggccaggcttgtctcgatctcctgaccccaggtgatccacctgcctcagcttcccaaagtgctgggattataggcgtgagccactgcgcctggcctggcccggcccacattttaggtggtgggttgatgttcagcaggctcacgccaatgtgactacgccaggttaaatatttgatcacctccatattgattggtaaacagtgagggcccagagcccaccgagcggccccctccctacctcctctctcttggatctctgcccacttccccacgatgcagacactaaagggttaacatttggcacagcaagaggctctgggactctgccccattcctgctctttagtccctttcagttggtgctggtgccctacagggtgacacgtattttgatttttttaactcctgggctggggagcagttgagtaagacggcacgtaggcctgggacatgctggcagtcaccatggctggaaaacaggaagccacagaagtgctggaggtgaggctgcaagactcagaatgagcccctggggaaggaccttgtgtgacatatgagggagaatagactaccttgaggataacgtggagayattggggtttttgtaagcatgctattttttattgatgtataattataca

SEQ ID NO: 673293 - DNA, 618 bp, Homo sapiens
gccacatgtggaaggtagaagtattttagacctagcgtgactcccaacctctggagctttcttgcctctgcattcaatyacctgccttctatttgcagggttcccatgtgctaagagcaaatatgctagtaccagtaatgaccttaggtttgtattcatgtttggaatcaagggaatgtgggaaggaggatgggctttcaagagctccaatacaattccagcatcttgtcattgttgttacaaaatagctctgaccctcagcttcaactgtatcttgtgataagatcctatcgccctctctccctaatctgatttctcatagaaaagtttttatcctgacttcgtagagtttgcaccttagaacttataagaattttgagttctttcttaaggcttatcagccacttggatccaaaagcttgtcttctgctgataaactatcctgaaaatagccactgagccatctgattaaatgctaaacactgccctctgggatttctgctacagatcactaccatgctccatccaccaaggcaatgttgcagttcctattgggcctccatgacccgggctgcagaccaagagtcttttgctgcacacctcaaatattgttctacc

SEQ ID NO: 673294 - DNA, 2587 bp, Homo sapiens
ttggaactggaaaccaattttaatgtggaaacacttttctatgtcatgatcagtttcttttagattatcaattttcttttcagatatgtaattggataaaatgactttctagagttggctgattgtttgccacaataacattgtatatatgcttgctaactcacaaaaggtcaaacaactattattgataacctagtcacagatggagtctgcctgtacatcctttacttttcccttcgaggtcgattataatgcttcttaaatatgttttgattgattactttttggctcacagactttttgtaaaacatcttcaggctgcctcaggctgtgagcaattgtggaggatggtcaagttatacaagagggagaactgactctacatattttttaaaaattctggtagtcatgactctggtcaactagattgagcagagacaaaatcaacatcagattcatgaattcatgcaagaatccttacaagaaaaatgattacactttttctcttaacagaaacagctggtgtcagtgatatggatggctgaagttttatttgtatgacagcggttggtataacagcccttctgcttcttacatttaaaataccccatagagaagcttgctactgagagaatggcaagacaggggccttaaactccagaagaggcagaaatcctgggaaagctcctcttcttgtattgaactagggaaggctgtttttttttttccaccccttaacggaatcctcccatgacttaaccatttcgaagaggacctgtaagattttgataaatataattgcttttcatttttcctgaagaaataataagagaaaatgggcaaaaaaaaactgaagtgaaggttgcattagtcttagtgaagactaagatattgaatgcttttaatttggttgtagttgaaaaagttttcttctgaagtttcttggggaaatttacttttagaagggattaagtaattctacggctgaaataagaatttagggtattaaaaaataaagcaccttgccttatggatcctttatggccctctccataaagaagaattaataatgatgatacaattagtggctatttgcaatctgctaggtattggacatacattatttaacttaattcttataattttctacaaggcctattcttagctctctttttatattaagaaaacaaaggatccaggaggttaaataacttccccatggtcacagagttaatgtggtagaacctgaatttgaaccccgaatatctggctctaaagctggcgcttttaattatgcccttaactattgcactatcatgtcatagcttgcccctaaatgttgccttctctcttttgatctaactcttctcagccttggctacttaagaaatagaaaataatgtaaatttaccctcctctgcctaccttttttcacattgtttggctccatattctatataactcactagttcttgcttcaaaacttacaattttgaggaaaccaagcaaagaaataaggctttttaatacctgttcaaaatccagtgtgtttcatcattcattcacatcttcatttgatatatatgaccactcatcggtcacatttagagcagctaatttgcatagttttaaagtacaaatattgattcttttaagtagctgttcccttcttatatttttaaattacgttatctcttcaagtagatatttcacagaagaaaaagtaaatatatccacatctatcttcatttgaaatgtgacaaatggatgtatcctggaagctcctctattttgtcagttagttttcttgatggtgtgactggaaatagcactagattacaattggattacaagagaggaagattagaatttagcaactggttttcaattcttttgctactttggatgtataagaaaaaagaaaaggccatgaaaacttctgactcaaagatagaggctgtacattcaatattatttacaaatagtaacattttaatgaactagacgacttgagggatggagaaagtgcttgttaatggactctcctggcaacttcaagattacccattatgctctttatttcattcttatgatgttaccatgaaactttttgactattctcttttatgattgatatcttggagtataccagactcattgtctgaatagcaaagagaatatagaatttaacaatgtaaataatatcaatccccaacagaatcatacaaaatggaacttgcacagtgcaastgcactttaaatttatccctttcctgcaagtgtctgctccattcagttgaaacgagtagtcagtggccaaagaagtaaggtggttgtagcagtacaatatctggttgtggtattcatagtacttcatgttagctttgagtgacggtatttatggagttatccttttttagcatatgtatgtttttaattgaagcttgaccctagaaagaaaagctatccccagaatctttaaaattgcagcagcaactatataatatactatctacattcagcctgccatgacttatttctaccatcacacgtgaaatactatcttttgatgaagaaatgggagaaa

SEQ ID NO: 673295 - DNA, 367 bp, Homo sapiens
aactcacttgatggcccacttgaacgggcaggggggatgaattcttttggaaacttgwttgtctacatatgcatatgtgtgtatatatatacacacacacacatacatacatatgcatatatgcatatatctatatctatctatctatatacacagtatctataattcaggtgggtgtattactgagggttttctacagggacagaacgaataggatatatgtacatatgaaagggagtttattaaagagaattggctcacgtgatcacaaggtgaaagtccaccacaggctgtctgcaagctgaggaagaaagaagccagtagtggctcagtttgagttccaaagcctcaaaagtagggaagccca

SEQ ID NO: 673296 - DNA, 588 bp, Homo sapiens
cccrcctcggcctcccaaagtgctgggattacaggcgtgaggcaccgcgcccggcccaacgagttttttaaaaaatagctaaaagataatgaaatatgtctggaatcagataactttgaggaaggttgtacagtatgtgaccaacacatagctttccactgaaacacgttttttttttttttggtagtaatttccagtctagttgtctgtcaaagatttaaaccataatcttttttccccccagaggttgatactttccttattgatttttttcttaaataaaatcaattattgtccattataaaaatgttaaatccacagtagggtaaaaatagaatgtccaggaaccactttgcactgccctcatttagttctactccacaaaattaacgattgttaatattttcttgtttatcctttccgaactccatttatttgtgagaatggtgtcatataaaacatcttagccaggtatgggtggctcatgcttgtaatcacaacacttctggagagcaaggtaggaagatcgcttgagggcaggagttcaagaacagccttggcaactcagcaagaccctcatctcttatg

SEQ ID NO: 673297 - DNA, 588 bp, Homo sapiens
cccgcctcggcctcccaaagtgctgggattacaggcgtgaggcaccgcgcccggcccaacgagttttttaaaaaatagctaaaagataatgaaatatgtctggaatcagataactttgaggaaggttgtacagtatgtgaccaacacatagytttccactgaaacacgttttttttttttttggtagtaatttccagtctagttgtctgtcaaagatttaaaccataatcttttttccccccagaggttgatactttccttattgatttttttcttaaataaaatcaattattgtccattataaaaatgttaaatccacagtagggtaaaaatagaatgtccaggaaccactttgcactgccctcatttagttctactccacaaaattaacgattgttaatattttcttgtttatcctttccgaactccatttatttgtgagaatggtgtcatataaaacatcttagccaggtatgggtggctcatgcttgtaatcacaacacttctggagagcaaggtaggaagatcgcttgagggcaggagttcaagaacagccttggcaactcagcaagaccctcatctcttatg

SEQ ID NO: 673298 - DNA, 1419 bp, Homo sapiens
gtcttggccaatcccagcagcggtacttcaaccactgatacactgctgagtgttcaaactgtgttcaaataagccaaatgccaacttctgaccaatccagctgttcctgcacctcacttccgagttctgtatgtcacttcccttttttttgtccataaatttgttctgaccacaaggcatccctggagtctctctgaatctgctgtaattctgggggctgcctgattcgcgaatcactcactgctccattaaactcctttaaatttaattgggctgaattaacttttcttttgcaaggcccagagagtaaatatttttggctttgtgtgccatatagtctctgcacaaccactcaactctggttggagatctgttgcccttttttatacactgttctttacctggataaaggcaccaggataagtttgcttccacattattattctttaaaattaggactagttagcagtttataacagtccttccagggtttgaaatctgttttcttgttttattttcaaagttcaaaacactttttaaaagttttagtttcttttggacgtttgaggtttcttcttaaatgtgatgaaatgaccacattgtagaggctgactttggaatcttagtaatatcattgtatgagtaaactggacctattagttcattagaactcaacctattcagttctccccatattttccgtaacgtcaaagttctcctaacaactcccaaatgcctgtgtcctttactctttgttcatgatcatttccttgaagatgactagactagcccctgtaaaacctgtatgttacaattcagtgtaatcatactagagttgttgcaaaggaagtccatctagggcaaatattttcgtcagtaatgagagtctamaactatttcctagaagacaaaataacagcagatggagaggccacaactgagaaaacagccttttaaaaaaaattttaccttagaataatagatgagtcttcattaagaatgtttgcaatgcaatgtggtaacttcattagcgaagagtatacagaacaagactgctatgctagccctcagtggccaaaagagaatgaagccataaagcatatatgtatatataaatatgtgcactgtgctgagtgaactattatatatgtgccaatttcattggaaattatttcagaaatatatagtgttagatcagcactgtgcagaggtaaaaggaacatatatattttgtgaaagtcatctaatacagaacaaaatctttatactcatggaacttgtaatacagcagcctttaaaaatggggataacatattcaaatatatataaacacgtatttaatacttcagcaatttgtggtcagcctgaatataaccttttttgaaagaaccaaccttagaacactaaagacttgatttg

SEQ ID NO: 673299 - DNA, 626 bp, Homo sapiens
ccaaccatcctacaaatgtatgctcagaatctacaaagagcaagacactgtgctgagtgctggcaagtgttaaggttgagggagccaggctctaatttcaaggaggactaagtagaatgggattcttccctgaaagaacatacaacacacagcaagtaaaaaagaaggcaaactgtttcacactctgtaactaaaatattaacaaaatactaaatgagaatcaatacaaaaccaaacaaaaaaaaagtccagacattttatctacattcaccattagtcccaaatttcctggaactaaaagaatgttgaaaactcttgacacttaaaaaaaaaatcttatttataactcacttgaagktaggaaggaaagaatcagaaagacatccacgatatttggaaagcaagaagcagggatattggaaacacataaataatgactggaaaagtataactgagtcctagggagtgctggattcccaataaatgtctgttcaactactcagtgaacagatcaaccctagagtagataatcaaggcaaagataagtgtggaagaaaaagacaggtaagatacaaggcagatatacatgaatggtatatgtgtctatgttgaaataaaacaatgta

SEQ ID NO: 673300 - DNA, 626 bp, Homo sapiens
ccaaccatcctacaaatgtatgctcagaatctacaaagagcaagacactgtgctgagtgctggcaagtgttaaggttgagggagccaggctctaatttcaaggaggactaagtagaatgggattcttccctgaaagaacatacaacacacagcaagtaaaaaagaaggcaaactgtttcacactctgtaactaaaatattaacaaaatactaaatgagaatcaatacaaaaccaaacaaaaaaaaagtccagacattttatctacattcaccattagtcccaaatttcctggaactaaaagaatgttgaaaactcttgacacttaaaaaaaaaatcttatttataactcacttgaaggtaggaaggaaagaatcagaaagacatccacgatatttggaaagcaagaagcagggatattggaaacacataaataatgaytggaaaagtataactgagtcctagggagtgctggattcccaataaatgtctgttcaactactcagtgaacagatcaaccctagagtagataatcaaggcaaagataagtgtggaagaaaaagacaggtaagatacaaggcagatatacatgaatggtatatgtgtctatgttgaaataaaacaatgta

SEQ ID NO: 673301 - DNA, 625 bp, Homo sapiens
gctgacagtcagtactgctcaccttcctccttccccactcctgcctttccagtttggctccatgctgcactgcctcaccactgcaccagccttggtgccccatctctgtgrcccaggcttccagcctcccaccttgggcccacctcctggctacagccgacgatgcagatctttgtttgtttttgaagaaaaggtccctagagacctctcctaccttttgcaagaccactggtgtctcagtgtgtgtgtaaacaaaaagcttgagttgtggggaagttgtaggagagttcctaagaacttagtccttcatgacaacagaagcacagcattttctaaaacattaaaaatctcaattacactaaaactccaggatggttgggccaggggggaataaatcatgttaactaagaaagcaagggagggaactactgagaacgtcaaggttggaatccatattgcttcaagccagaggccagttcctagtcggtggctcccatgctggtctctgatgtttaggaagtggtgtcagcagagactgagctgcaccctttctttggacagatggcaggagaggagaacttcaaggaagagctcagatcccaggatgcttccaggaacttgaacc

SEQ ID NO: 673302 - DNA, 1650 bp, Homo sapiens
aactcagaaaaattatacactagcatttcaataatctgttcaaagtcagtttccattttttttcattttttaacatgccatggatatgtcacattcagctattcttttaaaaataagatatgtttccaactgttctattcactaaataacaccactgatgtttagttttttcaatattgtttatgtactttctcaaactatgaaacaagacattgtaggtaacttaagtcaaaatctagccccataaatcagcactaagataaaggcaatagatacaaataattacacagtaatccctgaagaactgttattcaagtatttcaaacatgtacagtgtgcctgtacatacatactctatttagcacaagggatacattcttagggaatgggccccaggagaggtcttgatagccagaatttttgctaacctgatcttgcttccctgtcagccaaagttcttcccttctcttcaaattccacctcagtttatttttgtaaccatgcattctgttcccaggaggyagtaagacttattatgctctctgtaatgtcctaagacttccaacaagccctaatctcatatttcacctgcttccccaacctttttctcaagcacttaaaaaccttctatgatcatatcaagtccagtgcctttttctacaccaaagacattcaatacactttggatattgctgcaattgctgctgccggctaaatgttaaaagtacaaagtactctgtcttcctttaataatcattactatcaaaatcaaatgaaaatggggctagaaaacacactaaattcttctaaaccgctataattttcttaacccacttcagtttattttatttaggatgtgattacatgggccaatgtttatttttaggatagtactaactgcccttttgcttattatttgtgttttctcatctcctgattcccaaaagctctgtaaatgtagagtaattcaacctacataataaattacaaccaaaagattatgactgtactataacaactgcctattaccacaagagaaaatgaggaatttcaccagggttctttaagtgaattctttgtaatactttcaaataagtattgtttcctaaaaataataaacaggaagaataatgtgttacctactgagtttatccatttacttgttcacttattcactcactcattgatttccactagcacatactcatttattcagtaaatacacattggcttatccacctgtttgagcaaataaaaattttttgttgatatagcaacttctatattctctagtatctgttaaaaatacatttttctccataagggacagatgcttgttttctgttgcctatctctcctcccattacattccttttctcttttggaaggtatctaactctttcaagcaatagaactatcattctcaaaactgtagactaaatggtaaatatcatcttaatttttaaaatctatgactcatcctggaggaaaagtctgtattcttttcacccacctgttattctaaatagattaaaatttatactaccaattatccttataaaaacaataattacattttcaattttactgttcatgagaacaacatacagttgtgggattcatgagcagaattcataaaaatattgactt

SEQ ID NO: 673303 - DNA, 668 bp, Homo sapiens
agtgggaactaaataatgtgtacacaagagtgtagagtgtggaatggtagacaatggacactcaaaaggaygaggggggggcgagtgtgatggattactgttaccgaaacaccaggggtttggtgtaggtactgctgctggctgcacagaaaatcagtgactgagatgacgagtattaccaaggaagaaagctttaatcaggtgctgcagctgaggagatgggagctcagtctcaaatccatctccctgaccaactaaaactagaggtttatatagcaggaaagaaatgtaacaatgtgtaaaaaaacaggaactagggaggggcaaggaagcaatcatgatgaatgagggggtcaggcatctcattggtttgtgctgggaagcattgccacctgaataagaagtggtccacagacacggatgatcagtcaaatgcacctaggagccaatggtcagccaagatcaggaaaaactgacctaaggaaatcgatcactggtggaatccttagcagaaaaggcatatgtaactcagggtgggaggaagaaggtctctcttaagttatatcccttgttgccctctgcagtgtattgagttcaggccaggaagaagtagacagagtgctgaagccatccttgcagagttaacaagaattttggacagaaataca

SEQ ID NO: 673304 - DNA, 668 bp, Homo sapiens
agtgggaactaaataatgtgtacacaagagtgtagagtgtggaatggtagacaatggacactcaaaaggacgaggggggggcgagtgtgatggattactgttaccgaaacaccaggggtttggtgtaggtactgctgctggctgcacagaaaatcagtgactgagatgacgagtattaccaaggaagaaagctttaatcaggtgctgcagctgaggagatgggagctcagtctcaaatccatctccctgaccaactaaaactagaggtttatatagcaggaaagaaatgtaacaatgtgtaaaaaaacaggaactagggaggggcaaggaagcaatcatgatgaatgagggggtcaggcatctcattggtttgtgctgggaagcattgccacctgaataagaagtggtccacagacayggatgatcagtcaaatgcacctaggagccaatggtcagccaagatcaggaaaaactgacctaaggaaatcgatcactggtggaatccttagcagaaaaggcatatgtaactcagggtgggaggaagaaggtctctcttaagttatatcccttgttgccctctgcagtgtattgagttcaggccaggaagaagtagacagagtgctgaagccatccttgcagagttaacaagaattttggacagaaataca

SEQ ID NO: 673305 - DNA, 653 bp, Homo sapiens
cccttttactgctgtctgacccactaaatcctaaggtggggtgtgcacaatagcactccatcatcaaatggaaatggtaaatatgagacaggccygagccagccttgaaggcacaagaaagttagctgaggaagtggcccatatacctatagagctgattcttcctacactgccttctctgtctcagcctgtacctatggcctcatgaagaattccctgtgattagctgaatgaggaagagaaaaactcaagtttgcttatagttggttgtgcacaatatgcaggcatcacccaagatgttcaggtgtagcaatacatcttctctctgggtcattcctaaaccacagtgatgagaagaaatactcccagtaggcagaacttggagcattgcacttggttgttcattttgcttggaaggaaaaataggtacttaaactctcaatcacattatttatagacagtctcagggttcagtcccacaaattgcagcctgtgaacatttgaatttgctagttgatttcagaaagaaaatcttagttcccaatttctaatttcagtgacaatgatgttaaaaaaaaaactttcactcttacttctatataacatgcagtatacgtattccatttcccacttttagcaaaaaagaggaaatg

SEQ ID NO: 673306 - DNA, 653 bp, Homo sapiens
cccttttactgctgtctgacccactaaatcctaaggtggggtgtgcacaatagcactccatcatcaaatggaaatggtaaatatgagacaggcccgagccagccttgaaggcacaagaaagttagctgaggaagtggcccatatacctatagagctgattcttcctacactgccttctctgtctcagyctgtacctatggcctcatgaagaattccctgtgattagctgaatgaggaagagaaaaactcaagtttgcttatagttggttgtgcacaatatgcaggcatcacccaagatgttcaggtgtagcaatacatcttctctctgggtcattcctaaaccacagtgatgagaagaaatactcccagtaggcagaacttggagcattgcacttggttgttcattttgcttggaaggaaaaataggtacttaaactctcaatcacattatttatagacagtctcagggttcagtcccacaaattgcagcctgtgaacatttgaatttgctagttgatttcagaaagaaaatcttagttcccaatttctaatttcagtgacaatgatgttaaaaaaaaaactttcactcttacttctatataacatgcagtatacgtattccatttcccacttttagcaaaaaagaggaaatg

SEQ ID NO: 673307 - DNA, 653 bp, Homo sapiens
cccttttactgctgtctgacccactaaatcctaaggtggggtgtgcacaatagcactccatcatcaaatggaaatggtaaatatgagacaggcccgagccagccttgaaggcacaagaaagttagctgaggaagtggcccatatacctatagagctgattcttcctacactgccttctctgtctcagcctgtacctatggcctcatgaagaattccctgtgattagctgaatgaggaagagaaaaactcaagtttgcttatagttggttgtgcacaatatgcaggcatcacccaagatgttcaggtgtagcaatacatcttctctctgggtcattcctaaaccacagtgatgagaagaaatactcccagtaggcagaacttkgagcattgcacttggttgttcattttgcttggaaggaaaaataggtacttaaactctcaatcacattatttatagacagtctcagggttcagtcccacaaattgcagcctgtgaacatttgaatttgctagttgatttcagaaagaaaatcttagttcccaatttctaatttcagtgacaatgatgttaaaaaaaaaactttcactcttacttctatataacatgcagtatacgtattccatttcccacttttagcaaaaaagaggaaatg

SEQ ID NO: 673308 - DNA, 653 bp, Homo sapiens
cccttttactgctgtctgacccactaaatcctaaggtggggtgtgcacaatagcactccatcatcaaatggaaatggtaaatatgagacaggcccgagccagccttgaaggcacaagaaagttagctgaggaagtggcccatatacctatagagctgattcttcctacactgccttctctgtctcagcctgtacctatggcctcatgaagaattccctgtgattagctgaatgaggaagagaaaaactcaagtttgcttatagttggttgtgcacaatatgcaggcatcacccaagatgttcaggtgtagcaatacatcttctctctgggtcattcctaaaccacagtgatgagaagaaatactcccagtaggcagaacttggarcattgcacttggttgttcattttgcttggaaggaaaaataggtacttaaactctcaatcacattatttatagacagtctcagggttcagtcccacaaattgcagcctgtgaacatttgaatttgctagttgatttcagaaagaaaatcttagttcccaatttctaatttcagtgacaatgatgttaaaaaaaaaactttcactcttacttctatataacatgcagtatacgtattccatttcccacttttagcaaaaaagaggaaatg

SEQ ID NO: 673309 - DNA, 623 bp, Homo sapiens
caaagcttgatcccagattggatctgggttatgggaagacagctcaccagggactatttaagggcaattggcgaaatgtagacatggaagatggaccagacaacagcatgagatgaatgttaaatttcctgattttgatccttgttctgtggctatgtaagagaatgtccttacttttagaaaatacacatggggcatttttgggaagtttttaagggcatggtgtctgtaacttactctcaagcagttcaggaaaataatatataaattagatatgaagagaagtgaggggaggagaataacacaratgggggcaaaatattaacattggtgcatctggataagatgatctttggacagagttctttgaactattcttgaaacatctgcataaaatttgaagttatatcaaatttgaaacttacaaagaaaaggcttagggttggattctgcttgggctggaacataaactcaaggtgagaatatagccaactttgtgaatagagcaactgaaccaatactgggttttttgttttctttaaaaatcattctctgtggaagatcaacttaaatctattctgccaatattgataattactgactagcatgtggttttatttgca

SEQ ID NO: 673310 - DNA, 625 bp, Homo sapiens
aaggagtctgcagtgtcacgggggacacaaatgagcactactgttgcagctgtcattattattaatgaactttagttcatttctgcacgggatgatcccaaaccccagccctgtcctgtatttacctggtcactttggtgttcatgaagcactgctgtaaggtgtctgccaacctctggtgcaccaaggagtagcgaataaatgctcttcctttccccaaggatgttcggagctggaaaaagcagwttacatagagccaaagagctgtcagcctaactccaaatacagacctggtctcatagatggcttgtgaaacacagatacagggcaaaaaatgtcacccaattttaccctatacgttgtccttcaaaggacacaacacatttgatactcttaccgcagagagtaaggcttgaagtgggtgaactacttgcaggccttcatctgagaataatctgcagactccagcaaacatatcatggaaaacatattaacaagaggcttccaaacatctgtggattctattggaatgtcactttccctcctctgctctatcagaatctctgggtttggagtcagataggaaccaaataaaactcagttttatattagagtaaaacctgga

SEQ ID NO: 673311 - DNA, 625 bp, Homo sapiens
aaggagtctgcagtgtcacgggggacacaaatgagcactactgttgcagctgtcattattattaatgaactttagttcatttctgcacgggatgatcccaaaccccagccctgtcctgtatttacctggtcactttggtgttcatgaagcactgctgtaaggtgtctgccaacctctggtgcaccaaggagtagcgaataaatgctcttcctttccccaaggatgttcggagctggaaaaagcagattacatagagccaaagagctgtcagcctaactccaaatacagacctggtctcatagatggcttgtgaaacacagatacagggcaaaaaatgtyacccaattttaccctatacgttgtccttcaaaggacacaacacatttgatactcttaccgcagagagtaaggcttgaagtgggtgaactacttgcaggccttcatctgagaataatctgcagactccagcaaacatatcatggaaaacatattaacaagaggcttccaaacatctgtggattctattggaatgtcactttccctcctctgctctatcagaatctctgggtttggagtcagataggaaccaaataaaactcagttttatattagagtaaaacctgga

SEQ ID NO: 673312 - DNA, 608 bp, Homo sapiens
ggaggtggaggttgtggtaagccaagatcatgccactgcactccactctgggtgacacagtgagaccctgcctcaaaaaaaaaaaattctctgctgcatgtctctgcttcagtttgcagaatctcaggcatagtgaataaaactcattccagttcaggaaattccattttcaggctggactcagtggctcacacctgtaatcccagacttttgggaggctgaggtaaaaggatctcttgaagccagtagttcgagaccagctgggaaattaarcaggacctgtctttccaaaaacaaatttaaaaattagcctggtgtgatgatgcacacctgtagtcccagctacaaaggaagctgatacaggaggttcgcttgtggctaggaacttgaggccactgcactccaacccaggcaacagagagacctgtctctgaaagaagaagaagaagaaataaattcaattttcagaaaatggcccattagaagtctccaattaatgaagtgataaattgagttgtgcattaaaagttaccataaattttatatttcttatatagcaacatatttctctaacttagtaattagtctattgatttgttcataaatga

SEQ ID NO: 673313 - DNA, 608 bp, Homo sapiens
ggaggtggaggttgtggtaagccaagatcatgccactgcactccactctgggtgacacagtgagaccctgcctcaaaaaaaaaaaattctctgctgcatgtctctgcttcagtttgcagaatctcaggcatagtgaataaaactcattccagttcaggaaattccattttcaggctggactcagtggctcacacctgtaatcccagacttttgggaggctgaggtaaaaggatctcttgaagccagtagttcgagaccagctgggaaattaaacaggacctgtctytccaaaaacaaatttaaaaattagcctggtgtgatgatgcacacctgtagtcccagctacaaaggaagctgatacaggaggttcgcttgtggctaggaacttgaggccactgcactccaacccaggcaacagagagacctgtctctgaaagaagaagaagaagaaataaattcaattttcagaaaatggcccattagaagtctccaattaatgaagtgataaattgagttgtgcattaaaagttaccataaattttatatttcttatatagcaacatatttctctaacttagtaattagtctattgatttgttcataaatga

SEQ ID NO: 673314 - DNA, 608 bp, Homo sapiens
ggaggtggaggttgtggtaagccaagatcatgccactgcactccactctgggtgacacagtgagaccctgcctcaaaaaaaaaaaattctctgctgcatgtctctgcttcagtttgcagaatctcaggcatagtgaataaaactcattccagttcaggaaattccattttcaggctggactcagtggctcacacctgtaatcccagacttttgggaggctgaggtaaaaggatctcttgaagccagtagttcgagaccagctgggaaattaaacaggacctgtctttccaaaaacaaatttaaaaattagcctggtgtgatgatgcacacctgtagtcccagctacaaaggaagctgatacaggaggttcgcttgtggctaggaacttgaggccactgcactccaacccaggcaacagagagacctgtctctgaaagaagaagaagaagaaayaaattcaattttcagaaaatggcccattagaagtctccaattaatgaagtgataaattgagttgtgcattaaaagttaccataaattttatatttcttatatagcaacatatttctctaacttagtaattagtctattgatttgttcataaatga

SEQ ID NO: 673315 - DNA, 2407 bp, Homo sapiens
  misc_feature 1020, 1021, 1022, 1023, 1024, 1025, 1026, 1027, 1028, 1029,1030, 1031, 1032, 1033, 1034, 1035, 1036, 1037, 1038, 1039,1040, 1041, 1042, 1043, 1044, 1045, 1046, 1047, 1048, 1049,1050, 1051, 1052, 1053, 1054, 1055, 1056, 1057, 1058: n = A,T,C or G
  misc_feature 1059, 1060, 1061, 1062, 1063, 1064, 1065, 1066, 1067, 1068,1069, 1070, 1071, 1072, 1073, 1074, 1075, 1076, 1077, 1078,1079, 1080, 1081, 1082, 1083, 1084, 1085, 1086, 1087, 1088,1089, 1090, 1091, 1092, 1093, 1094, 1095, 1096, 1097: n = A,T,C or G
  misc_feature 1098, 1099, 1100, 1101, 1102, 1103, 1104, 1105, 1106, 1107,1108, 1109, 1110, 1111, 1112, 1113, 1114, 1115, 1116, 1117,1118, 1119: n = A,T,C or G
tattctttctatgttctttagaacataggtactgggcttaggatggggtggatataatgctatctactgtagaattgaggagcatctaaaaacaccttattgtattttgtgaagctaacataatgtattaccaaaatgcaaatactgttgcactcaaaagaaagccagtgaccacacttacttgtgaaaatacacatgaaaattcagatctcctaaaaaagaagaaagctaacaagtctacatgcatatacatatataacttcacgacaaagtttatccagaaatgttgatattctcattttagaacatattttactttaagatatattattattgaataattaacagcatcatataatctcaattattactgaacaaccattcaatttaattcaaaaacagattactttaaatagttagaaaattatatagatgaatattttctgaacattatgaagattattatagtattcatagtgatctgaatatttgccctttcctctgcccgttttgtcattacctgttccactgaacattctctggcactgcaaattctggactatgatccatcagtatgaatgttctagaaaataatggtaaccccatagccacagcaatgatagggcaatggaactgctatccgtggcccagaattcttggacaccacctaagtggaaggtcatgagattaagttcatgtggaacttacaggaaaatgacattttgaaagaaaacttggaagaataaaaagtaagagaaagagaaagttgatggaagaagaaggaaaagagaaagtgtgaggatagagcagaagtaaagaaaatgatggatgtaagtagaataggaaaggaggacaacgaaaacaaacgaaaaggatgaagttactaatatttgtattttgaatataaaagaaacttgttcaagaacaaatagctagtaaacatggaactgtgatttgaacatgcatcccaaattctggactcctgagtctgaaggctacttccttttcattacaccatgnnnnnnnnnnnnnnnnnnnnnnnnnnnnnnnnnnnnnnnnnnnnnnnnnnnnnnnnnnnnnnnnnnnnnnnnnnnnnnnnnnnnnnnnnnnnnnnnnnnngcaattaattgatgttttaaaaagccaaatgacattttcaaaccaaaaaatttgggaagaaggtgtttttgttatgataaaaatttaaattgtattttcgtgtttcaaatgataatctactagaaaattaaaatataggatatgttataaataaggacctgttcagcccagttgaaataatgaaatattctgtttattttaacataaacttggctctcccatcaatgactttctttctaatctggtagtgagctaggaacttaaccagtcccttttccagtttgcatgtctcgaagacctttctaccaagatactattttaatgagtgtcatatgtacctgcagcaacttaagatgtggtcttgactttgggactgggtggcagccaaatgctataaaagtgttgaggaaactgttatcaaaatccaagtttttaaaaaagaaaacctgttagtggatgccagaaactatgtgaggaaagtgatatttgagcctggaagtaatggtgagccatgcatgtagtattggaacaagcggtcaaaagatcagtgtgaagtagaatatacaggtgacccttaagcaatgcagttgacctgtgtgggtccacttatatgtagattttcttctgactctatcaccactaagtaagcaagacccatacctcatcgtccttctggcctactaaacatgaagatgacaaggatgaggacctttatgatgaccaacttcctctacatgaatagtaaatatattttctcttccttctgattttcttaataacactttcattttcagattagtttgttataagaatagagtacatagtacacataacatacaaaatatgtgttaactgtttatgttatcgataagacttttggtcaacatgctattaatagttcagttttggggagtcaaaagttatatgtgaatttttggagtgttgggatccctaatccctgagttgttcaagggtaaactgtatatgtaattgtaaatctgctaagaagttttctgggcataattattaaaatgtcaattgtcttcttttaatggcatacactaaagtacagggtgaggaagatgagctaaagagaaaactattatgttttcaagcaaaattagaacaaatatagagaagacaggattgctgggtttgactataaggactatttcacatctccagtccttgacagaaraacactctcagagaaagaaatggtcacagagtaaatatctcatcaaggacatcagagcctttgttaggacttctgaaatattcaaggtag

SEQ ID NO: 673316 - DNA, 679 bp, Homo sapiens
gacaaatcctgtaatattcaatacaaaaagtttttatattttttgaagcaaaatgttgcatgccatgagatataaagagattgtacttccaggacaactagcattcaattctatgtctagaattcagtgagaattacatgtatgtttattgcagcactatttacaacagcaaacacttggaaccaacccaaatgcccatcaatgatagactggataaagaaaatgtggctcatatacaccatggaatactatgcagccataaaaaggaatgaattcatgtcctctgcagggacrtggatgaagctggaagccgtcatcctcagcaaactaacacaggaacagaaaaccaaacgccacgtgttctcactcataagtgggaattgagaacacatggacacagggaggggaacgtcacatactggggcctgtcgggtgatgcaggacaaggggagggaggacattaggacaaatacctaatgcatacagggcataaagcctggatgatgggttgataagtgcagcaaaccaccatggccacatgtatcctatgtaacaaacctgcacattctgcacatgtatcccaaaacttaaagtcaaatgcaaaaaaaaactaaatgcctctaacaagaccaaaaaagaattatgagtgagttataaaccttggtaatgtgttttctgc

SEQ ID NO: 673317 - DNA, 679 bp, Homo sapiens
gacaaatcctgtaatattcaatacaaaaagtttttatattttttgaagcaaaatgttgcatgccatgagatataaagagattgtacttccaggacaactagcattcaattctatgtctagaattcagtgagaattacatgtatgtttattgcagcactatttacaacagcaaacacttggaaccaacccaaatgcccatcaatgatagactggataaagaaaatgtggctcatatacaccatggaatactatgcagccataaaaaggaatgaattcatgtcctctgcagggacatggatgaagctggaagccgtcatcctcagcaaactaacacaggaacagaaaaccaaacgccacrtgttctcactcataagtgggaattgagaacacatggacacagggaggggaacgtcacatactggggcctgtcgggtgatgcaggacaaggggagggaggacattaggacaaatacctaatgcatacagggcataaagcctggatgatgggttgataagtgcagcaaaccaccatggccacatgtatcctatgtaacaaacctgcacattctgcacatgtatcccaaaacttaaagtcaaatgcaaaaaaaaactaaatgcctctaacaagaccaaaaaagaattatgagtgagttataaaccttggtaatgtgttttctgc

SEQ ID NO: 673318 - DNA, 640 bp, Homo sapiens
atctcatttctaaaaatcacccctaaaatacactgcaaaaaatacaaagacagataatcatgaagctattcactgcaggcttatttgtgatagcagaagactggaaacaactcatatgtccttagtagggttccagttgaataagcaatggtacagtcaaacaaaggagcatgcagttctgaaagaacaggagaaatatttttatacattgctgtgcaactatctccaaatttattattaggtgaaaaaagcaaaaaggagaaggcatgtattgtacgcatctactaatttaataaggaggtgagattaaaatacacatgtaktttttcatactgcaaataaatcaacattgaaatacaaagttactgatggggaaaggaggaggaagtggaaaggacagaaataaaagttagattttcctgaatgtatcttcttttgcagatttgattttgtcactatgtaaatattttacattactaattacgttaaatctttaaaatggaattcttaacaaaaaggagcaaataaatctaactgcatggaggtagtgacacaaccacacagggaagagttatttcaagtgactttggcatagcatagtttgattatttattcattatgagacagacatacctgaaaa

SEQ ID NO: 673319 - DNA, 1405 bp, Homo sapiens
cacacacacacacacacaaaaggtaactacatgaggtgataaatgtgttggtattattattattatttttgagacagagtctcactgtgttgcccaggctggtgtgcaatggtgcaatttcagctcactgcaacctctgtcttgcaggttcaagcaattctctcgtctcagcctcatgagtaactgagattacaggtacccaccactacacctggctaatttttttttttttttagtagagaaggggtttcaccatgttggccaggctggtcttgaactcctgacctcaggtaatccacccaacttggcctcccaaagtgctgggattacaggcgtragccacgttaattagcttgattgtagtaatcattgcacaatgtatgcatacatcaaaacatcatgttatataccataaatatatgcaaatttaatttgtcaagtatatgtatgctcaataaatctcatggtgggggcaggagggaagacatgtaagcaaagaaaatggtaaacagtgaaatctaaataaacattgactatatgaaaaaaagggataaatggggattaggctattggtgagtttgttttgactaactggcgagttttcaagacctgaaacttagtgaaattcaaattattttcaaattaatgagagatataaaacatatatatttgatgtcacaaactacactatagaatataaatataattttatgcccttatacgtcctgcatgcctgtctttggctttctcagttggggcaatgaagtttatccctttccacccatgaagtcaggtattcacaatgaaggagaataagaattcctgtacaaaaattaaaagatttctttcccttggattcttgctagctgaagagaacagaacttactcttttgtatctcctcactggctaatggaaataatgagaagatactgccatgttcttctctttcatgtgggagaaaacacctggctaaaaagtggttcaaggttactctgcaaagtgcagcctaattgttaagcttataaggatccggtattcctaagacagttcactccttaatggatgtgttttgtaatggggctgtcagtactgattatagaataaactgtatgccctgtgttctcttcaacagaactcttagccctagatttaaaccatcctaggtttgatttacaaaaatataatttgagaatactatattaataagtatctataaccaagaggtctctgattcttcatttttatatgaatttttaatgaatttatttttatatgaatgtgtctaacaaacatgtatccctactctatgccaggttctatgctacagggatacaggcacgaaagtctgtctgtatgtcctcaagagagtctagtaaagaaggcaggtacttaaatgagtacaaa

SEQ ID NO: 673320 - DNA, 612 bp, Homo sapiens
ggatttatcactaggagacaagacaaggcaactacatccttagctgtctatgagtgaactgaataacagatacgtagtaaccaatcactggccgactttgaatgaagtggtgtcattggccgttggtcatgatgttatgtagtgattttatagactgaagtgctggcagcaaagattgtgcgttatgcattgctcacaatcaatrtatttggtcattgaaatttggaccatggtttgaggagtagctggtgttttaactaaagcatagtaactgaaacttacccatatcagaacctcgccaagagaggactaccatgaaagttaaatgaggggcattaggttccataaaggatcataaaaatactactctactctattatacatttacatatacacatgtgtatcctaaagtaataagctagttttaaaatattaaccatacttaatgattaatatttattatatctaattataataattttacttgccacctagggatttagaagagttcagagggatttaatgtatgatccaggaagtttgaaagtttgaattgggccaggcgcggtggctcacgcctataatctttgggagtgtaatctttgggaggcc

SEQ ID NO: 673321 - DNA, 612 bp, Homo sapiens
ggatttatcactaggagacaagacaaggcaactacatccttagctgtctatgagtgaactgaataacagatacgtagtaaccaatcactggccgactttgaatgaagtggtgtcattggccgttggtcatgatgttatgtagtgattttatagactgaagtgctggcagcaaagattgtgcgttatgcattgctcacaatcaatatatttggtcattgaaatttggaccatggtttgaggagtagctggtgttttaactaaagcatagtaactgaaacttacccatatyagaacctcgccaagagaggactaccatgaaagttaaatgaggggcattaggttccataaaggatcataaaaatactactctactctattatacatttacatatacacatgtgtatcctaaagtaataagctagttttaaaatattaaccatacttaatgattaatatttattatatctaattataataattttacttgccacctagggatttagaagagttcagagggatttaatgtatgatccaggaagtttgaaagtttgaattgggccaggcgcggtggctcacgcctataatctttgggagtgtaatctttgggaggcc

SEQ ID NO: 673322 - DNA, 1005 bp, Homo sapiens
tgatcagggccaaggccagctccttagggcacaagctccgagtggaaaaaaagtgatggccacacaggaaaaggggcctggagacccatcttccccttccccaaccccagcgggagctgaaggtctcacagacmgaaaaggaagtcccgttgggtttgcacagtttattaagataatcaatcaatttcttaagttattcctttgttaaccagacagcatctctggagagaaaatgcactctctgtgtagatacataaaaatacatcagtcattttgcccctcctggatgtgaacggaatctcccctcctcacctccacagagggagctcaagccccagggaaccttcccctccccttttatgcattaccaggggagtggcaggggcagcccccaactgtggagtgcattcaggtctgaggggggaggaaggctcagaggggcatctccccagcaccctgccacagtgctggcttctggggtgtttgttcagcggcctgctgggctgccccaggctgggggctcccccagctccccgtgcatcctggcttgttccacggagccctgagccaagtctttgtctggctcatgttcctctcacaacatcccacaggcaggggtgagcctgccgcaggaaggagtaaggtgctgtcattgcggaatcgattgcgcacaggaatgcaggctgagggcggcagcccggtcccctcagtgtctctttaaaccgacagctgagctccgactccctcgagttcagacccggcctcacacaggtggcagcatttccgagagcttcaccgcctccactgggcacttggttttgacatcaagggttctcgtcctggaggtggtgcgtggatgggtgttagctggggacgccctgcaggtgaggctccagaggctgagcaccaacctttccatttcgacgggcagtgccccaaatctttgacactggagggcacgggacactggcaaggccatggctcaaagtatttctaggccttccc

SEQ ID NO: 673323 - DNA, 1340 bp, Homo sapiens
ggactctgcatcctcagcaggccaggtcctagtgcctggcccagggatgcctccctgccccggggagtcgcatgttccccggtggcctgtctcacccgagggacttttccgcagtgcccttgctcagtccccagctgtaccacagatgtccacgcctggacagagctccagcagtgactcacctcttcatttttagcccgtgtcctctcggagcctgcagcccgcctttgctgggcagctgtctgggggtcagggcccatgccctgggtgtccactcataaaaccagctcttgaccacctgccctactaagacagggaagcggggacaaaatgaattcaaagtgcctttgacctgggcatacgttctgctgccatttgtatgtgcgtgtccaggacagcctccagattcccagtgctttcagtgagtaatgaaagctgttctaacggtctgccacccagcgtcctggcttggctttcccgcagcccctcccgttcccactccacagtggggctgctggactcacctcacagctccgggcaaagacgcctacggctgagaggcttcttcccggctggaaacttgccgcttcacaccttccggctgtaaggagcttttagctgaaaaggccttttctgccagcttctcccaagcttgagtaaacaaaaaacctatttatgtcttcagagcacttaattaagccagggcagggataaaatcagagactgagtgtagtgaaaacacactccgtaaagtcagaagaaggtcgctcccggccaggcttggccaagagccagctgtgtgttcttgggggaagctgggtccccctgaatttttgcaagaataatgtaatgaaaacccaagtaccatttgggtttgttgggtgttgacatatcggatctctctctctctctctctctctctctctctctctctctcgtatgtgtgtgtgtactgtttattttgttttgtgttttgctraactatgtaaaaattggtggtaaacatcatgcccctttgccccaaaactcttcaacggcacctcctaagaagaaagatgatatggaaccacaataccgcgatcatactgagggaatttaacgttgatacaattatataacctatattccatatcaaaatgtccccaattttcccaacaatgtcctttaaagctgttttctttctcaacccagggctcaaacacacgttgcatttcacttgatcttagccaaaaggcagagaagcgatcacacacattgcatttcgttgtcactattaggagacaattcttcatgagtctcccgtgtttattcccatcttgcaaacagaggccttggccgcc

SEQ ID NO: 673324 - DNA, 1340 bp, Homo sapiens
ggactctgcatcctcagcaggccaggtcctagtgcctggcccagggatgcctccctgccccggggagtcgcatgttccccggtggcctgtctcacccgagggacttttccgcagtgcccttgctcagtccccagctgtaccacagatgtccacgcctggacagagctccagcagtgactcacctcttcatttttagcccgtgtcctctcggagcctgcagcccgcctttgctgggcagctgtctgggggtcagggcccatgccctgggtgtccactcataaaaccagctcttgaccacctgccctactaagacagggaagcggggacaaaatgaattcaaagtgcctttgacctgggcatacgttctgctgccatttgtatgtgcgtgtccaggacagcctccagattcccagtgctttcagtgagtaatgaaagctgttctaacggtctgccacccagcgtcctggcttggctttcccgcagcccctcccgttcccactccacagtggggctgctggactcacctcacagctccgggcaaagacgcctacggctgagaggcttcttcccggctggaaacttgccgcttcacaccttccggctgtaaggagcttttagctgaaaaggccttttctgccagcttctcccaagcttgagtaaacaaaaaacctatttatgtcttcagagcacttaattaagccagggcagggataaaatcagagactgagtgtagtgaaaacacactccgtaaagtcagaagaaggtcgctcccggccaggcttggccaagagccagctgtgtgttcttgggggaagctgggtccccctgaatttttgcaagaataatgtaatgaaaacccaagtaccatttgggtttgttgggtgttgacatatcggatctctctctctctctctctctctctctctctctctctctcgtatgtgtgtgtgtactgtttattttgttttgtgttttgctaaactatgtaaaaattggtggtaaacatcatgcccctttgccccaaaactcttcaacggcacctcctaagaagaaagatgatatggaaccacaataccgcgatcatactgagggaatttaacrttgatacaattatataacctatattccatatcaaaatgtccccaattttcccaacaatgtcctttaaagctgttttctttctcaacccagggctcaaacacacgttgcatttcacttgatcttagccaaaaggcagagaagcgatcacacacattgcatttcgttgtcactattaggagacaattcttcatgagtctcccgtgtttattcccatcttgcaaacagaggccttggccgcc

SEQ ID NO: 673325 - DNA, 891 bp, Homo sapiens
cacaacttctgagggaccactgtgtagcccaccacatcctgcaaccaaccaacctgagaactgcggctccatgcccttcctccaatcatcagcatcccactccccagtttgctttttaaagagataatcagggataaagatcacatccggtgaaaattcaactgccatctagtttagattttccccatgcccctgtgatagcaacgagaccctctgccatccactatcgccctggctttcttaggatttttctggaaatattctgccttatcctgtctcttcttaggctgaagtgggtgacaggcccccaggctgccttccccttgggagcctggttgggtcacattgtctcctctactaaagaaaaaagaaattacaacccagaatttccctggatatcagacaactctgtccaaatgtagttaggatgacttaaatgaaagagggtcaggaacatatgraataaattcttttaaaaataaacataggttttaagaagagtgaatgggaaagagattccagacaatgagtcttaggtttttgctaagacccaaaatgtcaatcaggattagagcaaagtatcagctgactccttcctccctggtccttgggggtagttgttaacagctcgaattccagcggcggccttcttgggttcaagtttcattgctatcctttgccagctatgtgagctggagaaaataactaagcctctctgtgtgtcaatttcctcacttatattgtgggaaaatggatattagctaccttgcatcagtcaggctatgctgcattatgctgcagtaacaaacggccctaaaatctttgttcatgaaacaaaggattgtttttcactctcaccccatgtcctttgcagggaggcagggagttttg

SEQ ID NO: 673326 - DNA, 891 bp, Homo sapiens
cacaacttctgagggaccactgtgtagcccaccacatcctgcaaccaaccaacctgagaactgcggctccatgcccttcctccaatcatcagcatcccactccccagtttgctttttaaagagataatcagggataaagatcacatccggtgaaaattcaactgccatctagtttagattttccccatgcccctgtgatagcaacgagaccctctgccatccactatcgccctggctttcttaggatttttctggaaatattctgccttatcctgtctcttcttaggctgaagtgggtgacaggcccccaggctgccttccccttgggagcctggttgggtcacattgtctcctctactaaagaaaaaagaaattacaacccagaatttccctggatatcagacaactctgtccaaatgtagttaggatgacttaaatgaaagagggtcaggaacatatggaataaattcttttaaaaataaacataggttttaagaagagtgaatgggaaagagattccagacaatgagtcttaggtttttgctaagacccaaaatgtcaatcaggattagascaaagtatcagctgactccttcctccctggtccttgggggtagttgttaacagctcgaattccagcggcggccttcttgggttcaagtttcattgctatcctttgccagctatgtgagctggagaaaataactaagcctctctgtgtgtcaatttcctcacttatattgtgggaaaatggatattagctaccttgcatcagtcaggctatgctgcattatgctgcagtaacaaacggccctaaaatctttgttcatgaaacaaaggattgtttttcactctcaccccatgtcctttgcagggaggcagggagttttg

SEQ ID NO: 673327 - DNA, 601 bp, Homo sapiens
cggagtcatgaatgctcttgtatgtgaccacttggcgtgtgttacttgactttggatttttctctatcccactcccatttggaaatatcttttctgccttcttcccgtccttcctgcctaaaagtcttagctcaagccacagcctctagcacctatcgccgagacccaggtcgtccagtttgacagcccctaaactcccgaggctgctgtgcacgaaaaacagggctagtccaggttgagatgtgccggaagcatcaaacacaccctggatttcaaagatgtaaaatacggagagattgtgaaacaagctcataaataacattctacactgattacatgttgaaaacgtgttaaatatattgggttaaataaaatwttggttaaaattaattttacctgtttctgtttttttgttgtttttttgttttcgttttttttcttggtggggtagagcttctcctagtgattagagccctcatacatcagaagaattccagtacaggaaatctgtttcttttttaaacatgtggctactaggaaatttaaaattatatctgtagcttgcatttgtggctcacatttctagggacgggctggtcaa

SEQ ID NO: 673328 - DNA, 602 bp, Homo sapiens
tcgatctgagcaaaatacttatactttataggcaagtctttctgtttgtaaatggagaatcagcagataaattcctgcagcaaaatagcagagtaaaaagaaaacttaaaaaaaataaagaaggcatttaattcccaagtaattatcaacattgcctgtggaagataaaattgcaacactgttatakaaagatttatgttcattctcatacaaattagcaaggaaactgattagttgacatcttctctgctcctctattcctgactgaatatgatctcagccctagggactggcaggccaggctttcagccagggtcagatgcaggttttgtggggcctgcagctgagaccatttttgaaggtctctttaaaaagaagacaaaattacaaattcaaaagttagatagaaaagtaaagacttactcatcctaaacgagaatagaaaacacaccgatgataaattgtttaaaagataataaatatcacaatcatcacaaagttcataaaatgccttattattataaatactactacatccctataatactccatccctacatatttggttacatgctcttcgatcatctctttatatgacaata

SEQ ID NO: 673329 - DNA, 656 bp, Homo sapiens
ccatatgggacataatgaaacggaggcagggagaagttaaacaacgtagccaggtctcctgcacatgccgtaacggcgtcagtagttcagtgcaggcaagctgatgcccgtagcccaccccaccggcatcccgtggtacagtggggccaaggccagagcgcttctgaagaagccagcacacaggcgccttatccttccggctgccagacgttcgtcctcatcatgatccatagttctcctttccctctttctttcctttcagtggaaaaggtatccctccaattttccaaggcaaacacccctctcttctattagaagaaaaacaaaaagcactccctgtctgccctgcaggaatttccctgggttgccacctttcctcctccccaagagctgaagctcttagtctgcctcccactcactccccaggacatcaggacccgttcccatgcctcctccataggcactgttcttgccaaggaagccagtgaccctctttggctgaaaccattctcctcgttgataaatgcagtacatactttttctttctgtatcttgccctgtcactgcrggctactcccttctgggaacactcggttacttttgctctgtggtctctggttctcaggctcttgctatttcctcccttcaaggctgaa

SEQ ID NO: 673330 - DNA, 796 bp, Homo sapiens
caagagcaagacttcgtctcataaaaaaaagaaaccttctggtaatataaatcatccttccttcattattacctctccacttactatcagatttgcctatcatgaattgaatcttttaatttaaaaataataatttcttaggcatgtcttaatttaatggatgattttttacaatttctgaattgcggtacaaaataatctactttgttctttgaacactgtagatctttgggtgagcctttcttttatcttccagtcagaaaactgcgtacttagggactcacttgatcaagaagaaccccttatgtcttggttattgcttaaaatttcatatrccttttattttctgctgtgaaggttaatttccagtttttccctgaaagatgagtgggcttccagcctaactttcctgtggaaaagactttctgttctaaaagttctgaaaactttctagtgatggaagataagaatgttagtttaacatcttccttaaaaggaatctttgcgaaatatctcacaaacaaggcatgaaatatttatgttgttttttaaaggggatttaggagagagaaatatctatcagtggaacaactgtgggtagaggtaagatgtgtcactattctaggccttggatgagttcagatgcagaggtcatttttccatttctattttggtttatctataaatgaattgaagtatgatctagtagtcagtattgtgcagtcttaaaaataaaagctgacttgtgttttttaatgtgcatatgtactttaaaatacataaatgggacctcata

SEQ ID NO: 673331 - DNA, 796 bp, Homo sapiens
caagagcaagacttcgtctcataaaaaaaagaaaccttctggtaatataaatcatccttccttcattattacctctccacttactatcagatttgcctatcatgaattgaatcttttaatttaaaaataataatttcttaggcatgtcttaatttaatggatgattttttacaatttctgaattgcggtacaaaataatctactttgttctttgaacactgtagatctttgggtgagcctttcttttatcttccagtcagaaaactgcgtacttagggactcacttgatcaagaagaaccccttatgtcttggttattgcttaaaatttcatataccttttattttctgctgtgaaggttaatttccagtttttccctgaaagatgagtgggcttccagcctaactttcctgtggaaaagactttctgytctaaaagttctgaaaactttctagtgatggaagataagaatgttagtttaacatcttccttaaaaggaatctttgcgaaatatctcacaaacaaggcatgaaatatttatgttgttttttaaaggggatttaggagagagaaatatctatcagtggaacaactgtgggtagaggtaagatgtgtcactattctaggccttggatgagttcagatgcagaggtcatttttccatttctattttggtttatctataaatgaattgaagtatgatctagtagtcagtattgtgcagtcttaaaaataaaagctgacttgtgttttttaatgtgcatatgtactttaaaatacataaatgggacctcata

SEQ ID NO: 673332 - DNA, 645 bp, Homo sapiens
gccagaggtgaagtgaaagggcccagaacactagactccagcatgtaaattcctactgctaggagttaaagtcacgtggaccacacctctttgtttaatggaactaggtttttctaggtataaaatgtttactccaggccaggcatggtggctcacgcttgtagtcccagcactctgggaggctgaggtgggcggatcacttgaggccagcagttcgagaccagcctcaccaacatggtgaaaccccatctctactaaaattaccaaaattagctgggtgacgtggtgggtgcctgtaatcccagctatgagagaggtggaggttgcagtaagccgagatggcaccactgaagtctagcctgggcgacagagtaaggctgtctcgaaaacaacaacaaaaaaaatgtttattccaggccatcttccttttctcacacactctagggattaaacatgtttawttgtgagacagctgacaaatggttaggagactaatctctgataacaaataaagaaattggcccctaagtcattctgttgccagggaattagccctttaacttgcaaattagaaataacttagaaagattttaaatataattcaatatccctaacaaatctcaattcagacaggaaaaaaatgta

SEQ ID NO: 673333 - DNA, 928 bp, Homo sapiens
agaacacatggacacaggaaggggaacatcacactccggggcctgttgtggggtggggggaggggggagggatagcattaggagatatacctaatgctaaatgacgagttaatgggtgcagcacaccagcatggcacatgtatacatatgtaacaaacctgcacattgtgcacatgtaccctaaaacttaaagtataataataataaaataaaataaaaaaaagaaaccatctcagaatctggcaactgtttcctatatctgaaatatgtcatttttgcaatattataaacccacttcttacacttccattcttgcagagatgagagcactgggtcaccattgtcatcatgagacatcattatttatttagaaaacgttattgcaatgtccagctacttgctctgcagcagcagcagttagtctttaatctccagcaaagagtaatcacctttgtgactccacttggaatactgtggtgctgaggggctactgtggagacacataggggttaggttcaaagtcagtaaataaagcaaacatcacacccagtcaaaagtactcttgaaagtccttttagactggctccatgttggaaactgacatacctatatctcaagaagccaaacccagagaaatcattcctcgtaagcgggacaaatagctgtttcracaattgagcactaattgtatagaggccatgttgtatgaagaaggcttatctgtaaacactagaatcccattcaccacagcaagatgctcacaccctgaaggctcatgggaactgagattgcctgagaaggacaaatccacccctttcatcttctgctctctcctggactatcgtcattgaaggcaataaccagaaatctacctacagtacttagggtgttcctccctctctcatctttttagtatttcttttttatt

SEQ ID NO: 673334 - DNA, 655 bp, Homo sapiens
agaaaacagagaaggtgggacagccttctccatccaccaaaatgttagctctctctgggcactaggagctggcggttacctgcttggtattggagggggtgggggtatggcccttggcgacgcacaggatcacagcagtcagtgcacaggttaatatttcagcggaggagatccatgcaacacttcattgtccttttaggagatttcaggttaaggaccagcacttaagagtatgaactttgcctggtactaatcagaactgtgttgaggaggttgccttccaggccccaatgagatgatgtttgcccagataattaccagggccccttycctgaaatacaggctttccctgggggctggaggttctgctagcacttcatgaccctggaggtgtggaggctcttctgggggcgggggggtactgcgagtggtgcgtgcattgagccttgcctgcctcagacctcggcacctctgtcatctccctcaagagtagagtttaggaacagagaggtatttttaaaaaggaaacaaggagagtcatgtgccagcagccaggctctgcgagggctggaggacagggcccacggtgctccttgcccgggtgagggttttatgcaccagcagctgcccaggggattggtggcatctccttgtc

SEQ ID NO: 673335 - DNA, 655 bp, Homo sapiens
agaaaacagagaaggtgggacagccttctccatccaccaaaatgttagctctctctgggcactaggagctggcggttacctgcttggtattggagggggtgggggtatggcccttggcgacgcacaggatcacagcagtcagtgcacaggttaatatttcagcggaggagatccatgcaacacttcattgtccttttaggagatttcaggttaaggaccagcacttaagagtatgaactttgcctggtactaatcagaactgtgttgaggaggttgccttccaggccccaatgagatgatgtttgcccagataattaccagggccccttcyctgaaatacaggctttccctgggggctggaggttctgctagcacttcatgaccctggaggtgtggaggctcttctgggggcgggggggtactgcgagtggtgcgtgcattgagccttgcctgcctcagacctcggcacctctgtcatctccctcaagagtagagtttaggaacagagaggtatttttaaaaaggaaacaaggagagtcatgtgccagcagccaggctctgcgagggctggaggacagggcccacggtgctccttgcccgggtgagggttttatgcaccagcagctgcccaggggattggtggcatctccttgtc

SEQ ID NO: 673336 - DNA, 586 bp, Homo sapiens
tgactttgactttgtcttcttcatgacataaacaataaactgyggacttctcaggaagcctcctgggaccctctctgcctcttgaccatacatggctctcccagatgtcaggaggatcttccttctctgtttacaggaacagtccatcccatcagagactgaaaggctgtggcaatgacagcaaaaatgacaccacattcttctagttcaatgccagtgtttgcacccgagagggatgtaattcactgaacacagaaattgagctcattcctgcactaggcaatgatgataatcaaatatggtaaaaattagtcaacttgtacgatggaagccgtgattaagctgatttcaaattttctgtaacagagatggtcagtcttgaaatgcaagaggagagcaccaggacgtgagagcaggtccaggcgacagctgctcctaaatggagattttcttgtattattgttttacagatttccacctgcatctcttaaacagtcatgtcctcattacaatttttcctgggcaccagccatgggacaggctctgtactaggaggctggttagttccattgttcagtgcatgggc

SEQ ID NO: 673337 - DNA, 586 bp, Homo sapiens
tgactttgactttgtcttcttcatgacataaacaataaactgcggacttctcaggaagcctcctgggaccctctctgcctcttgaccatacatggctctcccagatgtcaggaggatcttccttctctgtttacaggaacagtccatcccatcagagactgaaaggctgtggcaatgacagcaaaaatgacaccacattcttctagttcaatgccagtgtttgcacccgagagggatgtaattcactgaacacagaaattgagctcattcctgcactaggcaatgatgataatcaaatatggtaaaaattagtcaacttgtacgatggaagccgtgattaagctgatttcaaattttctgtaacagagatggtcagtcttgaaatgcaagaggagagcaccasgacgtgagagcaggtccaggcgacagctgctcctaaatggagattttcttgtattattgttttacagatttccacctgcatctcttaaacagtcatgtcctcattacaatttttcctgggcaccagccatgggacaggctctgtactaggaggctggttagttccattgttcagtgcatgggc

SEQ ID NO: 673338 - DNA, 645 bp, Homo sapiens
tatataacaatgtaaacatatatgtacataagtaaatgtatacatttaaaagtgaaaatcgttcagaaaggtcttctcctccttccctcaccaaaatgggattcattcagttctttatactattttattccaatttaaagcttgtagcgttcaattttctttttttcttgtaacccaccacttgtgggttcagagggcctgcctgtaggtactctcctttccaataattcaaatagctacagaygttgagaaggctgttatttctttaataatttctgttcaaagattttcagttctggagtgtaccagattcaatggctataacctcaataataaatagtaaaatgctctgattttaatctactttcagaggttagttcttatcagtgaactcttttaaaatctttcatgcatgaaatgtcaggtttataaaaatcaagtttctttgttctctgttttatttactgattttctaattttgcatttaaaagaatacaggctatataaatacctttgtttgtatttttaatactttaaaaattttcagatgagttatttgtttattgcatacaatttttctccagactggaaggaaggcaatgattatactctcagatttcaatagaccggtagatgctgaggact

SEQ ID NO: 673339 - DNA, 784 bp, Homo sapiens
gtctcgcactgtcgcccagtggtgcaatctcggctcactgcaagctccgcctcccgggttcacaccattctcctgcctcagcctcccgagtagctgggactacaggcgcccgccaccacgcccggctaattttttttgtatttttagtagagacgaggtttcaccgtgttagccaggatkgtctcgatcttctgaccttgtgatccgcccgccatggcctcccaaagtgctgggattacaggcgtgagccaccgcgcccggcctagaatctttatcttaaagatgtgttgtcacctaccaactgatagttctgccaatggtaatgccatgttaatgttccaaaagaagggcttgccttttattggtcttatgtccagttgtttaaaaactacattctagctatgtagttatcatagcctttttatatttattttttgaaaacctagtaatgattcattacaatgggttcattgatctatttatggcagtaacatcggtttggaaagtgggttacactgcaaaaaatagaatgtgaacaaccatttgagaggaaaacaaaggaatttgatcttcgggacttaaattattctatgtgtaacacacctagcaatctacttatgatcctttataggcagacacataattattcaacctaaaatctaaaacatgactttataagaaatgtagaagaaagaactctcccttttcaaggctaatctacaactactgctttcttagaagctcttagttactttgaatttcttttcccatctcgcttaatata

SEQ ID NO: 673340 - DNA, 689 bp, Homo sapiens
gaatctgggaggcagaggttgcagtgagccaaaattgtgycattgaactccagcctgggcaacaaatacaaaactctgtctcaaaaaaaaaaaaaaagttatccataacagaaatccacattttggtaagcaagttctatgcaaggtgtttgttggggcagtggaggagatacaaaatcatgtgggccagatgtatctaaatcaaagcataaatttgagatatccatagaagtagaaaggctgcatattttttagaaaattcccccaaaatatttttttcaaatgttttcagtattatttgacagggcagtttaaagttacattcttaaatacctcttgccaattaatggcagacccattaattagactcacaacctttttatcaaagctaatcctaaccaggacatgttagaacagacactgtctaatttcaaacaatgcaacttcctactgaatcttcaaggataaagtagctgaaaagagaacctagagttgtaagcagctaaaggttggagaatgtttactaaaaataattattaataatcatttgtgtagatatgtggctgaaaggatcacttatgtaagtgagccagttgtacacaagtaaatattggttatttagcttaaagaatctgtcattctttgggacctgacattttgcaataagagttgattaaagagtattctga

SEQ ID NO: 673341 - DNA, 595 bp, Homo sapiens
aaaaatagctaattttggacgatagcctaaagaaggtaagtagtgctgaacagaggagttagagactagaggaaaatgatgaaatcttcagcagatgtagaggagaaaaattctaaagcacagtgaaagaagaacgggtagaatattgttacgttttatgtagtaactctctaaacttgatttcagagtttgttggagtcttstaatctacagaaatcaatgtacattgacagagtcaatctcaataatctagaaatatatacattataatgtactaaaattcttttctaactactgacaaatattattagtctttggaatttgaaaatgagaaatcagaattcctggaaattctgtagaatcccaaagccatagtcattattaaaatacttctagtatttttaaactttttattcattattatagacatctaaaaattgcttataacataaggagtattaaatttaattgtacctgcaatggactgtggccaatagttaatgcattggaaaatgccagcaaatatcatcaggtaataacttcaccttcaaatttccttgttgattgacaaaggcaggccaaaatttcttaaaac

SEQ ID NO: 673342 - DNA, 595 bp, Homo sapiens
aaaaatagctaattttggacgatagcctaaagaaggtaagtagtgctgaacagaggagttagagactagaggaaaatgatgaaatcttcagcagatgtagaggagaaaaattctaaagcacagtgaaagaagaacgggtagaatattgttacgttttatgtagtaactctctaaacttgatttcagagtttgttggagtcttctaatctacagaaatcaatgtacattgacagagtcaatctcaataatctagaaatatatacattataatgtactaaaattcttttctaactactgacaaatattattagtctttggaatttgaaaatgagaaatcagaattcctggaaattctgtagaatcccaaagccatagtcattattaaaatayttctagtatttttaaactttttattcattattatagacatctaaaaattgcttataacataaggagtattaaatttaattgtacctgcaatggactgtggccaatagttaatgcattggaaaatgccagcaaatatcatcaggtaataacttcaccttcaaatttccttgttgattgacaaaggcaggccaaaatttcttaaaac

SEQ ID NO: 673343 - DNA, 434 bp, Homo sapiens
aaaatgcatttatagttcaccaccaatctattgtagcctttgtccttttttattatcctcattttcaccactcttccctccaaaaaagtcctggcatgcttttattttatcttatcctaaaaattgttgcaataaataactgcattccatctaatagctgcagaatacayattcttcttaaatgcacatgggacattctctaggatagatcgtacattaggcaaaagcacaattcttaatatattcaggaagattgaaattatgtcaagcatcttttctgatgacaacatttctaacactagaaatcaataataggagaaatatcagaaaatttataaatatgcagaaattatacaacatgttcctgaaaaagaatgggccaataaataaattaaaagggaaactaaataatttttagaaaattgaaaacttga

SEQ ID NO: 673344 - DNA, 434 bp, Homo sapiens
aaaatgcatttatagttcaccaccaatctattgtagcctttgtccttttttattatcctcattttcaccactcttccctccaaaaaagtcctggcatgcttttattttatcttatcctaaaaattgttgcaataaataactgcattccatctaatagctgcagaatacataytcttcttaaatgcacatgggacattctctaggatagatcgtacattaggcaaaagcacaattcttaatatattcaggaagattgaaattatgtcaagcatcttttctgatgacaacatttctaacactagaaatcaataataggagaaatatcagaaaatttataaatatgcagaaattatacaacatgttcctgaaaaagaatgggccaataaataaattaaaagggaaactaaataatttttagaaaattgaaaacttga

SEQ ID NO: 673345 - DNA, 434 bp, Homo sapiens
aaaatgcatttatagttcaccaccaatctattgtagcctttgtccttttttattatcctcattttcaccactcttccctccaaaaaagtcctggcatgcttttattttatcttatcctaaaaattgttgcaataaataactgcattccatctaatagctgcagaatacatattcttcttaaatgcacatgggacattctctaggatagatcgtacattaggcaaaagcacaattcttaatatattcaggaagattgaaattatgtcaagcatcttttctgatgacaacatttctaacactagaaatcaataataggagaaatatcagaaaatttataaatatgcagaaattatacaacatgttcctgaaaaagaatgrgccaataaataaattaaaagggaaactaaataatttttagaaaattgaaaacttga

SEQ ID NO: 673346 - DNA, 1837 bp, Homo sapiens
tcaaaaggctgaaaactaaagttgtatagctttttcctctaagaaacagcactaaaactacaatatataatataaaataagttgacaaaaacagttcttacttgtaatttcaaaataataatttctayatatttgtttttattggcatgtattcataaaataatgagagtctggataaacaataaataaagtaataagctggagcaattttcccttgtgtgcaatatgaatcattgaagatcaaggcctctcagcatctccatgactcactactgcaggatgctacacttattcagaaagcccagtcaagcgtgcaccaaagactgtgcactcagcaggaagggagtccttttagcattatgaactcagcgggatcaacagttacaagctccataatagacagacttgctgcagatgtccctttcttgtctctatattgcagttttcactcttcattttacatggaaatatgtagcatgtctgtgtatgcttaatccatcctggcaatgaatataacagtgaagaaggcactttgctccattaagcaaattagatgccaaatattctgttaacctacatcatctatatgtaactattctgtaggaatttacatttataagtcccttagttaattatattattaaataaaatatatgttgagcattgcaaattagcttcttgttaaagaccccgtatttgaaaagtaattgaaatatacatgatttcaattatataggtgttcaaaatttagttggggatatgcacaagaaattgataaataaaatgtggcaatatagtgtcgtatctagtactttaaagatttagaattagagcatgtatttgaatttatatcatgtatccacatttactattaaaataggtccctttttatgttttacctcttctaaaaattcacagaattatgtatttcctcttgtttctccgggaagaaagttaatttctactattaaataagaccttacctaggcagcattttaacattctaagcctcagattctttatctctaaataggatggattatatttatattggaatatttctttttaaagccagagcaaaacaactgtgacatttaacacatgaaaattggcattggtcattgcttatgtcgcatattccttataatggttgtgtgtaaaaacactaatccagtcattattttacagatgagaaaagtgaaataaatacataacttaacaccatctaattataatgttcaggtacttgatttaaatgcatttatattttgtttacgtattttggacttaatattttaacattcttcccattttataattccttaatgaaacaatgtctcatagattaatacaaaatatgaagaaccaagatacttcccttcactgccccaggaaatgcaagggagaggatatgaaataagcttggccatcaaatcagttcttctatagaaaacctctaatcttcaagacaatgtgataaaacaatgaggccattgaaaagaatttatggaggactattattaaaaagtcaaaaaataacagatgctggcaaggttttggagaaaagggaacacttattaactgctggtgggaatttgaattagtttagccattgtggggagcagtgtggcaatttctcaaagaactaaaaacagaactaccatttgacccagaaatcccattattgggtatatacccaaaataatataaattgttctactataaagacacatgcacatgtatgttcattgcagcactattcaccatagcaatcatggaatcaacctaaatgcccatcaatggtagactagataaagaaaacatggtacatatccac

SEQ ID NO: 673347 - DNA, 536 bp, Homo sapiens
agatgactgcctcaaggtcatgatatactattttaagtrgtgaattctaatgaccctgtttttgacacatgccaagtgttgtaataagtgaagtcagcctttaaataacacacttttccccctaaatgggagctgtgtattacaaaggtcattagggttgatgctcaacgtccaagttttatgaccttgttctgcctttgtaatatgagaccagcgacttcagcgtattgtcatcttggcttcattgcctgctaaactaaaatatatttgcctcctgagagaatatacatctatattataatatattaataataatgtggtaataatatacgatgtaatatttatatatttagagaattatttaattaatatttttaaaggttttaatattttaatatatatttaatgaattatttaatatatatttatatatttaacgaattttttaaaggttttaattaatatctatttatatatttagagaattgtttaatgaatattttttaaagattttaatctatgtattttgatagcaa

SEQ ID NO: 673348 - DNA, 536 bp, Homo sapiens
agatgactgcctcaaggtcatgatatactattttaagtggtgaattctaatgaccctgtttttgacacatgccaagtgttgtaataagtgaagtcagcctttaaataacacacttttccccctaaatgggagctgtgtattayaaaggtcattagggttgatgctcaacgtccaagttttatgaccttgttctgcctttgtaatatgagaccagcgacttcagcgtattgtcatcttggcttcattgcctgctaaactaaaatatatttgcctcctgagagaatatacatctatattataatatattaataataatgtggtaataatatacgatgtaatatttatatatttagagaattatttaattaatatttttaaaggttttaatattttaatatatatttaatgaattatttaatatatatttatatatttaacgaattttttaaaggttttaattaatatctatttatatatttagagaattgtttaatgaatattttttaaagattttaatctatgtattttgatagcaa

SEQ ID NO: 673349 - DNA, 536 bp, Homo sapiens
agatgactgcctcaaggtcatgatatactattttaagtggtgaattctaatgaccctgtttttgacacatgccaagtgttgtaataagtgaagtcagcctttaaataacacacttttccccctaaatgggagctgtgtattacaaaggtcattagggttgatgctcaacgtccaagttttatgaccttgttctgcctttgtaatatgagaccagcgacttcagcgtattgtcatcttggcttcattgcctgctaaactaaaatatatttgcctcctgagagaatatacatctatattataatatattaataataatgtrgtaataatatacgatgtaatatttatatatttagagaattatttaattaatatttttaaaggttttaatattttaatatatatttaatgaattatttaatatatatttatatatttaacgaattttttaaaggttttaattaatatctatttatatatttagagaattgtttaatgaatattttttaaagattttaatctatgtattttgatagcaa

SEQ ID NO: 673350 - DNA, 536 bp, Homo sapiens
agatgactgcctcaaggtcatgatatactattttaagtggtgaattctaatgaccctgtttttgacacatgccaagtgttgtaataagtgaagtcagcctttaaataacacacttttccccctaaatgggagctgtgtattacaaaggtcattagggttgatgctcaacgtccaagttttatgaccttgttctgcctttgtaatatgagaccagcgacttcagcgtattgtcatcttggcttcattgcctgctaaactaaaatatatttgcctcctgagagaatatacatctatattataatatattaataataatgtggtaataatatacgatgtaatatttatatatttagagwattatttaattaatatttttaaaggttttaatattttaatatatatttaatgaattatttaatatatatttatatatttaacgaattttttaaaggttttaattaatatctatttatatatttagagaattgtttaatgaatattttttaaagattttaatctatgtattttgatagcaa

SEQ ID NO: 673351 - DNA, 1244 bp, Homo sapiens
aatgaataatcagctatccaaattggctcaaggacgatcaaggggaatatttgacctctactttagatgatctacatttttaatgttagtatttgtgacttagcagagcggttgatcataactggccttctttcttcctcatctgtgagcatacatcaaaggctccaaaatatgcacacaagacaagtttaaaagccctcatcattgtgaaaatttcttgtgatttttattttaattgggagagaaggaggtgtggacaggagatgctcatggctattttttctacagatcaaatccatagatctacattgtattgtttttctcttttcagaactttagtataaattcattacttgtcttattattgaaaaatattattcagacatagtgaggtactttgatgtagttctagtggctatatttgttgtttcttagaagacttagctgtctgcaggggaagtaaaaataatggaattaagcagtgggatcatcccccttcaaaagtcttacatttattagcatatatttatttttttaagacagaagtccacaaactatggcataataaacaataatgctattctggaacatggaaagtcctggactggtcatcagatataggctctagccttgacttcaccagcaactgggcgtggggccatagataactcatttaactttcatgactctcagcattctcatctacaaaaagtgttggattaattcaatcagtggttctcaaatttgaatgtgcaacagaatcactggacctcattaccatattcagtaaagcttgggtggaaatctgcaaatttgcctgtctaacatggtcccaggtgataatgatgctggtgtggggagcacactttgagaatcactggattggatgatttctstgactacttctggtattaacattgggtgacttttatgctctgtggctagaatgatctgcttagagcttcagaatgcattggctgtgatgggtccaatgggcaagtgctacgagtagaactgaataagagcagaaatttgaatcaatagagtcatatggttttaggatggcccaaatattagcagtatctctgagtggtcaaaccccccaaccaagagttggtgtattggagtccagcagcaggggcatcacatggtggtggctagagcaagctgagcatttggttggactgatgagatcagtgtaaatgatgtgacacatttcaacaggcttatgtacatattggata

SEQ ID NO: 673352 - DNA, 633 bp, Homo sapiens
tctcactctgttgcccaggctggagtgcagtggcgtgatctcggctcactgtagcctctgcctccccggttccagcgattctcttgcctcagcctcccaggtagccgggattacaggcacacgccactacacccggttaatttttgtattcttagtagagatgaggtttcaccatgttcgccaggctggtcttgaactcctgacctcaggtgatccacccamctcagactccgaaagtgctaggattacaggcatgagccaccgcgcccagcctttactacttcttaaatcatttcttaaaagcttttttagtatcaaaaaacagctccttttgagttcccactatttgttgagtgtgggtcatctctgtgttctcactttagaaacacaggctcttgactgaacattgtttccaccttgcttgtccaaaaccagcatagttaggtaggtattgaaaacctggcactttctctcccttctcttccttcattcattcacatgcctgctttgtgcccagtgttattgccagccccaaagtgtgcccggcagaactaggtatgctacctgtcctccagacacgtatgtgtagtggaggaaaatgacaagcaaacagctggtgctctaatggaggtg

SEQ ID NO: 673353 - DNA, 1185 bp, Homo sapiens
tgcatgaaaacaatgatacatacattttgcaggaacaaaagcaaaaagataaaccattaacataattgcttatggggtggtggtggagaatggaaggggctgttgggataattaaatgaaccttagaataggccaaggttgatgtgccaggaacagaagagtaagatggcctccatggtctgcacctgaggctctctaacagatttattgaaagaaaggaaacacatttattgaaagaaaggcataccacaggaaataaagtggtatggctcaaaggtataatgagacaccatgcagccattatacatattgcagaagtttgcttataaacattgaaatatatttgttttaatattcaagtgamactggcccaagagtttcatagacagttgcttttggataaacataaatatggacccttctgctgtaaaagcttgaaacatatctgttttatctgagttcctttctcaggaaatgaccttcaggcctctcacaaaaagtatcaaagaactgaaaccagattgccacaccagatgccccacccctcattcactatgattgcttccttgcccctcccaagttcctgttttcttacacattgttacatttttttgtgtgctatataaacccttggttttagttggtcagggagatggatttgagactgagctttcttctgctctgctgcatcactcaattaaagccttcttccttggtgacacctgtcatctcagtggtttgctttttgtgcagtgagcagcaggacctagaccaaacccctggtgttttggtgacacaagtggaagagcagaagagtgggctaaagagcatgcccactgttaattcattattcagcaaaacaaaaaaatacctataagttaaagaaacagagtggctggtaggatttcagggattcaaatactttcttctcatctatatttccaacatggcttcaatgaccaggtctgggcaataaggagaaaaaggaattattttttaaggaagacttttgcttttaaaaagataaaaaacagagatcatcggttgtgagaatgtacaggtactgaaaaggaggcagtgtttttctaagtctttgtgttttcaaatgcaaatggtaaagcccaagctttgagggaacagagggagccatagctgttctaaggatccccatttgaatggggcagt

SEQ ID NO: 673354 - DNA, 1067 bp, Homo sapiens
tgtcaattttgatattctttatgagtattttatgactactctacctacacacaattaggctactatgtctcacatccattaaatacagtgtttccttaatgcaaaaagaaatcagatatttttaaaattaagaaatgatttccccaatgtttgaatagttattcatatcaytacaatgtcaaagattcacagtgagcatattttattagatgacaaccacctcaaaaataacgataatattttttcaattattttagtcccttttcatttttcagcctataattccaatatttctgagactgaagatgtggcaggcctctggtggcttgactggcttgactaggcccctttaataacttctgtttgctaagaatggtgatgtgacatggacctgcatagagaaggcctgtttgatattacctttccatctcagtccggtggtgtgaccgagactcttagctacattgctttaggcctcctggcaagagaaaacctgtttaattacctgccccagctgtacttactaagtggaatgattattaaatctgtctctctatttcacagtttcagtatacaatttaaatctatgccaagacgaatggaggtcatagattctgtaggagtagacaggactaaaatcatcattgtgacaggtgtcttaagagcattgtggtctaaggctcagccaaccctctgtcctctaatataaaaataggaggttcttagatgctctgccaactttgtaactgcacataacgtctcatcatttagccatgttattgtccagttcatgttcaaagaaggataataatacttaaccttttctcctctttacctgctgacatatcatttgagttatttgttctgaagtctaaagacaagataaaatcaccaactttgtgatggttaattttatgtggcaacttcactggaccatgggttgtccagatatttggccaaacattattctgggtgtaactgtgagggtgcttctgaatgagattaacaattgaatgggtaaactgagttaagcagattgcccttctaaatgtagatgggcctcttcc

SEQ ID NO: 673355 - DNA, 1067 bp, Homo sapiens
tgtcaattttgatattctttatgagtattttatgactactctacctacacacaattaggctactatgtctcacatccattaaatacagtgtttccttaatgcaaaaagaaatcagatatttttaaaattaagaaatgatttccccaatgtttgaatagttattcatatcactacaatgtcaaagattcacagtgagcatattttattagatgacaaccacctcaaaaataacgataatattttttcaattattttagtcccttttcatttttcagcctataattccaatatttctgagactgaagatgtggcaggcctctggtggcttgactggcttgactaggcccctttaataacttctgtttgctaagaatggtgatgtgacatggrcctgcatagagaaggcctgtttgatattacctttccatctcagtccggtggtgtgaccgagactcttagctacattgctttaggcctcctggcaagagaaaacctgtttaattacctgccccagctgtacttactaagtggaatgattattaaatctgtctctctatttcacagtttcagtatacaatttaaatctatgccaagacgaatggaggtcatagattctgtaggagtagacaggactaaaatcatcattgtgacaggtgtcttaagagcattgtggtctaaggctcagccaaccctctgtcctctaatataaaaataggaggttcttagatgctctgccaactttgtaactgcacataacgtctcatcatttagccatgttattgtccagttcatgttcaaagaaggataataatacttaaccttttctcctctttacctgctgacatatcatttgagttatttgttctgaagtctaaagacaagataaaatcaccaactttgtgatggttaattttatgtggcaacttcactggaccatgggttgtccagatatttggccaaacattattctgggtgtaactgtgagggtgcttctgaatgagattaacaattgaatgggtaaactgagttaagcagattgcccttctaaatgtagatgggcctcttcc

SEQ ID NO: 673356 - DNA, 628 bp, Homo sapiens
taggttaaatgaataatgcactagaccaagagagctgaccagaggtttgctgtatattctttttaccatatatgctagacagaatttgatgtgactccaaattataaaactgtaaatcataaagacaaagactttgtcaataagcatttataaggttaacaagggaaaacctgccccctttcctaaccccaccaaaccataaagtttttagtacaggtagaacacaagccataaagcatgcaaataatgcattattattggggtattcataaaagcttygtaaccagctgagttgtcttgagcaaaccacaagagataatacaaatattgaacaaaatatggtaatttaaatatgactttatgctcttctttactgtaattttgcccagctatatggaaatgtcacagagcctttgtgtaatctttgggatccaaatcacaaaacagagaattaatgtgatggaggaaaaatacacttagagtttattgtgtgtttgattctaaactctgtaactcattttctctgttatcttagactcatcatttcactctcttgatgtcacttcatctaaaaaaataaagggtttattcttgaatgatcatctgaaagttttcttccaacattcca

SEQ ID NO: 673357 - DNA, 1156 bp, Homo sapiens
gacctcttatttagagacagaggtttaaaaaatatatatcatttcataaggactcatgaggaaattattaacacatcagttataaraataggtgattagaggctgggcacagtggctcacacctataatcccagcattttgggaggccaagacaggccgatcatttgaggtcaggagtttgagaccagcctggccaacatggtgaaaccccgtctctactaaaaacacaaaaattagctgggcatggtgccaggtgcctatgatcccacctactcgggaggctgaggcaggagaatcacttaagcccaggaggcagaggttacagtgagctgagatcgtactactgcactccagcctgggtgacagagtgagactctgtatcaaaaaaagaaaaaagaaaaagaacaggtgataagaaagttagaaagttattgcaccacctttcctgcacactagacagttacagttcttggaaaatctggaataacccccattaatctgctcctacaagccaggaaagttgccatttcagtcatcctgcgaaggcttcctgtgagttaaatctatcttgtcagtggttctggagtattcaaggcagctggcagatgctcaatactgctgtctaaaaccctcaggggtctagacctgaggttgagatcatttctctgcccagccttcccaggcgttcactccaaacatgtacacttttctttgctgcaaaacttacagatggttagtcaccttagcgggcagtcctcaaggaggtaggtagataccttttgttagtaaagaaggtcactcatgtctgtcccccatccttataacctcaatctgcctaaggctggcctggggtcttcctttgtggcattaagacattttttgttcagccctggggggtttatatattgcaatgtcatgtgttcccataaaacatggggttccccatacttcttatttctctactgttgttttacttgcttatttatatgaacagggcttttccttaatagattccttaaaactattcttctaaaatttgtctttttcacatactatgcattaaaaatgtacacaaactaaatggcatttacacttaattcagtacattcatggaatgggggctggaaggtaactggaagaccctctattctagcag

SEQ ID NO: 673358 - DNA, 689 bp, Homo sapiens
  misc_feature 390, 399: n = A,T,C or G
tcaatttagggcggggtccaagagagtatattcctaacaagttcccaggtgtggctaggctcaggcccaagcaccatacttggtggtaacaaagatcttgagctccacaaaatcaaataggatgcagtgtcattgttgttccaggaaatcatgggaagtactgaggatgctggtacctcccactctgtcagtgaactggggagaaaagggcagatggtgcagtctgctccaggttaaaagtctatgtagatctctaggttacctgatatgttatctagtatctatatcatggtggatgcaaaggagttgatttaattttcattacttgttttctaaggtggttttacttacttacggtgtgtgtgtgtcttttagtgaagaacacgatantgaagagtntgtgatactctgctttgttactgccaaagaggttaagatgagcygggataaaatgactgccatcgaggtgctgccctgaggcactagggaattaacacgtgtgtgcagcacctgacacatgccctggacttccacgtcgctgagaacctgcctctgctcagtcagcctccttggggcttccctactcataaccttcaagtgttactatgcctgaagtgtttccttccttctttcagcaaatcttcattgaggttttttaggtgctgggtagaattcacaaatgcagggac

SEQ ID NO: 673359 - DNA, 1204 bp, Homo sapiens
tccaagcatgacagctaaatgtaaagtagctgagttagtggcatcctttaaaggtaatcatgaaaaatgaccacgcttccggcatcctcaaactttgatgttattctcttgttttcttcaagatgagtcagatccatacatggatttacatctctttctgagctcttcacatttatagtattatagaaggattggagggaggatacgaaggtgattgaaacaataagaaatcggatatgcaaagagaagttcaaagatctgggatttcttgtcactggcagaaaaatgagctaagtttgaactgttgctaatgatattaacatgacccatagaaagtatcgtggctggtgtgtgattccaagcagcccccgcgatgtttgtctctggaacaatagagatcacctaactttagctatttaaccagtcagagaaggtcgccattttgatttcctattaatatggaataaaaggcattttcaaaaatactataggagatgctgagggcattaattggaagtaaactgtcctacatctagctcaagaagttttgtcagtgcagtattttactgctgcaagctgtggcttataaaactctgatgtaaggcttattaacaggttgaagactgtgtttcctgatttagtacaaaggagtttctctgaggcaaagctgggctttcttctggccaatcctccagactttccctgctgaagattatccagacctttatggggtggaagtcctatattgcagacatgggggtgcccccagtggaacacatttccaccctcagaccaatcgtgtagggcagatttggccattacagtaytggagatgatagtcgtttagacaggggtggatggatcccagccaagaacaagaggcgacttgaaactctcacctgtgcaggtggagtgcaccactcgtcactgtcatcccccccacatgccccagagtcggttcaggaacagtggggtcagttgattctcaccttgattgattgcctcccttgaagaattttctcagatgactttaggaactgggatcttacccatgcaatacctcaatatatcattgcaaattagtttcccaacatttttagttctttttgttgcttgatcttctgtatatcaaaacccattctagatttttgactcagctggagtttacctttacctacttacctagcagtgtttttcattctca

SEQ ID NO: 673360 - DNA, 1551 bp, Homo sapiens
aatagctttctagtacctgcagaacaaagtagtccacatctcttggtgcggcatgcaaggccctgtaggacatggccctgcagcctccacagcctggcccctcccttcccttgcatggattctgagctctgcagatgctgggctcctcacagggccctgattgtgcttggccattcctctcctcactgttgttaagtctgttctatctccatctggggcatgccagcactgtcacctggccagtgcctaggtgtcacccacagaaagtctttgatagcccacgagcccatcccaggagctcacattcgagctctcagagcagtcataattctcctctcacctgaataacactggactctctttcctgactccatctaccctgggagctccgtgagggaaggaactttgtctttgatctcgggyacatagcagatactgcttactggtcagacataatataaaatattttttgttgactctcccagaacaaaaatacatgtttccctttttcaaagatagcatgatccataatagaaacagctttaattttggagccaggaagacttgagctccaatcccagttctgcatgaattggttgtatgaattttagtaagtgatttagcttctctggccatctgtttacttatcggtaaaagaggaccaataatggaatacgactgaggattagggattgggagtatgtaattcccagctaaatgcttggctcatgttaagtgtccaataaacggtggctgtttattaggttatggctttctttctctctggcttattttttgtttatttttcagtaacacacacattatcagcctttaaggttaggaaagaacttctgcttgaaatatttaaatgggagaaaacatttgagttttctcatttaaactttaacattttaaatgttaatacatttaaacatcaagcaagatatcccataatggttttctagaacagctaattgattaatcatataaaccttaatgggaagaaatgcaacattatgtcaattagatcaacagttaaatgtccaaaactgcagaaaccattatgtagcatgaaaggcaagcagaaagagtagttcactggttttcaacacaaattttttgaatataaatttcttttttctttttttcttttcttttcttttcttttttttttttttttgagacagagtctcactctgtcacccagactggagtgcagtggcacgatctcagctcactgcaacctctgcctcccgggttcaagtgattctcttgcctcagcctcctgagtagctaggactacaggcacatgtcaccacacccagctaattttttatctttagtagagacagggtttcaccatgttggccaggctggtctcaaactcctgacctcaggtgacccacctgcctcggtctcccaaagtgctgggatgacaggtgtgagtcactgtgctcagcctcttgagtataaattttagccacattgtatttttacaaatcagagtacagttttgataaatctgtctcttgttaattaagataattcatt

SEQ ID NO: 673361 - DNA, 613 bp, Homo sapiens
tagctaagctcattcccacaggctgatttttttttttcctaatacagtggagtcacagagtataggatttatgtctgtgtcttaacaaaatttcaaaatgttacttgtcatgtacttatgaatcatttacaaatggtcaatttcaaatcctcaaatgtcaaagctgtactggataaccggcaaagaaaaaacaaccccacagttaaaccatagcatatacttcacctaatatgttagtatttccatgttaatatatatagccttcataattataattttaggtgactaatactttatcaacaaatttgctctgtttactcagttcgttagtattgggtagtttggcttttttttttggtttttttgaaacggaatcttgctttgttgcccgggctggagtgcaacagcacgatctcggctcactgcaacctctgcctcccgggttcaagtgattctcctgcctcagcctccygagtagctgggatttataggcacgtgccaccatgcccagctaatttttgtatttttttattagagatggggtttcaccatgttggccaggctggtcttgaactcctgacctcaaatgatcctcccgccttggcctcccaaa

SEQ ID NO: 673362 - DNA, 1160 bp, Homo sapiens
aataaaaattaaaaaattagtggcacatgatgatttgcagctacagtcccagctactcaggaggctgaggcagaaggatggcttaagcccagaagtccaggctgcagtaagctatgactgggccactgccctccagcctgggtgacagagcaagactccgtttctaaaattaaagaaaaaaaaaaaagagggtacatagtcaaactcagatgtttcccataagattgcaataagagttgctaagctgagaaatgagatttgttttcagtttcagagaaaatgaatcattcastcagggcaggagacgataaagaagaaagaagaaaagggactgttttcagaccaagacaacatttggactaaaaacttgtttccttaaattcagagtggaaagaagagaaagaatagctgtactactaaaatcataaggtacttcctcaaaattctgcatagagctgcaattcaggtgctgtaactgttctattgcctttattaaaacagcatcacaggccaggtgtggtggctgatgcctgtaatcctagcactttgggaggctgaggcaggcgaatcgcttgagtccaggagttcgagaccagcctggacaacatagcgaaaccccatctctacaaaaagaaaaaaacaaacccagaaattagcagggtgtggtggcgtaagcctatggtcccagctacttggggggctgaggcaggaggatcccctgaacctgggaggtcaaggttgcactgagccgagactgtgccactgcactccagcctaggtgacaaagtgagaccctgtctcaaaaaaacccaaaacaaaaaaaaccagcatcatagatgagaggttaaagaacagataaaggagaagatttcataaaagtgtgaaatttttttggtctcagcatatttaaatgcctggctataatagccttctccaagctaatttataattgagggtttgaaataaatgttatgtgttttaaacatatttaaagtagtttccccatttttttttttttgttttgtttttgacgatggagtcttgctctgtcacctaggctggagtgcagtggcataaccttggctcactgcaacctccacctcccaggttcaagtgattctcctgcctcagcctgccgagtagctgggactacaggcgcg

SEQ ID NO: 673363 - DNA, 1763 bp, Homo sapiens
cactcatccactctcttctcattttacaaatgaggaaactgagatcaaaataggttaatagactgacccaggattctgccattaatggcacagattgagttacagctcaatttttcaaccaccagggcactggtgatgattttaaagaactaagataaggagaagaagactaagtgttaaatgcactagctgcatttctattttaaactactgtaatatagtaattctaaaaggcctcttttgctggtttgcttcttttatgaaagcagaatcaaactcagatttcttgctttaaataattcagttgatgactgaaatttaaccaagtggtgagtttcctcacatttttcagaacagcccttaagaaacaaaaataattatgtttgttgacttaaaaaatttataggaatacttactttttcccactttctccctttttcccaacttgaaagcttaacctcatttgatcatcttccattcaactttcaaacactgtccatactgttgtgtagtaaccatgcagtgttcttcttcagtaggggataaaatgcaaccactatctaggggtgaataaaaatatctaacggtattagcaaaccagtataaagtgtacagtagaaaaaatttaaacttggaattatgtcctcttttccagtttctctggtgttaatattttctggaaaacatcctcaaggcttgtcctagctaccatcttcctgacattgtcccaggtgttgcagttactaatgtgagcaagacatcctcctggccttagcgagtgtacccaggagttatataaaggatattctgggagccggaagaaggagcgaataaagcagactgcacagatggaacatggaaaggcttttaacagaaatgaatactttcagactaggtttgaaggactgagtaggagtaaactaaaagagaaaaagcaggacaaaagaagcaccactttggaagctcaaagccgcactggaaacacagtctttcaggatgtctgaaaggggcaagtctgtttgtgtggggtaagaaatgcggggagacaaacggacagtggacagattgcagagagctctgtgtgctgagaggagggtgcagaccagatttttaaattgagaatgcaacagtgaaggatttcaagcttggagtgagaggggagactacgagcctgcagtgataaggcaaagctgaagatttcagagccaaggccacaccctacagttgccatggaatggggtggcacagtgggctttggaggtaaagtctgcagttgagaagttcaagggtagtaagtacttaatgccaggtcaatcatcccttttaagacacagatatcatctgcagcgttttcaggaacagcgatagagaagaaaagcrggcagctactagatattcaaatcttccacaaatgtcagggagagagtcaggcagttggtagaagagacctgtaaagctgggtaccataagcctcaacacaggtgtttttatttcaaggctggggagctgtgctttggaaaagcaatgaggaggtaacaggaagtctcttctccttctaaatcctgtgttcatggaggagggtgggttttctcctcttgagagggagttacatacaagtttaagggaaaagagtctgaagtttccacctaaatgattctgaaagaatcaggtaagtagttgcttagaaatattgctaaatgttgcataaagagatacagctcttctatggagtaacagatcccggctactcaatagctttttgc

SEQ ID NO: 673364 - DNA, 642 bp, Homo sapiens
gtttctctagagaaccctgaccaatacaattatttagtatcaggccaagttaaaggttttttttttgttttgtttttattttttattatactttaagttctagggtacatgggcacagtgtgcaggtttgatacataggtatacacgtaccatgttggtttgctgaacccatcaattcctcatttacattagrtatttctcctaatgctatctctcccccagcctcccaccacctgacaggccccggtgtgtgatgttccccaccctgtgtccaagtgttctcattgttcaattcccacctatgagtgagaacatgcggtgcttgattttctgtccttgtgatagtttgctcagaatgatggtttccagcttcatccacatccctgccaaggacatgaactcatccttttttatggctgcatagtactccatggtgtatatgtgccacattttcttaatccagtctatcattgatggacatttgggttggttccaagtctttgctattgtgaatagtgccacaataaacatacgtgtgcatgatttacaatcctttgggtatatacccagtaatgggatcgctgggtcaaatggtatttctagttctagacccttgaggaatcaccacactgtcttccacaa

SEQ ID NO: 673365 - DNA, 642 bp, Homo sapiens
gtttctctagagaaccctgaccaatacaattatttagtatcaggccaagttaaaggttttttttttgttttgtttttattttttattatactttaagttctagggtacatgggcacagtgtgcaggtttgatacataggtatacacgtaccatgttggtttgctgaacccatcaattcctcatttacattaggtatttctcctaatgctatctctcccccagcctcccaccacctgacaggccccggtgtgtgatgttccccaccctgtgtccaagtgttctcattgttcaattcccacctatgagtgasaacatgcggtgcttgattttctgtccttgtgatagtttgctcagaatgatggtttccagcttcatccacatccctgccaaggacatgaactcatccttttttatggctgcatagtactccatggtgtatatgtgccacattttcttaatccagtctatcattgatggacatttgggttggttccaagtctttgctattgtgaatagtgccacaataaacatacgtgtgcatgatttacaatcctttgggtatatacccagtaatgggatcgctgggtcaaatggtatttctagttctagacccttgaggaatcaccacactgtcttccacaa

SEQ ID NO: 673366 - DNA, 1149 bp, Homo sapiens
ttcccccaccagtccacagagaacctgaaatcacttggccaataatattctagaaaaagtctaagttgtgaggagactattggtagaaactgtattatacgaaatccaattgttctttatgaaacccaaataggattcctcagacccttggcactaaagaaaaaatatataccctgagacttttccaaaaccttaaatttgaaaatcctactagcatgtgattacgatgcccccctaaaacacagtatattattatatttttaggagagtcactacttaccataaactgaaaaattttaagaattaacatagacatgaagcctcaaagtaaatcaacgtattactattcatcttggattctcaaaccccctgccctttgatgcgaaatgtaataaatacatcatattaatactttgtagttggcagggtagaagccagcttgaaaggcagatgctggccagacagctaggctcactcgctagcgaaatgactcgcatctgcgaatttaaaagtcatgatacgtcatccaccttcaggattacttgtgaatgtttgcaacactggatattaattaaatccttaaatgctggatatctattgcacatatccgaacaatttgtggtgacactaaaggaatttttgtttcttcaggtatggctatcctgatccttcttacctgaaacgtgtcaaagaggagctgaaagcyaaaggaattgagtaagacaactgctggaagatgtcttaaatcaagctttcaaaaaaatatattttaggaggctgatttaatgccagtctaaatccttatgtagaaaggactttgaaatttttcttctcaagaaatggtttgtataagaataacaatctgctagtctgtcatttctggagtgatacttttttttttgagacggagtctgctctgtcgctcgcgctggagtgcagtggcatgatctcggctcactgcaagctccgcctcccaggttcatgccattctcctacctcagcctcccgagtagctgggactacaggcgcccaccaccatgcccggctaatttttgtttttgtatttttagtagagacagggtttcactgtgttagccaggatggtctcgatctcctgacctcgtgatccgcccgcctcagccttccaaa

SEQ ID NO: 673367 - DNA, 616 bp, Homo sapiens
  misc_feature 314: n = A,T,C or G
cccactacagatcagtcactttcactgggaagtctcctcggttctcccttcccaatgctgtctcacaacacacttctgtatcttcatttaccatgctggattatcttacttgtctctgtgtatacaatcaggkcctggatatagtgtttcctaagtatttgttgaattgaggcaggtttattcattccacaaacatacatggaatgcccatgatatagtgagcactgtgctagtttcctgggattcaaaactaatgaggcacagatcttgcctttaggggctcacagtccagagggacagaaagagacacacancagatagttacaattacagtgggtaccggcagctctgtctcacatcttctcattcttgcttttttcccttaactggccataacttgaaagtataattcatatttactgcttggcttatttcctcaaaagaattttctgtttcctacatattattcctgaactgatttaatgaaatgtgtttgtatttctctctttactttgccaggaaaactattgaaacagtcaaagtagcctccaaaattgctgctctccaggcatgggagcaccccatttccagagattaccaaaagatcactgaaatt

SEQ ID NO: 673368 - DNA, 616 bp, Homo sapiens
  misc_feature 314: n = A,T,C or G
cccactacagatcagtcactttcactgggaagtctcctcggttctcccttcccaatgctgtctcacaacacacttctgtatcttcatttaccatgctggattatcttacttgtctctgtgtatacaatcaggtcctggatatagtgtttcctaagtatttgttgaattgaggcaggtttattcattccacaaacatacatggaatgcccatgatatagtgagcactgtgctagtttcctgggattcaaaactaatgaggcacagatcttgcctttaggggctcacagtccagagggacagaaagagacacacancagatagttacaattacagtgggtaccggcagctctgtctcacatcttctcattcttgcttttttcccttaactggccataacttgaaagtataattcatatttactgcttggcttatttcctcaaaagmattttctgtttcctacatattattcctgaactgatttaatgaaatgtgtttgtatttctctctttactttgccaggaaaactattgaaacagtcaaagtagcctccaaaattgctgctctccaggcatgggagcaccccatttccagagattaccaaaagatcactgaaatt

SEQ ID NO: 673369 - DNA, 933 bp, Homo sapiens
ccctgagcctcatctgagtattttatactatatccctcagctttaactgtaacaactagctggggcaatagcaatgactctagaagttctgctatttggggtttacttttgactggggacaagttgctgtcatgaatcctctctgttttcaaaacataccaaaatcatgcactacaccaaagacccagtgtctgtcactgtaggtgctaatcttaattccctctgccttatataagcctgaatgagaacagttaatttagccactttggctgatttaacgtgtggcaaagcttggcattcaagagttttgtgtagatgagtgatggcatatccaggctggaaggtcccaacctccttccagaagtaggagcgattgacatagagcatcaggtcracttaggagagaagggtttctgacatatctaacctaaatgagacagtgatctggtttcagtagcaccattgtgtgtgtgtgctgaggggttcccttagtggacaaaatgtacagggtagcaagggatttttggcagcaaaggattgtgattgggtggggaggcatagtgatatttcatgagaagtaagtcgagaagcaaacgagtgctgtgtgttttcattaagtaatagggtcaacacagcatgggaacatacacatcaagtgggcggcctaacactaaatcagaagtagcctggatgagttggaagtcatggccactgtttgtaggccaggaggatatgcttcagcactggctggttttgtgggaaaacagagagaaagacatggctgagtctcatggtgctcagagaaggccacagccttggggtgccgtggtgaccacaaacacttcccccatcccataccaatctttaagagccttttccttcttaaagacctgtcacttagcaaagagctttcaatgaaccctcccctctggg

SEQ ID NO: 673370 - DNA, 545 bp, Homo sapiens
tggagtcccagaagaacactgagtggatgtctgtgtgtgagtatgtggtagggaagarcaaaaccaaaaatacgaagaaatgattgccaaaatgttattagaatcacaaataaagacaaaatggcaaggtaaactattgtctaatttctgaaaatcagtgataaagagaaaaatcttaaaaggcatcagagatgacaaaataatccacatcaaaagaaatacacacacacacacacacacaaatacgggcaattttcttcagaaactatgaaaacttggagacaatggagcaatcataaataattaaataataaaaaacagctttatctacatttttataacaagtagaaaattttaagcactaaagtaaaatagggctcgtttatttttagaaaattaaaaataggtttggaactagggtaaagtaaatgacacaactaggtcccaaaacctaaagagctactcactttcagagttatatatttgagattgagagtgcaagacttgtgccttgtgtgacccgagagagttcctcattaagtttt

SEQ ID NO: 673371 - DNA, 652 bp, Homo sapiens
tttttttttttccagtatgtttcctctgaagacaatcttcacatctagggaatattaatggtaataataacagcattgatttattgagagttttcctatgtaacaattactatacaagtatgccatttaatctatttctctagtttcaatattaatattggtacttaataaacgagtaaactgaaaataataagtttaaaatcttttttcacagctagtcagcaatacaactgggatttgatatcagattcatacgattccgaagaccctgaccaccaaatgcaaaaggtacatggcaacagctgattgcaatgagagaaaaacaactaataaggcaacaagcaggatactaagatattttccaaaatgaatagcactgattctgtgaggaatgaacattgccraacaagtgttttgttttgtttttcaactcctctaaaaaaattcacatatatgcatgccactttcctgaaaaatatctgcctcataattgccataagaaacggtatggacaactcttaaacattctgaaagtagtcagggatgggggaaagcatttgctgttttagtctgttcctggtcttataacaaataccacaaactgggtaatttatgattacagaaatgtatttctgaaagttcaggagttggg

SEQ ID NO: 673372 - DNA, 634 bp, Homo sapiens
ttcttttttcttttgcttttttttagacagggtcttgtgctctcacccaggctggagtgcagtggctggaacacagctcactacagccttgacctcttgaattcaagtgatcctcacacttcagcctccagagtagctttgatgacaggtgtgtgccaccaggcccagctacttttctttactttttgtagagacatggtcttgccatattacccaggctagtctcagatccctgggctcaagtatcctcctgcctccamctcccaaagtgctgggattataggcataagccaccatgcccagctaatgttttctatttaccatagcttttcacatatatatgttattatatatgtaatatacatatataatatagtatggatgtgtatatactatattattaacaattagatctaaaatatagaaagaattttaatacctttattttctgtaccttcatagttaatctcatattttccaaatctgttaatgtggcactggtcagttatagctccaaagaatgagcatccacttaatctcataaccaggacccaacctgcaacattagtattacaaattaattcctaattccagtctcactctttcatcaccagttctatctttgcacacttac

SEQ ID NO: 673373 - DNA, 605 bp, Homo sapiens
gaccataggataggccacaaaaacaaatctcaataaattttaaaaagtcaaaattatataaagtatcttctcaggtcacagtgaaataaaactagaaatgagctccaaaaggaacccttaaaactatacaattacctggaaattgaacaatctgcttcttaatgattactggkttaacaatgaaatgaagaaagaaattaaaaaattctttaaatggatgattatagtgacacaagttatcaaaacctctgggacatagcaaaagcaatgctaaaaggaaagtttctagcactgaacacctacgtaaaaaagtctgaaagattacaaattcgcaacataatgtcatacctcaagaaactatagaaacaacaaatcaaacttaaagccaggagaagaaaagaaagattacagcagaactaaatgaaattgaaataaaaatacaaaagtttaatgaaacaaaatttggttatttgaaaatagaaataaaatagatcattagttagaagaattaagattgttagaacaattaacaattgttctaacaattagaatgattaacaattgttctaacaattagaacgattaacaattgttctaacaattag

SEQ ID NO: 673374 - DNA, 605 bp, Homo sapiens
gaccataggataggccacaaaaacaaatctcaataaattttaaaaagtcaaaattatataaagtatcttctcaggtcacagtgaaataaaactagaaatgagctccaaaaggaacccttaaaactatacaattacctggaaattgaacaatctgcttcttaatgattactgggttaacaatgaaatgaagaaagaaattaaaaaattctttaaatggatgattatagtgacacaagttatcaaaacctctgggacatagcaaaagcaatgctaaaaggaaagtttctagcactgaacacctacgtaaaaaagtctgaaagattacaaattcgcaacataatgtcatacctcaagaaactatagaaacaacaaatcaaacttaaagccaggagaagaaaagaaagattamagcagaactaaatgaaattgaaataaaaatacaaaagtttaatgaaacaaaatttggttatttgaaaatagaaataaaatagatcattagttagaagaattaagattgttagaacaattaacaattgttctaacaattagaatgattaacaattgttctaacaattagaacgattaacaattgttctaacaattag

SEQ ID NO: 673375 - DNA, 761 bp, Homo sapiens
cctgtgatgagcttttgggaggggcttgctgttactaattagcatcaccatggatccccatcaaatcttaatctactgcaaatttctagcttttgtaatttttatagcttgttaattctctccatttttcttagcacagataaattttccctaaacatccaaactccattttacaattttatcaaactctgtagggctacaattttacacttgagagataactgatgttaaaacttacacctttaaagtgatgattctaaggactttgctgtgtagttttcactgcaaaatgagcaaatgtcaaataaaacagtgctgactttgtgagttctttctcttcagaagcagcttccacatgattcaagagtggccttttcttttttctttttgattttgacagagcctcgctctgttggtcaggttaaagtgcagaggcaccacttgcaacctccgcctcccagattcaagcgattctcctgtctcagcctcccaagtagctgggactacagggccatgccaccactcccggctratttttgtatttttactagagacagggtttcactatgttggccaggctggtcccaaacttctgacctcaagtgatctgctcatctcagcctctcaaagtgctgggattacaggcgtgagctactgcacacagtcaaggatggctttgtcattcttcaagtctacacacaccttaagtaagaattactgaggaataacattagaactactgtaagtaagtaagaattact

SEQ ID NO: 673376 - DNA, 655 bp, Homo sapiens
tggtggagtgtgcctgtaatcccagctactcgggaagctgaggcacgagaactgcttaaacccaggaggtggaggttgcagtgagcggagatttggccactgcactccagcctgggcaacaaagtgacaccctgtttcaaaaaaaaaaaaaaaaaaaaaaaaaaaaagacattaagagtccaccggattggtatttgggtcagtaggagctctccgagagtacagcacaaaagcagaagcagatgtgtgggaggtgtgggaggccactgcacaacctcctcactagcctcctgctgtttttacctacttgtgtgtgtacctaatagaatttttcttgatatgaaggtgcaacmtgaagatttagcattttctttcaatttagtcagcttcctgtttttcatgcaaattggtctggagagagccgttttaagtagataaaacaaattcgcaaaaattgtattacttgtattatcaccttccccagttccaccactatcagtcaacatcgcctgctctttcccaaggataacagtgatgatggcagagaaacagcagagacaataagaaaatgccaaaacaaaaatataagaagatagaataagaacctgtctcaataactccacagcgctggagcgggaacatctgtgtatgtgaa

SEQ ID NO: 673377 - DNA, 583 bp, Homo sapiens
tttgagacggagtctcgctctgtcgcccaggccggactgcggactgcagtggcgcaatctcggctcactgcaagctctgcttcccgggttcacgccattytcctgcctcagcctcccgagtagctgggactacaggcgcccgccaccgcgcccggctaattttttgtatttttagtagagatggggtttcatcatgttggccaggctggtctggaactcctgacctcaggtgatctgccctccccggcctcccaaagtgctgagattagaggcatgagccactgtgcccggccggatgctacttttttagggggagactctgatctctatccaaagggaggtgaccttgtcctcagactggagtgaaacatgatacactaaatcttgttataacagattgacgcctaccctgggaggggaagtttttcttaatgaaggccattagctagtttgcatgattacatttatccatgctccttatctatctctccacacctgcccttctgaggcacacaaagacatcctccttgacacactcctcctacccaggtgttattgatgtgttgtagagggtaacctctgc

SEQ ID NO: 673378 - DNA, 583 bp, Homo sapiens
tttgagacggagtctcgctctgtcgcccaggccggactgcggactgcagtggcgcaatctcggctcactgcaagctctgcttcccgggttcacgccattctcctgcctcagcctcccgagtagctgggactacaggcgcccgccaccgcgcccggctaattttttgtatttttagtagagatggggtttcatcatgttggccaggctggtctggractcctgacctcaggtgatctgccctccccggcctcccaaagtgctgagattagaggcatgagccactgtgcccggccggatgctacttttttagggggagactctgatctctatccaaagggaggtgaccttgtcctcagactggagtgaaacatgatacactaaatcttgttataacagattgacgcctaccctgggaggggaagtttttcttaatgaaggccattagctagtttgcatgattacatttatccatgctccttatctatctctccacacctgcccttctgaggcacacaaagacatcctccttgacacactcctcctacccaggtgttattgatgtgttgtagagggtaacctctgc

SEQ ID NO: 673379 - DNA, 611 bp, Homo sapiens
ctactattctgcatgtacattcttatgtgaactattgtcattactatgtctttctttttatttatttaatttaawtttattttttttttagatgaagtctcactctgtcacccagactggagtgcagtgggtcaatctcagctcacttcaacctctgcctcctgggttcaagcaattctcctgcctcagcctcctgagtagctgggactacaggcatgtggcaccatgcccagctaatttttttttttatattttcagtggagacggggtttcaccatgttggccaggctggtctcaaactcctgacttcatgttccactggattaggcctcccaaagtgctgggattacaggcgtgagccaccgcgcccggctacatgtttttccaataagtcttgaaatcaggtaatgtaagtcctccagccttctttttcaacctgccaaaatttgagggcttttctgggatttcgtatatttatataaaatttaaaattagcttttcaatgtttccaaattttctccttggaatttttgaagggatgacatcaagtctataaatcagtttggggagaagaattttttattgtaataatattatatgtcttttcatcc

SEQ ID NO: 673380 - DNA, 1262 bp, Homo sapiens
tgcttggggtcctcttccatcataaaagccagcaatggttggttgagtcttactctgacactgacccctgaaaatttctctttggtatataaggccccttgtgattacattgggtcttcctggataatacaggataatctcctaacaaggtcagatgactagcaaacttaaatccacctgcaaccttaactctttcttgtcatgtgacgtaacatattaatagattctgggaatgaaaatgtgaacaaatttgcagggctagtattctgtctaccatattttgaaacgtaggatttaattgatgcaagcttggtatacattttcaatgtacatcatatatggtgtgattcttttagcaactgcagagctgatccatgtttacttattaaataaataaataaataaacatatatgtgtcagctcaagttcttatagctgttatacaaagccaaggaggtttagtctccttagccaagagaartgaaatacaactacctcacacttttatttgaaagccctggtgacttggaaccttttgattgcatcttctttgttgattttcataccccaagtatatttccttcattttttattcttaaattacagtagatagcatgtgaaaatatatgaaggaaaataatgagaccagagagactattaaactggtagcaacgggaagaatcaaaagagtgatacttgacaagctaaatctctattatggaggagcattaatgtagtgaataaaggacactgtttaccttctttatgagaagatcaccagtctccatttttctattggtcctgatgatatggtttctgttctttatagcttcaaggatttcagttatctgaatgtgttgcaatgcaatctgaaaaggtccattaagtaaactccctattatctgccccctatttttaagtttatgttacctatttcagtgaatgccttcacacacagtttctaaaaacgtgaactcatctctggctttttattcttcctcatcttccaacttaaaactttcaaatcctgtcaattccaccccttcacctccatcctcacttccagaacatacctcaggcctccttggcacacacctccttattttctgcttcttctgctttccatttatcttttatattttttcataaatacattttcaaaactcatatatgattgtaatagtggcctactttatttatgacactctgtttacaagacaacaaattatgaactcctgagtcttccattcaggacctttaat

SEQ ID NO: 673381 - DNA, 719 bp, Homo sapiens
tcatttataatgtccatgaattttttctcctgtcagtgactagtcaccccttccctgcattttagaagtgtccctatataaaatgtgaaaatttatataaatcaggcaaaacttaaaggatacaacctaagggaaatctacctgggcctccctgcactctcaggggcctgagaagcccccatgctcccacaggcttggaagtacctgctcccactaccaggcctctgtccctacttccagtgcttgctccagttttggagcaaagttgaggctaagmccaggaactgttgtgacctagctgggtgtgtgagtacttgaggtggcactgacataccaggtccctgctgcctgaactccctctggacttgagggagttcgagggggtcctgagggcagcttggcacaggcctgcaggcacccctaagcatgaacagcctgggcaccacggacatgattggtggtggcaggaggcagacaggcccctgggcaggaaggggtaggtccctggtgaagcctcacctttaatccagggatggtctgaagcccgggggcttgctgtcagttccaggtggagtccacatcctcaagtgaaaacctgtgctatttctggcctgcccatggctccccagggaccagtcagtgcaaacttcctccattctgagctcataaaacccccagacccagccagactcacacagacattgagcaacctgcctgca

SEQ ID NO: 673382 - DNA, 719 bp, Homo sapiens
tcatttataatgtccatgaattttttctcctgtcagtgactagtcaccccttccctgcattttagaagtgtccctatataaaatgtgaaaatttatataaatcaggcaaaacttaaaggatacaacctaagggaaatctacctgggcctccctgcactctcaggggcctgagaagcccccatgctcccacaggcttggaagtacctgctcccactaccaggcctctgtccctacttccagtgcttgctccagttttggagcaaagttgaggctaagcccaggaactgttgtgacctagctgggtgtgtgagtacttgaggtggcactgacataccaggtccctgctgcctgaactccctctggacttgagggagttcgagggggtcctgagggcagcttggcacaggcctgcaggcacccctaagcatgaacagcctgggcaccacggacatgattggtggtggcaggaggcagacaggcccctgggcaggaaggggtaggtccctggtgaagcctcacctttaatccagggatggtctgaagcccgggggctygctgtcagttccaggtggagtccacatcctcaagtgaaaacctgtgctatttctggcctgcccatggctccccagggaccagtcagtgcaaacttcctccattctgagctcataaaacccccagacccagccagactcacacagacattgagcaacctgcctgca

SEQ ID NO: 673383 - DNA, 391 bp, Homo sapiens
tgcacagaagaaaatgaatccattatttgtgtttgccttttcttacaagacaaatagagagcaagtcttggtcactggtgtcttaccacagggctcagcatataacctgtcattcagcaggggagaaatcagtttattgcaggaaataggcatataaacaggaggttgaaggtcygaagagagctgccatgatttactgtgcagagggaagatactacacttaggattagaaagccttagtgttgggctcagtcttcccatcaaatagctgtgtgactttaggcaaatttctgaagcttgttaagttcccgccccccccccaaattttttttgcctatcaaggtaagagttaactttagtgatctccaaagcctattctagctttattttt

SEQ ID NO: 673384 - DNA, 665 bp, Homo sapiens
tgctgagtttgctgataaacttcctgcttctctccagatggctcagacgctggagcaaatactcccaggctgatgggtgaagttttctcagtagacacatctgcaggcatgataaattagacagagactgacaacaaccagatccaattgacgtgtggtaagaggtttttcagttccgaaaccacacagcatcctctctaaacttgcctaygagtttcctagaagcctgaatcaatgcgggatggccactgcatagtcaacgctgggtttttgcaaaccagcattttgagcttcagttcaggccacaagattttaaaaagaggtgatagcactgaattatttgttttcttcattgtagtttttcatgtggagagtttcattaagatgaggcttatgaacaaattgtatgacatgagcttttatatcttattgttctagattccacatcccaggggtattctagggtacgctcaaaatcaccatctctgtagtgaaagggttttattctacaacagtgcctaggaactcaattgccaatggatagggtcaacccaggagaaacaggaaaactgtaggaaaaggaccaggatctccacgatggctataattcacccatagtcagtactcaaacatgtcaacatcaaagcagccttcaaagctaagca

SEQ ID NO: 673385 - DNA, 652 bp, Homo sapiens
tcattttagatttcacatttaagtggaatgatgtagtatttgtccttctgtgactggtgtattttgctaagcataatgtcctgaagattcatccatgtcacatattgcaggatttacttctttttaaaggctgaataatattccaccgtatgagtgtgtgtctgtgtatcacmttttctgatgaaaatattcatctgttgatagacatttaggttgtttctacatcttggctgttaatgaataatgttgcgatgaacatgattgtgcaagtgcctccaggaccctgattttatttcctttagataaatactcaaaagtgggattgctaaattatatggtggttctatttttagttttttgaggaaatttcatactgtttttcataatgactgcataaatttgcattcttacaacagtacacgaagtttccaatttctcctcatcctcaggaccacttcagttttatctgtagtaataacagctaactccagcacttgacagtttaagcacttcacagttattggttaatttagtctttataacaaccctatgaggcagataaatacccccattttagatagggggagaatgagatttagagagtttaaataacttgcctgaagtcacaaactattcagtgatagatcatgga

SEQ ID NO: 673386 - DNA, 652 bp, Homo sapiens
tcattttagatttcacatttaagtggaatgatgtagtatttgtccttctgtgactggtgtattttgctaagcataatgtcctgaagattcatccatgtcacatattgcaggatttacttctttttaaaggctgaataatattccaccgtatgagtgtgtgtctgtgtatcaccttttctgatgaaaatattcatctgttgatagacatttaggttgtttctacatcttggctgttaatgaataatgttgcratgaacatgattgtgcaagtgcctccaggaccctgattttatttcctttagataaatactcaaaagtgggattgctaaattatatggtggttctatttttagttttttgaggaaatttcatactgtttttcataatgactgcataaatttgcattcttacaacagtacacgaagtttccaatttctcctcatcctcaggaccacttcagttttatctgtagtaataacagctaactccagcacttgacagtttaagcacttcacagttattggttaatttagtctttataacaaccctatgaggcagataaatacccccattttagatagggggagaatgagatttagagagtttaaataacttgcctgaagtcacaaactattcagtgatagatcatgga

SEQ ID NO: 673387 - DNA, 2233 bp, Homo sapiens
ttttctcttcctttctttctttctttttttttttttttttttgagacagagtctcactctatcataacccaagctggaatgcagtggtatgatcacagctcaatgcagcctcaacctcccatctcarcctcctgagtagctagggctatgggtgtgtactaccacacctggcttatttttgtattttttgtaaagacaaggtctcactatgttgcccaagctggtcttgaacttctgggctcaagcaatccaccctcctcggcctcccacagtgctgagattacaggtgtgagataccacatcgaacccattcttctgatttgccaggaactacccgttagactgcagatgctgagcatcaaaagggtgaatctctacctttatggagctcacagtttagtatgtatttacaacaattctgtaaaggttacagtaaactgtcttaaagtcctatgaagagattttttaagtactatatactgatttgaatatcctacttagctttctacaacaaattaatattgaaatttgaggggctatgatcaaattatgatacagacatgtggaagacgtgatggtttcttagacataattgtttcgtatttgtcgtgacagaagggaaaatatctttgagatgtaacacttttctggataagtactgtgatttatcttctgtcctggactgctttttccacccacgttctatgtaattaacctcttaacattataccctttcatattaagttctttgcttattgtgcagagatattttcaccatggcttcaaatttcctatctctggaatattttagtcatttctgaaactcctctaagagtgtatggttcacaacccacaacaggaacctgaaggtgatactacagatttaaagtagtcttaatgatagtgaaatgacttgaaactaatagtcaatattttagtgttctggtttcatttttggattttattccaaaacctccagaagtacacattcccattattctacaatgctccattgtgatgtgaaaaatataatcactggctatgcttttaaacagccataatatgtttccttatatctgtagacaacttttactttttaaaaatagcattctttaaactgatatatttctggattcaaaatattaaaacctcataaacaagataacttttctgcattataaccaaactaaataatactaattttttacataaattatgtcttcgcatatgtacacatatgcacaccaagttatatgcacattttacttgacactttgagaaaaaccacaagatccaaaatcacaaagtgaacaagatcctaatttgattttcgaaggggagggagattttatcttaaaaacataggcaaccatttttgttttattgtaccttaataaaagcaaacttttacctgggcaagcatggggaagccaaggttcctacatccattacacggagttaatgcttcccaaagtcctgatggcccacacgtattttcatcatcatcctcttcttccacttctcctggtgacaaattgattgtagatgaggttctctgaaattaaatttatatcataccaatatattatatcaatgatatttagatatcttaacatcaattaaattctataaatgacagtggtatatctcggcaaacaagtcagctcacttttagccacagttacatggctgtgccctgtgcctgagataaaaatatgtatagtccaacttaagttaaaagtgaaaaaaactaggtgtgaaagacttataaaataatatatgaagttcataatgaagaatagaacatgataatggcctaataaaatatttgaatagcaacaaatgagaaaaatcttatggtttatcaagaatttaggtttaggcataaaattaaggaaaaatgcagttagggcactaacaggaaaatattttattgaaatgggaactcctgataaaccagtttgttcagaatgccactgaaataaaactttataaactttcatatcatacatataacaggagtaacagttttaaaattcataatgagacttccatatttagcacatatattttccttcgttatctcccaaatctcactaaaatgatggtagaacatttataaaaatgtttacaccataaaaataaggatgacaggagagatgaacagacaatattaagaaaacttctggataatgttgagtaacttttggataacagatgggtattacctgac

SEQ ID NO: 673388 - DNA, 756 bp, Homo sapiens
caatgtcagggatacacctgagcactgagaaacttcttgaaggtgtaactttacttttaggtttctgtttagtaagatctaaatagacattttactttttggaaatatgtggattatcaaactctaaaattctttacaacatgacactttgatatttacaaaatmttcctgagtttaatgcaaaagattgattaaatatcttcttattttaattttatttttgttggattgtagttcttttatcagacagatctgtattcagtttcagctctgccacttactattttgactattcattgacaaatatcttaactactctaaatttcagtttcctcccaaatgataaggaaacatctccctgctagaactctttatccaaattgtttggcctatcaacttactcgatcagtgaaacttgccagaggtgacatctgggactttgatggctaggtcatcagaagccttgccccttttctctggacttcttggtactcagacactctctggaggcactgagccgccatataagaaacactcatagcttgtgagctgcatgttggagagccacatttaggtaatctatctccagtatctgatgagtcctttcttccaaccatcctcaggaagacaccaaacgtatgagtgaagcaatcttggattctctatcccagactgtccatatcagacacagagtgatcttagtaaatgctacgtggagcaaagcattgttcagctgagtcctaaccaaactcctga

SEQ ID NO: 673389 - DNA, 756 bp, Homo sapiens
caatgtcagggatacacctgagcactgagaaacttcttgaaggtgtaactttacttttaggtttctgtttagtaagatctaaatagacattttactttttggaaatatgtggattatcaaactctaaaattctttacaacatgacactttgatatttacaaaatcttcctgagtttaatgcaaaagattgattaaatatcttcttattttaattttatttttgttggattgtagttcttktatcagacagatctgtattcagtttcagctctgccacttactattttgactattcattgacaaatatcttaactactctaaatttcagtttcctcccaaatgataaggaaacatctccctgctagaactctttatccaaattgtttggcctatcaacttactcgatcagtgaaacttgccagaggtgacatctgggactttgatggctaggtcatcagaagccttgccccttttctctggacttcttggtactcagacactctctggaggcactgagccgccatataagaaacactcatagcttgtgagctgcatgttggagagccacatttaggtaatctatctccagtatctgatgagtcctttcttccaaccatcctcaggaagacaccaaacgtatgagtgaagcaatcttggattctctatcccagactgtccatatcagacacagagtgatcttagtaaatgctacgtggagcaaagcattgttcagctgagtcctaaccaaactcctga

SEQ ID NO: 673390 - DNA, 756 bp, Homo sapiens
caatgtcagggatacacctgagcactgagaaacttcttgaaggtgtaactttacttttaggtttctgtttagtaagatctaaatagacattttactttttggaaatatgtggattatcaaactctaaaattctttacaacatgacactttgatatttacaaaatcttcctgagtttaatgcaaaagattgattaaatatcttcttattttaattttatttttgttggattgtagttcttttatcagacagatctgtattcagtttcagctctgccacttactattttgactattcattgacaaatatcttaactactctaaatttcagtttcctcccaaatgataaggaaacatctccctgctagaactctttatccaaattgtttggcctatcaacttactygatcagtgaaacttgccagaggtgacatctgggactttgatggctaggtcatcagaagccttgccccttttctctggacttcttggtactcagacactctctggaggcactgagccgccatataagaaacactcatagcttgtgagctgcatgttggagagccacatttaggtaatctatctccagtatctgatgagtcctttcttccaaccatcctcaggaagacaccaaacgtatgagtgaagcaatcttggattctctatcccagactgtccatatcagacacagagtgatcttagtaaatgctacgtggagcaaagcattgttcagctgagtcctaaccaaactcctga

SEQ ID NO: 673391 - DNA, 589 bp, Homo sapiens
gatttccaggcaaggcttagaaatgcttagtaggactttgatacatagtcgcctaggaaacagtgacttattttatctaaaatattgtatcataaagtgtgtttcaaaataaaatttcaaataaattaaaatagaaatttcaaaataaaaatagctaaaatctgttaaataccctctgtcaggctttagtgaaaatcctttaccatattaaagtttaatcgacacaacaccctcctaagttggtaccttgttgtcttcctcattttatagatgagaaagcagaggcatggagaagataaagatggatctatgtacttatctttcccaacacccaaatttagtaagtggcagagctgggatttgaactcaggtcagaataggtcttgaaccactatgaatcactctgttaatcacatgctcctttgagcaggaactaaacataggcatttagataaggaaaygtgcaaataaggtgacttgactttgaggggttaataattattgacctatatactatttagtagttttaggttcttggctcaaataattagttagggaaacaatgagaaaatgagaatacaagtcaggg

SEQ ID NO: 673392 - DNA, 628 bp, Homo sapiens
acattttcttgtacattgcactcagtcagtattccaattaacccttcactctatgagatcgtgtgtgtgtgtgtgtgtgtgtgtgtacacacataactggttgatttccttaaatttcaatgaattatttggtgatgtacaaaagcagcttatgtttgtatttttataatggtactatccccacccccacaaaaaaagaaaaataaaagtgttaycactatgatatttttggtagttttaatcagtcttccaccttcacttctcatcttttaccaacacaagttgctttcaatatttcaattgaaatctattgttttatcctaccattggcagaattttcccaacaatatgtaaatttaaaatatgactactttttaaaactcttaagtaaaaacaaaaatacattttaaaagctaatggtattcaataaatttcccctttagtctttttttttttaattttggctttaaaaaaacatacatatagaaaagtatataaatcccaagcttactgaattatcacaacatgaacaggcctgtgtaaccatcaataggtcaagaaatattaccagtacttagaagcacctttcctgcctcatccaaaacactggccttccctccttccagca

SEQ ID NO: 673393 - DNA, 1327 bp, Homo sapiens
aattttaatcagcaattaaaaaaagaataaactttctccactcaacatcataggtgaacctcacagatacagtattgagtgaaagaaaagagatttcctctgggagagggagtagtgtgcagtgagtggatattgactgggaaggagcaagagagacccttcttaggtgttggaaacgctctgtagcttgactgagatagtgtagcatacatgagtgcatgacgtatgaatgaaattatatgtgaaaattcataacagtcatgtgcttaacattaatgcactttactatattttatatctcaataaaaaaattaagtgccatctttctgcaaccctcaatgtccctgtgatgacatgcctaagacagataccatccctctgctatgactggcaacaccactgtcacaccttggcacattcctgctgttggatcacactcccctttgggtaccctctatacctcagggagagccccatgttccatgatctttattttttcttttcatctttggttttttaaacagcattctcctgaggcatctttaggactcttccaaggaacctggggcttggggcaaattctaattaatccagaaataattcattttccctagacagaagtcctcgtcattgctttcttcccctccagctggatccagccacctcgggccctgtggggggaggggacacagaggcataaagcctggcaccacctgccctgccagctctgcttgaattagtccttccctccacatgaggccgggggcctttccctgttaaaatggactttctcttattgtctttatcttttcatgttttgtggaaattaaaagatgagtgacttccaggcagcgccagaggcagcrgcagcgcagagagtgtctgtgttttcttccaaggctgaccggagtgggcctggaattgacccagggctccccaggctcctccgccttcacttattctctgggctgctcaattccttttaagacacaaattgattgggataatttttgccataactacaattgccatggaaagggagtggggggacagcattcaggctgtggactcctgcaatgactgtgaaccattgagttactgtaaaatgaccagaaaatggatttaaaattgaagccacaaataatgtaattactgcagtgtgatcagggctgccagaacaagagttggctgctgccctggaaacatctggaagaaaagctgctgctgctgctgtaagccctgccctggtccctgtgggggcagcagtgttcttcccagctgggaagtcctcagagggtggaaggaacatggaggagacaggaaaggg

SEQ ID NO: 673394 - DNA, 1375 bp, Homo sapiens
caaacactatcagacactcaaaaactagcatgtagcaacccaggggtttgaataacaaagttggaaaaggacggccaaaaacaataaattggcctccctggtctgagccagactcagtcatgtataactactgagctggaataaataagacctctgttttaaatggtaataagagtagatgaagcattcaaataataaagtcaaaaaaatcacagaagttcattctaaaattcctaaaataggatgtttctaaaataccaaagcattratttaactaatggtattataacccatgtggaacaaaattaaatgctgatgtaaataaggaaaaggtcattttgattcagctggagagctcctgattttgatacagaatatctgcagaggcaagtgtttttcaaaaacttctccactaagtaccataaaagtaaagggattgggaacatgagcccactggttggatggtaaacacagtagaaagtagcacacttcaagcattaaatgtcttttaaactttgtatctgtcctaaaatattatgataattttgagttataccttaacatctatctctatataattatatttatagttatatataaaatatatgtaacatatatatctgtatgaatattaaaattatttaccttagggaatttttgaaattattttttattaaactctgagtgaagtcaacacttggggactatgtgtcatattgatcctgcaaataattggactctggcaagctatcagttccccataggagcacatatagcccatgttaataaacataattttagaagactttatgtatttcccaacctattggcaagctactaactaattacatgaatataacattaggaagcatcttgcagatatgcatattcttaaaggattaaagaattgatttggctcctattagagagactcaaagtaataagggcttaaataagatagatgtttcattttttttttcctatgtaaaagtcttggctagtatggtggcctgtgttggaagccaggctctatctgttttgttctgccatcctcaacatggtccactcctctatcttctgccattgtgactacatccaagagcaggcagttgttcttccctagaaatttcaagcaccattcccactcacattccaaatgcccaaaatttagtcacatggacatacctagctgtaagagaaaatgggaagtgtaatatttaacaaagtagcattatgctctccgtttttaagaaaaaaaatctataactaaataataaagggaaaatagatactgaagaacaaccagcaatttctgccactctcagctaaagttaccagcgtgatagaaatttgtgttcagtatttagtaaaagaa

SEQ ID NO: 673395 - DNA, 604 bp, Homo sapiens
accattctgcagtgattcttctctcagtaacattccaatagtgaattcagccttgtattactctgttgatctttacttgttaagtaataaagaacactaaatgtagcttttattgtcatgttaattaaaaagtgtactgagagacaaaataaaaaaaaaatcattagcccactgattgttaatgaaaaccacattagccagctaagtgtaaggaagtacttgcccacccacataaggtttcactttccttgcaaactgcttgatattatcttaygctgatgctttcaaaataaactgcttttatagcccaaaagttcaaacaaaatattattcatatatatacttttctttagagaacaagaaataatgcaggaaataacacggattttccttaatacattctttcttccacaatattttgagtattgttacctattactgaacgtcttcaacaggatactgtactctcttaaaggtttgatcatttacatatgagaacataaaatatgctatatttaagagacatatccaacagtttttaaaaagtggggtaagttttcttattctttttttttttttttttttgagatggagtctcgctctg

SEQ ID NO: 673396 - DNA, 647 bp, Homo sapiens
catctttgacaaatgtactataatagtccaggaccttatgtgagagctttgtaaatcactgttttacatgatagttttgaaaagtgaaatgtactcacctattgtttggatgatagcattctgcacaatcttctcatcattgtctttggaacttgtatttaagtygacactgcctacagatcccccctgtaaatcatttgcttcgaattcaacgctgagacgcagatgtttcaaaagggtattgaagacttccagcactgtcggacctataaaggatcacttatgtgagaagatacatgtttctagtattgcatatttgaagtcaattaccttatttctccacagattgtttctgtaattttctaaatagtcagaaatccatagtaatttataaactatttcatttttttaaaaaagagtaaatgagaaataattaagaaagacactcattataacaacaaacatttactgggcatttatgagcaactcaccgtttgaatctctggttccacccttaaaaaatgtgtataggcatataagaattaccaaaaactttctaactatttaatcttatctgttcacaataatgtgtactaggacaatatttaacttaactgctaggtaagaatccacaaaattatgtaata

SEQ ID NO: 673397 - DNA, 1304 bp, Homo sapiens
gctccacacatggggaggccaggacatccagttaggcctatcgaaacaatatttagaaaaaaaaaacacacaatagtggtcatccttgcttcttagcaatttttactcatttttttattgttaaaggaaaaagtcagctgggcttatctcatttgtccatttgttcgagagacaacttgttttattttcaaagttacaatcgatamtcttgaaaacagaaacaatactatagtaactggccaacacatttttttatagaggtaaagaaatccaacaaatgcattcaaaatttagttcaggagcagcgaggagtgatgtttacttgtccctttgcttgagagacctggggtttctcccaccacccagggtgcattatgaggctggagtgggaggaccatctgtacttaattgaggaaggaatagtaacctattgcctgatctgctattggtgacatttgccctgttcactagggaacagctctttaaagggtttcaagaaatagctaccaacagccttaatttaacagctgtgctgaactattgcggaacatccagatgtggagctgtctgtgggaaatacaatccgtccaaaggaggagataatggttccccttgtgggcccagccttcccgagctttcgagaacttagtgtctaccctgtctttgtttaaggcagttatcagcctaattactcatatgcaagccaacagctgttttcccagttgagagtcattttatactatattgcctcctttacacttatttgtcatattaggaaaaatattgaggggcagaagtgtttgcagctgtacatttaaaacatctcatgtagcactaaagtttgataatgagatgaactgaacttcatttcattatagtgactttttctttctcttttttcttcctcactttagctgtcaccttcactatggtgtcagtccttgggttctacttatggagactcatattattttgccagaaagcctaagaacgagtttagctattaaaagtaactctacttctgaagtcatattttattcccctgcaatagtttcaataccagggcaagtaaacagtgattaaacaaaaaatggcggcaattatctttgcgggctttgctgtacacataaaatctcaaagaaggactgaattctttgactaattgaaatgatccccaaatttgaagagaagccatttatttcctggtgtactttagacttcatcttcagaactgccgtttttattaattgtccaattcagaattcaaagatagtactgttctgcttaggaattcaaagcaaact

SEQ ID NO: 673398 - DNA, 657 bp, Homo sapiens
caattaagattgattattgatgtattaatatatactaggaattataaacttcttggaaaaatcttatttttcctattatgatttacataattaatgaaaattatcctctgcagctcagtttgtataggaagaattcatttatgacagtgatttccagagcttcttaaggcagatgagtatgaaagaatggtacttggactttttaaaaaagagagttgtccagtaggacaatggactgcctgacagagtaatgagcctcaatcatttcatctgttagcatggaggctcactcagcatttgcaggggtgttcctgtgttaggacaaattygtactaaattaacttttcgtatgtctcatctctgagccactgtggttttataatttccctgtattcatgtccttatatatcaagagacttattcaaggttagggagttgatgtgaggtatgagaatcatctttacatgctgaggagtaaaactgggatggacagttggagaatgtgagagataagctcttgagaaacttcaagaatcaatttgctatgatgctttcttttcacataagcaataacaaaataccattggacctgggtcactgggagttgattaataggaatgtggtaggtgagaaagatagtgattttactggcataag

SEQ ID NO: 673399 - DNA, 607 bp, Homo sapiens
tgctaatcttcacrttccagggaatgccattgttatgctgtaaggtaatggggtgaaaataaatagcctcaagagaagttcagataaatgaatgggtggtcatgctagagatgggcattttgagaggatattgaagatgtttagaacaccttttgttgggataggttcacagaagttaaattcctaggtatgttctcctgtcttttaagttaggcagtcaaatggaaaccggtgcttccaaccttccgacaaattagcccttgttgctactatgagttgaaaatacagaatgtcacccactgtgtgccccagaattgtagacttagggttacaagaggccttaggtgttccttccagactggccaggctccaatgagttggtagcttcactttggactaatctaatcatattattatgtgtgtgtgtgtattagtttattctcatgctgctatgaaaaaataaatgagactgggtaatttataaaggaaagaggtttaattgactcacatttccacagggctggggaggccacaggaaacttacaatcagggtgaaaggggaagcaaacacttccttcctcacatggtcgcaggaaggagaaatgca

SEQ ID NO: 673400 - DNA, 607 bp, Homo sapiens
tgctaatcttcacattccagggaatgccattgttaygctgtaaggtaatggggtgaaaataaatagcctcaagagaagttcagataaatgaatgggtggtcatgctagagatgggcattttgagaggatattgaagatgtttagaacaccttttgttgggataggttcacagaagttaaattcctaggtatgttctcctgtcttttaagttaggcagtcaaatggaaaccggtgcttccaaccttccgacaaattagcccttgttgctactatgagttgaaaatacagaatgtcacccactgtgtgccccagaattgtagacttagggttacaagaggccttaggtgttccttccagactggccaggctccaatgagttggtagcttcactttggactaatctaatcatattattatgtgtgtgtgtgtattagtttattctcatgctgctatgaaaaaataaatgagactgggtaatttataaaggaaagaggtttaattgactcacatttccacagggctggggaggccacaggaaacttacaatcagggtgaaaggggaagcaaacacttccttcctcacatggtcgcaggaaggagaaatgca

SEQ ID NO: 673401 - DNA, 607 bp, Homo sapiens
tgctaatcttcacattccagggaatgccattgttatgctgtaaggtaatggggtgaaaataaatagcctcaagagaagttcagataaatgaatgggtggtcatgctagagatgggcattttgagaggatattgaagatgtttagaacaccytttgttgggataggttcacagaagttaaattcctaggtatgttctcctgtcttttaagttaggcagtcaaatggaaaccggtgcttccaaccttccgacaaattagcccttgttgctactatgagttgaaaatacagaatgtcacccactgtgtgccccagaattgtagacttagggttacaagaggccttaggtgttccttccagactggccaggctccaatgagttggtagcttcactttggactaatctaatcatattattatgtgtgtgtgtgtattagtttattctcatgctgctatgaaaaaataaatgagactgggtaatttataaaggaaagaggtttaattgactcacatttccacagggctggggaggccacaggaaacttacaatcagggtgaaaggggaagcaaacacttccttcctcacatggtcgcaggaaggagaaatgca

SEQ ID NO: 673402 - DNA, 607 bp, Homo sapiens
tgctaatcttcacattccagggaatgccattgttatgctgtaaggtaatggggtgaaaataaatagcctcaagagaagttcagataaatgaatgggtggtcatgctagagatgggcattttgagaggatattgaagatgtttagaacaccttttgttgggataggttcacagaagttaaattcctaggtatgttctcctgtcttttaagttaggcagtcaaatggaaaccrgtgcttccaaccttccgacaaattagcccttgttgctactatgagttgaaaatacagaatgtcacccactgtgtgccccagaattgtagacttagggttacaagaggccttaggtgttccttccagactggccaggctccaatgagttggtagcttcactttggactaatctaatcatattattatgtgtgtgtgtgtattagtttattctcatgctgctatgaaaaaataaatgagactgggtaatttataaaggaaagaggtttaattgactcacatttccacagggctggggaggccacaggaaacttacaatcagggtgaaaggggaagcaaacacttccttcctcacatggtcgcaggaaggagaaatgca

SEQ ID NO: 673403 - DNA, 641 bp, Homo sapiens
tatcccacagattttaggatgttacatttagttgtttcagaaatttaaaatttttcttttttaatttctttactgacccattgatcattcaggaacatgttgtttgatttccatgtgtttgtatgttttctggtgttcctcttgttattgatttctagttttattccactgtggtcagaaaagaaattgatatgattttgggatttgttgaggctcgctttgtggcttaagatatggtctgttctggagaatgttccatgtgtggatacaaataatgtgtactgttcagcagttgggtgatttgttctgtaaatgtcagttgggcctatttagtctagtgtatagtttaactcctatgtttctttgttgattttctgtcttggtctctttgtcttamcatcctgactgattgagagtaagccatctataagtaacagacactgtcgacgttttgctcacctgtcctcctgccccctctgaattaactggcagtcctagtagacttctcagcatgctaacatcctcccacttcaagcagcagatcgttcatctgcttcacctgagacctttctcagctccttaggagctttctctccaggagccaaacacaacctggcagtatggggtagtggataataacc

SEQ ID NO: 673404 - DNA, 641 bp, Homo sapiens
tatcccacagattttaggatgttacatttagttgtttcagaaatttaaaatttttcttttttaatttctttactgacccattgatcattcaggaacatgttgtttgatttccatgtgtttgtatgttttctggtgttcctcttgttattgatttctagttttattccactgtggtcagaaaagaaattgatatgattttgggatttgttgaggctcgctttgtggcttaagatatggtctgttctggagaatgttccatgtgtggatacaaataatgtgtactgttcagcagttgggtgatttgttctgtaaatgtcagttgggcctatttagtctagtgtatagtttaactcctatgtttctttgttgattttctgtcttggtctctttgtcttaacatcctgactgattgagagtaagccatctatragtaacagacactgtcgacgttttgctcacctgtcctcctgccccctctgaattaactggcagtcctagtagacttctcagcatgctaacatcctcccacttcaagcagcagatcgttcatctgcttcacctgagacctttctcagctccttaggagctttctctccaggagccaaacacaacctggcagtatggggtagtggataataacc

SEQ ID NO: 673405 - DNA, 641 bp, Homo sapiens
tatcccacagattttaggatgttacatttagttgtttcagaaatttaaaatttttcttttttaatttctttactgacccattgatcattcaggaacatgttgtttgatttccatgtgtttgtatgttttctggtgttcctcttgttattgatttctagttttattccactgtggtcagaaaagaaattgatatgattttgggatttgttgaggctcgctttgtggcttaagatatggtctgttctggagaatgttccatgtgtggatacaaataatgtgtactgttcagcagttgggtgatttgttctgtaaatgtcagttgggcctatttagtctagtgtatagtttaactcctatgtttctttgttgattttctgtcttggtctctttgtcttaacatcctgactgattgagagtaagccatctataagtaacrgacactgtcgacgttttgctcacctgtcctcctgccccctctgaattaactggcagtcctagtagacttctcagcatgctaacatcctcccacttcaagcagcagatcgttcatctgcttcacctgagacctttctcagctccttaggagctttctctccaggagccaaacacaacctggcagtatggggtagtggataataacc

SEQ ID NO: 673406 - DNA, 641 bp, Homo sapiens
tatcccacagattttaggatgttacatttagttgtttcagaaatttaaaatttttcttttttaatttctttactgacccattgatcattcaggaacatgttgtttgatttccatgtgtttgtatgttttctggtgttcctcttgttattgatttctagttttattccactgtggtcagaaaagaaattgatatgattttgggatttgttgaggctcgctttgtggcttaagatatggtctgttctggagaatgttccatgtgtggatacaaataatgtgtactgttcagcagttgggtgatttgttctgtaaatgtcagttgggcctatttagtctagtgtatagtttaactcctatgtttctttgttgattttctgtcttggtctctttgtcttaacatcctgactgattgagagtaagccatctataagtaacagacactgtcracgttttgctcacctgtcctcctgccccctctgaattaactggcagtcctagtagacttctcagcatgctaacatcctcccacttcaagcagcagatcgttcatctgcttcacctgagacctttctcagctccttaggagctttctctccaggagccaaacacaacctggcagtatggggtagtggataataacc

SEQ ID NO: 673407 - DNA, 641 bp, Homo sapiens
tatcccacagattttaggatgttacatttagttgtttcagaaatttaaaatttttcttttttaatttctttactgacccattgatcattcaggaacatgttgtttgatttccatgtgtttgtatgttttctggtgttcctcttgttattgatttctagttttattccactgtggtcagaaaagaaattgatatgattttgggatttgttgaggctcgctttgtggcttaagatatggtctgttctggagaatgttccatgtgtggatacaaataatgtgtactgttcagcagttgggtgatttgttctgtaaatgtcagttgggcctatttagtctagtgtatagtttaactcctatgtttctttgttgattttctgtcttggtctctttgtcttaacatcctgactgattgagagtaagccatctataagtaacagacactgtcgacgttttgctcacctgtcctcctgccccctctgaattaactggcagtcctagtagacttctcagcatgctaacatcytcccacttcaagcagcagatcgttcatctgcttcacctgagacctttctcagctccttaggagctttctctccaggagccaaacacaacctggcagtatggggtagtggataataacc

SEQ ID NO: 673408 - DNA, 644 bp, Homo sapiens
aactggattaactagacataagactttttgagtgacaggaaagatattttcctaactgtagaaactgaggagtcatcagacaagtaataaaaccaaagctagttttctggaagatccgtgtagtttcactgtggtagttggagtaaatggaaaggatggtagagtggacgctgaacaagcagccttagagaaacttcataaaaatgtatacaaggccagcggtagaaaaaataagatacaggaagaacatgttgtaaaagaaaaacttatgtatcaagggagtcatgagatttaggatgactctaggcttattaaaagagaaataagaaagtcagaattaaaagctggtataaacagagtgttagtgataatcaaatcaaccagcactaccaacacctggctgtgctaagtgctttatctggcaatctttaccatagtcctacaaaacaacaacaatcacctccaactacagatgaggaaactgaacctcacagatgtcaataatttgtctgagatcaaacaatgaatagatttctctatttgtgtaatgagacagtagtgctatcaatatgattattgaaatattaaaataagatatctacaaattttaagggccatataaatattatctagtaytgttttgg

SEQ ID NO: 673409 - DNA, 643 bp, Homo sapiens
tcaaagccattcaacaagtctctaggaagttccaaacttgcccacatttttgtatcttctcctgagtcctctaaactgttccaacctctgcctgttactcagttccaaagtcactaccacattttcaggtatccttatagcagcacctcattctactggtaccaatttactgtattagtctgttctcacactgctaataaagacatacccaagacagggtaatttataaaggaaagaggtttaattgactcacagttcagcatggctgaggagacctcaggaaacttacaatcatggtggaaggggaagcaaacttgtccttcttcacrtggtggcaggaaggagaagtgctgagcaaaaggggaaaaagccccttatagaaccatcagatcttgtgagaactcactcactatcatgagaacagcatgagagtaatcaccctcatgattaaattacctcccactgggtccttcatacaataagtggggattaggggaactacaattcaagatgagatttgggtagtaacacagccaaaccatatcacttgccatgcaaacagctgcctacttcctcacccaaggaagacattgctcatcaacacaaatacccctcttctctccatacctggaaggtctagccc

SEQ ID NO: 673410 - DNA, 1032 bp, Homo sapiens
ccatcaaaccaggaatccccctaacctcatccctccccattgcatcctcacccacatccatacccagaggcaaccactgttctaatttttttgaccatcaattggttttataacttcatataagtggaatcatacagcatrtgcttttttgcatctggttgctttcacttgcattatatttaagagaaccgttcatgttgtgtgtgaagcaggagtttgttccttttattgctgagtaatattccatggtttatttgtccattcacttgttgatagacaccaggaatattccggaattcatttttgactatgtattgggaagtatattctcacactgttttgttcaggtgaacaattatgccagcactacttattaaatatattattcattttttattgaatcatatgtcatccttgacatattaagttcattatatgaaactatgttttgattctcaattctgctcttttaatctatttattcttatgctcaaccgtgttgtcctgattataataatgttagcaaaagttttcctgtctgtattctgattatagtaattttattaaaagtcttactgtaggttgggcatggtggcctgtgcctgtaatcccagcactttgggaggccgaggtgggtggatcacctgaggtcacgagttcgagaccagcctgaccaacgtggtgacaccccgcctctactaaatccaaaaaattagctaggtttggtgactcatgcctgtaatcccagctacttgggaggctaaggcaggagaattgcttaaacctgggaggcagatgttgcagagagccaagattgcgccattgcactccagcctgggcaacaagaggggagccccatctcaaaaaaaaagtgtcttactgtctgggtaaagcaagttatccttcattatccttcttttaagaaaaaaaaaagcttccttgactgttctcaaatatcttttctttcaagtgcaatttaaaatcttcctgtccagtttcaaaacatgcacatatacatgtatactcacatgt

SEQ ID NO: 673411 - DNA, 638 bp, Homo sapiens
agtgtatatagagagtgtatatatatataatatgtataatttttctatatctggattttttctaacatatatatgtatatatattagagtaccattagtttcagctgtgtcttgtaacctcttcagagtctattgggttcaatgtccccagagagtaaatttatagtctactggcaaagggagaagaacccatttatcagattgaatgtatgatagttggtatcatggatctaatctttgtttagacaaatttcatatggtttctcctgtgyagcttcataggcaccacacaattttagagatatttgggtcatctataataattcccaagacattctgagaatctcagccttatttttggtttctgatttcccactatgtctgtttatgtcttgtttcttttgtccctctgctttcctgtttccaaagcctggtttgtcttctctgctctcattgtcttcatcattttgatctatttattgtttgaaaccactattttcatgtaagcatactttttaaaaaacagtacatatatatgtatatatatacacacatatatacaacagtacatatatctatatatatagagagagaaacagattatagatataggtatggatatatacaaagagatttat

SEQ ID NO: 673412 - DNA, 638 bp, Homo sapiens
agtgtatatagagagtgtatatatatataatatgtataatttttctatatctggattttttctaacatatatatgtatatatattagagtaccattagtttcagctgtgtcttgtaacctcttcagagtctattgggttcaatgtccccagagagtaaatttatagtctactggcaaagggagaagaacccatttatcagattgaatgtatgatagttggtatcatggatctaatctttgtttagacaaatttcatatggtttctcctgtgtagcttcataggcaccrcacaattttagagatatttgggtcatctataataattcccaagacattctgagaatctcagccttatttttggtttctgatttcccactatgtctgtttatgtcttgtttcttttgtccctctgctttcctgtttccaaagcctggtttgtcttctctgctctcattgtcttcatcattttgatctatttattgtttgaaaccactattttcatgtaagcatactttttaaaaaacagtacatatatatgtatatatatacacacatatatacaacagtacatatatctatatatatagagagagaaacagattatagatataggtatggatatatacaaagagatttat

SEQ ID NO: 673413 - DNA, 602 bp, Homo sapiens
ccagttttactcagtcttttcaaaaatattcttttagcaaaaatcacattcctggttttgaatgttcaggggctcctccagactaggaatcagatctaatttaggactcctataaattctgtcccatcttttacattctggaatattgtcagccttctccatgtctttacatttctctatctttaaaataaaattgattgytttcatggaatggagtctgcccactgctttacataataagtgcatgatatattgttttaattgagtttgctgatctgaattttatggaatgctctctcttcccttcataattcttttttgtatgttttcagggtaaatgctggaggggctccaatttggaagtgttacattatcaagttaaatcataagagcaatttataaaagagatagcttggaattaaactacaaaagctgcttaaggtaaaatatgcgagggaactctcttgttgccattgtgagaccctggagaacagatggaaccaactctcaagcttctgctcgggtacctgctgtttaattataccctaattaattaaaagaaagactcctacgtggtttcagtagtagtgagcgggagggca

SEQ ID NO: 673414 - DNA, 612 bp, Homo sapiens
ccctggatgttctcatgttctctatacagcaaatggataaatacaactcaataaaagcaggactgctaaagactagacctttcaaaaatgaaggcttgtgtcaacctcctaggcargaaaccatgacctactaaggagctggctgagaataaagaaaatatggaagtgtcaaattatacacatcagctatgccttagtacctatgagtatttatttcttcctcattttaatgtgaatatgtgtgtgtgactcaccattttcttttttaaaattctgtactcctgcaataagtatagcataaagcatgttgacagtacttaaccttattcaacatttaaagtgtccctcagatagacgtggacattcaaaagtgttaaagagcccagccaacatcacaagagctgcctacctgatgcactgctggccagagatgtaagaataagctcagcagaaatcaaaagagccacctgatacatagacttctgagtgctaaaaactggttgttcttttaagccactcagtgttgaagtggtctgttcatcccaatagctaactgataagaaatccagcaatggacagtgttaaggaggagtgtatacagaggagggtgat

SEQ ID NO: 673415 - DNA, 612 bp, Homo sapiens
ccctggatgttctcatgttctctatacagcaaatggataaatacaactcaataaaagcaggactgctaaagactagacctttcaaaaatgaaggcttgtgtcaacctcctaggcaggaaaccatgacctactaaggagctggctgagaataaagaaaatatggaagtgtcaaattatacacatcagctatgccttagtacctatgagtatttatttcttcctcattttaatgtgaatatgtgtgtgtgactcaccattttcttttttaaaattctgtactcctgcaataagtatagcataaagcatgttgacagtacttaaccttattcaacatttaaagtgtccctcagatagacgtggacattcaaaagtgttaaagagcccagccaacatcacaagarctgcctacctgatgcactgctggccagagatgtaagaataagctcagcagaaatcaaaagagccacctgatacatagacttctgagtgctaaaaactggttgttcttttaagccactcagtgttgaagtggtctgttcatcccaatagctaactgataagaaatccagcaatggacagtgttaaggaggagtgtatacagaggagggtgat

SEQ ID NO: 673416 - DNA, 637 bp, Homo sapiens
gtaaaggagatacaattaaaaattatacaaacacatactcacacagatatgcttatatgagttgtctgttgacatatgacttatgcttaaactcataaagaatatcttaattgagacattatcatgtgcatagaacagctatattctgtggagaatataaaaataaactagaaatagattctaccccctaagaaatattggttcaataagaacaacagggcatctaactaaggaacaataattcacatgtatataagttaagtgccgtaaaaatgtagattattctgcagtaagattcctgaagataaagatattacattttggtgaaaggagttatccaccctgatgaagaaattgacaaactattgaaattttaaatggaagttcatagtttggatayatgcgtaatggcatgcagataaaaggcaaagggtgaataggcagtgtattatattgctggcactaccataacaaaactccgcagattgagtggcttaccgaatagaagtttaccttctcacagttctggaggttagaattttgagatcaaggtgttggctggattggttccttctgaaggccatgaggtagagatctattccaggcctctctccttggcttgtaaaagattgtcttc

SEQ ID NO: 673417 - DNA, 650 bp, Homo sapiens
agatttttctttttctttgagacagattctccactctgtcacccaggcattgtaccattttaccttcctggcatcagtgcatgagagtttcagtttctctacattctcatcaacatttgctcttatctgtcttttaaattataaccatcctagtgggtgtgaagtgatatctgattgtggttttgatttgcagttccttgagaactaatgatgttgagcattatttttgtggttactgaccatttgtgtatcttctttgcagaagtgccaatttagattcttgcttttatttgtttatttagttagttttcaagacagagtctctctctgtctcccaggctggagtgcaatggcttgatcacggatcactgcagccttgtcttcccaggctcaagcaatcctcttgcctcagcctccctagtagctgggactacaggtgtgtatcaccacgccaggctaatttttgtattttttgtagagacagggttttgccacgttgcccaggctggtctcaaactcttcrgctcaagccatctgcccatcttgacctcctaaagtgctgggattacaaggcttcagccaccactcccagcctgctaagagttttatggtttcacctcttatgtttaggtcttttattttattttatt

SEQ ID NO: 673418 - DNA, 577 bp, Homo sapiens
gagagaaagagagagagagagaatataggggaagtgctacacactttcaaccagatcttgtgagaattcacctactatcatgagaacagcaagggataagtctgcctccatgattcagtcacctcctaccaggccccttctccaacacatgtcgacgtgctatttgggtggggacacagacccaaaccatattaccagggcactggagaaacacagaggggaaagaaccagccaaggagtgagatggagaacaaggaggacttcttgaaacagatgacatccaaactgggtcctgaaagctgaatagagattagacaggggaggaggggcagctaaagatggctcaggcaaacaaagggccaggggatatgtkcatgggatgatgtgtctctcgttgtctgcttaacacaaggtgagtctctccctccctctctctctctttttctctgtgtgtgtttgtgtgtgtgcatgtgtgcaaatgtaatatacccaatagtcaaacatgtgccccaggagaggggtagaggaagaaagagaatgagagagtaagaaggaggaatagacacagaaaatgaga

SEQ ID NO: 673419 - DNA, 882 bp, Homo sapiens
agttgtatttctgacccttttgtgaaatgatgatggaagatgacagttgtttatattttaaatatcaactgggttagatgacaatttcagaaccgttttttaaattctacttttcaaattcatttgtggaacccaagatctgggcgccattggtctaaacccagttaaatgtctaagttctcattgcgtgttacatgatgatattcacttttctgtgttccataaccaggaatatagaatcatcaatggtgtaaaccccatttgggctatccttttttcacatttgggctaaccttttcactctggtggacatgagcattctcctactgctaagcttccatttaaaccccacgggtcccgagatcaccattatccccacaagccacaagaacttggattcccacctcgcccagatgaaaaagatcactcggacagacctccacttcaacaaaagagctccttcacaattgcccccttcttggtcaacaggtcatcacaccccttctggcacaaacaggacccaaaatcaccctcatgactctaattctacagtctctattactgcttgggctacatctgggcataccaagaaggtatggtacttaaaggatggacgatgatagtgatgaagatgatgattattattattacaaaagtgatgcaaattctctcctagtgattatttctagttacataaatttcctcttggaaaaataagttctaaattcaatcrtgaagcaaacaaacctctggctataaattgcaaagaagtttgctggcataaatcatgatcgtaaattcatgttcacaagaaatatcactttatgttctgaacaaatttatttcaatttcatgttgcaatcctactggcctagtgggaaa

SEQ ID NO: 673420 - DNA, 1302 bp, Homo sapiens
tttactgcctacaagtagagacagccttggggctcaggcttgctgagaaatattagataagatattgtgtcagtctgagacagtgggggaatatattaattcattctcacactgctataaaattctacctgagagtgggtaatttataaagaaaggaggtttaattgactcagttttacatggcttgggaggcctcaggaaacttacaatcgtggtggaagrcaaaggggaaacaagcagcttcttcataaggtggtaggagagaaagagtgagctaggaagtgccacactttaaaaccatcagctcttgtgagaactcactcactgtcatgagaacagcatgggggaaactgcccctaagatccagtcacctccaaccaggtccctgcctcaacctgtggggattacaatttgagatgagatttgggtggagacacagagtcaaaccataacaaggaattaacagccaagtccactcagcagaagtggcgagatgatttaagacttgaaggacgagtttgcaggaagacaatgttggactgaagatgtggaaaatgaggaaataggcctcaggaagggcatggctgagcagcaggaatagcctgtgcaaaggcgtagagatgtggtgtgcccagggaagtagaagtgtctaaacatggcatagggagcatgtgggcaaataacaacttatgaaacagcaaatgtgggcagaatttagacagaaacatgggcatacagaactcagattttatcttgagggccatggggaaccactgaatgactttaaataaagggtgatatgtttggatttgtgtggttggaggattacatggggaatcatgtgcatgtggttggaagattacatggggaacagtgtgtgtgtggagggtttgatggaggacaggttattccctcagtgcctcttgacaccttccatgtggcctagtagaaatagaactttttccttggttcttagacattttaatgaataataatggcagctaattcttaggaacatattaagggctaaatagattttatgctattttatatttttaccttatttaatcctaaaatatattctgtggaataaatactactatcatttttattttacagattaggaaacagttgtagagggtacatggcacatcttgagttacacagccattaaccagtgaaacggggattacagcctggggatctgaattccaaaggccagagtattaagcagtatgctattatcactcatctttctatgtgcacatgtgttatttccatatccagagggcacagcatgca

SEQ ID NO: 673421 - DNA, 640 bp, Homo sapiens
gaatcttattgataatccctaagtgactgatagactttctaagcttcagatttatccctttcctctggctgttattcttggtatatttggcaatatataatccatatgtactactcttttttttcatcagagagaaggcagacatatgtaacttttaacagcygggaagagcttgcattaatgtaaaagttctcaatcaggaatgcacctcacaatcacatgtcgaaaactttcagaaatatgtatgtctgagactctaccactttagaacaaaaccagaaccttcaggaatagggtaaagatgtatgtatttttaaaatacacatgattttgttgcatttttgtggttaggaaacaccacactgcaattccataaaaagtccatatgaagttacattcagtcatagtctgtaggagcaacaaaccttaaaaatcctggcacagtattcaaaggatttgggattgctgacatcatataccaggcatacaacatcacaaatgatttcagcttcagttagaaattccgattctgagatatcatgcaacttgtaaaagaaaaagataatgaaaaatataagtatcataatattgatatattaagtcatgatagcttattacttccttccctggacttcctaag

SEQ ID NO: 673422 - DNA, 1370 bp, Homo sapiens
ggtgttaggtaaactgattttctctttatgctttcatagcatttagcctattattgaattatttcaattattatttcatatgtaaatttaaaatattactttatcaattgtctgagtttaaacactatgatttcttcaaatttaaacatgtaaaaccagagcacagtgtgtgaacaacactcagtaagaacatttataaagaatgagtagatgggtagaagaatgatggatgaatggatagatatattttctttgtcactgctcttaatctttatttcttcttctttgtcaccagctctaaacttagaaaagtagtgaagcatcccattcactttaatattattctcattctttgagaataatattattttgttagtctcattctttatttgaagataggaaatttatacatatgataatgataaagtacaatctaaacttaatgaaacataccagatgatttctgagaaattcagagtttatgccttttaaattgttttctaatttcaaattaatctcactttattagggatcagataatatagtcctagaatctaaaacaatagaatctgtaggaatgatgtctagcagaactttctgttgtgatgaaaatgttgtaaatttaacacggttaaaaaagctagccactgtcaatatatagcagttgagcatttaaaatgtggctagtgtgactgaggaactgggtatttggttttatttattataatcattttaaattgaattaaatgttaatagccatatttgactagtgcccagcatattgtacaaaatagttatcaattgtaagattaagataatggagatttgcaaggaaattgtatctagaatggtataaatgaaaattgttattccatgttaagcccaatatatccctaagagtgttcatttatttcaggaatggggcaaataaattacattcctttcttctttccttttttttcttcaacaaatggatattgaaaatacactgtattccacatagtattctaaatttgtgtcatgcaatagtgaataaaataaaattctagcattcatggatattatgcactattgaaaggacataaaataaacaataaacaaatgtatacataaaataatttcaaataatatttgatgccataaaaaataataaagcaagttaataaaagaatattttgggcagaaagcttaatgaaaagggacagcactggatgtggtggcttrtgcctgtattcccggcactttggggtacaaaggctaaaggatcacttgatcccaggagttcaagacaagcctgagcaacatagtgagaccctgtctctacaaaaaatcagaaagtagctggatgtggtagcacatacaactacttg

SEQ ID NO: 673423 - DNA, 907 bp, Homo sapiens
caccaaaaagtcttttgccttttaaaaaaaagtattaacttttgtttcacaaaaatagtagttgatgtgtattgatgccaatgtacacatagataccccacaggtaagactctactgtgggcactacactataaaattatcttgagatattataaatcaggtgatatatatatatatatatwtttttttttttgatgcttcctgaaagtaaaaagttaacttcttataggcagtgttttatagatttgagacatggggatagaatcatgaacttaaagttccctctgatttgatgagtaattattaataatttgctatttttcaatttatgtgatttgcccctctaatacaatgggaaggacagcttcttatccctgtcttccaggaatgtgaagtgtataaaattattcctgaagacctgtaatctgactctataacacaaactggtaatagattaacaggaaaaaagggcatacaaatttattatctgcacatgtatgtacaggagtcatacaaaatatgaaaactcaaagaaatgcccaatcattgatgcttttataccatcttggggttacagaaagaataggggcttatggcatggcaagacagattgtcagagttagagcagaagaagaaaggcatggagtaaaggcaatcttgtgcagatgtacaggtagcagccctcagaaaaaataggtgatagtctatggtaaatgtttctctgtcagatcttaaaaggtgtcagactctctgttaatctttcctagacatggacaagcggggcgtcaggaaaagcttgcttgcatctgttatttatttcactttattgcctccacagatgcaaatctccccacaaaaggcacctttgtagggctattcctgtctgcaggccctctgaacagccatc

SEQ ID NO: 673424 - DNA, 1213 bp, Homo sapiens
ttttcttatactttcagtgtctggcacctcacctggcacataggagacattcagtaaaaacctttcaaaataaatgactgaatgaatgaatgtatagagtttggagtgcatagatctttttctatatgtacagagagatcttgttcattcacaaatttattagacaaaacatttattaagtgtcccctatgtgccagacactggggctcagtaaaaaagatgggatttgcatcagacctcacagaacacagggtcaatatggggagacagatgttcaagggggactatcagcaaaatgtgaaaattgttaacacagaggaagttcagggggttttagaagcactttggtttggagggcactctatgttatggtccaggagagtccactagtctctgcgcttgtcaatcaagaagcagcaatggcacaaacccacaaatgcagggaacagagcttatgtaagtgaaggacgtggtcatctttgtaaacatgaataaattgtttagttgtaagcactgtattcaataagggaggttcaaactgcttgcataagagggctttctagctattaatcaagtggaaagcactgttgtgaaggctgtattgggaattttgaacaccatttgatttctcttcaagcctctttgagggagtattatgttcagagccagccttttaacaatgcactatatttaatctttttaccacttttgacctttttctctaaaaattatttccattattccaaatttcattttgcctttgctatacctcttttgtaaatttttctttaggagataaagaacccattaaatgctgtgaagtccctgcctgcctttaatatgggagggatatgggagctctaatagaaggtcactggattgtgagaaaaatagattcacagtgggcacagatttctttttgtatatatgctggcagcagtgcctggctgtaactataagaaaaatggtaaactccatccttgcactttattagaatgacgtttcttacattaaaactggtcaaactataacaaaaggcctaacattcacgtcatcagagttctgaagagagatgaaaaagatggggctgaaaaattacttgaagaaatagtggctgaacacttcctaaatttgacaaaakatataatttaacagttgcaagaagctcagtgaaccccaaacagggtaagttaaaaaaaaaaatcacaccaag

SEQ ID NO: 673425 - DNA, 616 bp, Homo sapiens
acaggaagcacgatgctggcatttgctcggtttctggggaggcctcaggaaacttacaatcacggcagaaggtaaagggggagcaagtaattcacacggccagaccaggaggaagagagagaaaagggggaggtgccacacacttttaaataaccagatctcaggagaagtcactgttgcaagaacagcaccaagggggatggtgttcaatcaggaaaaaccacccccgtgatccaatcacctcccaccaggccccacctccagcactgggaattacattttaacctgagatttggatggggacacagatccaaaccctatcacaggatgatttttttctgttatttagaagagaactagctatataccaaggacacwgttctgactccttggatcagaagagaatgacagaacagcacgtacctagagatttatctaaacacttcagaaatcaaatggcaagtttcatgtttctagatactttctgaaatactttctactatttagcataaccaagtatgtcttgcatctctgtcttcctctgtagcttcccctccagtctccattagagctcagaaaattcactagctcttcctctcgtaacatcttagatttg

SEQ ID NO: 673426 - DNA, 616 bp, Homo sapiens
acaggaagcacgatgctggcatttgctcggtttctggggaggcctcaggaaacttacaatcacggcagaaggtaaagggggagcaagtaattcacacggccagaccaggaggaagagagagaaaagggggaggtgccacacacttttaaataaccagatctcaggagaagtcactgttgcaagaacagcaccaagggggatggtgttcaatcaggaaaaaccacccccgtgatccaatcacctcccaccaggccccacctccagcactgggaattacattttaacctgagatttggatggggacacagatccaaaccctatcacaggatgatttttttctgttatttagaagagaactagctatataccaaggacacagttctgactccttggatcagaagagaatgacagaacagcacgtacctagagatttatctaaacacttcagaaatcaaatggcaagtttcatgtttctagatactttctgaaatactttctactatttagcataaccaagtatgtcttgcatctctgtcttcctctgtagcttcccctccagtctccattagagctcagaaaattcactagctcttcctctcgyaacatcttagatttg

SEQ ID NO: 673427 - DNA, 672 bp, Homo sapiens
cttccttccttttcttttctttctctctcccctcttttcttttctttttagaagcagggtctggctgtgctgcccaggctggagtgcagtggttattcacaggtgtgatcactgtagccttgagctcttggactgaagagatcctcctgcctcagcctcccaagtagcgggaaccatgggcatgtgtcaccatgcctggctccagttttttctctgtggatgctgckccttaattcatccctggtattagtattttctatagtttcacttatgcatctacccgttttttcattttctttagatgatctcatgaagtcccatgacttcaattgctatttgcattcaaattatagttactgcttagatcagagtgcctgacccatagattctgttatctggtgatcatctccatgagatgtcccaagtgccaaaaactgaatgtgccttgtgtctctcaccccttcctgacactcccattcacctgagcctcctgcattccctgcctctgtggacagcatcaccagccaccccctgtcacatctgggagtcactttcactgcttctcattctttacctgagaaatccagtctgtcaccagaccctttccccattacctcctaaacacctctgaaatccatccactgctgtggccttaattcaggccttactgtc

SEQ ID NO: 673428 - DNA, 672 bp, Homo sapiens
cttccttccttttcttttctttctctctcccctcttttcttttctttttagaagcagggtctggctgtgctgcccaggctggagtgcagtggttattcacaggtgtgatcactgtagccttgagctcttggactgaagagatcctcctgcctcagcctcccaagtagcgggaaccatgggcatgtgtcaccatgcctggctccagttttttctctgtggatgctgcgccttmattcatccctggtattagtattttctatagtttcacttatgcatctacccgttttttcattttctttagatgatctcatgaagtcccatgacttcaattgctatttgcattcaaattatagttactgcttagatcagagtgcctgacccatagattctgttatctggtgatcatctccatgagatgtcccaagtgccaaaaactgaatgtgccttgtgtctctcaccccttcctgacactcccattcacctgagcctcctgcattccctgcctctgtggacagcatcaccagccaccccctgtcacatctgggagtcactttcactgcttctcattctttacctgagaaatccagtctgtcaccagaccctttccccattacctcctaaacacctctgaaatccatccactgctgtggccttaattcaggccttactgtc

SEQ ID NO: 673429 - DNA, 500 bp, Homo sapiens
agagaaaggctttagatagctgtttatgggaccatttatttcttaaaaacaagtgacagaaatttgatgtaaacatggcaaaatgtcaacattcattaaatctaggaggcagatatatgggtatcatagttttaaaatttttttccatgtttgaagcacttattatttcaatttgtctgcttactatttaatcacagagccacttggttaatgattacggttttctccaggcaccaaacatttgcccctctttgtgaaacagttgctgtttctgatgggccatttcattaccttataattttggaatctgatgtcactgcatttacttctacattaacttcaaccttaaattaacaaccacagcaatcataaacttaggaaaattaaaatccactgagaagttaataagcttgctgccctagaaaaatatcyaggctcattttaggctgttgtgtaaataaactaagaagcaattattttaaagaattattcactaacag

SEQ ID NO: 673430 - DNA, 625 bp, Homo sapiens
aaaatgaagctgggcattgcttgaagagtacttttttaagagwcacagggcctcactctgtcaccccccaggctggagtgcattggcacaatcactgtaaccttgaactcctgggctcaagccatcctcctacctcagactcctgagtttctgggactacaggtacacactgccacacccagctaatttaaaaaaaagttgtttttagagatagaggggtctcactatgttgcccaggctggtctcaaactcctggcttcaagtgatcctcctgcctcaacctaccaaagtgctgggattacaggtgtgagccaccagccctgggcaatttttttttaaaggcaatcaaggagcctggggttgtttcactacgtgctaggatcacattaggaaatactggagcacaactttgtttatattgatcccattatcctttccttccatccacccagatcctacccattccttccagtcccgccttctctaggacattcaattacattccttccttaagaatgacttgcaagaccttgtttaggccacttaacctctctgtgcctcggtctccatatctgagaagtggggataataacagaaactaccttaaagtgttgctgagaagtaa

SEQ ID NO: 673431 - DNA, 625 bp, Homo sapiens
aaaatgaagctgggcattgcttgaagagtacttttttaagagacacagggcctcactctgtcaccccccaggctggagtgcattggcacaatcactgtaaccttgaactcctgggctcaagccatcctcctacctcagactcctgagttkctgggactacaggtacacactgccacacccagctaatttaaaaaaaagttgtttttagagatagaggggtctcactatgttgcccaggctggtctcaaactcctggcttcaagtgatcctcctgcctcaacctaccaaagtgctgggattacaggtgtgagccaccagccctgggcaatttttttttaaaggcaatcaaggagcctggggttgtttcactacgtgctaggatcacattaggaaatactggagcacaactttgtttatattgatcccattatcctttccttccatccacccagatcctacccattccttccagtcccgccttctctaggacattcaattacattccttccttaagaatgacttgcaagaccttgtttaggccacttaacctctctgtgcctcggtctccatatctgagaagtggggataataacagaaactaccttaaagtgttgctgagaagtaa

SEQ ID NO: 673432 - DNA, 625 bp, Homo sapiens
aaaatgaagctgggcattgcttgaagagtacttttttaagagacacagggcctcactctgtcaccccccaggctggagtgcattggcacaatcactgtaaccttgaactcctgggctcaagccatcctcctacctcagactcctgagtttctgggactacaggtacacactgccacacccagctaatttaaaaaaaagttgtttttagagatmgaggggtctcactatgttgcccaggctggtctcaaactcctggcttcaagtgatcctcctgcctcaacctaccaaagtgctgggattacaggtgtgagccaccagccctgggcaatttttttttaaaggcaatcaaggagcctggggttgtttcactacgtgctaggatcacattaggaaatactggagcacaactttgtttatattgatcccattatcctttccttccatccacccagatcctacccattccttccagtcccgccttctctaggacattcaattacattccttccttaagaatgacttgcaagaccttgtttaggccacttaacctctctgtgcctcggtctccatatctgagaagtggggataataacagaaactaccttaaagtgttgctgagaagtaa

SEQ ID NO: 673433 - DNA, 625 bp, Homo sapiens
aaaatgaagctgggcattgcttgaagagtacttttttaagagacacagggcctcactctgtcaccccccaggctggagtgcattggcacaatcactgtaaccttgaactcctgggctcaagccatcctcctacctcagactcctgagtttctgggactacaggtacacactgccacacccagctaatttaaaaaaaagttgtttttagagatagaggggtctcactatgttgcccaggctggtctcaaactcctggcttcaagtgatcctcctgcctcaacctaccaaagtgctgggattacaggtgtgagccaccagccctgggcaatttttttttwaaggcaatcaaggagcctggggttgtttcactacgtgctaggatcacattaggaaatactggagcacaactttgtttatattgatcccattatcctttccttccatccacccagatcctacccattccttccagtcccgccttctctaggacattcaattacattccttccttaagaatgacttgcaagaccttgtttaggccacttaacctctctgtgcctcggtctccatatctgagaagtggggataataacagaaactaccttaaagtgttgctgagaagtaa

SEQ ID NO: 673434 - DNA, 668 bp, Homo sapiens
gagcccaggcctgtgtctaatcacaaagggaaaggtacctggatgtcccgcgagcgctcgtaggcctggtaggccaccttctcctcaatgctggccagctcctgcttcaggttggctgtctcatgctgatgcaggtccgtcaggtcatgcagctggtcctccagtcgctcatacctttaaaagagaggagccgattcccagtgtgacctttcacagcacattgtggaacgatgtcctttttatcttcctgcgccagtaccttttggcttgctctcattccctgatgggctgtttttctaaaagagtaaggctagctgtgggaattgagcttttggataacactgagtcccagctctggaaagatccagtctctggggtcttgactctctgtccttgccactgaaggtgcacacgggtcagactagcaccttagctagctgcrgtgacctcaagatagagctcatcagctgatgcacttgccagggccaggcaggagacagggctctgtgggatcctgctaaaggagggccaggacctctggtgtctgtggtgccttttccctattctgccctgacactgctgttggggttcatggccagagagcccacagggaaagcaccatgcttttagtatcaccttctactctggggtcaactctactatttccc

SEQ ID NO: 673435 - DNA, 652 bp, Homo sapiens
gaccactatctcttgcgcttctgacgttatcttgacattgccttctgaactagcacaccttytttttagtattggagaatctgaactagcacagctggttttagcagtggttcaaggaagtaagtcgtaaaaaatcatgatcccttgcttaattactggatttcagacagttttcagacctggaacctacagactaaagaggtggctgaattccttggaaaaacgccactggtacgtactttaaagattccttagtaacccccttctgtatgtactctaaagatttgtctagtctttcccaaagggatccatggacatttatgtggtgaataagtacttgaaaaggagaatatacacacagttgggagactattggacacaggatctgggttgacattgatatgcagagagccaaagtatcaccatgggccctgttacatggaggtgaatggggcaaggtaaaatattactagctaaagtttatcttgcagtgggtccatttggtttgcagatttactgcatggtcatttctctggctctccaatttactattggatagtcttcgacattgggtccttggctgtggaggaagacacagcctctgacattaccaagcttaaagacagaaaataaaaaacaatattgtttcctg

SEQ ID NO: 673436 - DNA, 622 bp, Homo sapiens
agctcagcgccctcgtctcttggggaaagtgcggcacccctctccactcccccacccaccgcccacaacttctaaaaagcccctaaccccttctagcctcttccctgatgtcaggagggttctggccaggatcagctgcagtgaaaatctagcaaatgaggacatccttgcagcagaaaggacttaaagtaggatatgccacatactttcccacctcaggatttttcagaggccatttcacatttcctttcccaccttcttggtttccttacctggaaacaatgcagacagaagaaatgaccgtggtgttcctgccaaagatgcgtagcctggccctaatcatcaaacgaaacccaattaaggcccattcttcaagctagttggccagtgagctccaaaatgtcaagatcacaaaattcagagaaagtttgaggacttgtttgaaggraaccaaagaatgtggcaactaaacacagcacgttgttctaacccagtgagaatcttgtaggggatctgaggattcgatggtaggaatgtgtcgatattaatttcctgatggtgatggctgtattacggtttgtaagagattgtccttgtttattgaaaataaacacaaagatgt

SEQ ID NO: 673437 - DNA, 690 bp, Homo sapiens
aatttatcaactctttgtctatgcatataatttttttcaatttgtgacttcctttttaattatcttcattccttttcaagtaaattaaattttaaaacatatatgtactcaaatatgtcagtattttccctaatgatttcttcctttgaagttgtgcttagagggtatcaccctaaacatccaatattatataagcattgaggatattttcctctgaatttatgtggatttgatttttataggtggttctttaaaactctgtatctgaaycttatcttgaaataatatgtgagattagaatctcacttttatcccagtagtattatttaaaagcaaaggtattgcacaattaatacagtcaccctatataatagagacaagtaaaaagaaaaaaaatgccaactctaatgtgagttattaacatttattcaccctctctcccactcagcctctctcaagttgtcttgcttgaaggtgtgtgttggcaggaatgggggacagccatgtatgccaggcaccgaacacagcagctttacatgtttgtatttaattctcgactagacttgtgaggtagaaattactctgtttcaaagatgagaaaggagggacttggagaaatcagaatgctggagattatagagttcagagcctggcaaatttgagtgtgtatatgagttcctggtaatgttg

SEQ ID NO: 673438 - DNA, 647 bp, Homo sapiens
ctgctaggtgccctggcattgccacagtgtggtgacagagcagtggttacacagacagcgatccctggcctcacgcagtttacattttgttgagtgaatgcttttttctttacttggacctttatcacccagggcccaaaaaaacaaactgctctagggattcagtgaagtggcctcttggctcatggcccccttaaagtcagctctccatgcagagaccagaagaaccttttaaaacacatcagatcattcgagaccagcctgacctacatggtaaaaccccatctctactaaaaatacaaaaattagccgggcatggtggcacacacctgtaatcccagctactcaggagactgaggcaggagaatcacttgaacccaggaggcggaggctgcagtgagctgagatcacgccactgcactccagcctgggagacagaatgagactccatctcaaaacaaaaacaaaaacacatcagatcatgccactmccttcctcaaagtcctccaaagtttcttgtaacatttggaatcaaatctccttgtttccgtagcaacgttgcttatgtaaacacatgtggcaggttgggtctcctgtccacatcccctcagactgcctttcctcccggcatcccagtgacttagcag

SEQ ID NO: 673439 - DNA, 603 bp, Homo sapiens
ttccagtgacggggaactcactacctcacgaggcagctgtaattgctgtgtagttagagaaacacagtagatgagaaatgctggtgattatgatgagggctattgactggggagtctcctggggatgggggcagcactcagacagagaagagcaccgcttctgagcacaagcaaatcctcaaagcatagaaggaccgctgagatgccgaggccctggggctctcgcctggtgtccaagtcacccccaaactcacccgcaggaaggaggggaatccctggccgtagtatccaacagcaaagtagtctggtttgggcctgaggattttcatgatgctttcatagaattttgcctgctggatctaaaggaagaaaacaaggtttgttgcaacacagatgtgtatcaaaggcacattcaactcaaagaggccttggtgaagacattttcattataccagagccaatgagccatgtgcacatatttacatatctgtgctatgtctataatcacaatagtaatagctatatttacagtataccagggactgtgktaatcactctacctgcactagtgtggttacttgaatcacccttgtaataatccca

SEQ ID NO: 673440 - DNA, 820 bp, Homo sapiens
agaagtttccctggattatctcttcaggctttatcatccatttataagattaaaaatcatatcacataaaacttgactctagaaatatgaaactaaccaatgttgtttttcaaaagttctctgaaaaataaaatggattatgcaggaaaattttgtaaatggaaaatattgcatattcagagtttgaggcaatccaggacattttaagccagaaagcagatggaataagagcaatataaattactgtaactgtattttgccaattgcaaagtgactctaatgccaaacagaacttcttctccccaacttgttgactgcatacgtatttgtttttaatttacacttggtagagtttggtgagatgtttggagttcgaatgatagaatctacaggtctagggaacaccaaatctagccaaaccacccacaragtatccaattaaggaaacaagcacataatgtacaaaaaggtattttcagtgaaaaataatattcatgcatgttatataagccaattaacaaaaactgtgcctgtagcaatttttaaggaatgtcttacaaataggaagtacgttaaatactgaacagaaggacaaaacttcatcagcagtccttcctggccttggtgctctcaacatgatctccagcctgtctcttagatgtcttggcagcttcccaaaggaagagtcttggcctctggtcgtcagactcagagaatcctgactttaatcctgactcaattcactctagaccatcaattcagggctcagtaagatttgtccaaattaccctgactggagtcaaataacgcagtcctgtga

SEQ ID NO: 673441 - DNA, 601 bp, Homo sapiens
ggtccaccatgaaataagaatggatagttatgatcaggttatgcccagagataatcaatccatggagacctggggttgtttgtattcctgatagtcttcattttagtttgagatgttcaatgctgttacttggcccacaataaccttcagatggcagttgatttgacataaatctgtagacctcaagtgctaaataataaccatgtgaggttactgtctgtgtgggttcaaggtgaatttgaagttgacaaattgtagtctttacagtggtgcacatgtaaagcttgtttgagacatgaaccataaaaagggcttagaggaatattttcttaggccattagtgactttggtcactaatagaacttagttgtcttcccataagacagcagagggtatcctatagtccttagaggggccttagagactctttcttattggataaaaggaaaccttttttttttccaaacaagtattatgaggaacattaatatgtaakcttgataaaactttattattataaatgtgttctttaagtttattgcatttgtcaattcgatggaaaaatgacaacctggcactttaggtcctctccaatgtctta

SEQ ID NO: 673442 - DNA, 631 bp, Homo sapiens
cagaaatcaaaaaaattttccaaacaaacccggagcctttgctttaggaagcaaactcaagtctgtgatgattattgtgcttgaaggatgggtttctaattctgtcataaaaaatgatgaaacaaggtgatgtcagagggacttcaggtgacaccaaaataccccatccagggcctggaagcccctctgcctttgactctaagatggggcaggacccccgctctcagtgggatgtgcccgcgaccctggcgctgggaggcagtgctgcagagaggagtggtgtccgcacggctgtcaccagacatcctcatcaccctccgcaccgcacagcccagcgtctccttccacaagcaaaagactgcggctcctctctctgcaggaaggtcagccatactcrggtggcagcgtgacgccagtcaccatggaaaccagggctgacaggaagatgcagccgcttccagcagggacctggcctgagggcaagggaggagcggcacggcggcggctgccttgcgcttccagctcgggccctgctcatttgaacaatatccaacctcggactggagtttaggctacagtgaaatggattacgttatgccgaaacagaaacatcaaactgccaacgtttata

SEQ ID NO: 673443 - DNA, 631 bp, Homo sapiens
cagaaatcaaaaaaattttccaaacaaacccggagcctttgctttaggaagcaaactcaagtctgtgatgattattgtgcttgaaggatgggtttctaattctgtcataaaaaatgatgaaacaaggtgatgtcagagggacttcaggtgacaccaaaataccccatccagggcctggaagcccctctgcctttgactctaagatggggcaggacccccgctctcagtgggatgtgcccgcgaccctggcgctgggaggcagtgctgcagagaggagtggtgtccgcacggctgtcaccagacatcctcatcaccctccgcaccgcacagcccagcgtctccttccacaagcaaaagactgcggctcctctctctgcaggaaggtcagccatactcgggtggcwgcgtgacgccagtcaccatggaaaccagggctgacaggaagatgcagccgcttccagcagggacctggcctgagggcaagggaggagcggcacggcggcggctgccttgcgcttccagctcgggccctgctcatttgaacaatatccaacctcggactggagtttaggctacagtgaaatggattacgttatgccgaaacagaaacatcaaactgccaacgtttata

SEQ ID NO: 673444 - DNA, 631 bp, Homo sapiens
cagaaatcaaaaaaattttccaaacaaacccggagcctttgctttaggaagcaaactcaagtctgtgatgattattgtgcttgaaggatgggtttctaattctgtcataaaaaatgatgaaacaaggtgatgtcagagggacttcaggtgacaccaaaataccccatccagggcctggaagcccctctgcctttgactctaagatggggcaggacccccgctctcagtgggatgtgcccgcgaccctggcgctgggaggcagtgctgcagagaggagtggtgtccgcacggctgtcaccagacatcctcatcaccctccgcaccgcacagcccagcgtctccttccacaagcaaaagactgcggctcctctctctgcaggaaggtcagccatactcgggtggcagcgtsacgccagtcaccatggaaaccagggctgacaggaagatgcagccgcttccagcagggacctggcctgagggcaagggaggagcggcacggcggcggctgccttgcgcttccagctcgggccctgctcatttgaacaatatccaacctcggactggagtttaggctacagtgaaatggattacgttatgccgaaacagaaacatcaaactgccaacgtttata

SEQ ID NO: 673445 - DNA, 631 bp, Homo sapiens
cagaaatcaaaaaaattttccaaacaaacccggagcctttgctttaggaagcaaactcaagtctgtgatgattattgtgcttgaaggatgggtttctaattctgtcataaaaaatgatgaaacaaggtgatgtcagagggacttcaggtgacaccaaaataccccatccagggcctggaagcccctctgcctttgactctaagatggggcaggacccccgctctcagtgggatgtgcccgcgaccctggcgctgggaggcagtgctgcagagaggagtggtgtccgcacggctgtcaccagacatcctcatcaccctccgcaccgcacagcccagcgtctccttccacaagcaaaagactgcggctcctctctctgcaggaaggtcagccatactcgggtggcagcgtgacgccagtcaccatggaaaccagggctgacaggaagatgcagccgcttccagcagggacctggcctgagrgcaagggaggagcggcacggcggcggctgccttgcgcttccagctcgggccctgctcatttgaacaatatccaacctcggactggagtttaggctacagtgaaatggattacgttatgccgaaacagaaacatcaaactgccaacgtttata

SEQ ID NO: 673446 - DNA, 608 bp, Homo sapiens
tcatctcctcagctccgcctgtcctggttgtcactggttttccaaatactgtctgtgctccaagttagagctaccctcacctgctctcaaattgccttccattgaattctcttcattgaaatgcttagttctcatcctcagctgatctctattcagttaagtgccctaactttagagtgtgaraatcacctgggggaaatgtatttttatgcaaatccctgggttcccctcccagaatatgtatcagtagatctggtgtgggtcccaatatttcatatttttttcaagctacataaggttctccgatgcagataatctgtaatcacatcctgagaaaccagtttgtacctattcaaccccactttctaatttcgagtctttatcagttttctcgtggttccttctttaacctcatctcaatgtcagcagatgactgagctcggtggttctcaaaccataaagtggttcctttatgttacaacaacctgggaggctcatagatatcccaatacacaacccacttctcatactaattgagtcaaatgttttttggagttattttttaatcaaggtataattacatacagtaaatgcacagatactaagca

SEQ ID NO: 673447 - DNA, 1814 bp, Homo sapiens
actagtcacatgtggctatgtagcatttgtgactagcccaaactaagttgtgctgtcagtataaaatacacactggctcttgatgacttgttattaaaaacatgtaaaatatctcattagtattcatgtttattgcatgttgaaaggataatagtttatatacataattaaaacatcttatgaaattcatttcacccattttgctgcttctttaaaaatgtgacttctagaaaatttaaaattacatatgtgaaattgtattatgtttatattggatagcacaagatagatatatttaggctctagccctgctggagttccccactaacaggatgatcacaattctctatccagcagcacaatgtgagtggaattatgcaggtaawcgtgtgctagtcagttacagagctagacctcaaggggagcagatcatagcctaaggaagtagacctctcaattcccactgcctgcatgtcccagacttagaacgttatcatccctaccatcgcaaacatggttgggatgatctggtcccagttgatctggtcatagtctgagcctcaacccttcaatctttaatctgcactctgtgaccaataaaaattttagaattctcaagcaagaacttgaatactatttttggcatttttaaaacaaaaatctgtaatggttattaattgatgtaggcatggttgaatagacagttttctttgaaaacctttgccattgagcaaataaatacttaaaccaaatttcatcaaagtgcagtcctgctgtagcagaatcaaatgcaatagttgtttaaaatgcagatttcagagccccaccaccaataatgataatttagtaggtctagaccagggaacagaatctgagtttaaacagcatcattctagttattctcatgcagtctaaaatgtgggaaccatcacttgaagctatagttgttttcctttaattgttctattttaaataagtacattatatagcaaatatactgtcatatcattatcctataaatttagaggttaggggtatctacccaggaatatttggtttctctattacttcattgtgagaacctgaacacaatttactgtcacagtttcccaacaaatctaaaaatttactggtgatattatttatacttctaaagttatttaataaaaaatatttaattaacatcttattctattatttgattatattcctaaaatgtaaacttctatgatagttcatacagttacaaatatcaagcttgtaaagaacatattagaaagactcatttttgttgatggggagggaatcccaagaatttgccattccctggaaatatattcaccaggaatttcctagaatttaatgaaattataccacataaatttccacccatgtctacccactggtaaactgaggagagagaaaaatcagtgattatttgtggattaaaaatgagatacatcagacagcaacatgtcctaggtatcaaaacaaatcagagagtattaacctggagtcgtgtcatgtaacacagaggaaaaaacagtgcatcatgtttcaaagcctggattcttgtttggagtcatccactaacagtgatgtgggcatctgtttcctcatctgaaatttaagactgtgagacaagatgatacagagacatcctctcagttctgacagtctgtgtttttcatccacacttgcagtgatatagacctatcaggagggacgactggaatcctgactagattgagttagatttagagcatctcagagataagcctgcgtgtggtctccttacaggatagcaaaaaata

SEQ ID NO: 673448 - DNA, 1814 bp, Homo sapiens
actagtcacatgtggctatgtagcatttgtgactagcccaaactaagttgtgctgtcagtataaaatacacactggctcttgatgacttgttattaaaaacatgtaaaatatctcattagtattcatgtttattgcatgttgaaaggataatagtttatatacataattaaaacatcttatgaaattcatttcacccattttgctgcttctttaaaaatgtgacttctagaaaatttaaaattacatatgtgaaattgtattatgtttatattggatagcacaagatagatatatttaggctctagccctgctggagttccccactaacaggatgatcacaattctctatccagcagcacaatgtgagtggaattatgcaggtaaacgtgtgctagtcagttacagagctagacctcaaggggagcagatcatagcctaaggaagtagacctctcaattcccactgcctgcatgtcccagacttagaacgttatcatccctaccatcgcaaacatggttgggatgatctggtcccagttgatctggtcatagtctgagcctcaacccttcaatctttaatctgcactctgtgaccaataaaaattttagaattctcaagcaagaacttgaatactatttttggcatttttaaaacaaaaatctgtaatggttattaattgatgtaggcatggttgaatagacagttttctttgaaaacctttgccattgagcaaataaatacttaaaccaaatttcatcaaagtgcagtcctgctgtagcagaatcaaatgcaatagttgtttaaaatgcagatttcagagccccaccaccaataatgataatttagtaggtctagaccagggaacagaatctgagtttaaacagcatcattctagttattctcatgcagtctaaaatgtgggaaccatcacttgaagctatagttgttttcctttaattgttctattttaaataagtacattatatagcaaatatactgtcatatcattatcctataaatttagaggttaggggtatctacccaggaatatttggtttctctattacttcattgtgagaacctgaacacaatttactgtcacagtttcccaacaaatctaaaaatttactggtgatattatttatacttctaaagttatttaataaaaaatatttaattaacatcttattctattatttgattatattcctaaaatrtaaacttctatgatagttcatacagttacaaatatcaagcttgtaaagaacatattagaaagactcatttttgttgatggggagggaatcccaagaatttgccattccctggaaatatattcaccaggaatttcctagaatttaatgaaattataccacataaatttccacccatgtctacccactggtaaactgaggagagagaaaaatcagtgattatttgtggattaaaaatgagatacatcagacagcaacatgtcctaggtatcaaaacaaatcagagagtattaacctggagtcgtgtcatgtaacacagaggaaaaaacagtgcatcatgtttcaaagcctggattcttgtttggagtcatccactaacagtgatgtgggcatctgtttcctcatctgaaatttaagactgtgagacaagatgatacagagacatcctctcagttctgacagtctgtgtttttcatccacacttgcagtgatatagacctatcaggagggacgactggaatcctgactagattgagttagatttagagcatctcagagataagcctgcgtgtggtctccttacaggatagcaaaaaata

SEQ ID NO: 673449 - DNA, 983 bp, Homo sapiens
agcagatcactgaaatcgaatatggaatagctaaataaagtgttagcaataagtcttgctagaattgtgagggtgggtagtcctgaatctttttgcggttgcctctgttccaagatcacttggttattagtgacatgacatgcattcacaaaatatgcaggaaattgctttgcaaatcagaattctagctaataccctatctttattattataaatatgtggttatgggagactgtgtgcacaaacgtaggagatttctttctttytttttttttttttgagatggagtctcactctgtcacccaggctgaagttcagtggcatgatctcggctcactgcaacctccgcctccagggtttaagcgattcttctgcctcagcctcctgagtagctgggactacagatgcacgctgctatccccggctaattttttttgtattttagtagagacagggtttcaccgtgttgcccaggctggttgagaactcctgagctcaggcaatctgccctcctcggcctcccaaagtgttgagattacaggcgtgagccaccacgccccgctaagatttctttaagcattaagaaaataagtaggtgtaatcccatcccttggaaggaactagatcttttctgatgtctaccctttcaatttatgtatacatatggatacattctttttaaagaagatataataccctgtactttgatttataacctatttttactataataggttgagaagtgcaggaaggaactggaggaaacatatgtatatagatcttttcagagtttgtgactgaaatgctgggattcaggttggaggaagaagaacaactgaataattagtgtctttgagatggtgagaatgaatagaacctacagaaactatgtggaactgggctttgatggcatgagggctacttttgttgtagcaggaggaaggggggtgtggacactggtgggtttacaaacagatccagtg

SEQ ID NO: 673450 - DNA, 983 bp, Homo sapiens
agcagatcactgaaatcgaatatggaatagctaaataaagtgttagcaataagtcttgctagaattgtgagggtgggtagtcctgaatctttttgcggttgcctctgttccaagatcacttggttattagtgacatgacatgcattcacaaaatatgcaggaaattgctttgcaaatcagaattctagctaataccctatctttattattataaatatgtggttatgggagactgtgtgcacaaacgtaggagatttctttctttctttttttttttttgagatggagtctcactctgtcacccaggctgaagttcagtggcatgatctcggctcactgcaacctccgcctccagggtttaagcgattcttctgcctcagcctcctgagtagctgggactacagatgcacgctgctatccccggctaattttttttgtattttagtagagacagggtttcaccgtgttgcccaggctggttgagaactcctgagctcaggcaatctgccctcctyggcctcccaaagtgttgagattacaggcgtgagccaccacgccccgctaagatttctttaagcattaagaaaataagtaggtgtaatcccatcccttggaaggaactagatcttttctgatgtctaccctttcaatttatgtatacatatggatacattctttttaaagaagatataataccctgtactttgatttataacctatttttactataataggttgagaagtgcaggaaggaactggaggaaacatatgtatatagatcttttcagagtttgtgactgaaatgctgggattcaggttggaggaagaagaacaactgaataattagtgtctttgagatggtgagaatgaatagaacctacagaaactatgtggaactgggctttgatggcatgagggctacttttgttgtagcaggaggaaggggggtgtggacactggtgggtttacaaacagatccagtg

SEQ ID NO: 673451 - DNA, 983 bp, Homo sapiens
agcagatcactgaaatcgaatatggaatagctaaataaagtgttagcaataagtcttgctagaattgtgagggtgggtagtcctgaatctttttgcggttgcctctgttccaagatcacttggttattagtgacatgacatgcattcacaaaatatgcaggaaattgctttgcaaatcagaattctagctaataccctatctttattattataaatatgtggttatgggagactgtgtgcacaaacgtaggagatttctttctttctttttttttttttgagatggagtctcactctgtcacccaggctgaagttcagtggcatgatctcggctcactgcaacctccgcctccagggtttaagcgattcttctgcctcagcctcctgagtagctgggactacagatgcacgctgctatccccggctaattttttttgtattttagtagagacagggtttcaccgtgttgcccaggctggttgagaactcctgagctcaggcaatctgccctcctcggcctcccaaagtgttgagattacaggcgtgagccaccacgccccgctaagatttctttaagcattaagaaaataagtaggtgtaatcccatcccttggaaggaactagatcttttctgatgtctaccctttcaatttatgtatacatatggatacattctttttaaagaagatataataccctgtactttgatttataacctatttttactataataggttgagaagtgcaggaaggaactggaggaaacatatgtatatagatcttttcagagtttgtgactgaaatgctgggattcaggttggaggaagaagaacaactgaataattagtgtctttgagatggtgagaatgaatagaacctacagaaactatgtggaactgggctttgatggcatgagggctacttttgttgtagcagraggaaggggggtgtggacactggtgggtttacaaacagatccagtg

SEQ ID NO: 673452 - DNA, 983 bp, Homo sapiens
agcagatcactgaaatcgaatatggaatagctaaataaagtgttagcaataagtcttgctagaattgtgagggtgggtagtcctgaatctttttgcggttgcctctgttccaagatcacttggttattagtgacatgacatgcattcacaaaatatgcaggaaattgctttgcaaatcagaattctagctaataccctatctttattattataaatatgtggttatgggagactgtgtgcacaaacgtaggagatttctttctttctttttttttttttgagatggagtctcactctgtcacccaggctgaagttcagtggcatgatctcggctcactgcaacctccgcctccagggtttaagcgattcttctgcctcagcctcctgagtagctgggactacagatgcacgctgctatccccggctaattttttttgtattttagtagagacagggtttcaccgtgttgcccaggctggttgagaactcctgagctcaggcaatctgccctcctcggcctcccaaagtgttgagattacaggcgtgagccaccacgccccgctaagatttctttaagcattaagaaaataagtaggtgtaatcccatcccttggaaggaactagatcttttctgatgtctaccctttcaatttatgtatacatatggatacattctttttaaagaagatataataccctgtactttgatttataacctatttttactataataggttgagaagtgcaggaaggaactggaggaaacatatgtatatagatcttttcagagtttgtgactgaaatgctgggattcaggttggaggaagaagaacaactgaataattagtgtctttgagatggtgagaatgaatagaacctacagaaactatgtggaactgggctttgatggcatgagggctacttttgttgtagcaggaggaaggggggtgtggacactggygggtttacaaacagatccagtg

SEQ ID NO: 673453 - DNA, 1280 bp, Homo sapiens
aggtgagatctctttactgataagaccttttcaaatgaagaaaatagttttgtggtatcttccctgttgggggttctgctgataaccttttataggaccaagtggaacaacccatattaagtaggctgtagtggactcctaattagtccaattaatgtgatggctttaatttgtaagagatctaatggtgtagaatctgatttctttgaaatcactcctctctagaatgtaaaacaacaatgaaaggcagctaaagcagtcctggagtggctaagtactgcatttagttattgtatttcccaccccttccctccttaaagagaaaataaaaggtatttcttcctccatattattccccctggcatgccgcctttgttaggacaacagcagccaagagcagatttgaaatgactcctcggcattttcttaagatgagtccagtggaggctcttcaattagtagtggtcatgtgtgccggggtcaatattccagaatacttatgtttttgctcttttctgcagaaataaacattattattgttgttgttattaaaatccaaaaggaaactataatgtctgaggcaaactgttcttgtcacagcctgctattcccatgagccgagaagcatcacaatacattgcctgctgtctcaacccatggaaagtctgattagctctctagcaatctgatctccagaaatcgccctttccttactatctcaacaccctttcatggaaaacagtatgcgtgcttctctgttcagactccactgtaaaatttttaagccaattcccatgggatcctgatggtttttttttatgtaagtaaaggaaccaaagattttcaatgagaactattgagcccgacaaaggcttactgatttatgtagttaccacctgaagtaagaaagccactttgatatttaaaaaccattctagggccgggtgcagtggttcaygcctgtaatcccagtattttgagaggccgaggtgggcggatcacgaggtcaagagattgagactatcctggccaacatggtgaaaccccgtctctactaaaaatacaaaagttagctggtcatggtggcacgcgtctgtagtcctagctacttgggaggctgaggcaggagaatcgcatgaacctgggaggcagaggctgcagtgagcccagattgtgccactgcactccagcctggcaacaagagcgagtctctgtcacaaaaaaataaacaaataaaaataaaagtaaacaaaaactattctaaattaagtggctggcct

SEQ ID NO: 673454 - DNA, 1064 bp, Homo sapiens
agccatgacaggctacagtcacaactgggacttttagttgtgtaatagaaagccctaaccaaattggcataaacaaaaaaagaggaaatgtagtgagtgggtcatgtcactaaaaatctcagaagtgttccaggtacagctaggtattttcatctcatctttctgttcttcattccccagggttagcaattttcagcttctgtagcagcttgaagctaggatctccttacttcccaagatatcctgtaaaagttccagaaaccacatttattgaccattcctaagtcatggatccatccctgatgctagcagtcctccagactacatagacttagagtaaggggggagtgaatctccagtgggaagtcaggatgccattaccaaaaggaggaagaaatagaagcaaagcagccaacattcaaaatgtccactacacagacacttcacccaaccatggcccaggtaaagatatgttctcctgactcttacatggtctggaaaaatctccccaggagacagcacagataggaaaatgggatcagaactctagggaggaatgacatgggaaattggccaaaatgtcctgagtgcttggtgtgagtctcctttgagcctcaggaacccaggctgttggatgggygttccagaatttgaggtcttggccaggagatgaactagcaattattcattctcattattaagacctatatcttcatcaggaaatcaactagcaattattcattcattctcaatattaagatctatatggaaacttatcacctataatctaatccaagtctccagctggaactccatgtctgccttctctcagttcttcccctataagccaacctgcatgacacctcctcacaaatcactcattagtttttggcacagcatctttgcataggccatagcccacaccagaagggccatcaatttttatctctgctgtcattttccaccaggaacatttaaattgttttcaaaatccactttcccctggaagtcttttcaaatcgtattcccacaacacattttctgatcattctcgcttcctcatt

SEQ ID NO: 673455 - DNA, 1481 bp, Homo sapiens
tggagtgaggaaagcacaggtcatgtgcatgggatactctgccttgatctaaaaggaagtctgctctggcatgtctacaaagcccatccatatatccaaaataaatcactctccatgtgagatgtcagatatgttcatttgcctcactagagtagccagtttactgcccatatgtatcccacaacattatgttgtaaacctcaaatattacccaataatatttaaataaataaatcaggctaagcttgaatcattctgcgaagagttgatggaccatgctagacctctggtgtgcagggcagccacctgtccagcaaggttgatcattccctgccatcagaagatagtgttaagtgaaacaagggcctcacccatgtcatgtgcaaagggaaaacaaactaacaatagaaccatcagagttacatgaaattaaccatgttattaaacatgtcggggttcagcatatttttgataatgtaaaaatcagaatgatttcatcaaaatggagaaaatatgtagtgaccacatccaaaaaactatgtattcccaccaccacatgtacactcacacattttagtctgtgccacacaataactcactcttcactgggacattttacagatgccagtgcctgtaacaagtgcccagatgacttctggtccaatgagaaccacacctcctgcattgccaaggagatcgagtttctgtcgtggacggagccctttgggatcgcactcaccctctttgccgtgctgggcattttcctgacagcctttgtgctgggtgtgtttatcaagttccgcaacacacccattgtcaaggccaccaaccgagagctctcctacctcctcctcttctccctgctctgctgcttctccagctccctgttcttcatcggggagccccaggactggacgtgccgcctgcgccagccggcctttggcatcagcttcgtgctctgcatctcatgcatcctggtgaaaaccaaccgtgtcctcctggtgtttgaggccaagatccccaccagcttccaccgcaagtggtgggggctcaacctgcagttcctgctggttttcctctgcaccttcatgcagattgtcatctgtgtgatctggctctacaccgcgcccccstcaagctaccgcaaccaggagctggaggatgagatcatcttcatcacgtgccacgagggctccctcatggccctgggcttcctgatcggctacacctgcctgctggctgccatctgcttcttctttgccttcaagtcccggaagctgccggagaacttcaatgaagccaagttcatcaccttcagcatgctcatcttcttcatcgtctggatctccttcattccagcctatgccagcacctatggcaagtttgtctctgccgtagaggtgattgccatcctggcagccagctttggcttgctggcgtgcatcttcttcaacaagatctacatcattctcttcaagcca

SEQ ID NO: 673456 - DNA, 662 bp, Homo sapiens
gaaacttttgtggtttttaaaatataattgtatcccttgcctgataaaattttcttataataccttatgcaacagcaacctgtgactgaaaatagaaaatggaatatacatttttaaagtaaaatatttctttttaaacatcgtgcatcaatacctcgaggccagaagtctaaatatctgtcagaaggtggcaaaccagaaattataaaaatcaaagacatgggaaaaacacatttatcttagcttcctcttcatggggatcaaagttcacactaagcacagtgattacatctgtttagtaagccgtctgcctacaatgaacttcaaaatttattctttctagttaagaaatacgtaattttttatgaacggcatagagaaataagaaataatctttaacattttgaatacttccttcctgtgtttctattagctgtagtayatgtagttgagatcacactacacatcaatttttacactctaggtttttcgcttaatataatttaatgctttatgttattagaaactgtccattggtatcattggaatggctacttgatattttatcaaacaggtacaccataatatgctaagccagtcttctatttttagatatttaagatatttccagtttgtgctgttagaaataacactgcattgaa

SEQ ID NO: 673457 - DNA, 589 bp, Homo sapiens
aagtccccaagcaccaatacaggtaaatgtggctgggtaagtgattctgggaaatgttttctcttcataactttctaacaagatgcttttttgatctgttgttgtttcctcagcaactgttcctagaacatagtctactgacggccaataccactaaaggaatctatgctggagtctgtatttctgtcttggtgcttcttgctcttttgggtgtcatcattgccaaaagtaagtcatttcgagrttgttcctaagggacaagggatgtacagcaaaattgcctgggttcactagtttcataagtcacatgattttgatttcacacgacttccctttgtctccccaaatcctcatttgtaaaagtcacatggtaataccatctacctcaagggggaagggaaatgaagtttaaatgcattggtacctacaaagcactaagaatgggagctgggtgtggggtcttatgcctgtaatcctagctacttgggaggctgagtgaggcaggaggattgcttgagcccaggagttcaagactagcctgaacaacatggtgggaccccatttcttaaaaaaaaacaaaaacaaaaca

SEQ ID NO: 673458 - DNA, 625 bp, Homo sapiens
ttgagaatttccaaattctctgaggatttcagaatctatcctgaggatagaatcttgagaatttcgttattttgggaaatctcccttgccgcctctgctgactaccagctgctatcatttatatttatttattactgactgattgactgagacaggatctcactctgttgcccaggctagagtgagtggtgcaaacacagcagcctctaccccatgggctcaggtgatccttccayctcagcctcccgagtagctgggaccacaggcttatgccaccactcttggctaatttttaaaattgttacagagatggggtcttatcatgttgtccaggctggtcttaaactcctgaactcaggtgatcctctccccttggcctcccaaagtgctggaattataagtgtgagccactgcacccatcctgctatcttatttatttatttattttgagacagagtcttcctttgttacccaggctgcagggcagtggcgcaatctcggctctctgaaacctcctcctcccgggttcaagcgattcttgtgccacagcctcccaagtagctgtgattacaagtgcctgccaccatacttgactaatttttgtatttttattagagatgggatt

SEQ ID NO: 673459 - DNA, 1433 bp, Homo sapiens
agcaagagatttgacacagcagctattcctgagttatttagactgtcttgttagtatgtagaaaataaaaacaatgctactgattttccacagcttcaatttctttagtgatttaatttggctttgtcatttaccaagcagttcttcaatatgtgtgcctctgatatttttttcaagctggaaagtaaaatggacactgctgcttaaaaattttcctacaaagacactttgaagaataatgaatatcagataagtgttctctaaaaccttaaacttttaaatgaatatactaaaagatgctattcctaaagagccagtaagctcacagattctctgcaatatgctcattgctcttatctctggaatacaaagcaaagaattgagaagcttttggttttgtttatttctttcacctttggtataaacaacacatagggaaatataatctagaattgatatcacatgtcaaatacagtttgaaatgattggttaaattgtggtttggagagaggctgaggtgacattgttcttcaacatacagtctaagttggtgaggcccgtggtgggaaaaagaatgcattattctttaatatctttgataaaaattatagcttttggctagggaaatgttccagattaaaggacactaaactgaggcaggagaattgcttgaaccagggaggttgcagtgagccgagatcatgccactgcactccagcctggacgacagagcgagactccatctcaaaaattagaaagaaggacactaaagagattggactaaagagatatggtaatgtgaaatgctagactagatgctgtagtagaagaaaaaatcctataaagaacattattgggtcaatttagaaaattggaaaaggacacccaattaaaggatagtatcaataatgtacaattacagtaaagtttatagctgtacagttcatgtaagaacatatccttattcttaaaaaaaaattgaagtatttaaaggtaaagacccatgatgtatgcaacttacattcaaatgatgtagaaaaaatattgcatctatttttatagatgtgcatatatataaatgtatgcaaatgcacacatataaatacacacacatatgtatgtgtgcatgtgtatgtgtgtgtgtatataaatatcagataagtgttctctaaaatcttaaacgtttaaatgaatatactaaaggatgccattcctaaagagtctcaacaagctcacaaagggtgaacttcaccttcaaatggcctttgtgtatgtgtgtrtatatatatatgtgtgtgtgtgtgtacacacacacatacagttttttttaagtttcagggtacacgtgcaggtttgttacataggtaaatatgtgccatcgtggtttgctgcacctatcaacccattacctaggtattaagcccagcaagcat

SEQ ID NO: 673460 - DNA, 1433 bp, Homo sapiens
agcaagagatttgacacagcagctattcctgagttatttagactgtcttgttagtatgtagaaaataaaaacaatgctactgattttccacagcttcaatttctttagtgatttaatttggctttgtcatttaccaagcagttcttcaatatgtgtgcctctgatatttttttcaagctggaaagtaaaatggacactgctgcttaaaaattttcctacaaagacactttgaagaataatgaatatcagataagtgttctctaaaaccttaaacttttaaatgaatatactaaaagatgctattcctaaagagccagtaagctcacagattctctgcaatatgctcattgctcttatctctggaatacaaagcaaagaattgagaagcttttggttttgtttatttctttcacctttggtataaacaacacatagggaaatataatctagaattgatatcacatgtcaaatacagtttgaaatgattggttaaattgtggtttggagagaggctgaggtgacattgttcttcaacatacagtctaagttggtgaggcccgtggtgggaaaaagaatgcattattctttaatatctttgataaaaattatagcttttggctagggaaatgttccagattaaaggacactaaactgaggcaggagaattgcttgaaccagggaggttgcagtgagccgagatcatgccactgcactccagcctggacgacagagcgagactccatctcaaaaattagaaagaaggacactaaagagattggactaaagagatatggtaatgtgaaatgctagactagatgctgtagtagaagaaaaaatcctataaagaacattattgggtcaatttagaaaattggaaaaggacacccaattaaaggatagtatcaataatgtacaattacagtaaagtttatagctgtacagttcatgtaagaacatatccttattcttaaaaaaaaattgaagtatttaaaggtaaagacccatgatgtatgcaacttacattcaaatgatgtagaaaaaatattgcatctatttttatagatgtgcatatatataaatgtatgcaaatgcacacatataaatacacacacatatgtatgtgtgcatgtgtatgtgtgtgtgtatataaatatcagataagtgttctctaaaatcttaaacgtttaaatgaatatactaaaggatgccattcctaaagagtctcaacaagctcacaaagggtgaacttcaccttcaaatggcctttgtgtatgtgtgtgtatatatatrtgtgtgtgtgtgtgtacacacacacatacagttttttttaagtttcagggtacacgtgcaggtttgttacataggtaaatatgtgccatcgtggtttgctgcacctatcaacccattacctaggtattaagcccagcaagcat

SEQ ID NO: 673461 - DNA, 1042 bp, Homo sapiens
gagatagttaagagcatgttttaaacaccgaaacatggaaatcaatctaaatgtcctttaagaaagaacaatgttaaaaaatcatattgtatttatgtattgaaatacaaaaaattattataaagaattagtcactttcatatacaatgatttgaaatattgcaaaatatattgttgttaaaaagtactgttcagaatacaactataatatccaacacattattattaaaagtgaataaatatacatgtatttttgcaaatacctaaaatatctatgaaaggatgaagaaaaatgtaaaagtaatttccagtgagtaagttatcttcatgttgagaaaagagtttggcaaagttttttttttgtatttttgtaaaagataaaataatctatgtattgtgggtcacatataccctagccatacatttcttgttttttataaaacttttaaaatataaaaaatattactagttcaaaggccagggattctaaaactttattctttcatacattatctatgtatgtttatactttattttatatcatagactcattaatattgaactaaacatccctcccaaactaccattatggcatgaaaatatgaacatacgtatgaagttatatttgtttttatattctacctcattttatattaaagattttctttggttgaggtaaatgctaccctaaattttggttcagtctttttatttttttattttaagttcagagatacaagtgcaggatgtgcaggtttgttacataggtaggcatgtgccatggtggtttgctgcacctatcaccccatcacctaggtattaagcccagcacgcattagctatttttcctgatgcatcacccacctcccagtctcccatgacaggccccagtrtgtgttgttatcctccatgtgtccatgtgttctcattgttcagctcccacttgtaagtgagaactcttggtgtttggctttgttgttcctgagttagtttactgaggataatggcttctggatccatccatatcctgtaaaggacatgc

SEQ ID NO: 673462 - DNA, 1042 bp, Homo sapiens
gagatagttaagagcatgttttaaacaccgaaacatggaaatcaatctaaatgtcctttaagaaagaacaatgttaaaaaatcatattgtatttatgtattgaaatacaaaaaattattataaagaattagtcactttcatatacaatgatttgaaatattgcaaaatatattgttgttaaaaagtactgttcagaatacaactataatatccaacacattattattaaaagtgaataaatatacatgtatttttgcaaatacctaaaatatctatgaaaggatgaagaaaaatgtaaaagtaatttccagtgagtaagttatcttcatgttgagaaaagagtttggcaaagttttttttttgtatttttgtaaaagataaaataatctatgtattgtgggtcacatataccctagccatacatttcttgttttttataaaacttttaaaatataaaaaatattactagttcaaaggccagggattctaaaactttattctttcatacattatctatgtatgtttatactttattttatatcatagactcattaatattgaactaaacatccctcccaaactaccattatggcatgaaaatatgaacatacgtatgaagttatatttgtttttatattctacctcattttatattaaagattttctttggttgaggtaaatgctaccctaaattttggttcagtctttttatttttttattttaagttcagagatacaagtgcaggatgtgcaggtttgttacataggtaggcatgtgccatggtggtttgctgcacctatcaccccatcacctaggtattaagcccagcacgcattagctatttttcctgatgcatcacccacctcccagtctcccatgacaggccccagtgtgtgttgttatcctccatgtgtccatgtgttctcattgttcagctcccacttgtaagtgagaactcttggtgtttggctttgttgttcstgagttagtttactgaggataatggcttctggatccatccatatcctgtaaaggacatgc

SEQ ID NO: 673463 - DNA, 1481 bp, Homo sapiens
ggagacagctgtcaggaaatggattggaaaaggctgagactggaataagggaaccatttacgaagtcctgcaaaaataagtcaaggtgagggtgagttcttgaactaattccagtggcagtaaggaaggggaggaatgcatggtccctcctgggctggctgagctgccccaggctggctcattacctggcctcggcctgggttcctcgttgtcccgtatcctctgaaagaagcccaagactgagtcaaggggtgagcatcagcccgcatgcctcctacttgagagggggcatttactcaggaggctgaggtgggagggtcacttgagcccaggagttcgagtccagcctgggaaaastgtgagtccctgtctctaaaaaataataataatacttgaaggggtatacatcatcccatttctgtaaacaaagaaagtccccaaatatgtaggagcacacagatgtgcgtgtatacagatgtgggtggaaaagagtctggaaagatacacaccaaacacagtgtgttcacagtgatcacctgtggaagagggagcagagttagggcaaaggagggcttcctatttctattctagaggcatcacattgcttaaatgtatttctttgttagtgtacagtgtgcacatatatttaaatatagctatatttgaagagtcacttaattgtaatcaatatattgtgaatagcagaagcatttagtatatatgtgtgtgtacatgtatatgtacatgtgtatgcatttatatatgtgtgtatatacattttgtgtgtgtgtgtaagacaccatgatagaactatacttgcaatgagaaatatttagggcctgatcatgtagatagagggcccatcatcaaatacctttctgatgtcttgagcccctaaatagtaagtgccacagtaatgccgatccgagcctgcacctgcagggtatcggttgtaaaatggagttgggatgattccaccttccccacagggcactactcccgacccaccataatgtaccgacagcgcgtgagggcaagattccacaggaattcctgcatactttcaccatgtgtaaacacagacactacattttcagttttgttaatgaaaattcaaaggttttatttaccttctagctgttgtttttaaatatgaaagtcaaattcattttaattcacttgcatctgtctaggtaacatttttgccttttaccaatcctcaccccaaaccaaaccaatatcgacaaaaatagttcagatcattttcacaacctatagtatcttattctccacctcaaagcctgcctggttctcatttaatttatttccgtccatcccccttacataagacaaatgttcatgacccctcttctcttcagcccctcacctcggtcacttggatttcaatcatctttgagtttacatgagttaactcttacctttgaatccttatttatccatttctaaacttaaatccttga

SEQ ID NO: 673464 - DNA, 1481 bp, Homo sapiens
ggagacagctgtcaggaaatggattggaaaaggctgagactggaataagggaaccatttacgaagtcctgcaaaaataagtcaaggtgagggtgagttcttgaactaattccagtggcagtaaggaaggggaggaatgcatggtccctcctgggctggctgagctgccccaggctggctcattacctggcctcggcctgggttcctcgttgtcccgtatcctctgaaagaagcccaagactgagtcaaggggtgagcatcagcccgcatgcctcctacttgagagggggcatttactcaggaggctgaggtgggagggtcacttgagcccaggagttcgagtccagcctgggaaaagtgtgagtccctgtctctaaaaaataataataatacttgaaggggtatacatcatcccatttctgtaaacaaagaaagtccccaaataygtaggagcacacagatgtgcgtgtatacagatgtgggtggaaaagagtctggaaagatacacaccaaacacagtgtgttcacagtgatcacctgtggaagagggagcagagttagggcaaaggagggcttcctatttctattctagaggcatcacattgcttaaatgtatttctttgttagtgtacagtgtgcacatatatttaaatatagctatatttgaagagtcacttaattgtaatcaatatattgtgaatagcagaagcatttagtatatatgtgtgtgtacatgtatatgtacatgtgtatgcatttatatatgtgtgtatatacattttgtgtgtgtgtgtaagacaccatgatagaactatacttgcaatgagaaatatttagggcctgatcatgtagatagagggcccatcatcaaatacctttctgatgtcttgagcccctaaatagtaagtgccacagtaatgccgatccgagcctgcacctgcagggtatcggttgtaaaatggagttgggatgattccaccttccccacagggcactactcccgacccaccataatgtaccgacagcgcgtgagggcaagattccacaggaattcctgcatactttcaccatgtgtaaacacagacactacattttcagttttgttaatgaaaattcaaaggttttatttaccttctagctgttgtttttaaatatgaaagtcaaattcattttaattcacttgcatctgtctaggtaacatttttgccttttaccaatcctcaccccaaaccaaaccaatatcgacaaaaatagttcagatcattttcacaacctatagtatcttattctccacctcaaagcctgcctggttctcatttaatttatttccgtccatcccccttacataagacaaatgttcatgacccctcttctcttcagcccctcacctcggtcacttggatttcaatcatctttgagtttacatgagttaactcttacctttgaatccttatttatccatttctaaacttaaatccttga

SEQ ID NO: 673465 - DNA, 622 bp, Homo sapiens
atagcctatggaagacaaagactgaggcccaagaatcctttacacactcaagaatgttacctgccagggtgaaagaaatatttgcagatataaacagacttagagactatcttgcctacttaacccatatggggaacatattcatatttaaagaaaaactgtaaccaaacagtaaataacactgaacaccatcaaagaagatgaggggagaagaaataagtgaggaacaatacgatatgtacatgtgtttcatgcactcaatgtgggtttttgaaatggaagtcacacattacaggggaaggtctactgagaatcaattacacgcattctcaatgggagcgatattgccccaaagggactgaaatagtgttactctttcgatgactaacacacagatatacatagaacacatatgcagtatatctgtgatattataatatcatgggaggcagtattaagaaaaaaatatattagaaggctcctcaggaagataataataaaaaacaggttgagaaatgctgatctacaatcaacaggataaacaatctcagtaaaagttatacgaaaaatggaggtgrgctttaaggtattagatgggaaaaagtgggtcatttttatgaaa

SEQ ID NO: 673466 - DNA, 678 bp, Homo sapiens
gagtagatttttgaaataaaaaatcagcatgtcaaaatatggtagccatgaaataatattataaaaattatgtattcaagttagactaatgaattggttaatagacctgacttacatatcagctttttaatttttttkttgttgtttgtttaattatgtaaggctgttacaaatttattattttggcaaggagactcttcaaactttgaaataaattctttctgtcttaggctggagatcaggaggaagaaggtagcataaatactcacatgagtggtgcaaagtcagagataaccaggtccacacacatttgtgtcttttcacaatgtcaggctttaatactgttcaatcacaaaagccacaagctacatggagttcccaaggaggcagttctccttagtacttctcattcactttgttttcagagccatgggtacacaggctcaagccactccacaaatcagtcaatattgcaaaccatacataataatatacttaatatataaggattataggttaaacattccacaacaaagtaacatttaacattaagagaaaagggatagagaaaagggttaatgaaaaagtccaggaagagtgacaaaaacaaagattcttctggtcttatctgggctgtccattgatcttgcaaggaagagtctgatgtggggagaattg

SEQ ID NO: 673467 - DNA, 1147 bp, Homo sapiens
tttttctccagatacatttagctatgagggaatggggtaagaattggggagctgcttattttaccaggtttttttcaggcgagtaagatggggaaggargaccaagggagatgagactgaagataataagtgactataaaacctaagttaagcttgcagataaatgaggacacgaaggggatgagggatgggaagaaatggcagagttaatggattggaggtcctggtgggattgaagaattgatggcaagggggcaataaagtgagcagggaactaataaggtaataggaactgagattttgtactggtttgatttggtgtgacatggaatttatgaattgaggtgggaaggaatcaatatctttgcaggcaacatagaggaactaaccatctagggtatcagatggattatctgcatgaatactgtaattaccaagactgagcatagaagtaatgggaaaggaagtgattctcagataataatatcttcagtgaatgtgggaggatgacagaaaacttcaacaaggggtgtgtagtaagtgggtgtctgtcaacatctgctttaaaggagctagattatttaagtgtgagaattagactcattaaaaagtttatttaaaaagctatggaggatgggtgcagtagcttatgcctatattcccagcactttgggaggctgaagaagacggatcacatgaggtcaggagctagagaccagcctggccaacatggtaaaaccctgtctctactaataatagaaaaattagctgggcatggtggtgcatgcctgtagtcccagcttcttggaagactgaggcatgagaattgcttgaacctgggaggtggaagttgcagtgagccaagattgtgccactgcactccaacctgggcaacacagcaagattctgtctcaaaataaataaataaataaaataaataaataaaataaataaataaataaataaataaataaataaataaataaaaataaactatggagatgattattagaataagatcaataatattaaaatatatatcagctcttttatgtgaattcatatattttacaaacaatttcttaaatatatatccatctgtttgccaacagaccatctgattgtatacaaaaaaatacagtaacga

SEQ ID NO: 673468 - DNA, 1147 bp, Homo sapiens
tttttctccagatacatttagctatgagggaatggggtaagaattggggagctgcttattttaccaggtttttttcaggcgagtaagatggggaaggaagaccaagggagatgagactgaagataataagtgactataaaacctaagttaagcttgcagataaatgaggacacgaaggggatgagggatgggaagaaatggcagagttaatggattggaggtcctggtgggattgaagaattgatggcaagggggcaataaagtgagcagggaactaataaggtaataggaactgagattttgtactggtttgatttggtgtgacatggaatttatgaattgaggtgggaaggaatcaatatctttgcaggcaacatagaggaactaaccatctagggtatcagatggattatctgcatgaatactgtaattaccaagactgagcatagaagtaatgggaaaggaagtgattctcagataataatatcttcagtgaatgtgggaggatgacagaaaacttcaacaaggggtgtgtagtaagtgggtgtctgtcaacatctgctttaaaggagctagattatttaagtgtgagaattagactcattaaaaagtttatttaaaaagctatggaggatgggtgcagtagcttatgcctatattcccagcactttgggaggctgaagaagacggatcacatgaggtcaggagctagagaccagcctggccaacatggtaaaaccctgtctctactaataatagaaaaattagctgggcatggtggtgcatgcctgtagtcccagcttcttggaagactgaggcatgagaatygcttgaacctgggaggtggaagttgcagtgagccaagattgtgccactgcactccaacctgggcaacacagcaagattctgtctcaaaataaataaataaataaaataaataaataaaataaataaataaataaataaataaataaataaataaataaaaataaactatggagatgattattagaataagatcaataatattaaaatatatatcagctcttttatgtgaattcatatattttacaaacaatttcttaaatatatatccatctgtttgccaacagaccatctgattgtatacaaaaaaatacagtaacga

SEQ ID NO: 673469 - DNA, 1147 bp, Homo sapiens
tttttctccagatacatttagctatgagggaatggggtaagaattggggagctgcttattttaccaggtttttttcaggcgagtaagatggggaaggaagaccaagggagatgagactgaagataataagtgactataaaacctaagttaagcttgcagataaatgaggacacgaaggggatgagggatgggaagaaatggcagagttaatggattggaggtcctggtgggattgaagaattgatggcaagggggcaataaagtgagcagggaactaataaggtaataggaactgagattttgtactggtttgatttggtgtgacatggaatttatgaattgaggtgggaaggaatcaatatctttgcaggcaacatagaggaactaaccatctagggtatcagatggattatctgcatgaatactgtaattaccaagactgagcatagaagtaatgggaaaggaagtgattctcagataataatatcttcagtgaatgtgggaggatgacagaaaacttcaacaaggggtgtgtagtaagtgggtgtctgtcaacatctgctttaaaggagctagattatttaagtgtgagaattagactcattaaaaagtttatttaaaaagctatggaggatgggtgcagtagcttatgcctatattcccagcactttgggaggctgaagaagacggatcacatgaggtcaggagctagagaccagcctggccaacatggtaaaaccctgtctctactaataatagaaaaattagctgggcatggtggtgcatgcctgtagtcccagcttcttggaagactgaggcatgagaattgcttgaacctgggaggtggaagttgcagtgagccaagattgtgccactgcactccaacctgggcaacacagcaagattctgtctcaaaataaataaataaataaawtaaataaataaaataaataaataaataaataaataaataaataaataaataaaaataaactatggagatgattattagaataagatcaataatattaaaatatatatcagctcttttatgtgaattcatatattttacaaacaatttcttaaatatatatccatctgtttgccaacagaccatctgattgtatacaaaaaaatacagtaacga

SEQ ID NO: 673470 - DNA, 1147 bp, Homo sapiens
tttttctccagatacatttagctatgagggaatggggtaagaattggggagctgcttattttaccaggtttttttcaggcgagtaagatggggaaggaagaccaagggagatgagactgaagataataagtgactataaaacctaagttaagcttgcagataaatgaggacacgaaggggatgagggatgggaagaaatggcagagttaatggattggaggtcctggtgggattgaagaattgatggcaagggggcaataaagtgagcagggaactaataaggtaataggaactgagattttgtactggtttgatttggtgtgacatggaatttatgaattgaggtgggaaggaatcaatatctttgcaggcaacatagaggaactaaccatctagggtatcagatggattatctgcatgaatactgtaattaccaagactgagcatagaagtaatgggaaaggaagtgattctcagataataatatcttcagtgaatgtgggaggatgacagaaaacttcaacaaggggtgtgtagtaagtgggtgtctgtcaacatctgctttaaaggagctagattatttaagtgtgagaattagactcattaaaaagtttatttaaaaagctatggaggatgggtgcagtagcttatgcctatattcccagcactttgggaggctgaagaagacggatcacatgaggtcaggagctagagaccagcctggccaacatggtaaaaccctgtctctactaataatagaaaaattagctgggcatggtggtgcatgcctgtagtcccagcttcttggaagactgaggcatgagaattgcttgaacctgggaggtggaagttgcagtgagccaagattgtgccactgcactccaacctgggcaacacagcaagattctgtctcaaaataaataaataaataaaawaaataaataaaataaataaataaataaataaataaataaataaataaataaaaataaactatggagatgattattagaataagatcaataatattaaaatatatatcagctcttttatgtgaattcatatattttacaaacaatttcttaaatatatatccatctgtttgccaacagaccatctgattgtatacaaaaaaatacagtaacga

SEQ ID NO: 673471 - DNA, 1147 bp, Homo sapiens
tttttctccagatacatttagctatgagggaatggggtaagaattggggagctgcttattttaccaggtttttttcaggcgagtaagatggggaaggaagaccaagggagatgagactgaagataataagtgactataaaacctaagttaagcttgcagataaatgaggacacgaaggggatgagggatgggaagaaatggcagagttaatggattggaggtcctggtgggattgaagaattgatggcaagggggcaataaagtgagcagggaactaataaggtaataggaactgagattttgtactggtttgatttggtgtgacatggaatttatgaattgaggtgggaaggaatcaatatctttgcaggcaacatagaggaactaaccatctagggtatcagatggattatctgcatgaatactgtaattaccaagactgagcatagaagtaatgggaaaggaagtgattctcagataataatatcttcagtgaatgtgggaggatgacagaaaacttcaacaaggggtgtgtagtaagtgggtgtctgtcaacatctgctttaaaggagctagattatttaagtgtgagaattagactcattaaaaagtttatttaaaaagctatggaggatgggtgcagtagcttatgcctatattcccagcactttgggaggctgaagaagacggatcacatgaggtcaggagctagagaccagcctggccaacatggtaaaaccctgtctctactaataatagaaaaattagctgggcatggtggtgcatgcctgtagtcccagcttcttggaagactgaggcatgagaattgcttgaacctgggaggtggaagttgcagtgagccaagattgtgccactgcactccaacctgggcaacacagcaagattctgtctcaaaataaataaataaataaaataaataaataaaataaataaataaataaataaataaataaataaataaataaaaataaactatggagatgattattagaataagatcaataatattaaaatatayatcagctcttttatgtgaattcatatattttacaaacaatttcttaaatatatatccatctgtttgccaacagaccatctgattgtatacaaaaaaatacagtaacga

SEQ ID NO: 673472 - DNA, 3551 bp, Homo sapiens
ttttttgagattgagttttgctcttgtcgcccaggctggagtgcagtggcgtgatctcagctcaccgcaacctctgcctccaaggttcaagcaattctcctgcttcagcctcccaagtagctgggattacaggcatgtaccaccacgtctggctaattttgtacttttactagagaggggtttctccatgttggtcaggctcatctcaagctgccaacctcaggtgatccgcacacctcggcctcccaaagtgctgggattacaggtgtgagccacagctcccggtggtaacatagttttcaaataagtcctttgatattgttgggtgtctgtgtgtgggttttcagtttttttttttattctaaaaatagactgtgcttgatattacatgaattcattgaaaagttaaacaagattttttccttttactttttttgaagcataaaattttttggtagtaacactttgtggcttgtctcataaacttgccacctgacattatttaccattggtccaaatgaggttgggaaatttaaatacaggatttaatagacatgtatataattcaaaataactaataaaaagttaagtgttaaatcacattgcccatttggtgttatgtagctcttttatagatgttattcactgaattgaacatttttagaaattgaatactaccaaatgccacatgctgaaatttacttgttcattcttccgaagtgaagctaagtaacataatcctgtggtgcttctgtagtgaaattagactaggataaatccatttcaagaaactaaattctatttgtaagtcctagagatcaaatagacctgaactctttcgtttctttattgtaaacttttaagtaaagaaaataattttgaaatccactagatgtagaagagatgtatcatgaagcaataacttatcatcttaattcctagatattttagtggcatcctctatttttgtggttagagaatgaagtaggttttgtttaagcagtttgcataccagcagtagggaagaatgagtaaaataaaaaattaactctcaataaaattagttgttgttgtttatgcagcaattgcttgattcaattctcttttccatagctaaagtatgaatactgtaaactaatttctggttttatccaaaaagctaatttcatgggcgcaaaacaagaaaagtacttatataaaagtattacatgagttaattgaaactggatcaacaaaacattaatttggggtcagatttttttggtcctggctgtgatactagctctgaaatctgggcacattatttaacccttcttaatttggttacttcatttactatatgaaaagaatgatagcatctacctcaaagtattttgtgaagattaggcaaaataatgtataaaagtccaaatcatagaatttaacatacagtaatctctccttacatagttattgcctactcaggaaccccattgttaaatataatgtttcttggtaatgctgttcacttatgttgaattttgtttttttaagcaggagagaagaatacttaatttaacataaagtatagcttgcaggactttgaggattactttccttttgttacaaaattggcaacgaggtcctcaaattgaggacaagtaggcataagtactcttttattttaaagaaaacagtcatcatttgggattaaaccttcccccaggacttattaagagatatcaacttaatgtcatctcagtatataaaagacgaaaggaaaaggttagaaggatgtgtcttagaagtcattggcaaaacctccttagggcagtgaggcaattctatccctttcagtgggaggtggaggtgctctcccctccctgatatccagtcaagaacaaagctagaagaagaatcacttgtaaaatatggaggttcctgcaaaagggatttgttttctgtcactccccaggcgaaagcctgtttaggcagtgggcttgctgttctaccccgagtctatctaagcagaggaaaaagtaattgaagagagcaaggttgagagagggccagtggtagagtgcaagctctctcaccattgggtctgrcaaggatataggagattcttgtgggccaagtgggcatgtgaaaagttggctgggcttcagtccccttgctggaatttcccagaggcctcatgacggaagaggaagagctgtgttaggtggtaagcctggacttcatgtctcccatcatggaactgggcctggtctacaaggccccacaaagcagccattcccaacctttttggcaccacggaccagtttcatggaagaaaattttttcatggacctgggggcagggggcagggtacggtttcaggatgattcaagtatattacctttattgtgcactttatttctattattattacattgtaatatataatggaataattatacaactcaccataatgtagaagcagtgggagccctgagcttgttttcctgcaactagatggtcccatctgggggttatgggagacagtgacagatcatcagacattagattcttataaggagcgtgcagcctagatccctcacatgtgcacttcacaatagggttcatgctcctataagaatccagtgctgctgctggtctgacaggaggcagagctcaggcagtaatgggagtgatagggaatggctgtaaatacatatgaagctttgctcttttgcccgttgctcacctcctgctgtgtggcccagttcctaacaggccatgaaccagtactgatccatggtccaggggttgagtacccctgccataaataagtcatacttctgtttcataagagacccagaatttggataccacatagaggttagcccacgtgtccacaaaagctatgaagaacttcaaatggtactttcttctctttatcctcacctcccctccctcttcactccatccctcttctctcacatgctcaggaaaagtggagagaaggggaaaagatgtaacagtgtttctgaaacagactttgttccagcttcttctcaatcccaccgttccatttcactccaatgtactggaggattgagaaaacaaattctgacccccagtccctagagccaaatatctagctgagcatgagaaaggagaatctttaattaaatttcagatgatagtttttaatggaactagactgtccttcaataactggagtgacaaggaagttaggaaatctgcctaagacatcatttgagagcttgaaaagaaatattcaacaatccatggttgacagtcaatacttgtatttcttgtttatgcaattctgagatgacagagtacagtaaaacagcaacacattcaaataattcactttaaaaacaggaaataaagccacatatctacaactatgtgatctttgacaaacctgagaaaaacaagcaatggggaaaggattccctatttaataaatggtgctgggaaaactggctagccatatgtagaaagctgaaactggatcccttccttacaccttatacaaaaatcaattcaaggtggat

SEQ ID NO: 673473 - DNA, 3551 bp, Homo sapiens
ttttttgagattgagttttgctcttgtcgcccaggctggagtgcagtggcgtgatctcagctcaccgcaacctctgcctccaaggttcaagcaattctcctgcttcagcctcccaagtagctgggattacaggcatgtaccaccacgtctggctaattttgtacttttactagagaggggtttctccatgttggtcaggctcatctcaagctgccaacctcaggtgatccgcacacctcggcctcccaaagtgctgggattacaggtgtgagccacagctcccggtggtaacatagttttcaaataagtcctttgatattgttgggtgtctgtgtgtgggttttcagtttttttttttattctaaaaatagactgtgcttgatattacatgaattcattgaaaagttaaacaagattttttccttttactttttttgaagcataaaattttttggtagtaacactttgtggcttgtctcataaacttgccacctgacattatttaccattggtccaaatgaggttgggaaatttaaatacaggatttaatagacatgtatataattcaaaataactaataaaaagttaagtgttaaatcacattgcccatttggtgttatgtagctcttttatagatgttattcactgaattgaacatttttagaaattgaatactaccaaatgccacatgctgaaatttacttgttcattcttccgaagtgaagctaagtaacataatcctgtggtgcttctgtagtgaaattagactaggataaatccatttcaagaaactaaattctatttgtaagtcctagagatcaaatagacctgaactctttcgtttctttattgtaaacttttaagtaaagaaaataattttgaaatccactagatgtagaagagatgtatcatgaagcaataacttatcatcttaattcctagatattttagtggcatcctctatttttgtggttagagaatgaagtaggttttgtttaagcagtttgcataccagcagtagggaagaatgagtaaaataaaaaattaactctcaataaaattagttgttgttgtttatgcagcaattgcttgattcaattctcttttccatagctaaagtatgaatactgtaaactaatttctggttttatccaaaaagctaatttcatgggcgcaaaacaagaaaagtacttatataaaagtattacatgagttaattgaaactggatcaacaaaacattaatttggggtcagatttttttggtcctggctgtgatactagctctgaaatctgggcacattatttaacccttcttaatttggttacttcatttactatatgaaaagaatgatagcatctacctcaaagtattttgtgaagattaggcaaaataatgtataaaagtccaaatcatagaatttaacatacagtaatctctccttacatagttattgcctactcaggaaccccattgttaaatataatgtttcttggtaatgctgttcacttatgttgaattttgtttttttaagcaggagagaagaatacttaatttaacataaagtatagcttgcaggactttgaggattactttccttttgttacaaaattggcaacgaggtcctcaaattgaggacaagtaggcataagtactcttttattttaaagaaaacagtcatcatttgggattaaaccttcccccaggacttattaagagatatcaacttaatgtcatctcagtatataaaagacgaaaggaaaaggttagaaggatgtgtcttagaagtcattggcaaaacctccttagggcagtgaggcaattctatccctttcagtgggaggtggaggtgctctcccctccctgatatccagtcaagaacaaagctagaagaagaatcacttgtaaaatatggaggttcctgcaaaagggatttgttttctgtcactccccaggcgaaagcctgtttaggcagtgggcttgctgttctaccccgagtctatctaagcagaggaaaaagtaattgaagagagcaaggttgagagagggccagtggtagagtgcaagctctctcaccattgggtctgacaaggatataggagattcttgtgggccaagtgggcatgtgaaaagttggctgggcttcagtccccttgctggaatttcccagaggcctcatgasggaagaggaagagctgtgttaggtggtaagcctggacttcatgtctcccatcatggaactgggcctggtctacaaggccccacaaagcagccattcccaacctttttggcaccacggaccagtttcatggaagaaaattttttcatggacctgggggcagggggcagggtacggtttcaggatgattcaagtatattacctttattgtgcactttatttctattattattacattgtaatatataatggaataattatacaactcaccataatgtagaagcagtgggagccctgagcttgttttcctgcaactagatggtcccatctgggggttatgggagacagtgacagatcatcagacattagattcttataaggagcgtgcagcctagatccctcacatgtgcacttcacaatagggttcatgctcctataagaatccagtgctgctgctggtctgacaggaggcagagctcaggcagtaatgggagtgatagggaatggctgtaaatacatatgaagctttgctcttttgcccgttgctcacctcctgctgtgtggcccagttcctaacaggccatgaaccagtactgatccatggtccaggggttgagtacccctgccataaataagtcatacttctgtttcataagagacccagaatttggataccacatagaggttagcccacgtgtccacaaaagctatgaagaacttcaaatggtactttcttctctttatcctcacctcccctccctcttcactccatccctcttctctcacatgctcaggaaaagtggagagaaggggaaaagatgtaacagtgtttctgaaacagactttgttccagcttcttctcaatcccaccgttccatttcactccaatgtactggaggattgagaaaacaaattctgacccccagtccctagagccaaatatctagctgagcatgagaaaggagaatctttaattaaatttcagatgatagtttttaatggaactagactgtccttcaataactggagtgacaaggaagttaggaaatctgcctaagacatcatttgagagcttgaaaagaaatattcaacaatccatggttgacagtcaatacttgtatttcttgtttatgcaattctgagatgacagagtacagtaaaacagcaacacattcaaataattcactttaaaaacaggaaataaagccacatatctacaactatgtgatctttgacaaacctgagaaaaacaagcaatggggaaaggattccctatttaataaatggtgctgggaaaactggctagccatatgtagaaagctgaaactggatcccttccttacaccttatacaaaaatcaattcaaggtggat

SEQ ID NO: 673474 - DNA, 3551 bp, Homo sapiens
ttttttgagattgagttttgctcttgtcgcccaggctggagtgcagtggcgtgatctcagctcaccgcaacctctgcctccaaggttcaagcaattctcctgcttcagcctcccaagtagctgggattacaggcatgtaccaccacgtctggctaattttgtacttttactagagaggggtttctccatgttggtcaggctcatctcaagctgccaacctcaggtgatccgcacacctcggcctcccaaagtgctgggattacaggtgtgagccacagctcccggtggtaacatagttttcaaataagtcctttgatattgttgggtgtctgtgtgtgggttttcagtttttttttttattctaaaaatagactgtgcttgatattacatgaattcattgaaaagttaaacaagattttttccttttactttttttgaagcataaaattttttggtagtaacactttgtggcttgtctcataaacttgccacctgacattatttaccattggtccaaatgaggttgggaaatttaaatacaggatttaatagacatgtatataattcaaaataactaataaaaagttaagtgttaaatcacattgcccatttggtgttatgtagctcttttatagatgttattcactgaattgaacatttttagaaattgaatactaccaaatgccacatgctgaaatttacttgttcattcttccgaagtgaagctaagtaacataatcctgtggtgcttctgtagtgaaattagactaggataaatccatttcaagaaactaaattctatttgtaagtcctagagatcaaatagacctgaactctttcgtttctttattgtaaacttttaagtaaagaaaataattttgaaatccactagatgtagaagagatgtatcatgaagcaataacttatcatcttaattcctagatattttagtggcatcctctatttttgtggttagagaatgaagtaggttttgtttaagcagtttgcataccagcagtagggaagaatgagtaaaataaaaaattaactctcaataaaattagttgttgttgtttatgcagcaattgcttgattcaattctcttttccatagctaaagtatgaatactgtaaactaatttctggttttatccaaaaagctaatttcatgggcgcaaaacaagaaaagtacttatataaaagtattacatgagttaattgaaactggatcaacaaaacattaatttggggtcagatttttttggtcctggctgtgatactagctctgaaatctgggcacattatttaacccttcttaatttggttacttcatttactatatgaaaagaatgatagcatctacctcaaagtattttgtgaagattaggcaaaataatgtataaaagtccaaatcatagaatttaacatacagtaatctctccttacatagttattgcctactcaggaaccccattgttaaatataatgtttcttggtaatgctgttcacttatgttgaattttgtttttttaagcaggagagaagaatacttaatttaacataaagtatagcttgcaggactttgaggattactttccttttgttacaaaattggcaacgaggtcctcaaattgaggacaagtaggcataagtactcttttattttaaagaaaacagtcatcatttgggattaaaccttcccccaggacttattaagagatatcaacttaatgtcatctcagtatataaaagacgaaaggaaaaggttagaaggatgtgtcttagaagtcattggcaaaacctccttagggcagtgaggcaattctatccctttcagtgggaggtggaggtgctctcccctccctgatatccagtcaagaacaaagctagaagaagaatcacttgtaaaatatggaggttcctgcaaaagggatttgttttctgtcactccccaggcgaaagcctgtttaggcagtgggcttgctgttctaccccgagtctatctaagcagaggaaaaagtaattgaagagagcaaggttgagagagggccagtggtagagtgcaagctctctcaccattgggtctgacaaggatataggagattcttgtgggccaagtgggcatgtgaaaagttggctgggcttcagtccccttgctggaatttcccagaggcctcatgacggaagaggaagagctgtgttaggtggtaagcctggacttcatgtctcccatcatggaactgggcctggtctacaaggccccacaaagcagccattcccaacctttttggcaccacggaccagtttcatggaagaaaattttttcatggacctgggggcagggggcagggtacggtttcakgatgattcaagtatattacctttattgtgcactttatttctattattattacattgtaatatataatggaataattatacaactcaccataatgtagaagcagtgggagccctgagcttgttttcctgcaactagatggtcccatctgggggttatgggagacagtgacagatcatcagacattagattcttataaggagcgtgcagcctagatccctcacatgtgcacttcacaatagggttcatgctcctataagaatccagtgctgctgctggtctgacaggaggcagagctcaggcagtaatgggagtgatagggaatggctgtaaatacatatgaagctttgctcttttgcccgttgctcacctcctgctgtgtggcccagttcctaacaggccatgaaccagtactgatccatggtccaggggttgagtacccctgccataaataagtcatacttctgtttcataagagacccagaatttggataccacatagaggttagcccacgtgtccacaaaagctatgaagaacttcaaatggtactttcttctctttatcctcacctcccctccctcttcactccatccctcttctctcacatgctcaggaaaagtggagagaaggggaaaagatgtaacagtgtttctgaaacagactttgttccagcttcttctcaatcccaccgttccatttcactccaatgtactggaggattgagaaaacaaattctgacccccagtccctagagccaaatatctagctgagcatgagaaaggagaatctttaattaaatttcagatgatagtttttaatggaactagactgtccttcaataactggagtgacaaggaagttaggaaatctgcctaagacatcatttgagagcttgaaaagaaatattcaacaatccatggttgacagtcaatacttgtatttcttgtttatgcaattctgagatgacagagtacagtaaaacagcaacacattcaaataattcactttaaaaacaggaaataaagccacatatctacaactatgtgatctttgacaaacctgagaaaaacaagcaatggggaaaggattccctatttaataaatggtgctgggaaaactggctagccatatgtagaaagctgaaactggatcccttccttacaccttatacaaaaatcaattcaaggtggat

SEQ ID NO: 673475 - DNA, 588 bp, Homo sapiens
ttggaactttctgtcttgtcatatcaaaattttctttaatatataagggataatagtacctgaaagaaatacctaaagtcggcaatagtatgctattcacataattcaatacattttaatttttatccccttacataaaatggctgaagcatttcattatattttgaatagaaccaatatacatgacatcaataaacttctagcaggactgtaaatgaaaaaagtcatgttaaatatgtttgccatgtgctgatggcagatctttctttgatatgtcggctttgagcataaaaagctacattttaatttattttgaatgtccactgcagccatgttgctaatagagatggtgcagggccatttctaacacagagtgcaaagctattttataacaatcccacaggaaaagaaaagcataataggaaattattcaaacctttcagagtcctgaagaggataggatcagagagtggccccactccttttgaatttcgtgcttgaattcgaaagtaatacayagtatcaaggttgagatccatgatttgatgagtaagcctatcaccactgattgtttccataatccagtca

SEQ ID NO: 673476 - DNA, 614 bp, Homo sapiens
tttaatgaaaagctagcccattggagataaaggaggaacctagagaaatagccacaggaacatcatttgtgagaygcacaattcacagaggaacacagaagccaaagcattttcacttccccagaatttcttctgtgaaattacaaactctttctgatgaataattttctccaatccaacgattatcttgagaatcctttgtgaaagagcctgccttttcctcctaagcaatgcctgcaatctaacatttcacaagcatcctctgagacctgtggttggaaggaattgctatcaaggaggcccacattaaggtaaactttcttatgggaacaaagagtgaggagaggacttgatgtcatctctttcaggccagtgccacaaagatgcccaaagttgggtcttggctaaaaattgaccatcggtcatagtctcctttagattaaatgagtcaaaagtcaaacctgagtaattttcattgtctctagaaccacactcacaaaaatctcattacatgacactgtttgaatacaagcacacaagtgtttctctcccctttacagtcttaaaagaaatttagtgccttgtataacacctacctaaagcctcgcatctga

SEQ ID NO: 673477 - DNA, 1088 bp, Homo sapiens
cagtaattkaaaataaaatagtaatgcttgtcaaatgtggatattaagttttattagtgtcataaaaaagttttctctatatgttgggtaatctaaatgattgtttatgtagtagccactgggcatcactaagagatccctatgcctcaagcatgagagagggagggaacttggcttcctattccctacgaggctcttggcaagtcctgtggcccatccctggcctggctcctgtggatctctctggcctcatctagcaccagggctctctggcactttatgccctagagatactggatggcttgtagttggcttacacatggtatttggttcacttctagggcagctcaaagaactgtgctcttatgtgttcattacaggtactacattcttatcaaaagataaatccaagggacagagtaagattgcctagaagacaatagtcttctaggtaattgtatctagatgttcttttctttattcatcccaagtcaaccaattggaataggaacaatgattctttttggccttagatatgtctgttcctcattctgatgactaatttaaagcagaatttcaaacaaaaagggcaattcttgcaagagacctgcaatggtgaagagaatgctagcgatttgcatcttgagcacataacacacctcagcttcctcaagagacagtatagacagttgtgaaatcacagactggctgacaacaggctaaatgggtttgcatcctagttctgccattcattcatagggcctggaacaacttcattaacctctctgtatcttcatgtcctccttgtcagaatgaggacatagtagtacatgcctcagagagttgttctgaaaattaaaggagtttatctatccaaggtatttagaatggttcctagctgtctcagttatacttataggatgttaagttatggaagtgattgagtaaacacaaacaaaagataatctcactgaaggaggattttatttacttgctagaggagggggcatgccctaccatgcaaggccacatggggaagcatcagtgtcagtgaagaggcagaaaggagcaaagggaaagcctggccc

SEQ ID NO: 673478 - DNA, 664 bp, Homo sapiens
gtttctgtctcagtttctttattggtaaatgaggatagcaacagtatgtaccttatagaggtcctgtgaaggatcaggtgtaaaatgtttgtggatagcaagtgattaataagtgctagctgtttattactcttctaattataaaaattayatatcttcattgttctaaaaattcaacaatataacaaatttaaaaaaataaaataaatcccccaaattattccatgactgttagcattttagtgaaaaatccttccggtcatatttcttcgtacatgtgtgatgtgcagaatctgaaatttatagcacaggaggaaaaattacagtaagctccactggtgcctccaagagggatgagtttcatatccttctttgatattcacttatttagtgtggcagtcaactggtctttcagacaacagtgcctatgaccatcaaaacagagtgggcagtggtctggcttcttcactgaagttagggttaggaagatttagaatctatgggcagtagatatcaacctctgcactatttcggtttttatgagggaaatcttgtgatctagtgagtgttgtgtatgtgaacaatggaagaatccgcccctaaagagctataatttgggaagtcaagggctactttggaaagtagtggtacatttgaaccctca

SEQ ID NO: 673479 - DNA, 664 bp, Homo sapiens
gtttctgtctcagtttctttattggtaaatgaggatagcaacagtatgtaccttatagaggtcctgtgaaggatcaggtgtaaaatgtttgtggatagcaagtgattaataagtgctagctgtttattactcttctaattataaaaattacatatcttcattgttctaaaaattmaacaatataacaaatttaaaaaaataaaataaatcccccaaattattccatgactgttagcattttagtgaaaaatccttccggtcatatttcttcgtacatgtgtgatgtgcagaatctgaaatttatagcacaggaggaaaaattacagtaagctccactggtgcctccaagagggatgagtttcatatccttctttgatattcacttatttagtgtggcagtcaactggtctttcagacaacagtgcctatgaccatcaaaacagagtgggcagtggtctggcttcttcactgaagttagggttaggaagatttagaatctatgggcagtagatatcaacctctgcactatttcggtttttatgagggaaatcttgtgatctagtgagtgttgtgtatgtgaacaatggaagaatccgcccctaaagagctataatttgggaagtcaagggctactttggaaagtagtggtacatttgaaccctca

SEQ ID NO: 673480 - DNA, 664 bp, Homo sapiens
gtttctgtctcagtttctttattggtaaatgaggatagcaacagtatgtaccttatagaggtcctgtgaaggatcaggtgtaaaatgtttgtggatagcaagtgattaataagtgctagctgtttattactcttctaattataaaaattacatatcttcattgttctaaaaattcaacaatataacaaatttaaaaaaataaaataaatccccmaaattattccatgactgttagcattttagtgaaaaatccttccggtcatatttcttcgtacatgtgtgatgtgcagaatctgaaatttatagcacaggaggaaaaattacagtaagctccactggtgcctccaagagggatgagtttcatatccttctttgatattcacttatttagtgtggcagtcaactggtctttcagacaacagtgcctatgaccatcaaaacagagtgggcagtggtctggcttcttcactgaagttagggttaggaagatttagaatctatgggcagtagatatcaacctctgcactatttcggtttttatgagggaaatcttgtgatctagtgagtgttgtgtatgtgaacaatggaagaatccgcccctaaagagctataatttgggaagtcaagggctactttggaaagtagtggtacatttgaaccctca

SEQ ID NO: 673481 - DNA, 1186 bp, Homo sapiens
atcctagcactttgggaggctgaggtgggtggatcacctgaggccaggagttcaagaccagcctggggaacatggcaaaaccttgactctacagaaaatacaaaaattagccgggtgtggtggcaggtgcctgtaatcccagctactcgggaggctgaggcatgagaatcccttgaccctgggagattgaggttacagtgaaccaagattgcgccagtgctctccagcctggggcaccgagcaagaccctgtcttcaaacaaccaaaccaataacattaagagtagataaggaattcattctgcaggatgaggtcaaagacgtagargggttattcctgaaagttctgcctttgagaatatggtctttcatcatgttactttcaggagtgtgccccagaggacaagataagaagatcactctctctactttctccaaagtgaccaatcaacacagggccacatcaatgctcagcaccttccatttgacttcacctgactttcactggatagttcccatcttgaaagcttcacatctgcattgtcagctatgcctgggtgtaattctacatacctacactgtggttgaacacctgagtaaaccaccccattttttggtgctgtgatgccagagctgatacaattgtgtatctcccagtgtcagtcacactctcccatgtgagcaccagcactgccacccccagatactgcagttctctcattcctcttctgccctctcctaacctccctgggtcttctgctataccaagttgatgcatcccaatgacatgtttaatcctcactttcctcttacctgctagtagcagaggagaggaaagaaggaagataccatctcttctcaagaaatgaagctcctaaggcttactccaaagacatttacatcccagctctctctctgttaagagggactatgtcatggagtatggtcctgtggcaaaactgtagttgtaccctaacatttgctgccaaggcttgactggagaggccagcccagcattatccatatgcgcatgttgtgctgtgcttagcctttccctgtactagacttcctacgtgggctgagggcatgggccaggctcacatggctttccttagcatctgctctactcagcatgagccattttctcttgccaaaacaacttaatgtcatatggatgagagaatttt

SEQ ID NO: 673482 - DNA, 611 bp, Homo sapiens
ccccgtctacaggcatctatcaccatgcccggctaatttttttttttttttttttttgkatttttagtaaaaacggggtttcacttgtgtctcagtgccaaggctatagtaatttacaaggggttctcaaataaattatatagtctctctgggtatcagttcacctatttataaaataaatttaaactaaagatctctgaagtcctttctaaattgacaagattaataatttttttttcatcggtatataagtcaggaaagaaataactacaagtagactggccagtgggtatctacttcctaatttaggattcttattttaaacatccccttttccaaaaattatctcccacttttataataatacttgagatttctagcattcaatttacttgctttactagttaaaatatgttggattatgggtaaaacaaaagatagtaagatgaagttagttataatgataataatgattagaagtaatatacaatatatttcatgcatttatgcacttacatacttggtatctcttaaagtttatgctctaggcattagtgcattgaatcctcaaaataaatcttatgtaataggtactacaattattagttcca

SEQ ID NO: 673483 - DNA, 611 bp, Homo sapiens
ccccgtctacaggcatctatcaccatgcccggctaatttttttttttttttttttttggatttttagtaaaaacggggtttcacttgtgtctcagtgccaaggctatagtaatttacaaggkgttctcaaataaattatatagtctctctgggtatcagttcacctatttataaaataaatttaaactaaagatctctgaagtcctttctaaattgacaagattaataatttttttttcatcggtatataagtcaggaaagaaataactacaagtagactggccagtgggtatctacttcctaatttaggattcttattttaaacatccccttttccaaaaattatctcccacttttataataatacttgagatttctagcattcaatttacttgctttactagttaaaatatgttggattatgggtaaaacaaaagatagtaagatgaagttagttataatgataataatgattagaagtaatatacaatatatttcatgcatttatgcacttacatacttggtatctcttaaagtttatgctctaggcattagtgcattgaatcctcaaaataaatcttatgtaataggtactacaattattagttcca

SEQ ID NO: 673484 - DNA, 3064 bp, Homo sapiens
  misc_feature 2234, 2235, 2236, 2237, 2238, 2239, 2240, 2241, 2242, 2243,2244, 2245, 2246, 2247, 2248, 2249, 2250, 2251, 2252, 2253,2254, 2255, 2256, 2257, 2258, 2259, 2260, 2261, 2262, 2263,2264, 2265, 2266, 2267, 2268, 2269, 2270, 2271, 2272: n = A,T,C or G
  misc_feature 2273, 2274, 2275, 2276, 2277, 2278, 2279, 2280, 2281, 2282,2283, 2284, 2285, 2286, 2287, 2288, 2289, 2290, 2291, 2292,2293, 2294, 2295, 2296, 2297, 2298, 2299, 2300, 2301, 2302,2303, 2304, 2305, 2306, 2307, 2308, 2309, 2310, 2311: n = A,T,C or G
  misc_feature 2312, 2313, 2314, 2315, 2316, 2317, 2318, 2319, 2320, 2321,2322, 2323, 2324, 2325, 2326, 2327, 2328, 2329, 2330, 2331,2332, 2333: n = A,T,C or G
tcctaaggcttctcatgctagtgccaattcctttttttttttttttttttttttgagacagagtctcactctgtttccagggcagggttggagtgcagtggcgcaatctcggctcactgcaacctcggccttgcctccccggttcaagtgattctcatgcctcagcctcccgagtagctgggactataggcacccaccaccatgtctggctaatttttgtatttttagtagagatggggtttcaccatgttggccaggttggtcttcaactcctgacctcaagtgatctacccgcctcggcctcccaaagtgctgggattacaggtgtgagccaccacggccggtgcaaatgctaattcctgacaagcagagtgtgtttcctagacttgcatcatcttgtgaacaaatgttgctgctttatttgttccaaagttatagtgagcttatagaaacttcaaggacaccatttcaattttaacatttattgctactaaaattagtgatttaaggcttgtattataagaatgatccccagagaaataatccctcaaaataaaacaaagttctcttaaacatgcaagatgaagccctgcagaagcaaagatgacctatgtttaacatttaacatttgaacacctactggaacttaaataagcaaggaggctcatctagaatggcagaccagctttgaaacatcatctttcttttgaaaaatcttctacctgttttaatgaaattaggtctattaatatgatcgcataaataaattatgatcagtatagagtcagtattgcacattaagcctggactaactcaaagtgtctttttactagttctttctgttaaatgtttccatgaaaattctttttaatctaaagactgttgtcaagacatactagttattaaatatgccttcagagctaaatctgcatgagcattccacatttcctatcacttttttgggttcatcttctttccatagaaaggagaatttcaaggaaaggaagaaatatctacaagtaaatatcattcagtatgggttagcatgcttgattgctattggtgaattatagcaaaaaaaggccttagcatctatcatgttatgttttatgtaacattttaacaatggcaaggtaagtcacactgctgatttcagcagtgttatatttgatagcaattgatagccgactactaaacaaaatcactaaactgtatgaatgctttaattcttttttttttttttttttttttttttgagatggaatcttgctctgtcacccaggctggagtgcagtggtgcaatcttggctcactgcaacctccgcccaccgggttcaagcgattctttgcctcagtctcccgagtagttgggattataggcacccgccaccacacccgcctaatatttgtatttttagtagcgatggggtttcaccaacttggtcaggctggtcttgaactctgacctcgtgatccacctgccttggcctcccaaagtgccgggattacaggcgtgagccatgaatgccttaattcttaagatagtaatgggaaatattgttctgagccaagaatatgatagccagggaacataagtttataagatcacacagtgtagttccaacggtgactttaaacccaatagttccctatggaaactcaggataccaaaaagtgcgacagtaatattctggattctaaacttaagtttgaataagaatatcatatttcctcttacttaaaaggtaaaatacaggttttactgttcaggaatatgactagactttcaatgtctccatcataaaccaatgtgtggcaaaggagataaatcttatattcagtccctactgacacacatgatgtcctttggtctcaaagtgcaaattaactaactatccttagaggctacagcctgagacaaaccctacctgggaaaaaaacaataataataatagagacaaaaatgctgaaaaaagggaaaagttattagtatatgtgtatatatatatatatatatatatatgtgtgtgtgtgtatatatatatgtgtatatacatatatatatccatatatatatatccctttataatttatagtaggaatattttcattaccatgcaatagtgatagatttaaatgaagatgaaagggacctattaaatcattatgtctaatgcatgctaagggaaggcatatttccctagagagaggaataaaaagaaaaaaatatatannnnnnnnnnnnnnnnnnnnnnnnnnnnnnnnnnnnnnnnnnnnnnnnnnnnnnnnnnnnnnnnnnnnnnnnnnnnnnnnnnnnnnnnnnnnnnnnnnnnaaaagctacttaatggacactgtgctgcactgctcagaccctttcccttcccaacctctgcccaacttccaggatcaacacactcattcaccattcttccagcttctgaaaaggttgcctgggagggctcaccactgagacctgccccaggaatccacagaacaaagcttccttgcctatgtctaagtgcctcaccatggaggtatctcaaatccaatgactggtcagttgggggttacaaagatttggccccctgacttcaagacaggacactataagctatcatttcatctgcagagctcctgtcagatcttctgagacctctatggacctgtatcacatagttcaagttctgccttgcctttttagtcaatcgttattgactgttgtcctaagcatccttcccaacaaatctgctgcatgcaatatgcctgccagcctgttttcaaggaaacctaayctaaaacgtcattcatccttaaggctagaagaccataaaaggcaaataagtcatcagttcccctcaaatgactgtttctacaccaatctgtggccaaagcttagtcagttactacatactgaagaacgaggcaaaaaatcttaatttaatccatgtctttggtcccttagtcactatctgaaacaaccataactaaatccacttatggagagtttactatattccaagcaccacacataccacttaattatatgttttggattaatattca

SEQ ID NO: 673485 - DNA, 1174 bp, Homo sapiens
tcttttgatcatggacaatttctgtataattgtacctcaaagtattctagagtatgaataacatgactcctactaccctaattctttatatttagataacttatatttctttacagttaaaaatagtgctgtggtaattatctttgtacatactttctcatgtgagagtattgcagtagattaagatctttgagttggaattgctggctcaacaggtatacacatttaggtactgctctacaaaaactaaaagtcagaattaatttactttccacatgtgtgtgacagtcattcctttcttttgttgctttttttaaattcagaaattgaattatatgatggtattatatgatcatggaaagtgaaggagctttgggagtcaacctgccttcatttttattttacaaatgaagaagctaggacctcaaaatataatgatttatcaaaagccatggttaatgagccagaatgcagatatgaacacaagtctcctgactgcaagttcattgtgctttacagcagggcatagtcagcttgtcacagataaagagtggcaatcttattttaccatgttccccttagatgggaggtagggaggtgctgcaagaaattcccatgtttactatgaatgctgtagcagaatgttaactgtaacactaaaagaattaataactaattattttgaratagagatattctaaatattacattgtaaaccatttagtatttaataaactattagaaaattatttattatatctaacccaaacttggtttcctattgtttgtaattaaaatgtatatcctgttttgagctgtgaagtttattcatgatgcaaagagagaaagaaaatttgaactttgtttggctttttgagtagagaattactactctgggattgggtgaaatctttgagattatatctttattttactgccttgtagtgttttcaaacaatacaatttaagaataactaggtttagtctctcacatttactcctgtgaccctgagtcaagtgactcagttctcctggatctgtaatacaacgagtgaataagctctccggggtgattaagttctcattacgtaagatcctgcgtttacaaatctacatgaaaaagcaagtatgaacatttatagaactagtttctaatgtctacccccaaaccaca

SEQ ID NO: 673486 - DNA, 1174 bp, Homo sapiens
tcttttgatcatggacaatttctgtataattgtacctcaaagtattctagagtatgaataacatgactcctactaccctaattctttatatttagataacttatatttctttacagttaaaaatagtgctgtggtaattatctttgtacatactttctcatgtgagagtattgcagtagattaagatctttgagttggaattgctggctcaacaggtatacacatttaggtactgctctacaaaaactaaaagtcagaattaatttactttccacatgtgtgtgacagtcattcctttcttttgttgctttttttaaattcagaaattgaattatatgatggtattatatgatcatggaaagtgaaggagctttgggagtcaacctgccttcatttttattttacaaatgaagaagctaggacctcaaaatataatgatttatcaaaagccatggttaatgagccagaatgcagatatgaacacaagtctcctgactgcaagttcattgtgctttacagcagggcatagtcagcttgtcacagataaagagtggcaatcttattttaccatgttccccttagatgggaggtagggaggtgctgcaagaaattcccatgtttactatgaatgctgtagcagaatgttaactgtaacactaaaagaattaataactaattattttgaaatagagatattctaaatattacattgtaaaccatttagtatttaataaactattagaaaattatttattatatctaacccaaacttggtttcctattgtttgtaattaaaatgtatatcctgttttgagctgtgaagtttattcatgatgcaaagagagaaagaaaatttgaactttgtttggctttttgagtagagaattactactctgggattgggtgaaatctttgagattatatctttattttactgccttgtagtgttttcaaacaatacaatttaagaataactaggtttagtctctyacatttactcctgtgaccctgagtcaagtgactcagttctcctggatctgtaatacaacgagtgaataagctctccggggtgattaagttctcattacgtaagatcctgcgtttacaaatctacatgaaaaagcaagtatgaacatttatagaactagtttctaatgtctacccccaaaccaca

SEQ ID NO: 673487 - DNA, 1174 bp, Homo sapiens
tcttttgatcatggacaatttctgtataattgtacctcaaagtattctagagtatgaataacatgactcctactaccctaattctttatatttagataacttatatttctttacagttaaaaatagtgctgtggtaattatctttgtacatactttctcatgtgagagtattgcagtagattaagatctttgagttggaattgctggctcaacaggtatacacatttaggtactgctctacaaaaactaaaagtcagaattaatttactttccacatgtgtgtgacagtcattcctttcttttgttgctttttttaaattcagaaattgaattatatgatggtattatatgatcatggaaagtgaaggagctttgggagtcaacctgccttcatttttattttacaaatgaagaagctaggacctcaaaatataatgatttatcaaaagccatggttaatgagccagaatgcagatatgaacacaagtctcctgactgcaagttcattgtgctttacagcagggcatagtcagcttgtcacagataaagagtggcaatcttattttaccatgttccccttagatgggaggtagggaggtgctgcaagaaattcccatgtttactatgaatgctgtagcagaatgttaactgtaacactaaaagaattaataactaattattttgaaatagagatattctaaatattacattgtaaaccatttagtatttaataaactattagaaaattatttattatatctaacccaaacttggtttcctattgtttgtaattaaaatgtatatcctgttttgagctgtgaagtttattcatgatgcaaagagagaaagaaaatttgaactttgtttggctttttgagtagagaattactactctgggattgggtgaaatctttgagattatatctttattttactgccttgtagtgttttcaaacaatacaatttaagaataactaggtttagtctctcacatttactcctgtgaccctgagtcaagtgactcagttctcctggatctgtaatacaacgagtgaataagctctccggggtgattaagttctcattaygtaagatcctgcgtttacaaatctacatgaaaaagcaagtatgaacatttatagaactagtttctaatgtctacccccaaaccaca

SEQ ID NO: 673488 - DNA, 798 bp, Homo sapiens
gatgtgctactagctaaaagtcatccaacctggtcatggcctaacatcttctggaactggggattacaaagaatctaaaattccattctctctattgttaacataacccttgagtccagattacctctctcttcagggaaataaattcataggagttgcaggacaaggaacagatcacaaacacatttctattttattcctgtctcatggaaaaagagcaagctagaaatgtaaacgtcagtgaaacattcctcggaccttagatgagaggtgttacataaacacgttttcagctgagcctgaaaaatttgtttacttacaaactttctatacaaccctgacggctttccaggaagtagcctctctcttcattagaaaattcttcacaggacttkcttcagagcctgcccgctcttgtttttcagttctcttgacatgtgacccattctttgagaagcttgtttgtttatgctgcagtgcatcatccattttcccactgccaaggcggctctgctctcatgtgaatcagagatcgctggactgctctgacctagaggtccgcacacggccccctccccagcttctcctaactgcagcatttgctcttctgttttctttgacttcctgtcttgcctccttcctcccctgtactctttctttagtcccaaacctccctactgtttgtctctctgcttgattcacctttattttttattgtatatatttaaggtatacaacatgatttttctatatacgtagtgaaattgttactacagtgaagcaaatttatatgaccat

SEQ ID NO: 673489 - DNA, 2839 bp, Homo sapiens
tgtcaccaattgtgttctgcattttctaatttttaaaagtgtgctataaactaacatatattgttagggcacttgccaggttgaattcctttcagagctacacttaacatgttatttaatctaggggttgaacaaatgccagcagctgcaggctacgactgcctgtaacattgcaactaatttagctagagtcagtatcctctgcttcttattctccagagaattatcataattattggtattctacaattaaattaaggtattaagattctgttctagcttcttactggcataaaaagttcttatgttgcctagaatattgaattaaaatattggaagtagtttttaaagatttttttttgcctttgtgtgtagaaagacacatattaagaggtatcattatcctttgataaggaaatatacaaatcattaagaaatggatgaatattcttcaaaagagtgagagaaagacaagtatacctcattaaggaaacagaaatgaccaatacatatggaacaagaaaagtgcagtatcactattaattaaaggcaaattactatagctactaattttcctttcagtggtcaagttttccaataaagtgcttttgtaacagctttgttgatataaaagtggtttaatatattaacagatatattaaatatctgttattgtgcaaccctcaccactatctaattttaaaatatgtttgtattccccaaaagaaaccccatttccattagcagtcactttccattcccccccgccacccgccacactgcccctggtaaccactaatctactgtctctataaatttaactattttggacatttcatataaatgaaatcatacaacagatggtcttttgtgactaacttctttcaccaagcctggtgttttcgatgtttgtccgtgttgtaccatgtatcagcacctcattcctttttgtagctctagtgaagttttgacaatgttctggcaaaactgagctctccaacattatgtttgggacagtataatgatttttagtaagtccattctgggggacaatttggcaattcatatttaaaactttttaaaaatatataacgtttcatccaagaattcactttcaggaaattaccccaaagaagcaatcatagatgtgttctcaaattggcctgcaaagatattatttgcagtgctgtacatgataagaaaatattcacacaacatgattctcaacaacagtggatatggtaagtaattttttttttccagagacggtggtctcactatgttgctcaagatggagtgcggtggattttcacaggagcaatcccaatactgaccagcacaagagtttcgatgtgctccattgttgacctgggctggttcacccttctttaggcaatcctgtggtcccctgctcctgggaggatgccatgttgatgtcaattttagtgcggacacctgattggtatagtgcaccacagcctagaacttctggactcaggtgatcctcctgcttcagcctcctgagtacctgggattacagtgtggactcccacaccagctgttagataaattgtgatgttggaatattgtaggatctgcagccatttgaaatgatgtggggaatgtgctgtaggaacttgcatgagtgccgtggagctatagtgctgccacaatagaatcagaacacttatgcatttttcaaaatatgatgcaaaatctgactacataatgggtaagaggtttatactgcttttaaaaattagttttaagacaaatcttgtagctgaatacttaaattgtggaaagarattagtgacataatgttaaataactaaagcaatttcaagcatgcagttggatctcactttgtttattaaaagaaggggtatgagtgtgtggtatgtaaaagaactggaaaaatatatgacagatacgtatgtgggttttttcttctctgtattttgtgtaacatatttaccactctacttttatgatgagaaaaaaataaggtttcaactttttcttaactctgtaattcaaacatatagcacactatgcttcttttttttaaagttatcttttgtatactatagagaatcttcttagatagtttactactctcaggaactgagctacagcactacttctattttgaaccaaataactgcacttcagcattctccttcatggtctggctaattatacaattttatgcagtggggtttataaataaaagaatattttccccttcatgtcataagctagtttatacacacatcctaaaggaaagtttggttcccagagcttggggctgtgcctagtatttccaaggtcttctcatccttttttttaaggaggatgaggaggttaaatcaaattccaaaatcatgccttattttgagactatccaaattcaggcagctcttagtttatgtagacagccaaactatactctgtgtctctaaaaagtggattgccttctttttttctagtaatgaaaaaattctatcaacaggatcttataaataccctgatgtttagacatttgaactttacaatacctcttaattgattgattgattcattgatacatgatatgatacagatagatatgtgagttataggtatttgagcaaattttaactgttcatcctcatatcacaacttatactaaaaaattaactccttactccctcaacccaggcaaaacacaccattaattaaattgcagtttagtgacaactactgcaaacaaattctaaagtaggaaaacgacatgcccttcttctgggagccactgtggatgctcttgaagatctcaaacttatatgtatacaat

SEQ ID NO: 673490 - DNA, 603 bp, Homo sapiens
tgttgagcaagcagtaagtgttctacagacatcatctagaaatatctttgccaattattattattaataccatgtcattttgttctcctttacataaaagttgaagtcatagatgtaaagaagagcattaagagagaatccaccaaatcctaacagaaaagctttatgggtagaacctggggaatacacagcttttgaaacactcacagaggagaaagaggcagcaaaggaaatggaaaggtcaaggatttggagaaaatctgggagagaatggtgtctttgaacttacttgataaatttaaaatgatgcaaaaatttgaaataggatgaagtctgaagctagactgttgatttggcaactttaaacatttatgggatctaaacatgatcagattagagctgtccaaatctaccattggttgagggtgaagaacaggagacagccaaaaaggacactatttcataaagtttggtttttaagggtgcgggtggtctaaggatayaaggaaataccttgtgagaaaagattatgaaaactttgaccaatgttctttctaggattgaaataattataaaaataggtaaagaagtcaattattaaag

SEQ ID NO: 673491 - DNA, 1913 bp, Homo sapiens
ctctctctggcatgataacrggcactattaaaacactgaccacaccatcagcctggaccctttactgaccacaattaacagagacctctgccaaccacgatagaaataaggcatgactgagaaacaaaccttctttattttaagtcatcaagacttttgcatttgaatactgcatcacacgttagcgtatcctgatacaagtgggaattttaacttactgctctgggactgaactctcatggaaaacctgaaccaacaatcacaatcgagtattaatttaagatctgtattccttgtacttattcattcaggaaacattggagggttaggataacattgataactttactagacttgggagtataaagatgaattagttgtggtcctcgacctcagtaaccttatattctaatgtgaatttctgagatgtaattaaataaaataataagaaatttattttgtagtgggttcacattagtcgattttgcaggtggtcaagctttccatgggaaccattgctctaaggacattattctaagctgagaaaacaccctgtgcaaagaatgaaattataaaaaaactatttagattacgttgataatcttactacagctgaggcgcatgtctatatattaattagaatacatatgtccaaagagatagaattccaagtttattttttatatttttcccactctagttagcaacctaacaaaatatttagagttcgtgctaagcaccatcagggttattccaatctatatcttacattgagacaggattcctgcagaaataattcaaaagcatattttcccttgttatatttattttggtttcagaagaatttggatgtgtatggttgcataactttacagcttaatttattgaatatttttgaatatttgaaaatgtgtacatttccctttattcagttgtgagaaccaaatttagcattttataaaaaactttcagcaaaaaattctttatgatcctatgatcctatgccaccacttaacaaagtccatgtgggaattctgtgtgataccaggtggcctgtctcttcaggaagtgcattttcataaaaaggggttgtcaggaaaaggtgtcatatatccattgggtagctttattgtatttaatatttttctttatttttattcaaactgtattttaagaaattcatcaaaatatgctaggaattttgtttttcttttttttttttttttttgctgcttctcactcatgtgaaatcctcagccacatcactttctggttttcctgctcttgtaaaaaatgttggttgggttggttagagtcttgtcgcttctaacagctaataaaaatgtccacaccgaaaaatccatccaaaggccaactttttgtatcaattttgtgtttacgttttaggaaatttaagttcagttattttgtgttttaggaagatggtaggaaatagaacactgtgtcatagtaccatttttcttagtacactatatataaattaggtggatatacaaattgaatcacatctagaataaagctatagccaacttccacttcctcagcaatcacagcaatatgttataaactctcccgcatgtggtattaaatactctattttgagtatctctgtgattgcaacttttctttagatctgaagaagacatttaaatttccaattgctggcttcacttaaaattggttttcatttatcctgatctgcatgcctgatcctatgcaactaccatgctgacatagaactctttttctagtcttgattgcttttacatatggttcactagctcttgccaacaagcctttcttaaaacactcaattttctcctacttattctgttgtgttttgttttgtttgggtttgttcagggagagagggtctcattctgtctcccagg

SEQ ID NO: 673492 - DNA, 1913 bp, Homo sapiens
ctctctctggcatgataacgggcactattaaaacactgaccacaccatcagcctggaccctttactgaccacaattaacagagacctctgccamccacgatagaaataaggcatgactgagaaacaaaccttctttattttaagtcatcaagacttttgcatttgaatactgcatcacacgttagcgtatcctgatacaagtgggaattttaacttactgctctgggactgaactctcatggaaaacctgaaccaacaatcacaatcgagtattaatttaagatctgtattccttgtacttattcattcaggaaacattggagggttaggataacattgataactttactagacttgggagtataaagatgaattagttgtggtcctcgacctcagtaaccttatattctaatgtgaatttctgagatgtaattaaataaaataataagaaatttattttgtagtgggttcacattagtcgattttgcaggtggtcaagctttccatgggaaccattgctctaaggacattattctaagctgagaaaacaccctgtgcaaagaatgaaattataaaaaaactatttagattacgttgataatcttactacagctgaggcgcatgtctatatattaattagaatacatatgtccaaagagatagaattccaagtttattttttatatttttcccactctagttagcaacctaacaaaatatttagagttcgtgctaagcaccatcagggttattccaatctatatcttacattgagacaggattcctgcagaaataattcaaaagcatattttcccttgttatatttattttggtttcagaagaatttggatgtgtatggttgcataactttacagcttaatttattgaatatttttgaatatttgaaaatgtgtacatttccctttattcagttgtgagaaccaaatttagcattttataaaaaactttcagcaaaaaattctttatgatcctatgatcctatgccaccacttaacaaagtccatgtgggaattctgtgtgataccaggtggcctgtctcttcaggaagtgcattttcataaaaaggggttgtcaggaaaaggtgtcatatatccattgggtagctttattgtatttaatatttttctttatttttattcaaactgtattttaagaaattcatcaaaatatgctaggaattttgtttttcttttttttttttttttttgctgcttctcactcatgtgaaatcctcagccacatcactttctggttttcctgctcttgtaaaaaatgttggttgggttggttagagtcttgtcgcttctaacagctaataaaaatgtccacaccgaaaaatccatccaaaggccaactttttgtatcaattttgtgtttacgttttaggaaatttaagttcagttattttgtgttttaggaagatggtaggaaatagaacactgtgtcatagtaccatttttcttagtacactatatataaattaggtggatatacaaattgaatcacatctagaataaagctatagccaacttccacttcctcagcaatcacagcaatatgttataaactctcccgcatgtggtattaaatactctattttgagtatctctgtgattgcaacttttctttagatctgaagaagacatttaaatttccaattgctggcttcacttaaaattggttttcatttatcctgatctgcatgcctgatcctatgcaactaccatgctgacatagaactctttttctagtcttgattgcttttacatatggttcactagctcttgccaacaagcctttcttaaaacactcaattttctcctacttattctgttgtgttttgttttgtttgggtttgttcagggagagagggtctcattctgtctcccagg

SEQ ID NO: 673493 - DNA, 453 bp, Homo sapiens
gagacggagtctcgctctgtcgcccaggctggagtgcagtggtgcgatctcagatcactgcaagctccgcctcctaggttcagaccattctcctgcctcagcttcccaagtagctgggactacaggcgcccgccactgcgcccrgctaattttttgcatttttagtagagacagggtttcaccgtgttagccaggatggtctcgatctcctgatctgcccgcctcagcctcccaaagtgctgggattacaggcatgagccaccgcgcccggcccaggcacttaatttttgtgtttgacttagtaacttaagtgcaaactattacgggagcagatggagtcaattggccttcatgtgattgtcagtgggaaattggtccaagcagagggaatactggttcaggaaactggtttgggaaggttaggcaaacgggaagtgctatggtggagagaaa

SEQ ID NO: 673494 - DNA, 618 bp, Homo sapiens
caattgtacctgcccctcacttgcctggcacctagcataggaacatagtacacactcaattaatatttataaaacgaatgaatgaatctcattattttttcattatacagacaagaaaacagattcaaagagaacatgctatttgttcaatataattcagtgagtaaaaacagaactaggaggctgggcgtgatggtcatgcctgtaatcccagtgctttgggagggcgaggtaggagggctgcttgaggctagcagtttgagaccagcctgggcaacatacaagaccttatctttaaaaacaacaacaaaaaaaacagaactaggaaatgaacccaactttctgtgttctttccattaatyttatcctctgaaattaaagtaaaacccaaatatgtaactccttttttctgctattgtataagctgttctcaaagactctagaatttctcttttcacgttttgttactctgagtttaatggcaacaaggttttccaccctagtttccaataaagctttaggaatgtaattgccatgtagaacactctatccaacacaggaaagaaagactcctaaaaattcctaatcttccaattagattatttttactttgtgctg

SEQ ID NO: 673495 - DNA, 640 bp, Homo sapiens
gatagagatcaaggaaagacggggtccagatgaaagcaaggaaagaaaacagagtctgaccatctcagaaaataagccgcgattgccgggcgtggtggctcacgcctgtaatcccagcactttgggaggctgaggcgggcggatcacaaggtcaggagatcgagaccatcctggctaacacaggtgaaaccccgtttccactaaaaatacaaaaaattagccgggcgtggtagtgggcgcaaaaaattagccgggcgtggtggtgggcacctgtagtcccagctactcaggaggctgaggcagaatggcgtgaacctgggaggcagagcttgcagtgagccgagatcacgccactgcattccagcctgggcgacagagcgagatctgtcaamcaaaaaaaaaaaaaaaaaaaaagtaagccccgatagttttaaccaccacacaaatacaacaaaaaaagagagcgatcaggttgtgaaattggaaatgctttcccaaatcctacctcctcctgaaagtttaagaaaattatttcatatttttttaaatgagcaaaaaaataccaagattaaatctcatacaaaattactgtcaggaaaaaaagagaagaaactgaaaaacatccctacagacaatgcca

SEQ ID NO: 673496 - DNA, 556 bp, Homo sapiens
taagttatggaactgggactggacttgtaccggtccatttcccacacccagtatgatgctgttatttgactagttttaatgcgagtggaagtaataagtttctgttgccaggattttctatacattggtgctgaaatgggataaaacttctccccgcccccaccgatagtttgctttgtcacccaggttggagtgcagtggtacgatccggctgactgcaacctccacctcccggattcaagcgattctcctgcctcagcttcctgggtagctgggattacaggtgcctgccatcatgcccggctaatttttgtatttttgatagagatggagtttcaccatgtaggccacgctggtctcgaactcttgacctcaagtgatccacctgccttggcctcccgaagtgctgggattataggagtaagccactgtgccaggccaagtcatgcagtagttatgatatgtaaaatttcaaatgacatagctgagaattacggtttattttcacattttctaatcacagaacrtaaagccgaatgttaaatgttgtaagcca

SEQ ID NO: 673497 - DNA, 547 bp, Homo sapiens
  misc_feature 66, 67: n = A,T,C or G
ccaggaggttgagactataatgagccgagatcatgccactggtctccagcctgagtaacaagcagnnatcatgcctcagaaaaaagaaaaagaaaaaactgatgctaataaaagacaaacttgttttctcactggagtcttatcttaccatgccatctcccttcaggaaaagggctgcagggaaaccaaaactgcagacaaaaatgtaggctcaactcttaagggtggtatgtaggaggaccaaatggaagatatcttgccacaaaccacagacttagggaggatcatggaaatgatatttaaggtaataagaaaccatgagggagtcatttaactgatgctttgccagattaatggcaatttaaactattttgggatcaagaactgaagtattatactgtacggacatttccagagatgcccaaatgaggtgtgtacctactgattctgtgcaaaaaaattatgagggaatgtcagagaattcatactgaatatgaaagaacytaacatattcaaccattcgggaaaagtccttggaatctggtca

SEQ ID NO: 673498 - DNA, 624 bp, Homo sapiens
attttagagtcatcttaatgtgattttagagtctaaataagcaacagaagaaacaaaagcaatgcagaaccataaaagtaagggaccccaatacttatctatttaaaccctaatattctgcagatgataaaacagaagcacaaagaactgacttgtatatgttaaggtcagggtaataggaaaggaacactggtagcatcaagtaccatgagcactcaggagacatttggatcatcgagggatattaaagccaggtccagtctccagaaatggctaagataggaacaayaatgaaactactcaggtagctgtatatgtaaggagttacagcacaaacaggagaggtgttttgtaaagaagtaaacttgggcagattcttacaacaagcttccatcctcaacatacttccaaagttagaaaaacgtggctattttaaaactcgtgagcatctccttctagaattagtacatgtacaacagaacagtaattttctctctatatcagttaatggcatcatcataaaatcagcttcccaaagtaacatggtaagagctgtcttgtattctccacctcacatgctcattgatcatctctcagggtaagagatgcggaaacaattcagca

SEQ ID NO: 673499 - DNA, 598 bp, Homo sapiens
tgaaaatcaagagaaaacctatttgttacgtgaaataactccaaaactcaagtaaatcctctaacagattattaatgtctgctttgctcttctctcatatttatctctttctttttattaatatgaaaaaatgttcattttctatactttttaaraacaatttattctcaatagataagagctttgaatctatgtctgccatcccagatatcattatataacaaatatttaggcagtatagatttaaaaaatcagcattctatgcttgttgtggtgattggtcaggtcaaaacaatatataattaccaagagacagatacaagactttttttcaaagctacattaaataaaaaccagcgagtactgggtatgatcacacacacacacacacacacacacacacacacacacacacacaagttgaattttatgtcattcatgtaaaactgcactttggggtttatgtttgtattgcctgtaaaaattcctttcatgtagcagcttcttccattgcagcagtcattccaaggtttatttaattttgctatgaacattgtctggaaacatacatttgaagtcatcaatatagggtccaatg

SEQ ID NO: 673500 - DNA, 598 bp, Homo sapiens
tgaaaatcaagagaaaacctatttgttacgtgaaataactccaaaactcaagtaaatcctctaacagattattaatgtctgctttgctcttctctcatatttatctctttctttttattaatatgaaaaaatgttcattttctatactttttaaaaacaatttattctcaatagataagagctttraatctatgtctgccatcccagatatcattatataacaaatatttaggcagtatagatttaaaaaatcagcattctatgcttgttgtggtgattggtcaggtcaaaacaatatataattaccaagagacagatacaagactttttttcaaagctacattaaataaaaaccagcgagtactgggtatgatcacacacacacacacacacacacacacacacacacacacacacaagttgaattttatgtcattcatgtaaaactgcactttggggtttatgtttgtattgcctgtaaaaattcctttcatgtagcagcttcttccattgcagcagtcattccaaggtttatttaattttgctatgaacattgtctggaaacatacatttgaagtcatcaatatagggtccaatg

SEQ ID NO: 673501 - DNA, 598 bp, Homo sapiens
tgaaaatcaagagaaaacctatttgttacgtgaaataactccaaaactcaagtaaatcctctaacagattattaatgtctgctttgctcttctctcatatttatctctttctttttattaatatgaaaaaatgttcattttctatactttttaaaaacaatttattctcaatagataagagctttgaatctatgtctgccatcccagatatcattatataacaaatatttaggcagtatagatttaaaaaatcagcattctatgcttgttgtggtgattggtcaggtcaaaacaatatataattaccaagagacagatacaagactttttttcaaagctacattaaataaraaccagcgagtactgggtatgatcacacacacacacacacacacacacacacacacacacacacacaagttgaattttatgtcattcatgtaaaactgcactttggggtttatgtttgtattgcctgtaaaaattcctttcatgtagcagcttcttccattgcagcagtcattccaaggtttatttaattttgctatgaacattgtctggaaacatacatttgaagtcatcaatatagggtccaatg

SEQ ID NO: 673502 - DNA, 598 bp, Homo sapiens
tgaaaatcaagagaaaacctatttgttacgtgaaataactccaaaactcaagtaaatcctctaacagattattaatgtctgctttgctcttctctcatatttatctctttctttttattaatatgaaaaaatgttcattttctatactttttaaaaacaatttattctcaatagataagagctttgaatctatgtctgccatcccagatatcattatataacaaatatttaggcagtatagatttaaaaaatcagcattctatgcttgttgtggtgattggtcaggtcaaaacaatatataattaccaagagacagatacaagactttttttcaaagctacattaaataaaaaccagcgagtactgggtatgatcacacacacacacacacacacacacacacacacacacacacacaagttgaattttatgtcattcatgtaaaactgcactttggggtttatgtttgtattgcctgtaaaaattcctttcatgtagcagcttcttccattgcagcagtmattccaaggtttatttaattttgctatgaacattgtctggaaacatacatttgaagtcatcaatatagggtccaatg

SEQ ID NO: 673503 - DNA, 641 bp, Homo sapiens
taacatttaccagattttaaaatgtttgagtagcttcaggtctttttaatttaaggcaataattatcagtgaagtagatcaatgattttcttgacaaactgcataactttttgcatgttacagcttgattctgcttatatttttgtcaaatttttrcaaatgtaatacaattatacaaggaattgacagtattgaagacattttcaaacttaattcatgtaagaatagctaacaagagcctccctctgttgagggcttactcttcgccaggcattgtacttcacagtcttagtcttatttaattattagaaacaaacctataggtggctattactatctccatcttacagatgaggagactgcaatttagaaaaatcaagtgatttacccattgtcacaaaattagtaaggggtggagaaaagaattgaatcccgactttctgtcatacttttgccccaacctaagaattaggaaaaaccgtatctttaactgctaaatttacatttcagaaagttgagtgatgtcctgactcatttaaaaaggaaaataaaatttatttaaaagtataatcgcactgaactttactgcctcccacaaaataattttatccccaaactctcatcattcagtccaatggtaa

SEQ ID NO: 673504 - DNA, 1271 bp, Homo sapiens
ctggccagaggtgaggaccttcttcattcagatagggtctgtggtttttggttatcaacaattttactgcttgtcttccactcattcagggcacctgcctgcctgcatttgtgacctctaagacagacccaaggaaaacaaggcagttggcctgaagccttccaaagaatacacttttgtaaagcaaaattgatgaagcatgatgaattatgctgggaataaacattttagattttcagagaagccaatatatgttgtgtaagaaatatcataaatattgaggaccccaaygagaaacctctaaaattaaggtacatttcccacttctaaaaagatttggctaagttgactcattttgcttttttcccacaatactattgttatgagtatggagagtttatcttaccgcaaggtccactttaatgtaatatgaataatgtgtgttctctgagattgtccatagagttgtaaggaataagttttaatgtcctactaggctctattctcagctttgtcactaggacttccagcaaggagaagtgggttctagctgtaaaacttttagtttcctctctaacatcttaggggagtggttctcaaatgttagcaggatcagaatcacctggagggcttgttaaatcacagattgctgggtcctgtccccagagcttctgatttcatatgtctggagtggggactggcaatttgcactcctaacaggttcccaggtaatgctgatgtcactggtctgggaaagatggtttgagaaacaatgacctcagacaggtaactttacccacctggcttcagcgtttgcatttgtaaacacaagagtggtattttatccacttggaaagttttttccctcctaccgaaacataatgaagaattacctttaaaatggttttattatttccttgtaccagatccttattgcaattgtggttcctttctttgtggacatgcaacgtgttgaaactaacctgaggtgtctttattggaaagaatacattgttgttgtcttagcatttctacaacatattttttcctgagaaaaaaagcattctcatttttttctttctctgtacttcttttgaaagtggagggaattgagaaagcttgccctccaaataaccccagagtcctgggagatgctgttgaaaaaccatttgctacgtgatgacctttgttttagcatcttattagaatcaggtggattgaaagaaacatgtttcctggccactcgaataaaagttgtgggtttccaggtt

SEQ ID NO: 673505 - DNA, 667 bp, Homo sapiens
attactcaattagtgaatgaataagttattgaattttataggttagaaaatataaaaakaaaataaaagaataaaccccccaccccaccccacccaaaaaaggatgaaggggaaaagtacaaagaattgccccacctacctttggttcccactgcaactgatcatttgttgattgtgtcatatcagaagcaggctataaaagggagctccttcccagtgttgaacacccccaaccccagttacatagattcgatgctcactgtttggctgtttttacacagagggatttttagattgacatttttgatgactgaagactcgacaaattaatattcatcaaatctcagaagatcattggagtagacagtcaaacttatctttgctcacattttaatcatgacaaggactgacattatgaatgactcactgagtgctcttaaactggtgatgcacccgggtaacactctgggaacaggctttctccatgagagtaaagggtgtcattatgaactgggctactaggtggccacagcgagtatctcagttcctcgcaaccactcctctggtataggcttttcagtttgggaatttctcaactatcttctgcagtgtccatgattgccatttatttgcatcagctgaaaatatttttattatttccttctga

SEQ ID NO: 673506 - DNA, 617 bp, Homo sapiens
ttgaaatttttaaaatgtgaatttattctaccgataccatatgaagtcaccaaaggtttcctgtatgatgaaaaatcccagcatttaaggatatttgaacgcaataacaggattacaaattmgtccagaaaaaaaaaaaaaaagagattcatgaagatttggtgctgacatttttatttttaggttttaaatttttttctgctccatcaattatttcatatgtgtagttttgtgattgcttgagagataaatggttgacggctgttattacactgccccagttctgacatttccaccccgactgcctggcttcaatgatcttttgggtatgacattttagctttggccttggtccccatcagcctctgaggcagaatccaggcaatgatctttccgggacctgactaaatgcctagttaactacaaggttactcacactggagcaggtcacaaggaaacattcaggcccccagatgtctttcttcttgtctcaaacaaagcagatgtcttagattttgcaaggctgtgtgtaatctactttggctttgcaattaagaaactatatatttaccatgtctttggacattttgtacttgttgtttcaaggggaatatgtc

SEQ ID NO: 673507 - DNA, 617 bp, Homo sapiens
ttgaaatttttaaaatgtgaatttattctaccgataccatatgaagtcaccaaaggtttcctgtatgatgaaaaatcccagcatttaaggatatttgaacgcaataacaggattacaaattagtccagaaaaaaaaaaaaaaagagattcatgaagatttggtgctgacatttttatttttaggttttaaatttttttctgctccatcaattatttcatatgtgtagttttgtgattgcttgagagataaatggttgacggctgttattacactgccccagttctgacatttccaccccgactgcctggcttcaatgatcttttgggtatgacattttagctttggccttggtccccatcagcctctgaggcagaatccaggcaatgatctttccgggacctgactaaatgcctagttaactacaaggttactcacactggagcaggtcacaaggaaacattcaggcccccagatgtctttcttcttgtctcaaacaaagcagatgtcttagattttgcaaggctgtgtgtaatctactttggctttgcaattaagaaactatatatttaccatgtctttggacattttgtacttgtygtttcaaggggaatatgtc

SEQ ID NO: 673508 - DNA, 652 bp, Homo sapiens
tgactttgagcataagccagccatgaagctgccatgaaaagtcatctgggaatataatttcatctacacccaagttttccaggtttctcttgtctcagcactccctgtttccagcacctttgccttatgtcttctatccaatttttccactgtctccaaatttcctttattgccaattatcacacacacacacacacacacacacacacatgcaaccctacatttttcccccgccgtggtagtccctgaacaaaagtctcatacataaaagctacccaggaggaaaatcaactgacttcaggccacatgtatgtcatcaactatttcaaaatgatctctaacatccacttgttgtgtttccaccaaayttgtcatttgtccgtttgtcccatgtttgaacttctgaaaatatttccctttcacaatgatggctgaaggattaataagcctccttagaaatctgtcaattaaatctgtatcttaagaacaatgtgatacttataaaccatagactgcataattttagtcttattttttaatattttatcagctatggaagaagagtgagctaaattccttaacgtaatcagctcttttgttaaaagcttccaactaactacgatgtttttttaaaaaaagaaagagtttagaa

SEQ ID NO: 673509 - DNA, 1625 bp, Homo sapiens
ttgcacaccatatataaaacaattgctgctattttggctcatattgttgtggaatacaagtatttctaagacccagagatttcccccccatggcatttcccccttttaacattcaatgcagttgcccaaattcagactctcattatcattaatattgattgttggttagttttctggaacacgtttgtatagtgacatcagctratttcaagtcctgttgggagcatctttgtcaatagtaaagttggatatcgtaagacggctgtccttgaatatcttcattagcagtttttcagtttttaattagtatctaaattagatttcttattgttacaactcaccacagatgtgccatacttgtgcagaaacttaccaggtatttttacctttggtttccaaagcacataatactaaatggtgtgattgctgctttggatgctgggtttttttttttttaaaaaaaagtcatgtaaaagggtacatggcatataaaactgtggagtagataaatgtggctagagtccatcactaagacaatcgaatatctttggttggcagtgcattcattctatagaatattttaaatcagattgcatttataggggactaaaccctttaaaaactattaagtatatgttaattggtctctaagacattgtattgtgcttttagtaaactgttaatttggaccaggaaagcactgtattgatatcagtcatttttatgcatttcacaatcattgagatattccttaatccttttgcattttgtctatataataggaatgctatccttgctttatcatccagtgttcctttcaacattgactgggtacccaataaaagtgaaactcacattaaaaaaacacagatgaaaaatacgaagaaataattattattgaatgtcatcaaagcatatttcttgatttttttttttactctgtccttacttggacccatactgaagtgaacattaaaatctcagcggtaaaaagataaatgtgaaatggataataaaggatgccactaaaaatggttatttccttcctcctaatagcttacaatctatcagaatacatatgagtacataaataactatcaaacaagaaaaaatattaaaatattttctttctacaaatactggaatttgtaccatcatctgatttctaatcagatttatttgcccttcttctttacagaggatgaaacagagagataattcattgaggcttaagagttgttgtccacttaaacgcataaatatatgttattaactagcccatttcttcattgatttcaacaaatatttattgagtctattttatgtatcaaattctgtttttagtgctgagaacaaagagatgagtaagaccaggccctttatttgaggatgtcacagaccactggagagaaataatagttactcagatacaatatgagaaatttcgtaatatagatatgtgcagggcactatcagaacacagaacagggaggagaaaataagcctcatgagtcaagaccctctattacaaagaatatgaaagatttccaggtagaaaaaaacagtgaagttatctctgttttgtttttattgttctttttcaattatatatttcaaattttcaa

SEQ ID NO: 673510 - DNA, 1625 bp, Homo sapiens
ttgcacaccatatataaaacaattgctgctattttggctcatattgttgtggaatacaagtatttctaagacccagagatttcccccccatggcatttcccccttttaacattcaatgcagttgcccaaattcagactctcattatcattaatattgattgttggttagttttctggaacacgtttgtatagtgacatcagctgatttcaagtcctgttgggagcatctttgtcaatagtaaagttggatatcgtaagacggctgtccttgaatatcttcattagcagtttttcagtttttaattagtatctaaattagatttcttattgttacaactcaccacagatgtgccatacttgtgcagaaacttaccaggtatttttacctttggtttccaaagcacataatactaaatggtgtgattgctgctttggatgctgggtttttttttttttaaaaaaaagtcatgtaaaagggtacatggcatataaaactgtggagtagataaatgtggctagagtccatcactaagacaatcgaatatctttggttggcagtgcattcattctatagaatattttaaatcagattgcatttataggggactaaaccctttaaaaactattaagtatatgttaattggtctctaagacattgtattgtgcttttagtaaactgttaatttggaccaggaaagcactgtattgatatcagtcatttttatgcatttcacaatcattgagatattccttaatccttttgcattttgtctatataataggaatgctatccttgctttatcatccagtgttcctttcaacattgactgggtacccaataaaagtgaaactcacattaaaaaaacacagatgaaaaatacgaagaaataattattattgaatgtcatcaaagcatatttcttgatttttttttttactctgtccttacttggacccatactgaagtgaacattaaaatctcagcggtaaaaagataaatgtgaaatggataataaaggatgccactaaaaatggttatttccttcctcctaatagcttacaatctatcagaatacatatgagtacataaataactatcaaacaagaaaaaatattaaaatattttctttctacaaatactggaatttgtaccatcatctgatttctaatcagatttatttgcccttcttctttacagaggatgaaacagagagataattcattgaggcttaagagttgttgtccacttaaacgcataaatatatgttattaactagcccatttcttcattgatttcaacaaatatttattgagtctattttatgtatcaaattctgtttttrgtgctgagaacaaagagatgagtaagaccaggccctttatttgaggatgtcacagaccactggagagaaataatagttactcagatacaatatgagaaatttcgtaatatagatatgtgcagggcactatcagaacacagaacagggaggagaaaataagcctcatgagtcaagaccctctattacaaagaatatgaaagatttccaggtagaaaaaaacagtgaagttatctctgttttgtttttattgttctttttcaattatatatttcaaattttcaa

SEQ ID NO: 673511 - DNA, 634 bp, Homo sapiens
tactcatatgtgtcaatctaagataacaacagagagaattcctatcgatagaaatgaattcaattgggaataaacagggggttaaaactcatgttatgacaaatcataggcatgtctggagaggctgggataaggaaaaactcttaaaggcaaaaagaagaagtacacataagctgctttgaaacaaacgtcattggccacagggacctgytgcaggagctgatgttaactcattggtgaaaacagccattgctaggcaactgttcttgtgagggtggctgatctgaaaagttgcagtcttgaggaactttttgcaatgagccagatgagcagagtgtgtaggaacttcttgggcagaaacaactgcttcactcgtcttatttatttatttatttatttttgagactgggtcttgctctgttgcccaggctggagtgcaatgggcaattataattcttgggctcaggcaatcctcctgcctcagcctcccaactagcatgaactacagacatgcgtcacaacaccaggctaatttttaaattttttttgtagagatggactctccttacgttgcccagtctggtgcctcacttatctttgtatcctcgctgctcaggtctatgtcatagaacta

SEQ ID NO: 673512 - DNA, 634 bp, Homo sapiens
tactcatatgtgtcaatctaagataacaacagagagaattcctatcgatagaaatgaattcaattgggaataaacagggggttaaaactcatgttatgacaaatcataggcatgtctggagaggctgggataaggaaaaactcttaaaggcaaaaagaagaagtacacataagctgctttgaaacaaacgtcattggccacagggacctgctgcaggagctgatgttaactcattggtgaaaacagccattgctaggcaactgttcttgtgagggtggctgatctgaaaagttgcagtcttgaggaactttttgcaatgagccagatgagcagagtgtgtaggaacttcttgggcagaaacaactgcttcactcrtcttatttatttatttatttatttttgagactgggtcttgctctgttgcccaggctggagtgcaatgggcaattataattcttgggctcaggcaatcctcctgcctcagcctcccaactagcatgaactacagacatgcgtcacaacaccaggctaatttttaaattttttttgtagagatggactctccttacgttgcccagtctggtgcctcacttatctttgtatcctcgctgctcaggtctatgtcatagaacta

SEQ ID NO: 673513 - DNA, 663 bp, Homo sapiens
ccggagggggactttttaccttatattcatctacgcttttttcatttgttaaatgacaaacataaattactcttaaaatttaagatattttaaatatggagctagtayacactctgtggccagatgaatttatgaaaactcattgccgagggcatttacagtatctttcccagaatcctctccttcacctttcacacagttaactactgcctacttggcctaatcagcttggattgggtggagttccctgaccgtctagttggccccacaaggcaccagaaccttctggcatctatccatcaaagtgtgctagagaacaaatagaccagggaggcaggctccagacagccagtgctgtggccaatcagtctcacctaaccaggagcatctgcagctgcattccttaagacttgaaagctgctgtcagggctcctgaggtatatgtgatgtttcagaaggtgttcccagtatgaataagcccaggtctggagagttccatattttaaactgggatgccctttcatcacccaacaatccttcattgaatacatactgacaacctagtatactgtattatgcctgatacctatttagcatgtcatgaaaaagaaaacaaattgctgacaatgctgagaaaaggaaagaggaaagctcttcaatggc

SEQ ID NO: 673514 - DNA, 1145 bp, Homo sapiens
tgaccgctgtctttataagagaaaggagagagagatttggacacagggttacaaaggagacacacagagagaagatgaccatgggaagatagaggcagagttggagtgatactgccacaagccagggaatgccaggagccatgagaagccgtaaatggcaagggggattctcccctagagccttcagagggagcatggccctgcagataccttgatttcaaacttctggccttcagaactgtgagagaacagatttctgttgtttcgagccaccaagtttgtgttacttggctatggcagccccaagaaacccatatggccttccttgctctcctttgacaatctgccaggtattttaaatttttctaaggatgyatttgaatgctccaggctgagccactaagaattgaggactttcatatcaagatggcaaggcatatttatactgtataaccctcactgctctagactcttaaagaaagattgaacataaaaatggaaagtcacgaaaagacataggtaatctaaaatacgaaatagttggctgtctgaattacaaatggaacaaaactccaaaatgatgacaggtattaagaccccagcttgctggtctccagtggtggcttctgacctccagaacaatgagataataaatttgtgttgtgtgcaccacgatgtttgtggtatttgttacaacagcatttggttaggaatatatccagcacttaagcaaaggaggcataacacaactgcccttgaactccaactgggactggggttcatggtgccaaggaggcagagacacaggacataggtacaatctgagcacagctgcttccaggctctgaagatgaatttgccatgagccccacagcttctgaagcagtaactccccatggctaccagcatacccagacttagaaaggcagcctggaagggcccagataggtcaactgcaaaatccacggacacagagtgaaaggcacagaagagagaaagagagagaaaattgccaaaacataaaagaaatacctacacaaaatatacatccaaacccaaattctaaaaccacatgaagacatttaatgctaagaagagagcctacacatccagtactctaaataggaattccctcctggtgacat

SEQ ID NO: 673515 - DNA, 1145 bp, Homo sapiens
tgaccgctgtctttataagagaaaggagagagagatttggacacagggttacaaaggagacacacagagagaagatgaccatgggaagatagaggcagagttggagtgatactgccacaagccagggaatgccaggagccatgagaagccgtaaatggcaagggggattctcccctagagccttcagagggagcatggccctgcagataccttgatttcaaacttctggccttcagaactgtgagagaacagatttctgttgtttcgagccaccaagtttgtgttacttggctatggcagccccaagaaacccatatggccttccttgctctcctttgacaatctgccaggtattttaaatttttctaaggatgtatttgaatgctccaggctgagccactaagaattgaggactttcatatcaagatggcaaggcatatttatactgyataaccctcactgctctagactcttaaagaaagattgaacataaaaatggaaagtcacgaaaagacataggtaatctaaaatacgaaatagttggctgtctgaattacaaatggaacaaaactccaaaatgatgacaggtattaagaccccagcttgctggtctccagtggtggcttctgacctccagaacaatgagataataaatttgtgttgtgtgcaccacgatgtttgtggtatttgttacaacagcatttggttaggaatatatccagcacttaagcaaaggaggcataacacaactgcccttgaactccaactgggactggggttcatggtgccaaggaggcagagacacaggacataggtacaatctgagcacagctgcttccaggctctgaagatgaatttgccatgagccccacagcttctgaagcagtaactccccatggctaccagcatacccagacttagaaaggcagcctggaagggcccagataggtcaactgcaaaatccacggacacagagtgaaaggcacagaagagagaaagagagagaaaattgccaaaacataaaagaaatacctacacaaaatatacatccaaacccaaattctaaaaccacatgaagacatttaatgctaagaagagagcctacacatccagtactctaaataggaattccctcctggtgacat

SEQ ID NO: 673516 - DNA, 612 bp, Homo sapiens
gatcctcctttagcaacactgatgccaccacatgaaagtgatataaaccagtagtgaaactttctgaactttcatacttgatctgtgacctcgataaaccatgagatggtacagagcacagtggtaattcatagaatatctactagctatgtaggacttgagaatatgatagatgaggtgcgtggagggaggtcatcatgtccctttcaactttattaaaatgtggtttaagtagttttaatcatattctgtaggcagttgctgagcaggcaacatgaagaaccagctgagttctccaacttgcaaagagtatttacattttgctctatggatggaaccacctggggtacaattaygtgagtagtgccgctttgaagttgcatcagggaattatcggtgcgacacaattggctctatacttgaaacacaaattaaaaaaacatactttctacaaaatgtttataaaggtgggaggataatccttctgaaatacaaaacaaaagaatatgataaaggagcataatcatggctcaaagtgcttattcggcccctagtgtgagtaattctaaggctttacaggggaaatgttatttttaactggaaaaggttagc

SEQ ID NO: 673517 - DNA, 613 bp, Homo sapiens
atgtcattaatttttattctatagtttcttctaatcttgcagagtttaacttttcacactaacaggtttaacctatctgaaatatatccttacatattgtgtgaagggggatttaatttttcccaaaatgatgtatttctctgcctgatttttaaaaatacttaattatcataatctaagctccttactcagttccattgatctgttgtttttgtttcggtgccaaatgcacactgttttaattactgtgacattgtgagtttccctggtttgatttcactattcttaagctactttcagactactactgasacaatcattttttgatgtaaaatataccagcactttgtcaagttctcaagaaatgcaataggatttcatctgggattgcatccaattttccattaaccagagtctccacattaaccgacatgttatcttaatagtgtgcagttttcctcactggaaaaccactggaatattcctaatggaatatttttgcatttattaaggtatcttttatgtcctttaagaaagtttcaggatgtacttcataaacattttatacaatgttagtttagttctcaatattttcaaattaattttcggactg

SEQ ID NO: 673518 - DNA, 663 bp, Homo sapiens
gatagaagagttgtattttaaattatttggatgatattaaaaatacctaatacataaatatgcttacaataaccagaaatattcataagacaattctaccattcatacaaaaaactttgaattatttcacgaaataaaattgagcaaatctgccactttattgctttcctgtcaaagctggctgtatgtaagagctggtrgagacagtgaatttgcacgttcaggaaagcgatttgaaggaattaatctttacaagcatttctaatctgtgaatttaaactatttctctatttttggaaagatgggtcacagattttgtagatatattcattttacttagacaaatgagtgcttgtcaatagggtagtgtttgtgtgtgtgtatatatacacataaaatataccacctatacattgtgttagaatttcaatttgaaacaccatgtatataatctttaagaatgtaactctcttaaacttcagtcccttttatagcagactaagtgctgctaatatacaggaagcaagaggcagcagggtcttcacctcaaaaagaccttcggattgcacccctttggagctcatcagagcccattcaggtttatcctgaggggtcagttgatgcactgcctgatactacttcttcccgggggctgaatgcaca

SEQ ID NO: 673519 - DNA, 620 bp, Homo sapiens
tgagacaacaacgggataaaaatgaaagcaaagcaaatcaaattagatctctgtattttataaggagcaaaaaatagattcttatacatcatttataaatacatgccagctrcattttaatactaaatgggagaaagaaatatttaaatttattttttaaaactaaccacaaaaatgcacgctgtatacagaatgtcctatgatgaaaagcacggttttaataacttttaacagttgcaaaaccagcaacttacatgacaatttaataaaaatctctaaatagtctctcatgctggagtaaactccttacattacaatagctttggtggctttcttcaactaaagagatatctaaatttgatatgaacctcaggtttcaacatccatgatttgctagtatataattcattgacacctcaggtaacaatttaaaagacttgacccatttatgcctggtgttccattattggaacactaagcatgtgggagttatttatatcctactgctcaaggtcatcgccaaggtctgattgcaaaaattcacaaaattccaacctcaggcataatgggttaacccaattatttaagttcttaggtatggaaaatcatggcttatgtag

SEQ ID NO: 673520 - DNA, 620 bp, Homo sapiens
tgagacaacaacgggataaaaatgaaagcaaagcaaatcaaattagatctctgtattttataaggagcaaaaaatagattcttatacatcatttataaatacatgccagctgcattttaatactaaatgggagaaagaaatatttaaatttattttttaaaactaaccacaaaaatgcacgctgtatacagaatgtcctatgatgaaaagcacggttttaataacttttaacagttgcaaaaccagcaacttacatgacaatttaataaaaatctctaaatagtctctcatgctggagtaaactccttacattacaatagctttggtggctttcttcaactaaagagatayctaaatttgatatgaacctcaggtttcaacatccatgatttgctagtatataattcattgacacctcaggtaacaatttaaaagacttgacccatttatgcctggtgttccattattggaacactaagcatgtgggagttatttatatcctactgctcaaggtcatcgccaaggtctgattgcaaaaattcacaaaattccaacctcaggcataatgggttaacccaattatttaagttcttaggtatggaaaatcatggcttatgtag

SEQ ID NO: 673521 - DNA, 942 bp, Homo sapiens
tgagcttggtggcatacacctgtaatcccagctactcaggaggccgagttacaagaatcgcttgaacctgggaggtggaggctgcagtaagccaagatcacgccactgcactccagctggggtgacagagtgagactctctcttaaataaataaattcactttaatttgtaaacaaataattcaggcgaaaacaaaactgayatagtataagtgaaagaggcaggggacaaagagctctggccaccaagttcccatccccaccagcacccattggggggagggcttcctggagcgctaaaaatcacatgctccttttacaaagaaggaagcagaggcctcagaaattaaaattatttggttaagctcacccagttaaagatttcaggtctctggattcctaatgaaatgccatgttatagtgtctcccagatcacatggttgtgaatagcttcagctaccacctccaagctggccacttcccttcctgcccagcaatctctctttccacacactgcctctctaagcatgctgcgctacttgtggcttttcaaatccaccttgctctttctgaaacatttcacctttgcacatggttttctccctgtttgaaaggctttccttttggatgccctttcctaatcaatccacctttctaatttctatagatccatcaattcttactttagtcagcactgcctctattaacccttcagagatacaatctatcctacctcacccctcactgccactcttgaccccttctggcccccactcccaagataggttggggttaagcctactcaaactatgcttatccttatcttttatcatatttgcttatattaattgttctttgggagacagagttttatctacattcctacctttgttccccagcattttgaatctattgagtatcataatcagaatttgtagaagaa

SEQ ID NO: 673522 - DNA, 733 bp, Homo sapiens
tgcatgttgacaatggttaataaagtttcgtgtcaataatagattatgatttttaaaaatattttaaactttgcattccaaccaaaggcatttacataaaaaagtagaagtataatcatctctgcaatccatacataattatataatggtcatgaccatgccatagatgatatagatggattcacatgccaatctgaacttagaaaacaagtttttttgcagaaaggaaaaggtgttcaagatgatactgctcagagctggcagatgactttgaatctactccccaaatttaatatctcagatgttgatgtgggaggagcacagtgaaatttttagcactcagcaactttgaagaatgaagttctcagaatgattaakcattctaattaatatatatggcatagatatcatgtgtggaataccagttttttagagaactgaaatagtatagaatctatttttaagtaatatcaaataatttagtatttatttgattactcagaagacacatgaggttctcaaagaatctgcataaataaattttagttattattctgaagatttagaaaaacatagtttaaaaaatattttcagtaattaaaaggtgtcattttttatggtataatgcagtccacagctcacattctaacagtgtctcttacttgctaaatattataagcaatttactctctctaagcatctttcattatcattacaatcattaactctttca

SEQ ID NO: 673523 - DNA, 1393 bp, Homo sapiens
  misc_feature 883: n = A,T,C or G
gcaagatgagttgagccattatctttgaggaagctgtaatcaaatattttaaatttgcctaaatcatcatttggactgattaatagtcgtgataagaaataagaaagatgtctgaaaccattatctaattagttaaatgatagggaaaaacagtaaaaaatgaaagaaaaatacccaagactaaccaaattccacatgctttatataagagaaatgctataatctctgttccatgtgggatattgtcgcctccttaaatggttggrgaccatgcctatgtgagtgattctgtacagccaggtagagtgctaaaagatacttcccactcgatttctactacggtatctgtatctaacctttaagtccgtattagtttcctagggataccataacaaagcatcacaaatggagtggtttaaaacaacatttattctttcacagttcctgagttctaaaagtccaaaattaaggtgttgtcagggtcatgctccctctgaaatctgtagggagaatccttctttgcttcttcctagctaccggtagtgccagcaacctttggtattatttggcttgcagctgcattactctaatcttcattttcattatcacacggcattctccctgtgtctgtcttcacataatcatctccaagggatgttagccatagtggattagcgaccactcttactccagtgtgaccttatcttaactaagtatatctgcgatgaccctgttttcaaataacatcatattccgaggtactgggagttaaaattcagcataccattttttctgaagacaatttcaacccagtaacaagtcctaaatggcatatttgtaatttcagataaacattctagtgaacaaatgttctcactgttanacatgtatttttaaaagactgtataatttccagaatgccaggttctttctttctattttctcccacttattacagcattatcaatctatgtgttctcatttcttctattcataagtcataaatgaccttgataaagcttgggtgattttcccaaggtaaaatttggggcaggggttatgagtagaaatttcactccacattgtatattgtttggacactttgctggccatattcattgtcctatttttattattaccaaaacactagaaggtactataataatgaagttacgcagatgtgaaaaacatgacttagttgtagtaaattaacttgtcctggagagatatatggataagtcagtatccaaactgtaccatacaaccttttagttttctggaaccagggagaaagtgggaagagaaatagaagaaattacatatgacatgatagatagttcctcttcaacaaagtttgctgtgctacaatctaccaaagctgataatttaatgg

SEQ ID NO: 673524 - DNA, 1359 bp, Homo sapiens
cacatatgtatatttcactggtatgtaaccatatatatctagattaatctagacaaaagctcatactgatgtctcaatctgcaatacattacctcatagttcattccacccttctcctctctcttatctgtaaccttccactcaaatagtgagagacatatctcatgcaatctataatcaatttactgaattgttcatattctgtatgtatgtatagctgtaacagacttacaacatgtaaatctttggtaagctactttatcaagtatattacagtgcctatgtacaatttcttttgtttctggccttttagactcctctcatttataaagttacttaagtcagcaccttttccctctacctccttcagtgaggttgtgtcataaatttgtaatatagttagatcattttgtcagtcaacattccatcctgggattacactaagctcctgcatatatttttaaattccatactttaagtttcactgcttgtaatgaaagtcctataggttctaaaaagtccatctttgctgaccagtattgtctcaataaaatagattatattgtgtgccgtggtgagagagaattacctgggttgaagatatggttgaagatttgaagttagttttgaaagtttagaatagctgccacgtgaataaggaaatggggctgagaaagaaatgtcaaacaaagaaaaattgctgagttgcttcagtgcttaagcaaagctgctatcataaatgtataatagatataattaaagagaacatgaggtttttccagcagcacttctcagcccagggaaaagtgagatgattagattggtcaacattttggcattgccaaggagaggtcatcggcagaaggtgaaggggactgaatagatggaaagtagtagrgagaaagtcactgagatgattaaccatgagattggtccaggatagcctgggagggaaatgaagtcagataggttctatattctaatagattaagatgagctcagtgattagaggtcagggatgactgtaacagcaggtttggctaagtggaagagctgagattacaggaaactggctggttaaggggcaatttcagacttcaggaatatgatttatcaatatagagtttcaacccactgaatttaacgagaaggaaaaagcatatgtttgcataataaggagacaaatagaacatctcagtcttcataacaattgaatttgggaaacataaacttgatttatcactcatttagttttgattgtaactacattgttaagcctaaaagctgtaaatcaacttcttgaatagatttgttagtgactgcaattaattaaagctaattcaaatatactttataaaa

SEQ ID NO: 673525 - DNA, 1359 bp, Homo sapiens
cacatatgtatatttcactggtatgtaaccatatatatctagattaatctagacaaaagctcatactgatgtctcaatctgcaatacattacctcatagttcattccacccttctcctctctcttatctgtaaccttccactcaaatagtgagagacatatctcatgcaatctataatcaatttactgaattgttcatattctgtatgtatgtatagctgtaacagacttacaacatgtaaatctttggtaagctactttatcaagtatattacagtgcctatgtacaatttcttttgtttctggccttttagactcctctcatttataaagttacttaagtcagcaccttttccctctacctccttcagtgaggttgtgtcataaatttgtaatatagttagatcattttgtcagtcaacattccatcctgggattacactaagctcctgcatatatttttaaattccatactttaagtttcactgcttgtaatgaaagtcctataggttctaaaaagtccatctttgctgaccagtattgtctcaataaaatagattatattgtgtgccgtggtgagagagaattacctgggttgaagatatggttgaagatttgaagttagttttgaaagtttagaatagctgccacgtgaataaggaaatggggctgagaaagaaatgtcaaacaaagaaaaattgctgagttgcttcagtgcttaagcaaagctgctatcataaatgtataatagatataattaaagagaacatgaggtttttccagcagcacttctcagcccagggaaaagtgagatgattagattggtcaacattttggcattgccaaggagaggtcatcggcagaaggtgaaggggactgaatagatggaaagtagtagggagaaagtcactgagatgattaaccatgagattggtccaggatagcctgggagggaaatgaagtcagataggttctatattctaatagattaagaygagctcagtgattagaggtcagggatgactgtaacagcaggtttggctaagtggaagagctgagattacaggaaactggctggttaaggggcaatttcagacttcaggaatatgatttatcaatatagagtttcaacccactgaatttaacgagaaggaaaaagcatatgtttgcataataaggagacaaatagaacatctcagtcttcataacaattgaatttgggaaacataaacttgatttatcactcatttagttttgattgtaactacattgttaagcctaaaagctgtaaatcaacttcttgaatagatttgttagtgactgcaattaattaaagctaattcaaatatactttataaaa

SEQ ID NO: 673526 - DNA, 1359 bp, Homo sapiens
cacatatgtatatttcactggtatgtaaccatatatatctagattaatctagacaaaagctcatactgatgtctcaatctgcaatacattacctcatagttcattccacccttctcctctctcttatctgtaaccttccactcaaatagtgagagacatatctcatgcaatctataatcaatttactgaattgttcatattctgtatgtatgtatagctgtaacagacttacaacatgtaaatctttggtaagctactttatcaagtatattacagtgcctatgtacaatttcttttgtttctggccttttagactcctctcatttataaagttacttaagtcagcaccttttccctctacctccttcagtgaggttgtgtcataaatttgtaatatagttagatcattttgtcagtcaacattccatcctgggattacactaagctcctgcatatatttttaaattccatactttaagtttcactgcttgtaatgaaagtcctataggttctaaaaagtccatctttgctgaccagtattgtctcaataaaatagattatattgtgtgccgtggtgagagagaattacctgggttgaagatatggttgaagatttgaagttagttttgaaagtttagaatagctgccacgtgaataaggaaatggggctgagaaagaaatgtcaaacaaagaaaaattgctgagttgcttcagtgcttaagcaaagctgctatcataaatgtataatagatataattaaagagaacatgaggtttttccagcagcacttctcagcccagggaaaagtgagatgattagattggtcaacattttggcattgccaaggagaggtcatcggcagaaggtgaaggggactgaatagatggaaagtagtagggagaaagtcactgagatgattaaccatgagattggtccaggatagcctgggagggaaatgaagtcagataggttctatattctaatagattaagatgagctcagtgattagaggtcagggatgactgtaacagcaggtttggctaagtggaagagctgagattacaggaaactggctggttaaggggcaatttcagacttcaggaatatgatttatcaatatagagtttcaacccactgaatttaacgagaaggaaaaakcatatgtttgcataataaggagacaaatagaacatctcagtcttcataacaattgaatttgggaaacataaacttgatttatcactcatttagttttgattgtaactacattgttaagcctaaaagctgtaaatcaacttcttgaatagatttgttagtgactgcaattaattaaagctaattcaaatatactttataaaa

SEQ ID NO: 673527 - DNA, 1482 bp, Homo sapiens
aaaaaaaataaatgaatgctttctgcaatccaaaactgaaaaattaagtaagttatttaaaagaaacctcttctaaaaaaacttttattttcaatcaaatagctcagtgagcttctcaaaaaatatgtatcatctctatctgtgattttggttgcatttttgcctttgtatgcatgaaattctatttacttacattaagttaagcttcttgaatttgtctctttactaccatttttggctgaaaataatacacagacttcatttattcttggatgattataataatgataagcagatagcaattaaaaatgaaagaaaacattctcaattattattactaatgcactgaatttacattacattacaaataacatttttacaagatttacttgacctttaaggttttgtgcattctagttattacctttaaaataaccaagaatatctgaaattttggcaatgctatatggtacaatatgaaactgttggcaaaactgcctacatatagttccgtagagtcggagcttttccatatggaagatgacttcataaaacctccccagactaaatatgcactttgtctcatattttcagattctagattaatttgcacaattagtaatcatactgactgaaaggactataatttaccataaagagtttaccaactgaaatatattaattcttctatatgtaagcatatcacaatgttaacaacatcagtgattaaataaataattgatggtgctagcgttagtaggaatgatttgctccttcattacagtatgtatctgttagctcaagacatttggtttaagaccaacgttttcacagacaaaaaacgttaaaatagagcatgaaatgattacaatgagtagcacaatgagacaaatcagagggttgcacaatgatgtcatctctagagtgaaattatttcttggtgttttacttaaactgtagaaatgacgttattaattaagaattctgcaagaacttttccctaattttaaaagcagagtattaccttataagaaatatgtagcttaaaagactgctaactaaagcacatttgaatagccaataccataaaagatttgtgagaactgtgtttccatttttaaggaaccactcctgaaaataggtttcaagtttgcagccatcaagaagaaatgtgtttgggcatatagaaagcgctctttacagatctgttatactcgggaactttgaaggttatttgaatggctgaagaaaactgtcaaacagattatttaaactttacaagttataaattcaggagaaatcagtggatatagggtacaactctaggggaccattgatactttttgagtttgctgattcaatttggtggtttcatattgtgtgtttaagaagtgttggtccagaaaatcaggccaatgataaaataatttaacacttaatgattgcctttcaatatgtatttaraatgtatacaactctaaa

SEQ ID NO: 673528 - DNA, 1501 bp, Homo sapiens
taaattttataacaggtaaataattcagcaatcaataaagcaaacattgatgaaaaagataaatttcactggttgtgtttgaatggggactagttagtcaaattaaacacattgggatagcaacaatggtaaagacttcagacagggtaaatatcctacarggtaaactggctcctaacaaagatcagtttcagcttatattttgtttcctcaaagagtccttccctgactacctaatcataccatctatcctcactcaagttactcagtagcctaacagtctttctcactttggatttatatattcattaatttgtcggttttatctatctctattagactgtagtttcatgacggtcatcttattatattcccagcaccaacctgccatggtgcttgccattcaggaggcattcatatatcatagtgagtaaatcagtggaagaacaaacgctacccaattccattcagctattcaacacacacttgtttaagtgccagtgccttgggtcatgtttttcccttgaggtagaatgctccttaacctattcattgtgcctattcaaaactcactaactcaaatgcctcctccagactctcccacctgatatgttattttctttgagttcccatagtacctgaactataactccttctattgttactcctattcactattatatttatctttatcatttatctccctgcacactccctgggatcaaagtccatctaagtcaattttttatcccccttctctattccccaccccacaagtgtcacgtatgcttttttgtccagcaagaccagtcttctccatttagttgtcatttcaacagctacattacagccttgtaattggaagtttgtgacaatgatttcttttctacttactgaattactggccaagactgtaatgacagttatgatattagaatcacattttagacaataggggagagaaatagtaagctaaaatttgctttagtcatcatgtataatgtccatcaattcaaaattaacttttcaaactaaaaggaaagaaagctacctcaatattttaacttgaatcataattctagagttttcagagcttttaatcaaatgcttaatataaactgacctaccaacgtttaaagtggttacattccatcttcattcctatgcttaccctcaacctctaccagtccatccagaaaactcccccaaaatttatcccaaaatattaaatccaatttttctcatgttattttccacttaagagtctgcaggggcttccactcaacatgtgtgatgataatggcaaaagtccttgccctctaatatcctacaggacggtaagttcggtggttctcaaaccatttctaatggcaaagctcttggaagttacagtgctttctgtgcaatactgtgacaaatcttaattcaattccagtagaaaatctagaataattaataaaaagcaaagctatattaaagataagtaatataaatatcacaa

SEQ ID NO: 673529 - DNA, 744 bp, Homo sapiens
tggctgattcacaagggagaaaaaaaaataatgctaccaccagattatttgtaatccttcttcaaaaaaaaaaaggagctaagcttgaaatgtcaagtttcctatgtgttttagttagatctggagtctcatttatctcatgagagacacaaattaattagctgtttccctgaagtactacggggaggccagtgggctaatgaaatgataaaccaagcacctagcacagtctctaacaaataggttgttccaaaacatgttgaataaaaaataaatgaatgagagtagcagagattgctacctgtccattaaggtccactttctcccgttttccagggcactaagctggactatattccccagtcccctgtgcatggccaaaaaacgcaatgggactgacttctaaccagtgtgagtggaaataaggtatagcacagccaggactgtcctctcacaagctgctatgggttctttcccccatcctgaggaatggaatggtgatgtccagaatttgggaaggcccataytgaaacagcagtgcctgcatccccgaataactgtggatcagaggactctctccttcccccgcacatgaaaccacccaggatttttatgaacttgagaaataaattctattttgttgagccaatgtatgttgggcccatttgtcgcatctatttctcctccccaaattaatgaaatgggtatttatagaactcaagcctcaaactacactgtggtact

SEQ ID NO: 673530 - DNA, 975 bp, Homo sapiens
cctctgtgaattctttcctgactgctcctgcccaaaagggaaaagtcatccaccttctgtgctcccataattcttggttcttaccataaaacacatcaacaccatcatcatcaccattaacattaatatttattgtgcacttactaggaacgttaaacaagaaagtgttctaatttggatcagggaataataattattattccatttaattaaatagttcgatagaaactgttaaaggagaagtgcagcacagcaaatcattttctgcctgatacatggattatgggtgtcttcaaatttatagtggagtccctcaacataatcctggggctacatgactttactcagcaattagcactctattgttaccttgtaacagaatagtaagtgtttatttcatattttttttctttcacaagcagtaggaaatagctttcatgtagggtagggcacccgtctatgcttcaataaatggcaaagtcagagaagaaagaaaaatatatcaaccattaagctgaaagagaacagcagagggttttctctttttttttttcttctttcaactgatgtatgtcaggctggtataaaaggggcaagttgaacatctggaccaaaaccaaggcatttaacattttcaagcaattcagaggcatggatgatttatgatgytattcttagatttttaccatatgtcctctaactttatgaaatgtggacaggcacataaacccggtaacacttcatgatataaaaatagtgactgaagactgatcaagaaaaaagaaaagaagaatcattttagtttagagatgttcagaatagggcaggcccctgggaagatgagttgctttttgctccagccactgtgcctttcagaaattggcaggagctttgtgtttaggcaatcacctgcctcctccattgccagagaaagcagagtaggatctgtaacttaactgatgcacccaggcggcc

SEQ ID NO: 673531 - DNA, 650 bp, Homo sapiens
atggagacaaattaatttgagatattattatatagagacagtatggtatagttgttaagaccccaggctctggaagcagcccaaatacatttaaatcttgtttctaccacttaccactttgtaaccagaagaaataatttcaactttccttgcctccatttactcatctgtaaaaagagaataataatattgcctatctcatagtgttgtgaaaattcaaattagtgaatacatttaacacccttggaaacaatgcctggcacatagaaagtgttagatrctatttttattattatacctatttttttaggactgatatgtagcatgaaactactgagacagttaattctctttccgaaaaggactttatcttgattaatagcaacatcattttttttgacccagtcggccaagccataactaaccatgaacaattgtaaacatgtcccagcaggtaacgctcctattaaaacatcagtcacattgtagggaattgtctttttgactccagcataattagcatcatagtattagatgctaatagttgcagtagttgctagtaaatgctaatagatgcaatagttctacaactgaagagtcattatatttcttacgaagcctagtgtaagaatcacaataatatatgttga

SEQ ID NO: 673532 - DNA, 1216 bp, Homo sapiens
gagggcaaagtaatggaagaatacaggatggtattcttcgggtgttggaaatgctccatttcttgacagaggtggtgttcactttacatcagtggttcccaaactttttggcaccagagaccggatttgtggaagacaacttttccacagatcaaagaggtaaagagatagttttgggggatgaaactgttctacctcagatcatcaggctttagattctcatagggagcacacaacctagacccttcgcaggcacagttcacagtaagttcatgctcctatgagaatctaatctgatctgacaggagccagagctcaggcagtaatactcctggccctccgctcacctcctgttgtgcagccaggttcctaacgggccatggatcagtactggtctgcaacctgagggttggggacccctgttttacgtaactcacttaactgtatacttctgatcttagctcaagatgctaatattttgccaaccacaaaatgttgtttcaattggtccaaaaatgtgagtgatctggttcaataggatttttaatgtcttaattatatcaccaaagaagctattttcatatggtttcacatgatcaccttatacctgaagtattttcttcaatttcctattcactatatcccatttcccctacaaatacacagcattccaaatatttctatttatcctaatttcctcccaactgtaataaacatacctatttcttccacaagtggttttgctgtcctggattttcttggtgccagaagagcagttaacatgttcagcccctcaaaatgctggccaggggtttctttgggcaggcgaatggtaaaaattccttaaagataaatttgttttatgcttagattaaaatatttaaaaagctgggcacaatagcttacaccagtaatcccaatactctggcagtctgaggcaggaggatcattttagcccaggagttcaagaccagcctgggcaacataccaagaccccatctctacagaaaataataataaaatcwttttaattaaaagaaaaaaataaataaataaaatagtcaaagacttcacaaatatatctgagaaatacatgtcttggtaaaacataattctattttacaggctctaaaactatgccctcatagatttggtgaatacaagtcaagatagaaaaaggttcttaacaagggtttttcagaagctgtcatttcta

SEQ ID NO: 673533 - DNA, 1216 bp, Homo sapiens
gagggcaaagtaatggaagaatacaggatggtattcttcgggtgttggaaatgctccatttcttgacagaggtggtgttcactttacatcagtggttcccaaactttttggcaccagagaccggatttgtggaagacaacttttccacagatcaaagaggtaaagagatagttttgggggatgaaactgttctacctcagatcatcaggctttagattctcatagggagcacacaacctagacccttcgcaggcacagttcacagtaagttcatgctcctatgagaatctaatctgatctgacaggagccagagctcaggcagtaatactcctggccctccgctcacctcctgttgtgcagccaggttcctaacgggccatggatcagtactggtctgcaacctgagggttggggacccctgttttacgtaactcacttaactgtatacttctgatcttagctcaagatgctaatattttgccaaccacaaaatgttgtttcaattggtccaaaaatgtgagtgatctggttcaataggatttttaatgtcttaattatatcaccaaagaagctattttcatatggtttcacatgatcaccttatacctgaagtattttcttcaatttcctattcactatatcccatttcccctacaaatacacagcattccaaatatttctatttatcctaatttcctcccaactgtaataaacatacctatttcttccacaagtggttttgctgtcctggattttcttggtgccagaagagcagttaacatgttcagcccctcaaaatgctggccaggggtttctttgggcaggcgaatggtaaaaattccttaaagataaatttgttttatgcttagattaaaatatttaaaaagctgggcacaatagcttacaccagtaatcccaatactctggcagtctgaggcaggaggatcattttagcccaggagttcaagaccagcctgggcaacataccaagaccccatctctacagaaaataataataaaatcattttaattaaaagaaaaaaataaataaataaaatagtcaaagacttcacaaatatatctgagaaatacatgtcttggtaaaacrtaattctattttacaggctctaaaactatgccctcatagatttggtgaatacaagtcaagatagaaaaaggttcttaacaagggtttttcagaagctgtcatttcta

SEQ ID NO: 673534 - DNA, 635 bp, Homo sapiens
atattcatctgtagtggacatttgttctttttatttggtcgtctagtatctaatctcctttcttatttttggagaatccctcattagatgtagtcttggtgggagacaggatctccattacaccattcttggatgccaggacatgagcacatgaattaggcatgggcaatcagatactgtggcccaggactctggctctcaagtaagtgactaaaaggataaatagatagctagaatttattcacggcagtaggaagcaatgtattatgttaatgacggtagtgctcttaggtaccccagctgactgttcttccttaaagatattgtttcttcttctttgtcatccagagcttcctgggttactgtggcagagactgccarttctcccacatccattcccctttttttcctttttgaagtagacttcgtacaccccaaatattagctgggtatttagctacctagctagtggctagatttttctggctcccttgcagctagaggtgaccatgtgactatttttggccagttggctgtaagtggaagtaatgtgaataacttttaggtcccatctttaaaaggaagtggtttactctttacttcctcttcttctttccgtgggctggagcctggat

SEQ ID NO: 673535 - DNA, 628 bp, Homo sapiens
aaatgggaaaaacaggactcagaggacaaattagggcttgtctgggatcctctgcaccagaagctcccagatattcacatcagctacacaattaaggtgtctgggctcttaaatccccctgtctctgtaacttggtcccttgctactcaaagtgtgaccctgggaccagcagccttggcatcacctggaaactagttagaaatgcrgagtctcagatttcacccctgcactattgaatcaagatctttattttagcaaggttcctagtaataggctagccgcttggcagcagacttgccaccactatggcaagaggctactcctgatcgaattctggggagataaatgaaccaaagtcatagggcataaagaatagttaggcattgcagacaaactgtcctactgcatatgttaagtgtgttttgagctaaattaaacctgtgtccattctgagtgttcagttccccagagagtctacactgtgtacccattggtaccatcttgatgcacatctcttgaaattaagcatccttgtttattggatgactagaaatgtcaactttcattagcaaagtgaatgtttggtcctttataaacactgttgtcacaccaaaaaaatgaatgtagt

SEQ ID NO: 673536 - DNA, 628 bp, Homo sapiens
aaatgggaaaaacaggactcagaggacaaattagggcttgtctgggatcctctgcaccagaagctcccagatattcacatcagctacacaattaaggtgtctgggctcttaaatccccctgtctctgtaacttggtcccttgctactcaaagtgtgaccctgggaccagcagccttggcatcacctggaaactagttagaaatgcgkagtctcagatttcacccctgcactattgaatcaagatctttattttagcaaggttcctagtaataggctagccgcttggcagcagacttgccaccactatggcaagaggctactcctgatcgaattctggggagataaatgaaccaaagtcatagggcataaagaatagttaggcattgcagacaaactgtcctactgcatatgttaagtgtgttttgagctaaattaaacctgtgtccattctgagtgttcagttccccagagagtctacactgtgtacccattggtaccatcttgatgcacatctcttgaaattaagcatccttgtttattggatgactagaaatgtcaactttcattagcaaagtgaatgtttggtcctttataaacactgttgtcacaccaaaaaaatgaatgtagt

SEQ ID NO: 673537 - DNA, 628 bp, Homo sapiens
aaatgggaaaaacaggactcagaggacaaattagggcttgtctgggatcctctgcaccagaagctcccagatattcacatcagctacacaattaaggtgtctgggctcttaaatccccctgtctctgtaacttggtcccttgctactcaaagtgtgaccctgggaccagcagccttggcatcacctggaaactagttagaaatgcggagtctcagatttcacccctgcactattgaatcaagatctttattttagcaaggttcctagtaataggctagccrcttggcagcagacttgccaccactatggcaagaggctactcctgatcgaattctggggagataaatgaaccaaagtcatagggcataaagaatagttaggcattgcagacaaactgtcctactgcatatgttaagtgtgttttgagctaaattaaacctgtgtccattctgagtgttcagttccccagagagtctacactgtgtacccattggtaccatcttgatgcacatctcttgaaattaagcatccttgtttattggatgactagaaatgtcaactttcattagcaaagtgaatgtttggtcctttataaacactgttgtcacaccaaaaaaatgaatgtagt

SEQ ID NO: 673538 - DNA, 628 bp, Homo sapiens
aaatgggaaaaacaggactcagaggacaaattagggcttgtctgggatcctctgcaccagaagctcccagatattcacatcagctacacaattaaggtgtctgggctcttaaatccccctgtctctgtaacttggtcccttgctactcaaagtgtgaccctgggaccagcagccttggcatcacctggaaactagttagaaatgcggagtctcagatttcacccctgcactattgaatcaagatctttattttagcaaggttcctagtaataggctagccgcttggcagcagacttgccaccactatggcaagaggctactyctgatcgaattctggggagataaatgaaccaaagtcatagggcataaagaatagttaggcattgcagacaaactgtcctactgcatatgttaagtgtgttttgagctaaattaaacctgtgtccattctgagtgttcagttccccagagagtctacactgtgtacccattggtaccatcttgatgcacatctcttgaaattaagcatccttgtttattggatgactagaaatgtcaactttcattagcaaagtgaatgtttggtcctttataaacactgttgtcacaccaaaaaaatgaatgtagt

SEQ ID NO: 673539 - DNA, 1406 bp, Homo sapiens
ttaaatatacacacatcccgtgtctagaatgattctataatttatcatacaaactgtgacacttcataactatcctaggataattggcataaactgagattattctgaataaactgagaaacatcatcatacaatccattacatcaatccaatctaaatatatctgagaaaaattagcatatagatcaatataataacatatgtgtgtatgtactatgcagtggttaggttcagtgaaatgaatccacattcagcaacattaacaactattttttaagtgaagtactcaactctattaatctatcatccatgactatcaggtgtgtgtgtatatatatatttgttgtgtacatacatatatatatatgttgagtatgagttgggtgtggactagaaaggcaaaaatgtaatatatattgaaggagagaagataaattaatccagggaaaagattggagttgaattagtgaatattaactccttcagaaaataaactttagatagaattgtttcctcagagttgtaatatatatgtaaccaaaacatccactttttctgtctaacactgctaatcgatgcattacaacatataatgttgaaatgaactctcaatctttacaatattttgttaaaaatcgttaacaggtgtctcagtgtttgagaaatcctagatgcaacattattgtggatatcttttggctacaaagtcacctctgggtatttattggtaaattgattgcagaacacttttattttcttggctgcttcagggaaaaaaaaagacaatgatggcaagaagtaatcctacaagcataaaaggttttgattcattgggattttcaatcttctgtcatcaacatacataagaagtgaatacattctttacaaatttgtgcttttgatggtaaacctagtcagaaaagaatgcagatttaaactaacagttaacaaagactaaaaaaaattaaatttgtgttcacaaatgttacaaattattgatgagattctttgtyggtcttgaaaacaccaaattcaaataaaaattttaccgggattagaaggtcaaatttgaaacatcagtcaaggtttcacacatgcacaaatccacatttatatattcagggagttgactgtataaacttcatgactctcaccttgctgtacagattgtttttccctaaactgaatagtgttttgatgtcatggaaacaaagtcactataaaggagaaactaatgtgtttggatttgaatgtagacaatgaacaaagcaatagaatcgagtttgccaacggggcctgcttcaacaaatctgttccatatgtccgttttccatttgctttccctcccttgcatattaacacaaaaagcactaaaaatggttatttactctaacaacttcctgatt

SEQ ID NO: 673540 - DNA, 663 bp, Homo sapiens
atatacattaaaatcttaatttgcttacattgaatattttaaaatagcattttactcttatatttttctaatttaatttttttaacttttattttagtttcaggagtatgtgttcaggtttgtatacaggtaaattgtatgttgagtgggtttggtgtagagattattttatcacccagataaaagtatagtaataaataggtagctttttgatatcctcctcccatcctccaccctcaagtaggccccagtgtttattgttccttcctttgtatccatgtgtactcaatgtttagctgccacttagaagtgagaacatgtgatatttggatttctgttcttttgttacttcacttaggataatggcctctagctgcatctacgttgctgtakagaacataatctcattttttattatgactgtgtagtattccgtggtatatatgaaccattttctcattatatagtctaccattgatgggcatttaggttgattccatgcctttgctattgcaaatagcactgcaatgaacctatgtgtgcatgtgtctttatagtagaacaatttatattccttggagtatacacccaataatgggattgctggctcgaaaggtagttcttttctaagttctttgagaaattgacaaacggctttcttca

SEQ ID NO: 673541 - DNA, 893 bp, Homo sapiens
gcacaagcccttatcaagctctcactggggaccatacttcttactaggtaagaagtatgattcgctaggggaccctagaggaataatatacagcatgattcacactctgcacaaatagtagtagaagtagaaagaaaacaattattggaactaatacaagaggaattgacttggattagaaaggcttcttgaaaactcataaaaccctgatgagtccaatcataagtcttgctttaaaaaagatatactatttttttaaggagggtctctatggttaacaggaaaatattatatactacaaaacagctacaatacrggctttttaaggttctctacaaggaaatgacaagtgcataaagtgatacactaactactttgattgggtcatcatacaacacagatatgtttcaaaacatcaaatggtaccccataatgatatacaattacaatgtatcaattaaaatgtagaaataaaaatttaaaaagaaatacatcctaaatcgaaagacagaaaacaatgttttttgtttgtttttgaaataagactattaaaagttgtactaccactacatatgtggaatctacctatatactacatataattcaggaagtataccacatgattaagatacaactgaaaaacatctctttcaacgcttgtgaaagtcaatacacctggtgcttatgagatgcatgttctagcctcccaacaacattaaaattacctttctttacctgcacatatttcttactgatttttttttttttttttttttttttttgagacagaatcacgctcagtcgccaggctggagtgcagtggcgtgatcttggctcttggctcactgcaacctccgcctcccgggttcaagtgatttcccctgcctcagcct

SEQ ID NO: 673542 - DNA, 663 bp, Homo sapiens
ttttcactagtccactgactcccctagttgaagcaaatcacttttccctcactgtatcaagctcctcctatttctatggcaaccttcttgtttttttttttggttggtttttttttttttttttttttgagacggagtctcgctctgtcgcccaggctggagtgcagtggcgcgatcccggctcactgcaagctccgcctcccgggttcacgccattcttctgtctcagcctcccgagtagctgggactactgggactacaggcgcccgccaccacgcccggctaatttttttgtatttttagtagagacagggtttcaccgtgttagccaggatggtcttgatctccttaccttgtgatctgcccgcctcagccttccaaagtgctgggattacaggcrtgagccaccgtgcccagcctctatggcaaccttctaaagatgcactattgcttctgtatcattccatgttttgctgctgagctgcaggatgactttaacggtctgggagagggaatgcgatgtggcagaggtttagattggaagtgcactaccacgttgacagagtaaactgttgaggtctacgtaaaggtaaccttgatcagactgccacaaaaagtatgaaggcatatttcaattcattctcatttgtcggtgaattcata

SEQ ID NO: 673543 - DNA, 2179 bp, Homo sapiens
atgacagaaaccaagtatgtaaagaatgacctaccgccaacaaggaatcctgatagacacaagcacctgtggggaaaaacaaaacaagaattaaaagggatgcataataaaccaataggcactgccccagcaagcttgctgctaaaactgcatctatatgcatcataaccaggaaaatgagcttcttccaaaatcttaaaagcttcagcattcttcccctggggaaataaccccatacaccaaaacaacattccttggacacacatgaggaaaagcatcattaaaacttatgacttgaattttaagataaatgtgtttataaygacatgctataaatacagtaaatatttttcttggtgataagtcagcaaagcctccataatccagtcccatttacttatccaggcttccctgccactgtttgcttacactaagcctccagtccaacccaagaggccaacttagaatcctgtaatatatttacatgtctcaatgcctttgctcattttcattttctacaggagatgtactttgtctagtcaagctctttgaacttgatcccatctcctttgtgaaacttctgcccaccagattatgctcctctgagctcctagcattttgtgcctacatcctccatttgtgaatttattcttgtgtatttcctttctaaggatgttgaaatgttgtatttaccccactacattatatatatgtgtgtgtgtactacatatagagagaatatatacactatatataccattacatatatactattacatatatagtatatacatatatatacacatgtatacccactatatactatataccatatatagtacatatatagtatatacacatatatacacatatatatacatatatacccactatatactatatatagtatatatataatatatagtataaatagcatatgtagtatttagtgtgtgtgtgtgtatgtatatatatatatatatatatatatacactataaaactgaaatcttaacttaaaaaaaatatagacacattcccaaccaatttttgagctgcacaacaggtcttgatttaacttagaaagagatgggcagtgtgctgtcacctactctctcagaaactgagtctgcaaaacacatttgaacagtatatacacaccaaggtgaagcatatcttaacaatgctccacacagttggtttttaaagagagaaggacattattttaccacagtgcttacctctaatggatcatttatgaagtcccaataatattaacttctcaggaaagaattggtctaccttctcctccagtaatggaattaagaacaatctttaaaaaaactgagatgactatttacacttaggtttgaatcaaagatctctgtgggcaaatttattgaaataatttttatgtccctgatattctttttttttttcttggtatacaacaattttattggtgttttaatataattcacccagaatatgaaggcatcacattagctaagtacaaggcatatgtataagcaaaaattataaatttatgacacccttgtgcctttctcctaatgacatttccaacttttaatggtttgtatttcttcctctgcagacataggataattaatataaatatgtcatttttgagtttatattttacacaaacttattattttactttaaaatagtttctagccatggcattaatatttattaaaatttctgtacatatgaaaaaaggaatttatttctatacatatgaaagaaaggaatagggagtgtctataaatgaatgattttatagacactccctatttttttattttatttatttatttatttttattattattctttaagttctaataagaataacttgagataaaaccttgaaggaaaattcttcttaattgactactttttccttaagaaatcttgttccaagacttagtagttcagtctatggtatgttataagaaaggaaatatatatatgtgtacatatgtatgtgtgtgatgtgtgtactaaaataattctatatatctcaaataaatacatatgaacacaattcactttctaaattacttatatggacatatttaattatttctggtgtttagaaaatttagaataaagatcatcatcacttaggtacaatttaacaaaatttaaacttt

SEQ ID NO: 673544 - DNA, 603 bp, Homo sapiens
tctaacgtttccatactgagaaacccaccaaggaccaaatgttcccatatccctactgctattcaactgacattaatgatttctagatatgcaaactccttgagcgcaggaggtttttttggctttggttttgatgtctgtacccacctactggacataacctgacacagaacctctcaataaaggcttgcagaatraaagaattaggttacttttttccagccaagttcttctcttcccaacattgagttattgagtttcaagcatagagtctctcagtgaaacaactctgcagcccagagtgcaactaccctaactcacccataaataaaacatattgtctatcaaatgagcctcttcaatgtaacctgttaaatagcatttataggaaaaacccgggattcagcgtttgtgggaatggctaaaatcacatggagagtgatgggacacagactaaagctcaattctcttaacctccaattcaatgatgtttccctatcccaaggcaactgtcttatctactgtaacttcacaggacttccatatgtcaacagaactcaagatatttctccagaaaaagccatggtagagtttctgtgattc

SEQ ID NO: 673545 - DNA, 1376 bp, Homo sapiens
ttaattactcagctttgccatcattcttcttggtacacagccattctttgatgtattacaagagaatcactgcctagggttcaggactagtgatttttttcatcctgtgaactrtaatccaacattagtaagattattatttcctctcagagaagtgaaagcaatgaagaaattagctctgtgtttggggtggggcatagaagaaagagaaagagagatgtactgtcaggattttcttcaagtacagtctctaaaaggttactaaagagggtgtgaaactcttttacatcttcagtaaagttagtcaagaagaaataggcttaagttgcaacatgagaggtttttggaaaaactagaaaacatttatgaatgagaaagaattcctgtagggaattgtatactttgttttcctaaagtattcttaaaaacaggaaagggactcattttgttttatgtaagtatttaaatgtgatacaaattagaagtggaaggatagactggaaaacctacctagctccttctattctaggatgatgaggataaataataataatgacaatagctaccatttactgagtgcttttgatacgccagcttctaggccaagtacttcacttacctatctcacttaatttctaaaacaagtctgtgaggtaagaaatgctaacatttctacttcacagatgaagaaacccattgttccagagtcttaaggtaacagattcagatctggatttgtttgacgattagatccatactttgaattatcatgcagatatgcgtcttctatgatgccataatttacatcttcaaaaccaacatttttacttaggaccactatgccttcccttttctaggtaatatttgtggtaattgttggttttgggtgatttactctttgccctgcactgcattatctagtcagagggaggtgatgcctcattattcctaggacttgatctagttttccaatgttataaaaatgtagccccacggcagtttgccaactcttaacagccttaggggatgctggcaggcccctaagcagagcacacgagcatctatttcctcataagaactgtcttcaccttcgtcttttaaaattgtggctgcttcaggtagggtaaaaagttactggttaaaagaaaaattttcttcccacagtatgacagttaattttatatgtcaacttcactgggcgaagggatgcctctatagctaataaaacattatgtctgggtgtgtctgtgaggatgtttctaagagattagcattggaataaatgaatggagtaaaaaagatcaccctttccagtgtgggtcaacatcatccaatccattgagggcctgaataggacaaaaaggtggggaggggca

SEQ ID NO: 673546 - DNA, 1376 bp, Homo sapiens
ttaattactcagctttgccatcattcttcttggtacacagccattctttgatgtattacaagagaatcactgcctagggttcaggactagtgatttttttcatcctgtgaactataatccaacattagtaagattattatttcctctcagagaagtgaaagcaatgaagaaattagctctgtgtttggggtggggcatagaagaaagagaaagagagatgtactgtcaggattttcttcaagtacagtctctaaaaggttactaaagagggtgtgaaactcttttacmtcttcagtaaagttagtcaagaagaaataggcttaagttgcaacatgagaggtttttggaaaaactagaaaacatttatgaatgagaaagaattcctgtagggaattgtatactttgttttcctaaagtattcttaaaaacaggaaagggactcattttgttttatgtaagtatttaaatgtgatacaaattagaagtggaaggatagactggaaaacctacctagctccttctattctaggatgatgaggataaataataataatgacaatagctaccatttactgagtgcttttgatacgccagcttctaggccaagtacttcacttacctatctcacttaatttctaaaacaagtctgtgaggtaagaaatgctaacatttctacttcacagatgaagaaacccattgttccagagtcttaaggtaacagattcagatctggatttgtttgacgattagatccatactttgaattatcatgcagatatgcgtcttctatgatgccataatttacatcttcaaaaccaacatttttacttaggaccactatgccttcccttttctaggtaatatttgtggtaattgttggttttgggtgatttactctttgccctgcactgcattatctagtcagagggaggtgatgcctcattattcctaggacttgatctagttttccaatgttataaaaatgtagccccacggcagtttgccaactcttaacagccttaggggatgctggcaggcccctaagcagagcacacgagcatctatttcctcataagaactgtcttcaccttcgtcttttaaaattgtggctgcttcaggtagggtaaaaagttactggttaaaagaaaaattttcttcccacagtatgacagttaattttatatgtcaacttcactgggcgaagggatgcctctatagctaataaaacattatgtctgggtgtgtctgtgaggatgtttctaagagattagcattggaataaatgaatggagtaaaaaagatcaccctttccagtgtgggtcaacatcatccaatccattgagggcctgaataggacaaaaaggtggggaggggca

SEQ ID NO: 673547 - DNA, 1376 bp, Homo sapiens
ttaattactcagctttgccatcattcttcttggtacacagccattctttgatgtattacaagagaatcactgcctagggttcaggactagtgatttttttcatcctgtgaactataatccaacattagtaagattattatttcctctcagagaagtgaaagcaatgaagaaattagctctgtgtttggggtggggcatagaagaaagagaaagagagatgtactgtcaggattttcttcaagtacagtctctaaaaggttactaaagagggtgtgaaactcttttacatcttcagtaaagttagtcaagaagaaataggcttaagttkcaacatgagaggtttttggaaaaactagaaaacatttatgaatgagaaagaattcctgtagggaattgtatactttgttttcctaaagtattcttaaaaacaggaaagggactcattttgttttatgtaagtatttaaatgtgatacaaattagaagtggaaggatagactggaaaacctacctagctccttctattctaggatgatgaggataaataataataatgacaatagctaccatttactgagtgcttttgatacgccagcttctaggccaagtacttcacttacctatctcacttaatttctaaaacaagtctgtgaggtaagaaatgctaacatttctacttcacagatgaagaaacccattgttccagagtcttaaggtaacagattcagatctggatttgtttgacgattagatccatactttgaattatcatgcagatatgcgtcttctatgatgccataatttacatcttcaaaaccaacatttttacttaggaccactatgccttcccttttctaggtaatatttgtggtaattgttggttttgggtgatttactctttgccctgcactgcattatctagtcagagggaggtgatgcctcattattcctaggacttgatctagttttccaatgttataaaaatgtagccccacggcagtttgccaactcttaacagccttaggggatgctggcaggcccctaagcagagcacacgagcatctatttcctcataagaactgtcttcaccttcgtcttttaaaattgtggctgcttcaggtagggtaaaaagttactggttaaaagaaaaattttcttcccacagtatgacagttaattttatatgtcaacttcactgggcgaagggatgcctctatagctaataaaacattatgtctgggtgtgtctgtgaggatgtttctaagagattagcattggaataaatgaatggagtaaaaaagatcaccctttccagtgtgggtcaacatcatccaatccattgagggcctgaataggacaaaaaggtggggaggggca

SEQ ID NO: 673548 - DNA, 1376 bp, Homo sapiens
ttaattactcagctttgccatcattcttcttggtacacagccattctttgatgtattacaagagaatcactgcctagggttcaggactagtgatttttttcatcctgtgaactataatccaacattagtaagattattatttcctctcagagaagtgaaagcaatgaagaaattagctctgtgtttggggtggggcatagaagaaagagaaagagagatgtactgtcaggattttcttcaagtacagtctctaaaaggttactaaagagggtgtgaaactcttttacatcttcagtaaagttagtcaagaagaaataggcttaagttgcaacatgagaggtttttggaaaaactagaaaacatttatgaatgagaaagaattcctgtagggaattgtatactttgttttcctaaagtattcttaaaaacaggaaagggactcattttgttttatgtaagtatttaaatgtgatacaaattagaagtggaaggatagactggaaaacctacctagctccttctattctaggatgatgaggataaataataataatgacaatagctaccatttactgagtgcttttgatacgccagcttctaggccaagtacttcacttacctatctcacttaatttctaaaacaagtctgtgaggtaagaaatgctaacatttctacttcacagatgaagaaacccattgttccagagtcttaaggtaacagattcagatctggatttgtttgacgattagatccatactttgaattatcatgcagatatgcgtcttctatgatgccataatttacatcttcaaaaccaacatttttacttaggaccactatgccttcccttttctaggtaatatttgtggtaattgttggttttgggtgatttactctttgccctgcactgcaktatctagtcagagggaggtgatgcctcattattcctaggacttgatctagttttccaatgttataaaaatgtagccccacggcagtttgccaactcttaacagccttaggggatgctggcaggcccctaagcagagcacacgagcatctatttcctcataagaactgtcttcaccttcgtcttttaaaattgtggctgcttcaggtagggtaaaaagttactggttaaaagaaaaattttcttcccacagtatgacagttaattttatatgtcaacttcactgggcgaagggatgcctctatagctaataaaacattatgtctgggtgtgtctgtgaggatgtttctaagagattagcattggaataaatgaatggagtaaaaaagatcaccctttccagtgtgggtcaacatcatccaatccattgagggcctgaataggacaaaaaggtggggaggggca

SEQ ID NO: 673549 - DNA, 1376 bp, Homo sapiens
ttaattactcagctttgccatcattcttcttggtacacagccattctttgatgtattacaagagaatcactgcctagggttcaggactagtgatttttttcatcctgtgaactataatccaacattagtaagattattatttcctctcagagaagtgaaagcaatgaagaaattagctctgtgtttggggtggggcatagaagaaagagaaagagagatgtactgtcaggattttcttcaagtacagtctctaaaaggttactaaagagggtgtgaaactcttttacatcttcagtaaagttagtcaagaagaaataggcttaagttgcaacatgagaggtttttggaaaaactagaaaacatttatgaatgagaaagaattcctgtagggaattgtatactttgttttcctaaagtattcttaaaaacaggaaagggactcattttgttttatgtaagtatttaaatgtgatacaaattagaagtggaaggatagactggaaaacctacctagctccttctattctaggatgatgaggataaataataataatgacaatagctaccatttactgagtgcttttgatacgccagcttctaggccaagtacttcacttacctatctcacttaatttctaaaacaagtctgtgaggtaagaaatgctaacatttctacttcacagatgaagaaacccattgttccagagtcttaaggtaacagattcagatctggatttgtttgacgattagatccatactttgaattatcatgcagatatgcgtcttctatgatgccataatttacatcttcaaaaccaacatttttacttaggaccactatgccttcccttttctaggtaatatttgtggtaattgttggttttgggtgatttactctttgccctgcactgcattatctagtcagagggaggtgatgcctcattattcctaggacttgatctagttttccaatgttataaaaatgtagccccacggcagtttgccaactcttaacagccttaggggatgctggcaggcccctaagcagagcacacgagcatctatttcctcataagaactgtcttcaccttcgtcttttaaaattgtggctgcttcaggtagggtaaaaagttactggttaaaagaaaaattttcttcccacagtatgacagttaattttatatgtcaacttcactgggygaagggatgcctctatagctaataaaacattatgtctgggtgtgtctgtgaggatgtttctaagagattagcattggaataaatgaatggagtaaaaaagatcaccctttccagtgtgggtcaacatcatccaatccattgagggcctgaataggacaaaaaggtggggaggggca

SEQ ID NO: 673550 - DNA, 682 bp, Homo sapiens
tcccagacgatgggcggccaggcagagacgctcctcacttcccagacggggtggyggccgggcagaggctgcaatctcagcactttgggaggccaaagcaggcggctgggaggtggaggttgtagcgagccgagatcacgccactccactccagcctgggcaccattgagcactgagtgaacgagactccgtctgcaatcctggcacctcgggaggccgaggctggcagatcacacgcggttaggagctggagaccagcccagccaacacagcgaaaccccgtctccaccaaaaaaatatgaaaaccagtcaggtgtggcggcgcgcgcctgcaatcgcaggcacttggcaggctgaggcaggagaatcaggcagggaggttgcagtgagccgagatggcagcagtacagtccagcttcggctcggcatcagagggagaccgtggaaagagagggagagggagaccgtggggagggggagaggcagaggcagaggcagaggggcagaggggcagaggggcagaggggcagaggcagaggcagaggcagaggcagaggccaattttaatattaaggtcagcaaacaccattaagcgtctagctgtaagaactaaaataacaagggtgagtgattaatgctgtcattgtttttctaatttttattttaatagatctgtcttgga

SEQ ID NO: 673551 - DNA, 682 bp, Homo sapiens
tcccagacgatgggcggccaggcagagacgctcctcacttcccagacggggtggtggccgggcagaggctgcaatctcagcactttgggaggccaaagcaggcggctgggaggtggaggttgtagcgagccgagatcacgccactccactccagcctgggcaccattgagcactgagtgaacgagactccgtctgcaatcctggcacctcgggaggccgaggctggcagatcacacgcggttaggagctggagaycagcccagccaacacagcgaaaccccgtctccaccaaaaaaatatgaaaaccagtcaggtgtggcggcgcgcgcctgcaatcgcaggcacttggcaggctgaggcaggagaatcaggcagggaggttgcagtgagccgagatggcagcagtacagtccagcttcggctcggcatcagagggagaccgtggaaagagagggagagggagaccgtggggagggggagaggcagaggcagaggcagaggggcagaggggcagaggggcagaggggcagaggcagaggcagaggcagaggcagaggccaattttaatattaaggtcagcaaacaccattaagcgtctagctgtaagaactaaaataacaagggtgagtgattaatgctgtcattgtttttctaatttttattttaatagatctgtcttgga

SEQ ID NO: 673552 - DNA, 1331 bp, Homo sapiens
tcagagcaagaaattctagctctcataacaggcaaactcccaaatcacagtatcttaacacaaaaagagtttatttcwtgatcacatcttggcccctgggaattggtgactccttctagtcaggccatcatgaaacatatgacacccatggcttctgcatggggtaatgaaagaggcattgcaaactttaagggcctcagcccttcctgtcacagttcaatgacaagaatgagtattgtgacccctatctacttacaagggaggataggacacataggggaagacatatctatttagtgagcactaactgtactgctttaccctagcacccatgctcttatctagcttaactgtccttagttatctatctatctatctatctatctatctatctatctatctatctatcatctatctgcctacagttaactatcttaactgtccttaccaaggccccagttgcacattccctgatgccaccagggctctgctgacctttattacaactcctctacagattcaacagtctgcctttgctctgctttcctgctcatctgctttcctgctcatctgctttgctctttttactctttctccctcccatctccctttcctctgcttctcactgtctttcttctgcataaccctactctgtgtgttgagtcttctatcacatctttctcctgtacgtgccttctctgatcttctttcagttgccctgggagtgttcttgcagtcgtagtgcatttgttctgctttgtgcattccagcatgcgacaatatttattgccttttttctgcttcaaatagttattccaaaaaagaatattcaaataatacagaaatataaactgattggctctgttataatctagcccctctgcaaggataaccacagcatatacattcagagattttcccctgcttaaagataattccttttacaaaaatgggattataacttacatgctattttataacttgcctcccgctctgaacaatatactgtgctataggcaagccacaagtttccaagccaaatcatattgatctatgtcattatttttaagagctgctctggttaacattgtattgatatgtctatttcgccaatccccttttgaagaacgtttagattgtttccaattttttgccattgtaaacaatacaacactaaatgtccttataaaagccctttatgtacttacccaatttatttccccggaataaacttttgtaggtgaaactgctgtgtcaaagcatgaataaaaacttttgtaggtgaaattgctgggtcaaagcatgctcatttatcattttgatctgtatca

SEQ ID NO: 673553 - DNA, 1331 bp, Homo sapiens
tcagagcaagaaattctagctctcataacaggcaaactcccaaatcacagtatcttaacacaaaaagagtttatttcatgatcacatcttggcccctgggaattggtgactccttctagtcaggccatcatgaaacatatgacacccatggcttctgcatggggtaatgaaagaggcattgcaaactttaagggcctcagcccttcctgtcacagttcaatgacaagaatgagtattgtgacccctatctacttacaagggaggataggacacataggggaagacatatctatttagtgagcactaactgtactgctttaccctagcacccatgctcttatctagcttaactgtccttagttatctatctatctatctatctatctatctatctatctatctatctatcatctatctgcctacagttaactatcttaactgtccttaccaaggccccagttgcacmttccctgatgccaccagggctctgctgacctttattacaactcctctacagattcaacagtctgcctttgctctgctttcctgctcatctgctttcctgctcatctgctttgctctttttactctttctccctcccatctccctttcctctgcttctcactgtctttcttctgcataaccctactctgtgtgttgagtcttctatcacatctttctcctgtacgtgccttctctgatcttctttcagttgccctgggagtgttcttgcagtcgtagtgcatttgttctgctttgtgcattccagcatgcgacaatatttattgccttttttctgcttcaaatagttattccaaaaaagaatattcaaataatacagaaatataaactgattggctctgttataatctagcccctctgcaaggataaccacagcatatacattcagagattttcccctgcttaaagataattccttttacaaaaatgggattataacttacatgctattttataacttgcctcccgctctgaacaatatactgtgctataggcaagccacaagtttccaagccaaatcatattgatctatgtcattatttttaagagctgctctggttaacattgtattgatatgtctatttcgccaatccccttttgaagaacgtttagattgtttccaattttttgccattgtaaacaatacaacactaaatgtccttataaaagccctttatgtacttacccaatttatttccccggaataaacttttgtaggtgaaactgctgtgtcaaagcatgaataaaaacttttgtaggtgaaattgctgggtcaaagcatgctcatttatcattttgatctgtatca

SEQ ID NO: 673554 - DNA, 1331 bp, Homo sapiens
tcagagcaagaaattctagctctcataacaggcaaactcccaaatcacagtatcttaacacaaaaagagtttatttcatgatcacatcttggcccctgggaattggtgactccttctagtcaggccatcatgaaacatatgacacccatggcttctgcatggggtaatgaaagaggcattgcaaactttaagggcctcagcccttcctgtcacagttcaatgacaagaatgagtattgtgacccctatctacttacaagggaggataggacacataggggaagacatatctatttagtgagcactaactgtactgctttaccctagcacccatgctcttatctagcttaactgtccttagttatctatctatctatctatctatctatctatctatctatctatctatcatctatctgcctacagttaactatcttaactgtccttaccaaggccccagttgcacattccctgatgccaccagggctctgctgacctttattacaactcctctacagattcaacagtctgcctttgctctgctttcctgctcatctgctttcctgctcatctgctttgctctttttactctttctccctcccatctccctttcctctgcttctcactgtctttcttctgcataaccctactctgtgtgttgagtcttctatcacatctttctcctgtacgtgccttctctgatcttctttcagttgccctgggagtgttcttgcagtcgtagtgcatttgttctgctttgtgcattccagcatgcgacaatatttattgccttttttctgcttcaaatagttattccaaaaaagaatattcaaataatacagaaatataaactgattggctctgttataatctagcccctctgcaaggataaccacagcatatacattcagagattttcccctgcttaaagataattccttttacaaaaatgggattataacttacatgctattttataacttgcctcccgctctgaacaatatactgtgctataggyaagccacaagtttccaagccaaatcatattgatctatgtcattatttttaagagctgctctggttaacattgtattgatatgtctatttcgccaatccccttttgaagaacgtttagattgtttccaattttttgccattgtaaacaatacaacactaaatgtccttataaaagccctttatgtacttacccaatttatttccccggaataaacttttgtaggtgaaactgctgtgtcaaagcatgaataaaaacttttgtaggtgaaattgctgggtcaaagcatgctcatttatcattttgatctgtatca

SEQ ID NO: 673555 - DNA, 1331 bp, Homo sapiens
tcagagcaagaaattctagctctcataacaggcaaactcccaaatcacagtatcttaacacaaaaagagtttatttcatgatcacatcttggcccctgggaattggtgactccttctagtcaggccatcatgaaacatatgacacccatggcttctgcatggggtaatgaaagaggcattgcaaactttaagggcctcagcccttcctgtcacagttcaatgacaagaatgagtattgtgacccctatctacttacaagggaggataggacacataggggaagacatatctatttagtgagcactaactgtactgctttaccctagcacccatgctcttatctagcttaactgtccttagttatctatctatctatctatctatctatctatctatctatctatctatcatctatctgcctacagttaactatcttaactgtccttaccaaggccccagttgcacattccctgatgccaccagggctctgctgacctttattacaactcctctacagattcaacagtctgcctttgctctgctttcctgctcatctgctttcctgctcatctgctttgctctttttactctttctccctcccatctccctttcctctgcttctcactgtctttcttctgcataaccctactctgtgtgttgagtcttctatcacatctttctcctgtacgtgccttctctgatcttctttcagttgccctgggagtgttcttgcagtcgtagtgcatttgttctgctttgtgcattccagcatgcgacaatatttattgccttttttctgcttcaaatagttattccaaaaaagaatattcaaataatacagaaatataaactgattggctctgttataatctagcccctctgcaaggataaccacagcatatacattcagagattttcccctgcttaaagataattccttttacaaaaatgggattataacttacatgctattttataacttgcctcccgctctgaacaatatactgtgctataggcaagccacaagtttccaagccaaatcatattgatctatgtcattatttttaagagctgctctggttaacattgtattgatatgtctatttcgccaatccccttttgaagaacgtttagattgtttccaattttttgccattgtaaacaatacaacactaaatgtccttataaaagccctttatgtacttacccaatttatttcccyggaataaacttttgtaggtgaaactgctgtgtcaaagcatgaataaaaacttttgtaggtgaaattgctgggtcaaagcatgctcatttatcattttgatctgtatca

SEQ ID NO: 673556 - DNA, 669 bp, Homo sapiens
ggcacatccttaaccttggcaaaataaactttctaaattgattgagaactgtctcatctatttatgggttcacactttctattagtctcctatgcctttcaagtaggccatgacaaaaaaaagaagaggtagtttatttttaattctagttccattcttcctctgcctgatgcaggaaaaacactatttgctattgatggattacctttctattaactttacctttgcttgggtccagatgtttgttttactgatatattctagctgattctgccttataggtctcttggagtgagagatacagtttttgaatgctgagtatgaaaaaacattcaactttttcaaaacataccttgcctacaactgaggtacagtttgggtaattctgctaaaaggtaatcaackacctgtccagaattccaaacagctggatataatttattgttttcatgctttaactttagcatctcatctttcgagtccccgcttgtagtctgatgttctcttctagcacaagaatgacctacttttcgacttaatgttattttttaatcaagaaaatcaacaaatacttgaatttcatactgatattctcaaatctttatttctaaaatatttctaaatcttacctaatgaataacaaaattttttgaataaagaacactgtta

SEQ ID NO: 673557 - DNA, 1322 bp, Homo sapiens
  misc_feature 177: n = A,T,C or G
ggggctgcgggaaagcaattctccagagcaaggaaaaatgatgctaagagccacaggccgggctggaaaggccrgtgcaagccggagggtccccagggatggaagaaagctgcgtctctctgccggctgggctcctctgccgcatcctcctccgcccccctcttcctccttttctancctttttcccttccatttaccttctggtgcccaaggaaccagtgggtggggggcgctgggaaggggcgcaggtcccgcagcagccgctgcctccgcaggtacagcttaatggcctgcagcagccccagggccaggcagaacacgaacgccaggtaaaagggccgcgcccagcgcgtctccagccaggagaattccatggctctgcgcagcgccgaacgccggcggtttcatggggcgcgggagagggtgggctttctcccgcccggagctggcgtagggtcgcccacccccaccgcctctctgggccctcgcgaagcttctgactcgcgggaagaaggaaaggcagtgggaggggcagctcaggcctggggagaggaggcaggcgcgcgtgcgggatttctagccggttaccaaagcgcgcacgcttcgttcggcccaactgcttttgcgctcctggagcgtcctcttttaagtccaacagttttcagtcacgggatctgaatttatattgtaaaataatgctaaagctgaggtcattgtttttcttccttatcacaaattataaatggctatgcaagagattttcttttccattctggcattctaccaaaattcccaggtggtagaggtagggggaggtgtaccatcattattcctttatcctgtggcctgcctagtggtgttccggtaaatggtttacaactgattcccaccctgattcccagcgtgtaccatgagctagttcaagctgccgatacgagggcactgaacactgaacggggaagatatgcacagtagcgtaccatcatatagtaattccactatacaggtacagtcagggcctgctatataatttatgaatctcagtgcaaaatgaaaatgcgggataaaaactttattaacaattctaagatgacagaccattaaaccgagcatatgctcttctgggttcagagcctcgtgtggctgcttgggtctcatgcccatgaagggctgactctagatgccagaaacataaataaactcgagtacagataacaggaaaatgtagtaaaaataatttgaaagtgatggttttagtatttgtaacgtatcaggtggtgaactaggatctaacaagcctgacttcccaagctggtgtctcc

SEQ ID NO: 673558 - DNA, 509 bp, Homo sapiens
ctgcaacctctgcctcctgggctcaagtgaccctcccacctcagccacccaagtagctgggaccacaggcgcaagccaccatgcctggcttatttttgtattttttgtagagacagagttttgtcatattgcccaggctggtcttgaactcctgagctcaagtgatccacacaccttaacctctgaaagtgcagggattatagrcatgagccaccatgcccagcctacttgtgctttttttaagtttggaatcctttgactcctttttgggctgccagaatcctactcgttatccaaggtttagttcagacaccgttcacttcgtagccttttgtctaagatcaggtatagttctatcacgccttccatgaacacctcctacctctctgtgaggattaatcaactctatgcttgtgctatagtgtcattttgtgcagcttgtgtctggtgtgttatttgcttggtgttattgttaattatttacatgttgttctccaccactagattgt

SEQ ID NO: 673559 - DNA, 509 bp, Homo sapiens
ctgcaacctctgcctcctgggctcaagtgaccctcccacctcagccacccaagtagctgggaccacaggcgcaagccaccatgcctggcttatttttgtattttttgtagagacagagttttgtcatattgcccaggctggtcttgaactcctgagctcaagtgatccacacaccttaacctctgaaagtgcagggattataggcatgagccaccatgcccagcctacttgtgctttttttaagtttggaatcctttgactcctttttgggctgccagaatcctactcgttatccaaggtttagttcagacaccgttcacttcgtagccttttgtctaagatcaggtatagttctatcacgccttccatgracacctcctacctctctgtgaggattaatcaactctatgcttgtgctatagtgtcattttgtgcagcttgtgtctggtgtgttatttgcttggtgttattgttaattatttacatgttgttctccaccactagattgt

SEQ ID NO: 673560 - DNA, 595 bp, Homo sapiens
tttctgaagtatagtcacacactttaagtgacatacatttccagatctctgaactgtggagaatttcttttccccttattatgggagaagttttacgatatataaatcacattgaaattttcatacaaaaataatacaaaataaaataaaatacaaaaaatacaagaaataaatacaaaaataatttttaaaatagtacaaaatgatgaaattttgttaacacagtgattggaaaatatgggttgaggatttgggattgtttacctaagtgacgctctgaagcaaccttttggttatatgtagattcagcttatttatcctttttagtggatgttgttcttttttttttttttttttttttgagacagggtcttgctttgttgcccaggctagagtgcagtgtggtgagatcagggctmactgcagccttcacctctcaggctcaagtgatcttcctacctcagcctcccaagtagctgggactaacaggcatgtgccaccatgcctggctaatttttaagtattttgaagagaaaaggtctcactatgttgcccaggctggtctcaaccccctggcctcaagtgatcatcctgc

SEQ ID NO: 673561 - DNA, 515 bp, Homo sapiens
tggcagaaataactcaaaatgctcytctagagaggcctagtaggtaacatacactaacaagggtgtcgaaccacctttaacagtgaacttccaaatctacctgggaatttaaaagaaaaaagtgtctccaagaacacaagtgtaagttttgcttttccttggagctggaaggaagatagtttattaattcagaaattaaactgcttggctgggagcagtggctcacccctgtaatcccagtgctttgagaagctgaggcaggaggactgcctgaggacaggagtttaagaccaccctgggcaacatagcaagaccccatctctccaaaacataataacacttagccaggcccagtggttacacacctgtagttctagctacttgggaggctgaggcaggagaatcactccagcccaggagtttcaggccacagtgagctatgatcacaccactgcactccagcctagacagcagagcaagacaatagagaagggaagggaggggaggggagggga

SEQ ID NO: 673562 - DNA, 616 bp, Homo sapiens
agtcaataattatttcctgtcagtgctttggaaatagtattcctctatcttcttcactaagttttgctgatgagaaattcactggtgagaaatttgtcagtaatttatatttatttgtaaatctttttttctctaaaaggttaaaaaacttcatttttttgttgttctacagtataatacacatgtatctaatttatccatctgaagactttaaattatttttaggacttactatgtttatagttttgaaatttttttataaaatatgttttcaaacaataaattggccccattttcttgattctctccctgacttcctattggacatgtataggaccatcttattccttccttcatgattttctcttcatctcatggtgctgcattctggtcatcttckcaggtccatcttttggcatatgaatattattctaaattgtgtctggttcacctttacccatcccattgagttttttatttcaattggttttttattgtctaaaatttacatttgggttttctgcaaagcatcctttttctttttttattatactgtcctgtcttgtcttgcaaatcttatttcttctttcatttattcaaccatatcagatattct

SEQ ID NO: 673563 - DNA, 944 bp, Homo sapiens
tgaaatattgaaatttgagttttgaaatatttgttttaatacacagagagaagtaaaataaataaataaataaaatatttcggtctttaaaatcatggcagttgaggctaacccatattactaaaaagtttccagtctttaggacctttctctttagactgtaaagattcataaggttgatttcagggcaaaaaagagtaagcattatatttatacagctattgattctcctaaagttgaaatatcctaatcagaacctatgcaactgcccataccgttatccagtaaggtaacaagccacaggagggactaggtgggagaggctattgtcaaaaaggttacttatcctgatttttttatgagcaccacaatagtcttttggattacaaccttctattgtttgtttatttacatagcctgtgtttgtgcttataattgcagaacaaatatgtaatgtggtacatactttaattgcgtagtttttttatcttaaaatgaattataactgaatatgcatatttaatgttggcagaaacacttcctattctaacttgggtccagttggaggcttgcaagttaacagacaatagattaacagaggaaaagacaaaatttacttacacagtcatgtggcagttgctcagtactgagtagttcactgaatagccagagataaagtttatataccaaactttagggaagggaagttttcagattttaatgaatggatggttctgataagccttgtttacacaatattttggaatgtcctagtgactaartccagagcctccctgattggagaccactccagagtcaggggttgtggtagctgactttggtaaatctctgtttcagtaagattatggatgttcagaacgtattttttttctgcttctttagctcaactgttttcactttaaaataacatttgtgtgaatcct

SEQ ID NO: 673564 - DNA, 665 bp, Homo sapiens
atcttggcttcatgctcgatttttttctgtaagtgaacttgtggtaacgagccgcagtgcaaggaggtccgatattttgtactgtgatatattcagaggaaaagaagtacatgtctttagatgacattacccttcataaagtcaactggaaaacagaattaaaactggtcattcctttgggaacaagatgagaatcttaaaagttgtctttttgttatggaaaagctcctttaaactttaggtgtaaaggaagaaacaatattttcctcagcttamtttttaatatttggtaagaaattattctaatttatagatcacagaagttatctcctttagttatcgagaagaaacctttcacttggatttatcaggcccacgtacatgattgcacatcaaaatgtgagggatgaggagaaacccttgtaaaatcctgccggctatgtgtcccaattagactgtattagggaactttccttaatttagattgggttaggacatcatttcccaaaatattatttggaacacttatttcacagagtgttctattggaaaagaaagagtgagagggcccctgtactcaattaagtttacaaaatgctttcttcagtgttcccctttcatagagtcacatccctaattaccatttaaagactctgaggagtgct

SEQ ID NO: 673565 - DNA, 626 bp, Homo sapiens
aggaaactaaacctaaataaaataagtagaaagaaggaaatcataaaatgtagagtaaaattaataaaataaaatatagataaacaataaagaatatcaaaaaacaaaatttcatttgttttaaacattaacaaatatactaaaatcaggaataagatataaaatattactgaaattacagaaagaaaaataattataaagaaatgctatgaacaactgtaaattaaaaaaattagttaacttcgataaaatagaaaaataccaactactgaaattgattcaagaagaagtaggaaatctaacctataacaagtaaaaagattgaatcagtaattaaacaaactaacaaaaattaacactatgaaatgttcatgsctagatgacttcactgagacattgtaacagatatttaaagcaaaattaagagtagttattcaccacctcctccaaaaatagaagagaagagaacatttcccaactcattttatgaggccaatattacaacaatagcacaaccagacaaatcacaagaaaactataggcaaatctatgttttcaatccctctatatagcactataaaccctctgtataccactaagatcaatgaaaatgagaaaattgtata

SEQ ID NO: 673566 - DNA, 623 bp, Homo sapiens
ctaaacgtgmcaaagaaacactcgcagatttaagcctgaaacttctgtgactctagggtcttgtttgcagcagaagatatttatattaaaactttaaattgttcaaggaatgaaaaacaaaagcttaacccacatttggatttttaaattaagtttaaatttattatattttataataaatgaagccgatacctttagttcttactggtaattgcctttctgattgtcttttgctttaattcatgaggaattaaacaatgggttccaaatcaacagtgttggaaatgattgctgttttccttctttgaactaacattatggtgttgggaattttgtttccataatgatgagcaatgccaattttcaataacacattagcaaagagaggccgggttccttcagcttgaactaagtgtggttgacaggagtcttgttctgtacctagtgttcatctctgaggggcctctgctttgaactgagaatagaaaaatataaaatcatatggagtttcctgctttgttttccttgtggcttatttgcccttactcttttctcaaagcaccttaatttcttacactggaactaacaatgggtattaccaatgcaactttgaagtgctaatg

SEQ ID NO: 673567 - DNA, 623 bp, Homo sapiens
ctaaacgtgccaaagaaacactcgcagatttaagcctgaaacttctgtgactctagggtcttgtttgcagcagaagatatttatattaaaactttaaattgttcaaggaatgaaaaacaaaagcttaacccacatttggatttttaaattaagtttaaatttattatattttataataaatgaagccgatacctttagttcttrctggtaattgcctttctgattgtcttttgctttaattcatgaggaattaaacaatgggttccaaatcaacagtgttggaaatgattgctgttttccttctttgaactaacattatggtgttgggaattttgtttccataatgatgagcaatgccaattttcaataacacattagcaaagagaggccgggttccttcagcttgaactaagtgtggttgacaggagtcttgttctgtacctagtgttcatctctgaggggcctctgctttgaactgagaatagaaaaatataaaatcatatggagtttcctgctttgttttccttgtggcttatttgcccttactcttttctcaaagcaccttaatttcttacactggaactaacaatgggtattaccaatgcaactttgaagtgctaatg

SEQ ID NO: 673568 - DNA, 653 bp, Homo sapiens
aatggcaggaagtaacaataattgccaggagtgtgagctctttctgaagaaaagaattgattttggctttgaaatgtttcataagcatgacacagtcagcacaaaggcacaaaaaggtaatagatccctaagcacaaaggcacaaaaaggtaatagatccctaaacacagacagtctcaaacacccaagtgtgaccagactaaaatcattcccrtgatacagttacaaatgagtatgtgccaggcactggggttttcttgaagttctataaacaaaacgcagagtaaaggcagagccaaatataatgttagtggggtaaactcacatgatacctaagacaaaaccaatccagatctgtacaaagaagaaatacaccagaaatagatggagggaaagcaacagttctatcaccatttttagatttttctatctgaaaatcacctcagagatcaagaaagaagcctgggaaccaaatgtccatgagatgtctctactgaacaacttattttggttagtttcattgggtaaatcttcacgggaatcttaacaggtccttcagaaactataaaacaaacaaacagataaataaataaacaagcaagccaacaggggaattcgtaaacaatttagatcaatgagtgaagattatctta

SEQ ID NO: 673569 - DNA, 653 bp, Homo sapiens
aatggcaggaagtaacaataattgccaggagtgtgagctctttctgaagaaaagaattgattttggctttgaaatgtttcataagcatgacacagtcagcacaaaggcacaaaaaggtaatagatccctaagcacaaaggcacaaaaaggtaatagatccctaaacacagacagtctcaaacacccaagtgtgaccagactaaaatcattcccgtgatacagttacaaatgagtatgtgccaggcactggggttttcttgaagttctataaacaaaacgcagagtaaaggcagagccaaatataatgttagtggggtaaactcacatgatacctaagacaaaaccaatccagatctgtacaaagaagaaatacaccagaaatagatggagggaaagcaacagttctatcaccatttttagatttttctatctgaaaatcacctcagagatcaagaaagaagcctgggaaccaaatgtccatgagatgtctctactgaacaacttattttggttagtttcattgggtaaatcttcacgggaatcttaacaggtccttcagaaactatraaacaaacaaacagataaataaataaacaagcaagccaacaggggaattcgtaaacaatttagatcaatgagtgaagattatctta

SEQ ID NO: 673570 - DNA, 626 bp, Homo sapiens
tgtttgaaatcttataagggtctcatagtgaacagatttctctctcagtaatgtttgtgttactttcttttccagtagaaattgttttatcttttgaatgctggttgtggtaaagttggcttactaagatattttggaccataattacttcatcattagagtaacccttttatccatccttcatttggtaatgttatatttttgttactcgcacttttgttcttttcctgttgctaggcagcagtataatcagcagccatatagctaattacacactgcttctagaatgactatgtgccctgaattgggttgtaatgtcttgaactgaatagtgtcttgcaataatattttctaggaacaaaatacactaaaagagaaatgcaaaacttccatatgtatgtatatatatatatatatayacacacatacacacacacacatacatgaatatgcatattcatatacagatgattctatatatatgaaactaatgaaatcatatatgattatatattatatatgaaatacatataatgtatatattttataattaaatcaatataatatcgttctgctcttaaatttatcaagtccaagtagcctcttttatgctctcagggataatt

SEQ ID NO: 673571 - DNA, 626 bp, Homo sapiens
tgtttgaaatcttataagggtctcatagtgaacagatttctctctcagtaatgtttgtgttactttcttttccagtagaaattgttttatcttttgaatgctggttgtggtaaagttggcttactaagatattttggaccataattacttcatcattagagtaacccttttatccatccttcatttggtaatgttatatttttgttactcgcacttttgttcttttcctgttgctaggcagcagtataatcagcagccatatagctaattacacactgcttctagaatgactatgtgccctgaattgggttgtaatgtcttgaactgaatagtgtcttgcaataatattttctaggaacaaaatacactaaaagagaaatgcaaaacttccatatgtatgtatatatatatatatatacayacacatacacacacacacatacatgaatatgcatattcatatacagatgattctatatatatgaaactaatgaaatcatatatgattatatattatatatgaaatacatataatgtatatattttataattaaatcaatataatatcgttctgctcttaaatttatcaagtccaagtagcctcttttatgctctcagggataatt

SEQ ID NO: 673572 - DNA, 626 bp, Homo sapiens
tgtttgaaatcttataagggtctcatagtgaacagatttctctctcagtaatgtttgtgttactttcttttccagtagaaattgttttatcttttgaatgctggttgtggtaaagttggcttactaagatattttggaccataattacttcatcattagagtaacccttttatccatccttcatttggtaatgttatatttttgttactcgcacttttgttcttttcctgttgctaggcagcagtataatcagcagccatatagctaattacacactgcttctagaatgactatgtgccctgaattgggttgtaatgtcttgaactgaatagtgtcttgcaataatattttctaggaacaaaatacactaaaagagaaatgcaaaacttccatatgtatgtatatatatatatatatacacacacayacacacacacacatacatgaatatgcatattcatatacagatgattctatatatatgaaactaatgaaatcatatatgattatatattatatatgaaatacatataatgtatatattttataattaaatcaatataatatcgttctgctcttaaatttatcaagtccaagtagcctcttttatgctctcagggataatt

SEQ ID NO: 673573 - DNA, 616 bp, Homo sapiens
gaggaagtgtctccttttaaattttatatattttgtaagctaaaattcagaaagattcagtacttttttaaaggttgcacagaagtaagactttaaatacagttcagatcagtaattaaactttgttttattcatttgcttaatcatctgtcttccccaatgttgcaatatttgtgagggtaggtaccaatattggcttttctacttctaatttccagcaattttcacagaacctgactctctttctttctctctctgtgtgtgtgtatatatatgtgtgtgtatatatatatataaatatatgtatatarttatatatataaatatatgtatataattatatatataattagaattataaatttactgtactgagtcataaatctttcataatttttttagtgtatatgtgtgatatttctttcaaaacaagagcactttcccagatcaaacattgtaacatgtatttctatgtatttatttttttgcatagatttactcactttttcatgtgctctttgtatttttttatttgacattaattgggcacttaatgaacacatagatttcaatgtgctagagtctccatatgtaaagatgaataagaactgattca

SEQ ID NO: 673574 - DNA, 802 bp, Homo sapiens
agtgctaacttttgactttaaacaagtacaggatgggactcaaagtcttctagtttaaagttgatgtaattgatttattctcccctccttcacaagaaagtttatataaaaagaacataaacaagtggtgcttactttgccacaaggcctactaatacagggagaccaggatgctgggcagcttagcggaaaggtcagtctttggagagggttggattgtaatcctttaaggcacctataaactatgtgactttaggccaattataaagtatttctaatcctccttttaaatattgggttttgttgttctataaaataaaaagaataataccaggtaaacattctgctaggcagtctaccttaggtcttctatgttaggagcttctattctagccaagattaacatttagtataaatattattagttgcaattatgacattttctkctatagagcctaacaggtcatctttacaaattcctttatttcacagaaaagtaatgaactatatcaactatttgattatatttatacttagatgctagaagcaggaccaatatattgcgcttccatttctcaatgatgtattcaattaattcatgctttttcagtcttcactagcttgttacctgtctacacctaagaccttatcttgtttctattttaacatccaaatactttatgcatagcatttgtttctcgattaatctgacaaaagatctctagaataaatgctgcattaacaaatgaaagtgaatttaatgcctgccaagttagtacctgaaaaaaaaaaaggtctttta

SEQ ID NO: 673575 - DNA, 1106 bp, Homo sapiens
caagacataatcagcagtggctgtgagggacgtagctggtgttgctcccaagtggagaccctaaaatggactagaaactgaaaaccagagacatctttccatgaagctccctccaaacrtgcacttctcatgtttataggctcctatctacagccatcaatacgcaatggatgctgtcatgtgacattcatcagtaactacggaattcaaagcaatgttaacagcatcattgatttaacttaagaacattaagctggatccctctcttcagaagataatttctgtttgagctgaccctgaaatcactcacaggccatttctgcctgccacacagcagctaaattacttgagtgtgcatctcataaactttagacctttggcagtctttgattgtttaattattttaaaagccagcgtctgagacattttcccttaattagttacgctttcctcctacattatttctccaggaacagacccctgacatctgatacaagcacaggttcaattcagttcaaattaaacgcttccactgactgtcccctatgcaccaagctcagaggggtctctaaactggtaaaatgcaatcctgattcccaaggaattctacgccatacccttaaaaagatacacttaaacgtcaccccctgtttccttcttagcgaatatcctaactagttatgtcaacttcaggaactgtagctttttcattctgaatgcagggttaagcatattggcatctccagctcctgggcggaaggtaattaaaatggagggtcagagcggcatcagcactcacacccatgccctcgtgggcatcacaatccatcaaggcagtggcccctcagagtcttcctccacgcattcctagggaaagacactgtcatgggacgtgacacaggagagaaagcttatctgccaagactgacacagaccagccgtctcatttacagacattatgacacagcccagataacctgtggtttgctacctaacacaggagagaaagcctgtccgccaagactgacacagaccacccgtctcattcacagacattatgacacagcccggataacctgtggtttgctacctagtaacttgttccg

SEQ ID NO: 673576 - DNA, 361 bp, Homo sapiens
atccctcccccctccccccaccccacagtagcaaagacttggaaccaacccaaatgtccaacaamgatagactggattaagaaaatgtggcacatatacaccatggaatactatgcagccataaaaaatgatgagttcatgtcctttgtagggacatggatgaaactggaaaccatcattctcagcaaagtattgcaagaacaaaaaaccaaacactgcatgttctcactcataggtgggtattgaacaatgagaacacatggacacaggaaggggaacatcacaggaattcttattataaattatataattggcctatttggtctcctggggctggtgttataaggacaataacaaacgg

SEQ ID NO: 673577 - DNA, 361 bp, Homo sapiens
atccctcccccctccccccaccccacagtagcaaagacttggaaccaacccaaatgtccaacaacgatagactggattaagaaaatgtggcacatatacaccatggaatactatgcagccataaaaaatgatgagttcatgtcctttgtagggacatggatgaaactggaaaccatcattctcagcaaagtattgcaagaacaaaaaaccaaacactgcatgttctcactcataggtgggwattgaacaatgagaacacatggacacaggaaggggaacatcacaggaattcttattataaattatataattggcctatttggtctcctggggctggtgttataaggacaataacaaacgg

SEQ ID NO: 673578 - DNA, 2140 bp, Homo sapiens
ataacagcatcttgggaagggttaagaaacaaattataattaatttttttctgtttctacatataaaccaatttttaaatatatagtttaaactgaaagagaaaaaacacagtatcttatttggatcaagaacttcctcattttatttcattttctgggaaacataataagctcctaattcttaataaaatgagataagataaaatacaatcagaagaatattttttaaaaggcaattactttcattgtgttgttgattacttgataattgtataaaacacatgaacaagtaacttacaaggtgatttctttcctgttaattatgatattgtgggttaacctaaaaactgaaaagttttaagcacgtatttcggtgtaagttaagggtatcaaattaccctttagtttaggaaggagtcatccaagtgtcctaaaggaacagaaattgaaggaagaagatctgcatttccaagaatagaaacgatttctgaagaatggaaagataccaacatggtacccagccataaggaaagacctccataattacagatcacggagccaggaaactgacagagtataattaaggacagaataatctaacacttgtataaagtacaaattaataggaccatgtctccaaaacacagctaagattgaaaaccccagagaaggtcagtggagacagttatagaaatttccaaggagaagtttcatttaacttgaaaacaacccatggagactggtgaaaagattaaaatttgcattttattaaatggaaattgtcaaatcactccccaatcaatgaacaaaaaccaaatcaaaataccaaacctttaatgttagtattatctaacattattctatatttaaataatgtgcatttaaatatagaataatgttatttcatgcacttgcttayagagttacatggaaaagtacctgtaatactagaaatccctcatgatgaaagatgaaagcagctctttgttataaggacgatattatcaacaaattttcgtaacgtcacaatttcagtataacaaatttaggacatgaatcatataaatgaaatcctttatatgacaggtgtctggccactgtgttcttacagtagttcctgaatctgacctatagatcttgacatagatttaacctgattgatgagatcaggcactcatcagatcctgccaaactaatcagacaagaagccattcagatcacattaaagtttctgtttttctcagacctagaagatatgttatttaaaataatttttacttagctggtaaaagaatctatttgttcatatttaggtaatgttttattcaaaatagtatttttgatttggacttatgaatattggattgttataaaagggaaattgttttccgtccataagctgtaaaaaagataacaaaaaaagaattctgcctattcttaagacaactaaaaaagcccatcacaaatggcttccatttcgagcagtaaaagtattaatataatggttttactgatggaaaatgtcaaagaaaatagtttgtggtagtatcctgtatccttgaatgaagggtgttcttttatggtactaaaatttcattatcattatatagctgacattggaccttcttcaaatcatttgagaaatgactggtgaagctatcataggacttggcatgtcttccaattcatcaaggtatcagacaaacccctcaaaccttagacaggaatgtttaggatatcatgggagtcttttgttgtgtgctacacccttgattatatcttctgtaaacatggcctggattgttttcatcaaaattattaaaaggatagtgtgagggtgagaatgctttatctccaaggaaatatgactcaagtaaattttaagtggaaaataatatgatttcatctttgaaaagtagacaagagtagttttagagaaaactagagaagagagttgcagaatctttaaagtgacccaaattctgaagctgatctcagtgttgtttggggaaaacactgagtaacatgaacctaaaccaaacaaatgaaaactcaagtaatgataataacttatatttagttgaaatcatcatttataccaatgaaaatctgaaaaacttgaaaagcttctttccaaatc

SEQ ID NO: 673579 - DNA, 2140 bp, Homo sapiens
ataacagcatcttgggaagggttaagaaacaaattataattaatttttttctgtttctacatataaaccaatttttaaatatatagtttaaactgaaagagaaaaaacacagtatcttatttggatcaagaacttcctcattttatttcattttctgggaaacataataagctcctaattcttaataaaatgagataagataaaatacaatcagaagaatattttttaaaaggcaattactttcattgtgttgttgattacttgataattgtataaaacacatgaacaagtaacttacaaggtgatttctttcctgttaattatgatattgtgggttaacctaaaaactgaaaagttttaagcacgtatttcggtgtaagttaagggtatcaaattaccctttagtttaggaaggagtcatccaagtgtcctaaaggaacagaaattgaaggaagaagatctgcatttccaagaatagaaacgatttctgaagaatggaaagataccaacatggtacccagccataaggaaagacctccataattacagatcacggagccaggaaactgacagagtataattaaggacagaataatctaacacttgtataaagtacaaattaataggaccatgtctccaaaacacagctaagattgaaaaccccagagaaggtcagtggagacagttatagaaatttccaaggagaagtttcatttaacttgaaaacaacccatggagactggtgaaaagattaaaatttgcattttattaaatggaaattgtcaaatcactccccaatcaatgaacaaaaaccaaatcaaaataccaaacctttaatgttagtattatctaacattattctatatttaaataatgtgcatttaaatatagaataatgttatttcatgcacttgcttatagagttacatggaaaagtacctgtaatactagaaatccctcatgatgaaagatgaaagcagctctttgttataaggacgatattatcaacaaattttcgtaacgtcacaatttcagtataacaaatttaggacatgaawcatataaatgaaatcctttatatgacaggtgtctggccactgtgttcttacagtagttcctgaatctgacctatagatcttgacatagatttaacctgattgatgagatcaggcactcatcagatcctgccaaactaatcagacaagaagccattcagatcacattaaagtttctgtttttctcagacctagaagatatgttatttaaaataatttttacttagctggtaaaagaatctatttgttcatatttaggtaatgttttattcaaaatagtatttttgatttggacttatgaatattggattgttataaaagggaaattgttttccgtccataagctgtaaaaaagataacaaaaaaagaattctgcctattcttaagacaactaaaaaagcccatcacaaatggcttccatttcgagcagtaaaagtattaatataatggttttactgatggaaaatgtcaaagaaaatagtttgtggtagtatcctgtatccttgaatgaagggtgttcttttatggtactaaaatttcattatcattatatagctgacattggaccttcttcaaatcatttgagaaatgactggtgaagctatcataggacttggcatgtcttccaattcatcaaggtatcagacaaacccctcaaaccttagacaggaatgtttaggatatcatgggagtcttttgttgtgtgctacacccttgattatatcttctgtaaacatggcctggattgttttcatcaaaattattaaaaggatagtgtgagggtgagaatgctttatctccaaggaaatatgactcaagtaaattttaagtggaaaataatatgatttcatctttgaaaagtagacaagagtagttttagagaaaactagagaagagagttgcagaatctttaaagtgacccaaattctgaagctgatctcagtgttgtttggggaaaacactgagtaacatgaacctaaaccaaacaaatgaaaactcaagtaatgataataacttatatttagttgaaatcatcatttataccaatgaaaatctgaaaaacttgaaaagcttctttccaaatc

SEQ ID NO: 673580 - DNA, 2140 bp, Homo sapiens
ataacagcatcttgggaagggttaagaaacaaattataattaatttttttctgtttctacatataaaccaatttttaaatatatagtttaaactgaaagagaaaaaacacagtatcttatttggatcaagaacttcctcattttatttcattttctgggaaacataataagctcctaattcttaataaaatgagataagataaaatacaatcagaagaatattttttaaaaggcaattactttcattgtgttgttgattacttgataattgtataaaacacatgaacaagtaacttacaaggtgatttctttcctgttaattatgatattgtgggttaacctaaaaactgaaaagttttaagcacgtatttcggtgtaagttaagggtatcaaattaccctttagtttaggaaggagtcatccaagtgtcctaaaggaacagaaattgaaggaagaagatctgcatttccaagaatagaaacgatttctgaagaatggaaagataccaacatggtacccagccataaggaaagacctccataattacagatcacggagccaggaaactgacagagtataattaaggacagaataatctaacacttgtataaagtacaaattaataggaccatgtctccaaaacacagctaagattgaaaaccccagagaaggtcagtggagacagttatagaaatttccaaggagaagtttcatttaacttgaaaacaacccatggagactggtgaaaagattaaaatttgcattttattaaatggaaattgtcaaatcactccccaatcaatgaacaaaaaccaaatcaaaataccaaacctttaatgttagtattatctaacattattctatatttaaataatgtgcatttaaatatagaataatgttatttcatgcacttgcttatagagttacatggaaaagtacctgtaatactagaaatccctcatgatgaaagatgaaagcagctctttgttataaggacgatattatcaacaaattttcgtaacgtcacaatttcagtataacaaatttaggacatgaatcatataaatgaaatcctttatatgacaggtgtctggccactgtgttcttacagtagttcctgwatctgacctatagatcttgacatagatttaacctgattgatgagatcaggcactcatcagatcctgccaaactaatcagacaagaagccattcagatcacattaaagtttctgtttttctcagacctagaagatatgttatttaaaataatttttacttagctggtaaaagaatctatttgttcatatttaggtaatgttttattcaaaatagtatttttgatttggacttatgaatattggattgttataaaagggaaattgttttccgtccataagctgtaaaaaagataacaaaaaaagaattctgcctattcttaagacaactaaaaaagcccatcacaaatggcttccatttcgagcagtaaaagtattaatataatggttttactgatggaaaatgtcaaagaaaatagtttgtggtagtatcctgtatccttgaatgaagggtgttcttttatggtactaaaatttcattatcattatatagctgacattggaccttcttcaaatcatttgagaaatgactggtgaagctatcataggacttggcatgtcttccaattcatcaaggtatcagacaaacccctcaaaccttagacaggaatgtttaggatatcatgggagtcttttgttgtgtgctacacccttgattatatcttctgtaaacatggcctggattgttttcatcaaaattattaaaaggatagtgtgagggtgagaatgctttatctccaaggaaatatgactcaagtaaattttaagtggaaaataatatgatttcatctttgaaaagtagacaagagtagttttagagaaaactagagaagagagttgcagaatctttaaagtgacccaaattctgaagctgatctcagtgttgtttggggaaaacactgagtaacatgaacctaaaccaaacaaatgaaaactcaagtaatgataataacttatatttagttgaaatcatcatttataccaatgaaaatctgaaaaacttgaaaagcttctttccaaatc

SEQ ID NO: 673581 - DNA, 2140 bp, Homo sapiens
ataacagcatcttgggaagggttaagaaacaaattataattaatttttttctgtttctacatataaaccaatttttaaatatatagtttaaactgaaagagaaaaaacacagtatcttatttggatcaagaacttcctcattttatttcattttctgggaaacataataagctcctaattcttaataaaatgagataagataaaatacaatcagaagaatattttttaaaaggcaattactttcattgtgttgttgattacttgataattgtataaaacacatgaacaagtaacttacaaggtgatttctttcctgttaattatgatattgtgggttaacctaaaaactgaaaagttttaagcacgtatttcggtgtaagttaagggtatcaaattaccctttagtttaggaaggagtcatccaagtgtcctaaaggaacagaaattgaaggaagaagatctgcatttccaagaatagaaacgatttctgaagaatggaaagataccaacatggtacccagccataaggaaagacctccataattacagatcacggagccaggaaactgacagagtataattaaggacagaataatctaacacttgtataaagtacaaattaataggaccatgtctccaaaacacagctaagattgaaaaccccagagaaggtcagtggagacagttatagaaatttccaaggagaagtttcatttaacttgaaaacaacccatggagactggtgaaaagattaaaatttgcattttattaaatggaaattgtcaaatcactccccaatcaatgaacaaaaaccaaatcaaaataccaaacctttaatgttagtattatctaacattattctatatttaaataatgtgcatttaaatatagaataatgttatttcatgcacttgcttatagagttacatggaaaagtacctgtaatactagaaatccctcatgatgaaagatgaaagcagctctttgttataaggacgatattatcaacaaattttcgtaacgtcacaatttcagtataacaaatttaggacatgaatcatataaatgaaatcctttatatgacaggtgtctggccactgtgttcttacagtagttcctgaatctgacctatagatcttgacatagatttaacctgattgatgagatcaggcactcatcagatcctgccaaactaatcagacaagaagccattcagatcacattaaagtttctgtttttctcagacctagaagatatgttatttaaaataatttttacttagctggtaaaagaatctatttgttcatatttaggtaatgttttattcaaaatagtatttttgatttggacttatgaatattggattgttataaaagggaaattgttttccgtccataagctgtaaaaaagataacaaaaaaagaattctgcctattcttaagacaactaaaaaagcccatcacaaatggcttccatttcgagcagtaaaagtattaatataatggttttactgatggaaaatgtcaaagaaaatagtttgtggtagtatcctgtatccttgaatgaagggtgttcttttatggtactaaaatttcattatcattatatagctgacattggaccttcttcaaatcatttgagaaatgactggtgaagctatcataggacttggcatgtcttccaattcatcaaggtatcagacaaacccctcaaaccttagacaggaatgtttaggatatcatgggagtcttttgttgtgtgctacacccttgattatatcttctgtaaacatggcctggattgttttcatcaaaattattaaaaggatagtgtgagggtgagaatgctttatctccaaggaaatatgactcaagtaaattttaagtggaaaataatatgatttcatctttgaaaartagacaagagtagttttagagaaaactagagaagagagttgcagaatctttaaagtgacccaaattctgaagctgatctcagtgttgtttggggaaaacactgagtaacatgaacctaaaccaaacaaatgaaaactcaagtaatgataataacttatatttagttgaaatcatcatttataccaatgaaaatctgaaaaacttgaaaagcttctttccaaatc

SEQ ID NO: 673582 - DNA, 2140 bp, Homo sapiens
ataacagcatcttgggaagggttaagaaacaaattataattaatttttttctgtttctacatataaaccaatttttaaatatatagtttaaactgaaagagaaaaaacacagtatcttatttggatcaagaacttcctcattttatttcattttctgggaaacataataagctcctaattcttaataaaatgagataagataaaatacaatcagaagaatattttttaaaaggcaattactttcattgtgttgttgattacttgataattgtataaaacacatgaacaagtaacttacaaggtgatttctttcctgttaattatgatattgtgggttaacctaaaaactgaaaagttttaagcacgtatttcggtgtaagttaagggtatcaaattaccctttagtttaggaaggagtcatccaagtgtcctaaaggaacagaaattgaaggaagaagatctgcatttccaagaatagaaacgatttctgaagaatggaaagataccaacatggtacccagccataaggaaagacctccataattacagatcacggagccaggaaactgacagagtataattaaggacagaataatctaacacttgtataaagtacaaattaataggaccatgtctccaaaacacagctaagattgaaaaccccagagaaggtcagtggagacagttatagaaatttccaaggagaagtttcatttaacttgaaaacaacccatggagactggtgaaaagattaaaatttgcattttattaaatggaaattgtcaaatcactccccaatcaatgaacaaaaaccaaatcaaaataccaaacctttaatgttagtattatctaacattattctatatttaaataatgtgcatttaaatatagaataatgttatttcatgcacttgcttatagagttacatggaaaagtacctgtaatactagaaatccctcatgatgaaagatgaaagcagctctttgttataaggacgatattatcaacaaattttcgtaacgtcacaatttcagtataacaaatttaggacatgaatcatataaatgaaatcctttatatgacaggtgtctggccactgtgttcttacagtagttcctgaatctgacctatagatcttgacatagatttaacctgattgatgagatcaggcactcatcagatcctgccaaactaatcagacaagaagccattcagatcacattaaagtttctgtttttctcagacctagaagatatgttatttaaaataatttttacttagctggtaaaagaatctatttgttcatatttaggtaatgttttattcaaaatagtatttttgatttggacttatgaatattggattgttataaaagggaaattgttttccgtccataagctgtaaaaaagataacaaaaaaagaattctgcctattcttaagacaactaaaaaagcccatcacaaatggcttccatttcgagcagtaaaagtattaatataatggttttactgatggaaaatgtcaaagaaaatagtttgtggtagtatcctgtatccttgaatgaagggtgttcttttatggtactaaaatttcattatcattatatagctgacattggaccttcttcaaatcatttgagaaatgactggtgaagctatcataggacttggcatgtcttccaattcatcaaggtatcagacaaacccctcaaaccttagacaggaatgtttaggatatcatgggagtcttttgttgtgtgctacacccttgattatatcttctgtaaacatggcctggattgttttcatcaaaattattaaaaggatagtgtgagggtgagaatgctttatctccaaggaaatatgactcaagtaaattttaagtggaaaataatatgatttcatctttgaaaagtagacaagagtagttttagagaaaactagagaasagagttgcagaatctttaaagtgacccaaattctgaagctgatctcagtgttgtttggggaaaacactgagtaacatgaacctaaaccaaacaaatgaaaactcaagtaatgataataacttatatttagttgaaatcatcatttataccaatgaaaatctgaaaaacttgaaaagcttctttccaaatc

SEQ ID NO: 673583 - DNA, 2140 bp, Homo sapiens
ataacagcatcttgggaagggttaagaaacaaattataattaatttttttctgtttctacatataaaccaatttttaaatatatagtttaaactgaaagagaaaaaacacagtatcttatttggatcaagaacttcctcattttatttcattttctgggaaacataataagctcctaattcttaataaaatgagataagataaaatacaatcagaagaatattttttaaaaggcaattactttcattgtgttgttgattacttgataattgtataaaacacatgaacaagtaacttacaaggtgatttctttcctgttaattatgatattgtgggttaacctaaaaactgaaaagttttaagcacgtatttcggtgtaagttaagggtatcaaattaccctttagtttaggaaggagtcatccaagtgtcctaaaggaacagaaattgaaggaagaagatctgcatttccaagaatagaaacgatttctgaagaatggaaagataccaacatggtacccagccataaggaaagacctccataattacagatcacggagccaggaaactgacagagtataattaaggacagaataatctaacacttgtataaagtacaaattaataggaccatgtctccaaaacacagctaagattgaaaaccccagagaaggtcagtggagacagttatagaaatttccaaggagaagtttcatttaacttgaaaacaacccatggagactggtgaaaagattaaaatttgcattttattaaatggaaattgtcaaatcactccccaatcaatgaacaaaaaccaaatcaaaataccaaacctttaatgttagtattatctaacattattctatatttaaataatgtgcatttaaatatagaataatgttatttcatgcacttgcttatagagttacatggaaaagtacctgtaatactagaaatccctcatgatgaaagatgaaagcagctctttgttataaggacgatattatcaacaaattttcgtaacgtcacaatttcagtataacaaatttaggacatgaatcatataaatgaaatcctttatatgacaggtgtctggccactgtgttcttacagtagttcctgaatctgacctatagatcttgacatagatttaacctgattgatgagatcaggcactcatcagatcctgccaaactaatcagacaagaagccattcagatcacattaaagtttctgtttttctcagacctagaagatatgttatttaaaataatttttacttagctggtaaaagaatctatttgttcatatttaggtaatgttttattcaaaatagtatttttgatttggacttatgaatattggattgttataaaagggaaattgttttccgtccataagctgtaaaaaagataacaaaaaaagaattctgcctattcttaagacaactaaaaaagcccatcacaaatggcttccatttcgagcagtaaaagtattaatataatggttttactgatggaaaatgtcaaagaaaatagtttgtggtagtatcctgtatccttgaatgaagggtgttcttttatggtactaaaatttcattatcattatatagctgacattggaccttcttcaaatcatttgagaaatgactggtgaagctatcataggacttggcatgtcttccaattcatcaaggtatcagacaaacccctcaaaccttagacaggaatgtttaggatatcatgggagtcttttgttgtgtgctacacccttgattatatcttctgtaaacatggcctggattgttttcatcaaaattattaaaaggatagtgtgagggtgagaatgctttatctccaaggaaatatgactcaagtaaattttaagtggaaaataatatgatttcatctttgaaaagtagacaagagtagttttagagaaaactagagaagagagttgcagaatctttaaagtgacccaaattctgaagctgatctcagtgttgtttggggaaaacactgagtaacatgaacytaaaccaaacaaatgaaaactcaagtaatgataataacttatatttagttgaaatcatcatttataccaatgaaaatctgaaaaacttgaaaagcttctttccaaatc

SEQ ID NO: 673584 - DNA, 2381 bp, Homo sapiens
agtgtgatgagtcacatcaactctggaataattttgcaaagtattaaatgcatgaatgatggcacactgctacctcacagtgtcattctaaaataaaattagtcaaattgactcattgtaaagacttgagagccgtgattatgttgactgataaagcaacacaattatgatgacggtaaaaatacagaatcacttccaaagagctgataggagaaagaatcagtagaaacttataaaaatggttacgattgaagagacattacacaatgggtgtaataaatgttgaaaatcatgaggctgtgcacaacagttttattccatgagtggctccggaatttcagcaagcgctattaaaggaacagatgaactcgcccccaattaccaaattgaccataaatgaagcatttggcaggagggcgagtcctgagagagaaacatttcaatgctgatgcttaactgtcaaagagttaagtcactttaaattgcacacatcaagatgaactattctatttggagagctattttttttcctttgcttgtaacgcaagaaatgatcctgtgtcctggaggaaagatgatgttgatgccaacatagaggctcactgctatygggttgcacctgctcatcagactgaaatattcaagtgcaagagttccactgatatatacatctcaggaaaaagatgattaaggtcatagaagttataacaaatattctttcttgaccctaaccctgagatattataggtgagaaacaatgatttctcaagagtaaacatatttcctcagagccgtccaatagttacaagtctgaaccttccagggacctgtttttaaacatgctcacattctcaggcaacttggatacttggtctctccaactttattgggaaagatccattgttgggaggcacaacaaagcgtttcttcagtgggacatcattctacggcctggacagttaccatcaaggccctatggaccacatggaacaggaagtgatgggagaagcatttatgagccacctctcataggatgagtggttggaaatattgtcctctgacttggctttgcaagaaaacagactctttcaataaccatatcacaaaaattatcccacacaagattaaacaattctgaagagcaaaggaattttcaatgaaatgtcatttaggtctaaaggagcacctatgcttttactatggaaggagagaattagttaattgtattgttgcttctggatttaaggtgaaaggtgaagttaaaagtttggagtattttggcaagacaaacatatctaagaaatcgtatttttctcttaaaggcataagcaaatgctttgctacaataacaaggatagtaagtattttttaaacgaagtgaactatataatattaatatcatagaagtagaaattagatatgaatagaaattgagatattttatcccaaggctcacatacagatagagtctctaatgagcaagaaataaaaatttcaatttgaagtactacatctagggtccatagaaccttaaaactgtattacttagtggtacttgaagttgtacttttacctgtaagacaagacaaagtcatatgcggggtatacacaaacacacacagagtacatcacacaaagcggactgttcttgtgttgtgttaccttaaacatagcgaatgtcatccttgtactcatgaaatatttgttcaatatcttcttcctgagtaatattcacgtgtggcagaagatagaacacaaagtaacctaagtccctatcttctggaagatcacaggttgctgttgagtgtggaaggggaagttggagcaaggggaagatgatcggagtaggcggaggaggaaggggaatacgatggggaggagaaagtggagtaggaagaggaggagctcttctgttcagtggctggaaggccaaggaagggcttgtggctgggaaagaatgggaggcaaaggaggtctgagtggcaggagaagtctgtggcctgaagctctgtatgactttgcaaaacagttgtagtggccatattgggatagagagcaacaggaacacaagggggcgttcagagaagaaatgcttctcctcaatgttttgaagatgatggagagaagaagaaaatgtccagagaccatggaaaacaatgatcactcatgtcaagtaaagctactgtgggaacgcacttgtaatgaaagcagagagttttgaaatgcagagtccctgcaagtacaaaggaccaaatttggagatcaggccatgttactgttgtgagcagtgcaacattacttgaaggctagctctgagtaattaaagatgtatattgtaaatgctaggccatctttaattgttttttaaaggcatgaataca

SEQ ID NO: 673585 - DNA, 911 bp, Homo sapiens
catgcctgatactggcaggaagtgctcaataaacatttgtttgttcaaaataaataaatraatgaataagatgatgtactgagcagcaaagtccatctctagaagtgccagtaaaactggatttcttggtatgaatttcagtacaaacctggagtctctcaaatgctgttttgtttactaattgcagattaggggcctggaatttggtcaaagtccttaacttaaaaaactttattaattttgagattgctttgtgctataggtaggaatttttaatagtataaaaaatacaatagttcctctatatactcctatggaggggaggggtctgtatggtttataattaaacaaaaccaaatcaaggtgaagaaaaatattagaaaaaagggatgcaaagatgtgtgtgtttgctttgcttattccaaagagtcacagaaaaatttaaaaaattaaaatggtaacctgtgggggcaggaagaaagaaagagaatacagaggactgagattacaagttagaaatgtctaaataaatcttgttttatacctttgatcttgggataaaatatgtatttaacataattagaaaataaaaatataaaagcagtacctaaaactagaaatcagaatgaaatcaaggaacctaactgtgtattgagttggtggcatcactatacataggagaattatttcatgtgctttcaaaacatgtttattatactgaatatctctagtaagatacatgctaaggacagcagactattacatatatggaaaacatatctttacatttgtggtactcttgttattctgagactgacatgaattttagaatttcaaaaattaatacttatgttgctgacattgggaaccaagatttttgatgaaagaatgaaggatagatctaagcttaa

SEQ ID NO: 673586 - DNA, 911 bp, Homo sapiens
catgcctgatactggcaggaagtgctcaataaacatttgtttgttcaaaataaataaatgaatgaataagatgatgtactgagcagcaaagtccatctctagaagtgccagtaaaactggatttcttggtatgaatttcagtacaaacctggagtctctcaaatgctgttttgtttactaattgcagattaggggcctggaatttggtcaaagtccttaacttaaaaaactttattaattttgagattgctttgtgctataggtaggaatttttaatagtataaaaaatacaatagttcctctatatactcctatggaggggaggggtctgtatggtttataattaaacaaaaccaaatcaaggtgaagaaaaatattagaaaaaagggatgcaaagatgtgtgtgtttgctttgcttattccaaagagtcacagaaaaatttaaaaaattaaaatggtaacctgtgggggcaggaagaaagaaagagaatacagaggactgagattacaagttagaaatgtctaaataaatcttgttttatacctttgatcttgggataaaatatgtatttaacataattagaaaataaaaatataaaagcagtacctaaaactagaaatcakaatgaaatcaaggaacctaactgtgtattgagttggtggcatcactatacataggagaattatttcatgtgctttcaaaacatgtttattatactgaatatctctagtaagatacatgctaaggacagcagactattacatatatggaaaacatatctttacatttgtggtactcttgttattctgagactgacatgaattttagaatttcaaaaattaatacttatgttgctgacattgggaaccaagatttttgatgaaagaatgaaggatagatctaagcttaa

SEQ ID NO: 673587 - DNA, 1411 bp, Homo sapiens
caatacatatgcacaactgaatgtggctgtgttccaataaaactttatttatagatctggagactkgaatttcatgtaagtttcacatttccccccaccaaccatttaaaaatgtaaaacccattatttagatcatgggacatataaaaacaagcagtggaatagatttggcttgaaggctgttgtttgccaccctctgttccatgctaaaatcagctcttccttaccaaaggcaattatcaaatttttttttttttttttttttttttgagacagaatctcactgtttcccaggctgaagtacagtggtgctatcttggcgcactgcagtctcgacctcccaggctcaagtgatcctcccacctcagtctctgagtagctggaactataggcatgcaccaccacacccggctaatttttttgtagagttttgccatattgcccaggctggtcttgaactcttgagttcaagcaatcctcccaccttggccttccaaaatgatgggattaaaggtgtgagctactgtgcctggcctttttcactcttataaaatataaattaaataccagagtcttttcatttttagaaccgtggggacagtcgagtgcccagaagtgcaattgttaatttatttgtgctaccactatcccacatctatggaatattgttttgattgagttcctctggccccatgggacactagaagcagtttgtggggagaaagggaacactgccttttgatttcccagtgtacgtgcccaaatggaagcacagagtttcaaaggctggcttctctgcttgccaactgcgtggtgctggaccagcatctcagtgtccaagtcagccatgctgaggctcccatctcaccaggttgttgcgaggactcagtgtgacatggcccgttccatacccagcccatggcagagcttcacacgcgcagcagagactatcctgggcatccagagcaaacactgcacgcgtggtttctgggtgtgctggcccctggagaagggctcagggctgggaggactcaaggatatcttcagcccacgcagagagggagtgtgattagctaaagtgcttttctggcttccatgcagcaggtagcaggttcttatctccaactcctgagtagagttgcacaaaaaactccagtctaaccagccagctcttacccattagttcctgaaaagtccctgcttctccccagccacaggaaagagacaattttgggaggaaaatctttcagctgcctgaaagagttcaaccctctttgaggcagctgttctcatgtctgcaggttgacttccgcatctcacctagggcgcacagatgtttgcacagttgccagagttcatttactattatatctacacataaacattatcccatgttatgacatggttgtca

SEQ ID NO: 673588 - DNA, 640 bp, Homo sapiens
tgtagtcagtcaccctaccagttttgaacagcctcgccagatttctcttatgtgagaggaacaaacatcttgctgaagactcgtacttaggtttttgtcccatacagtcraacagagttctaagtgatatatttctctacttactaggctgtgtgaccctaggaaaggtaactccatctctttgggcttcaatttctggagactgggtaataaacagcggccacttagtgggatggctgtgataaatgagaggacatgtacttagggcagtggttctccaagttggtcccacattagagtcacctgtggagctcttaatctcttgatgcccaggccatacccaaaaactcattaaatcagaaattctggcagtaaaatccaggcatcagtgatttttaaagctccacaggtcattcaaatctgcagccaaatttgagccacacgggtttaggagacctcaggttgtttattgccgaggtgcaggcttgcttgggcttgcctgatggatggtgggacaggacctaaaaaagtctatttgttggggattctgagggaccttctgggagaaacagatacaatgagaaggtggcaaacaattggctgagtaacagaagggagcaataattttgagtatagctga

SEQ ID NO: 673589 - DNA, 640 bp, Homo sapiens
tgtagtcagtcaccctaccagttttgaacagcctcgccagatttctcttatgtgagaggaacaaacatcttgctgaagactcgtacttaggtttttgtcccatacagtcgaacagagttctaagtgatatatttctctacttactaggctgtgtgaccctaggaaaggtaactccatctctttgggcttcaatttctggagactgggtaataaacagmggccacttagtgggatggctgtgataaatgagaggacatgtacttagggcagtggttctccaagttggtcccacattagagtcacctgtggagctcttaatctcttgatgcccaggccatacccaaaaactcattaaatcagaaattctggcagtaaaatccaggcatcagtgatttttaaagctccacaggtcattcaaatctgcagccaaatttgagccacacgggtttaggagacctcaggttgtttattgccgaggtgcaggcttgcttgggcttgcctgatggatggtgggacaggacctaaaaaagtctatttgttggggattctgagggaccttctgggagaaacagatacaatgagaaggtggcaaacaattggctgagtaacagaagggagcaataattttgagtatagctga

SEQ ID NO: 673590 - DNA, 643 bp, Homo sapiens
ggtctttcagaaacatagttcccctcagaagggggctgtgagtaacaggtgcatggcatgtatggaagagcagcagaaagagaagatacactcaagagggcaaatttkctttttcactttatgtttttaaataatgtctaaattatgaacttgctttctgaaacacatacttagaaatttctcatgactctaaaacaaatgtgaatagcaaatataatatttgaagctggcctccaacacagagagtttcatttattaatagtatgccagtcagagctttggctctgagatattttgttcatgcataaaccatatatttgaattgacagtactattaatgatggaatgcagttatgtatattatggtaaaagagcaaagtgtgtatttttgaatccgattatatacaagacagattaaaaacagtacttttagaaaatgaatataacccttgatttcctgttcagtaaaacatgtcaatggggaggtctctgaaagccttacagtgaaatatgaggggaaggtgtggagttgcaaggggtttcatttaaacacaaggctcgtgtattaatattttcattgatttattttcctgccaatatgttctgacataaatatggtgatctataatgtatcgaccataaa

SEQ ID NO: 673591 - DNA, 610 bp, Homo sapiens
tgggttttcgtttttaatattctagatttttgataaagtaaatatttcactattttaaaagctgataagatctgttggtcataaaaaactccatgattccgaacttggacttaaattttaatcttattcttaatttattttagtcattggacattccatttgcacatccatttaataattgattttggttagcactatttttcaaagagaccaaaacaggggagaaaagtcagattcttccagtgcgtaagcacttccttatgaatatattagatgttcagaatctatacaaatgctttctataaagctgcttattattcatagatgatgataaaaatgattaacagttatgtrttttttatagtttacaaagcacttctgcatacattatctcatttttttctcatagaagccctgtgaaacaggcattattatcatcatcatttccactttgtaaatgaagacatagaggcagggaaaatttgagtgacttgcccaaggtcattgggcaagcactggcttccaacccaagcctgctaactgcaaatttgtatcctttgcatcaattgcacatcttctctcatttctctcagtacatgagtttcttttt

SEQ ID NO: 673592 - DNA, 2135 bp, Homo sapiens
tgatatatcagtaggtggaaaggccattccatttggaataaaaaatacaccgtaatcagtgtttaagttaacttttctctagggttttacctgtaattctctggactatatgcagttcttcttttagcgtattattcatcatatcacaggtaatatgataattgcttaagatactgcttttctgaagctctcattattttatttggaggcaataactataaatgattctatactgtatcacccacttattatttggccttttgacaaatccttgaatattatcattacactattttctatttttgtagagatgtggtctccctatctttccyaggctgatcttgaactcctaggctcaagcaatcttctcatctcaacctcccaaagtgctgggattacagtcatgagccactgaacctgacccattacactgttaagaatacagtctttatcagttttgcttgtgttggtcataaaaggcctaactacagaagttaaggtctaacctgatgtgtttaaatgatgacgtgttaaaattgccggcattgatctacttctgtgtaagatgttagtctaaaaagttgagagtagaacctaagatataagcaacgtttttgattaaacacacatttaagacaagaattagtaccaaagagctctatgttcattaataagtaaactaatacagatatatacatacatgcacatataattttatatagatccctttttgttgctatctgccattttatataaatatgaaaacatcaatattttatagtaataagccataaacactgtatagttcaagcaattgtatttttccctaagagattccaactatttttaaattaaacatttctctccagtggaattttacattttctctaacagtattaacaattctaactgatagaagctattttatttttcaaaaatttgaattggaagtattttgtgtctccacagaaaattgtcattccaatccatgtgcttaaatatataaaagctgtcactgatgagcaaagggttttccacatgtataagaagaagtgaactgacaagaaatagtttgtattcagccctggagatggtcaagaaattcatgctgatatttaataggacttatcagcaggaaatcaatgagattttaggggtatagctagtttcacaataatgctaggtcaaaacatctgttaaattgttgaacctctttcaactgggggaataaatattaaatttaataaaatgctgtaacaaatcaaacatctattttagctctacacatattttgggatgtatttatagctggttgtaacaatacatgaaaatttcctaccatggattcaacaaccagcaatatttgggtagatagcagtctctattctgtggtgcattttgtactcattcaactgcaattgctgaaaacaatagccgaaaaaaggttcaacatgcctattgaaatcgttaattatttttaaaataagattcaaacattttttccaacaataatattttttgattattcatttcttctattaagagtgtgtgtaggctgggcgcagtggctcatgcctgtaatcccagcaccttgggaggctgaggtgggaggattgcctgaggtcaggagtgtgacaccagcctgaccaacgtggagaaaccccgtctccactaaaaatacaaaattagccggacatggtggtgcatgcctgtaatcccagctactgaggaggctgaggcaggagaatcacctgaacctaggaggcacaggttgcggtaagcagagatcgtgccattacacttcagtctgggcaacaagagcgaaactccatctaaaaaaaaaaagaagatggcaatttgtccatacaacattattctcaaaataaaataataatgtgggattgggacaggcactaatagccctgaaagaaatttttggcatggttttgccacgaaagtcacatttagtccccaatttttacatttggctgtgtataaaactactgtgatccttttatgctttctttttgtcttctctttctgccagttgtttacattcctatacccaattcttgcttcctgacatgcacatattgagtacccagtaatattgaactgtaaatcgtaggttctta

SEQ ID NO: 673593 - DNA, 623 bp, Homo sapiens
gagtggctaagtttgtggtaatactgttacacagcaatagaaaactaataaaattccacaatacttttcaactaaaaatactctgagaagattcacaggttctcaataaaacctgtatggcaacttctgaatcaaggtcacactgctcttggtagtcaaaggaaagtatggtagctatacccaacagtaagttgaaggggtgtccgaagccctaggcagggagtctccacttatacagtttaggagatttagctttgatcctccagctgctgccaggatactaatatattctgtcgagaaacttgctctcaggagatctagaggtgagctcatctgggggctttarggtatcatatttaaagcgttgacctcaggaattcaaaagagcagtgagcccagaggcagcaagtgagtggctcagagaggaatgtgagaagaggaggtgaggaagggcaagcagacatcgacaactgtgtctacagtgtagctttgctctacctgaactaattatgcccctaaagataatgaactttggtgctgctaagttgggtgcagggtaatgggtcctcatctctcatcctcaactttagttaccataggtggctagtacaccagtcatgaaa

SEQ ID NO: 673594 - DNA, 1404 bp, Homo sapiens
gggtttttatggaatccaatcaattaatacatgtaaagcattaaagctgccatctaataagtgctcaaagttagcttttaacaattatgattacttattaaaaggctttctatattagtagacaacagagaagaataaaaagaagagactatagttaagatcattagctgggtgcagtggctcacgcctgtaatcccagcactttgggaggctgaggcatgagatcacttgaggtcaaaagttggacaccagcctggccaacatggtgaaaccccgtctctattataaatacaaaaattagccaggtgtggtggtgcatacctgtaattccagctactcgtgtggctgaggcaggagaatctcttgaacccaggaggcagaggttgcagtgagccaagttygtgccgctgcactccagccaggacaacacagtgagactctgtcccccaccaaaaaatagatcatagttctgcttcacatggtttccactttggtagagatgttaattgcttaatgcaatagttataatatttttaaacttctttatcttctttcacatcacactatggagcctaaaaaagtaagacaataatttccaagattgtcttgcagctaggcatggccatgggaagttatggccattgaactgaaaagtcaaggctggtgggtcttcacagaaaagatttttatctccgaagaagaaacatgtacttgttttatatcttccttacatgaatgtggacatgtttcctggagccacggcagtcattctgttaccatgaggtgaccagcataaagacaagaagataatagatcaataagacactgaataatcccagcatgactgaggtcttggtagcattgtaaggacctgaatcaatgccaaggattatctaactattgcttttttagtatttgaagaaagtgaactattttaaaattcattctactgcccagcacttaacattcatcaatgatatgatgccatgtttctaaccctgtaatcttaaaaattgctcaacctgcatgaactgaagttttcttgtagtggaggggtgtaatgccaccagcaccacaatttggtgataaagaggaaacgaaaagttaccactgtaattgttgctgcaatgatcactttaacttttttttttcaatcacacaaccaactaggttgtgtttgtatttgcctgtgttacactatatgctgattttaaaacaaaattaattgtggggttttttttagagacactataaagtccttttattcaggtagtaagatattatcatgcagtatatttcaagtggtcccaatcacctagatgattaatttagatagtaaaatgtatttaaaatatagattatttttaaaaacatgccattttattaatttaatggactatttta

SEQ ID NO: 673595 - DNA, 1398 bp, Homo sapiens
ttaggtgagaaagagaagctagcaaaggaaactgaaaaaaaatgagctaacagggaatgcaagagtatggtgttctgtaagtaaatgagaggggtattcaagaagtgaagcttgactttcaaatgctgctggaatcctgggaaacaaataagtagtaggatagtgatagacctgtatgccaatgtgaagagaaatatccaaatcctcttctataatggaggtgcccctcagcaggctgactgaactagttacttccgtaggcagagacggatcaactggcaagatgtcagtccttctatgtcattgccagaattcagacagcaaatgccaatttttgttttgttttgtttaaaaaatatattcaatttttcaaagttacaaatataaaatcccagttgtttcctaagccattaagttcagcttataaatattattattttacttatataacaaaaggagtttaatattcaatccaagttttatttaattaagctcctttaaacacttaagtggcatttatatattaatatatttcatttccttgagtacttaatttatctgaccaagacaaaccttcccaagtacttatagtccaataaattaagctcataaatacagcaaatcttagccattttaaatgttccaaaactacatagaaacttagcaatgattccaccactgtactccagcctgggcgaaagagcaagactctgtctctaaacaaatttaaaaaagaaaattagacacttagcaagatttcaacttaaaattcaagtataaatactcaacattttttacttagcattacaaagcaaatctgttactctcacaaagttgttaatcttacatttgtcaaggacttaaaatgcaaactgcaaagtttcttaaaacaaatggttatgataagatgttcttaaacatgactatgttatgtcttgatgttcttaaacatgcctatccttggaaagcttggaactgagggattatgctggggcaaggaaccaaaatgagttcaagagggaggcaagacttcagaaccatagaaagtatgaaatgaaaaagtgacagaaccaaagtaatcagagacatgggagtcagggataacagatggaaggcaggattggggatagagagggaggatatgcagcattgcctgacagtgaatggctgaagttcatcaggtagatgagggtaaactgcagcatttaaatctactctaggccgggcgcggtggctcacgcctgtaatcccagcactttgggaggtcgaggcgggtggatcacgaggtcaggagatcgagacagtcctggctaacacggtgaaaccccgtctctactaaaatatacaaaaaattagccgggcgtggtggygggcgccggtagtctcaactactcggga

SEQ ID NO: 673596 - DNA, 696 bp, Homo sapiens
tttggtaggtcatggggaattactaaaggttttgaacatgtgagtgtcaaaatcagagccgtactttagggagaataaaagagtaacagtgtatctaggaagaatgaaaacgaaaaggagactggaaaattgtcatggctgtccttcccttgcaccttattaaggccctcgtaagatcctttgaccactgagaggtataaagtggaagatgttctgagttgaaaaaccagatctaggtcatagtggtctggtttaccatggtctctgtgacctttggaagtcatttatcctctctgagtttcaatttccctatgtatgaatctattaattattctttttggaaaaagtcaggagccagctatgagattcagcaaatgattagatactaggagtagaacacacacacaatatgaaattgtttcaagtgattaaaataagaggccaggcacagtggctsgtgcctgtaatcccagcacttcgagaggccaaggcaggaggattgctttagcccaggagtttgagaccagcctggccaacaccgtgaaatccccctactaaaaatacaaaaattagccaggcatggtggcgggtgcctgtaatcgcagctactccagaggctgaggcaggagaattgcttgaatctgggaggcggatgttgcagtgagccaagatcgcaccactgcactccagcctggg

SEQ ID NO: 673597 - DNA, 636 bp, Homo sapiens
acaccacgttttccctgttgtcagactgtcacatcctcaggtcaacatccaatttgcactaaatacactggtcttttgtatgcgctgtctggatggcatggacagtacttgattatttttcatcctacattctgagtagtrcactatagtactagcagtaaacatttatggagagactagtataccaacactaatgtctaatgataaccctttgaggtaggttttgttttcctcatctgattcaaaccggtttagaagcatagattatctcactgatcacaaaaccaaaaagatatagcacaggatatatctgactccaaagcctttctgctcaaactgccttcagtttcagtaatgtacagtgtcattcaggctgacttcccagctgaactataggctcagtggaggcagtgtctgcaagcatgactcatgtactcattcaagtcctcagataagtggaagctaagacaagattaaatgggcaagaatctgtttttgccttacccagcttcttttatattttttcttacaggcatttccctaatcaatttcttctgcacttgattgattaatttgtattcaaaaatgatcatgaaaacagtttggaaatttcttacaaaactaaatatgcaatta

SEQ ID NO: 673598 - DNA, 636 bp, Homo sapiens
acaccacgttttccctgttgtcagactgtcacatcctcaggtcaacatccaatttgcactaaatacactggtcttttgtatgcgctgtctggatggcatggacagtacttgattatttttcatcctacattctgagtagtgcactatagtactagcagtaaacatttatggagagactagtataccaacactaatgtctaatgataaccctttgaggtaggttttgttttcctcatctgattcaaaccggtttagaagcatagattatctcactgatcacaaaaccaaaaagatatagcacaggatatatctgactccaaagcctttctgctcaaactgccttcagtttcagtaatgtacagtgtcattcaggctgacttcccagctgaactataggctcagtggaggcagtgtctgcaagcatgactcatgtactcattcaagtcctcagataagtggaagctaagacaarattaaatgggcaagaatctgtttttgccttacccagcttcttttatattttttcttacaggcatttccctaatcaatttcttctgcacttgattgattaatttgtattcaaaaatgatcatgaaaacagtttggaaatttcttacaaaactaaatatgcaatta

SEQ ID NO: 673599 - DNA, 618 bp, Homo sapiens
agtattatattttaatatcaacacttttgcacaagtttttaacatgatttttcatttttttgtgtatttcagctttcttctgctctatgataagccttattatgtcattgaaaatctgttcttttcatcatattttcaacattgcctcacatgatatctaggataaagtrggcactttttaaatatttattgaatagaaacaatgggaagagatctagttatttattttataatacatttaattttatagtctgtattagtctgttttcatgctgctgataaagacatactggagacttggcaatttacaaaagaaagaggtttaatggaattaccatttaatggacctacagccctggagagggatcaaaatcatgggggaaggtgaaaggcatgtctcacatgatggcagacaagacaagagagtttgcatagggaaactttctttcatagaaccatcagatctcatgggacttatatcacaagaacagcatgggaaagacctggcccggtaattcagttacttcctaccaggtccttcccacaacatgtggaaattcaagatgagatttgggtggggacacagccaaaccatcttataccacccctgacccctcc

SEQ ID NO: 673600 - DNA, 618 bp, Homo sapiens
agtattatattttaatatcaacacttttgcacaagtttttaacatgatttttcatttttttgtgtatttcagctttcttctgctctatgataagccttattatgtcattgaaaatctgttcttttcatcatattttcaacattgcctcacatgatatctaggataaagtgggcactttttaaatatttattgaatrgaaacaatgggaagagatctagttatttattttataatacatttaattttatagtctgtattagtctgttttcatgctgctgataaagacatactggagacttggcaatttacaaaagaaagaggtttaatggaattaccatttaatggacctacagccctggagagggatcaaaatcatgggggaaggtgaaaggcatgtctcacatgatggcagacaagacaagagagtttgcatagggaaactttctttcatagaaccatcagatctcatgggacttatatcacaagaacagcatgggaaagacctggcccggtaattcagttacttcctaccaggtccttcccacaacatgtggaaattcaagatgagatttgggtggggacacagccaaaccatcttataccacccctgacccctcc

SEQ ID NO: 673601 - DNA, 618 bp, Homo sapiens
agtattatattttaatatcaacacttttgcacaagtttttaacatgatttttcatttttttgtgtatttcagctttcttctgctctatgataagccttattatgtcattgaaaatctgttcttttcatcatattttcaacattgcctcacatgatatctaggataaagtgggcactttttaaatatttattgaatagaaacaatgggaagagatctagttatttattttataatacatttaattttatagtctgtattagtctgttttcatgctgctgataaagacatactggagacttggcaatttacaaaagaaagaggtttaatggaattaccatttaatggacctacagccctggagagggatcaaaatcatgggggaaggtgaaaggcaygtctcacatgatggcagacaagacaagagagtttgcatagggaaactttctttcatagaaccatcagatctcatgggacttatatcacaagaacagcatgggaaagacctggcccggtaattcagttacttcctaccaggtccttcccacaacatgtggaaattcaagatgagatttgggtggggacacagccaaaccatcttataccacccctgacccctcc

SEQ ID NO: 673602 - DNA, 1652 bp, Homo sapiens
agcagaaactccgccatcccatatggaaagctaattgctttcctttttaacgtatttattcttagaccagtctgtgcatcatctggagcagactgatgattagctgacaaaattgttttatcttgcctactggcaccaacagacagcagagagcctttgaaagatgactttaactgccactgcacaccagaaacggatgtgtgcttgcaaagacagctgtctttttcmccattcttttcccccattttaatagtcagatatgattaacagaatttcttcaatgttcttgataaatagtgtttctctggtctacatagcaaaaatatgagctgtagagatggtaggaccagggaggttaaaaaaattgtaaccagactgaaacagagctgattcccttatgagcttaagagctaaaatggtggaagtttcaccctagagaatttccagaaacttccaaatacactcctgtgatattttttctatccacttattgtcttcattttaagcaagcacactgaattctaacagactgttagggaaaagtaggtatgctgaaacctcctccaagaaacaactattttagactctttgatacagtgagcgtttaaaataaatgaaaatacacttcactgaaatctggtggatgagagaaacaaaagccaaaatcacttcctattttgccttcaactgccttggcttataatccaattgtagagtctcacagttttgttctatatgaggaaatatttatcctctggctagaaaaagagctcaaccacccttccaatatttattctaaaacagaaattgttttactaggtacagagttaccagtgaacagttgttgaaaaaagggatgggaacttcagccctgctgtagaaactccttaaactggctaaccagacaagtctcctgtctttgcaaaatgtcaggttatctttcaaattcacgagcataatgcatgacctcaattagctcagctcccagctgcaggttatctattcatcaaatgtcacagttaacctaagcagctgcttccataacccaaagctccctaccctatatttttttcagtactttgtaatctcatattgtaattctataccaaagaagaagaagaaaaaaaaaaccttgtagaaccaacccttaattgtactgattttatggttagaagaaacagcacaggagataaaggaacaagaagggaagaagtcacgatgataaaaatttactctagtgaaacaaatggaaaaatatttaagcatgacaaagaaatcacaaaattgttcctttagttagggtcagcagtcattgccctcggtgatgaatgttgaggcttccaggcaaaggttctcagctctgtctcaggcacagaccgtccatctcctctaaagatggatgtggccctgtcaggctggatgacatttcacagtcccttcaagcctcatgatgccatggttctgtgaacagcgagctacagttcaaagttgaatgaccacgaaaaagtcatctgatgagaaatcggaatgccacgaataatattgaaatgaaaaggaaagcttgatcttgaaaaagttccaataaccctcaaagccaaacagaatttccctggatgttggtccaactttaacatctgccaaagagcaattta

SEQ ID NO: 673603 - DNA, 1652 bp, Homo sapiens
agcagaaactccgccatcccatatggaaagctaattgctttcctttttaacgtatttattcttagaccagtctgtgcatcatctggagcagactgatgattagctgacaaaattgttttatcttgcctactggcaccaacagacagcagagagcctttgaaagatgactttaactgccactgcacaccagaaacggatgtgtgcttgcaaagacagctgtctttttcaccattcttttcccccattttaatagtcagatatgattaacagaatttcttcaatgttcttgataaatagtgtttctctggtctacatagcaaaaatatgagctgtagagatggtaggaccagggaggttaaaaaaattgtaaccagactgaaacagagctgattcccttatgagcttaagagctaaaatggtggaagtttcaccctagagaatttccagaaacttccaaatacactcctgtgwtattttttctatccacttattgtcttcattttaagcaagcacactgaattctaacagactgttagggaaaagtaggtatgctgaaacctcctccaagaaacaactattttagactctttgatacagtgagcgtttaaaataaatgaaaatacacttcactgaaatctggtggatgagagaaacaaaagccaaaatcacttcctattttgccttcaactgccttggcttataatccaattgtagagtctcacagttttgttctatatgaggaaatatttatcctctggctagaaaaagagctcaaccacccttccaatatttattctaaaacagaaattgttttactaggtacagagttaccagtgaacagttgttgaaaaaagggatgggaacttcagccctgctgtagaaactccttaaactggctaaccagacaagtctcctgtctttgcaaaatgtcaggttatctttcaaattcacgagcataatgcatgacctcaattagctcagctcccagctgcaggttatctattcatcaaatgtcacagttaacctaagcagctgcttccataacccaaagctccctaccctatatttttttcagtactttgtaatctcatattgtaattctataccaaagaagaagaagaaaaaaaaaaccttgtagaaccaacccttaattgtactgattttatggttagaagaaacagcacaggagataaaggaacaagaagggaagaagtcacgatgataaaaatttactctagtgaaacaaatggaaaaatatttaagcatgacaaagaaatcacaaaattgttcctttagttagggtcagcagtcattgccctcggtgatgaatgttgaggcttccaggcaaaggttctcagctctgtctcaggcacagaccgtccatctcctctaaagatggatgtggccctgtcaggctggatgacatttcacagtcccttcaagcctcatgatgccatggttctgtgaacagcgagctacagttcaaagttgaatgaccacgaaaaagtcatctgatgagaaatcggaatgccacgaataatattgaaatgaaaaggaaagcttgatcttgaaaaagttccaataaccctcaaagccaaacagaatttccctggatgttggtccaactttaacatctgccaaagagcaattta

SEQ ID NO: 673604 - DNA, 472 bp, Homo sapiens
aagaaaatgtggtacatatacaccattcaatactacacagccataaaaaagaatgaaatcatgttctttgcagcaacatggatggagctgaaggccattatcctaagataattaatgcaggaacagaaaaccaaatactkcatgttctgtcttataagtgggagttatacattgagtacacatagacataaaaaggggacaatagacaacaggggctacttttgagggtggaggatgcaaggagggtgagaatctaaaaattacctgttgggtactgtgctcattacctgagtgatgaaataatctgtatgccaaacacctgtgacatgcaatttatccatgtaacaaacctgcctgtctaccccctgaacctaaaataaaagttgggggaaagaaaaactgaatccaagggaaaacgagaaggtaaaaatgtttaatgatcatttatgccgaagtattaatacattgtatc

SEQ ID NO: 673605 - DNA, 472 bp, Homo sapiens
aagaaaatgtggtacatatacaccattcaatactacacagccataaaaaagaatgaaatcatgttctttgcagcaacatggatggagctgaaggccattatcctaagataattaatgcaggaacagaaaaccaaatacttcatgttctgtcttataagtgggagttatacattgagtacacatagacataaaaaggggacaatagacaacaggggctacttttgagggtggaggatgcaaggagggtgagaatctaaaaattacctgttgggtactgtgctcattacctgagtgatgaaataatctgtatgccaaacacctgtgacatgcaatttatccatgtaacaaacctgcctgtstaccccctgaacctaaaataaaagttgggggaaagaaaaactgaatccaagggaaaacgagaaggtaaaaatgtttaatgatcatttatgccgaagtattaatacattgtatc

SEQ ID NO: 673606 - DNA, 567 bp, Homo sapiens
tggaccgctagagttgtgacctgagagccatggtttctttctcaggaaagggagaattgtggcctggggcaattttgcaatctgagcagagaatacttggaatccagctagctgtttcagcttgctgctactggtagaccactgggtcaagggtgtggtagcttggtgcctcttactaacacttcctgggctgtggagcctgagttatcctctctttcccatgtgggcccttttgagtggcaaaggtggttctactccttcctgcaacattgcctaaggggcaagggaactgactttcaaccctgttagacttcctctcacatccaccattggacagcctgaacatagccttgtctgacttatgcctccccagcttttcccctcccacctttytcagttgtagaacatgggagaggtacctttgagagttccatggctccacccattgatgagatatatgagtactttctctagtcaacagaggtgaagcataaattctactgctaccaccagagctggctttcacctgcaagtgtcatctattggctgggagtccaccttgcacag

SEQ ID NO: 673607 - DNA, 646 bp, Homo sapiens
aatatattagaaagaagcttgccctagagaaggagaatttctcagagttccatgaaggcaaggactttgcctagctttttcaccccttgccactgctatagcctattggactgaaaagaggggatgaaagaggacaatgaaggaatatagacatgcagaaaattatcagaatgatttgtggttgcttagaaaggagctagtgaaattgaattcaacagaactctgtttcttctaccttccctttctctcctacctctaaaaaaaaaaaatagtcctcaaggttaaaatttacaacagtggagaaatgtaacaaaatcttgattgatcaatagaataaaagaggagctaatggcacattggtgacaaaaaaattatgttgaccatttgggagcatagattstctgcagtgatggtatcggggaaacacctaatcatttgtttcactcaacgattctaacactgtctcactaactgggtattctaagtgaactctgctattagacctagagtctttgtgtgctgcctcttttcatttttaaaaatataattaaaagaaaattttaagaataatttttccaaaacataacagaaaagagcagaattcagcataatgattaaatgtgctgtgttaaacatattgccaata

SEQ ID NO: 673608 - DNA, 2990 bp, Homo sapiens
gaattgttaatgtgcattctctccttgtatgcaaagctacaggaaaggccacttataataagagccttctgggtaagcaagtaattggcaaaggaaactagaagactttagccatccttaggctggtgcttttaacttcttcccaggaattctgacggactgactccttaccaagcggtgctgactcttaaacctgttggtcgctgtgtcctccccactgtgcagggctgcagagtctctcatcaaattattactccttagaattctctcttctgtggccgggcgtggtggcgcacgcctgtaatcccagcactttgggaagctgaggtgggtggatcacctgaggtcaggagttcgagacaagcctgaccaacatggtgaaactcctgtctcaatgaaatacaaaaaaaaaaaaaaaaaaaattagccaggtgtggtggtgcatgcctgtaatcccagctacatgggaggctgaggcaggagaatcgcttgaacctgggaggcagaggttgcagtgagctgagatcgcaccattgcactccagcctgggcgacaagagtgaaactctgtctgaaaaaataataataataattctctcttccattaataaaacagtttccaaagtatgttcctcaaaacatttccatggtttaataggtatcactcaaaaaagggatcccatggctttttaaagtgggctaaaggtaacagtcctacgggactttaaaacccctttattcaccaaaccctcttcagaaaatagtgttgtatagactacactttggaaaacactgcattaacccattcttttttcttgctagatataatttgcttgattaagtaacagtgctaaaaatgctaatgaagttacattttcctgaatagacaacatggtccccatgttaggaatgtgtgttgagaagctgctggagggcactgttgtagagggcaggcttcagtgatagacctcactctgtcattttctggccatgtgatatgggcaatttgtttaatatcattaagcttcaatttcacccttcataaagtggaatgaagtattgtctctgctttattaatctgcccactcttcactatgactgctgctgacaccaccctgctccacgccaccatcatttctcacatgtaacccagtctgccagcttccctcttcctcctctgcctctcctcccaggctattctcaagatggctgctacatgttgggtacaatgtacactgctcaggttatgggtgcacggaaatttcagacttcaccaccatacaattmatccatgtagctttacttctaaagctattgaaatttttttttaaatgatagctgctagagaagtctgatttaaaaagaccatgtcactcctcaaatccctccattggcttctcactcactcaggtaaaaaccatggttttcacaatgatctagtggcaagtcaaaacttctactatttaacatttttctgtactccatccttatgtgtaaactaaacatagtatgtacacagtctgtggttgtatttttttaagacttcaatgcaaatgtattcatataatataaattgaaagtgtactttgtatacaaagctgaaaaacactaaaaatcttgtgtacttccaggaaaaatgctttatgtatttttaaataaattggttcatttttttcttctacatgttctttgaataactggtgcctttctcatgttcaggttatacttatctacagaaatagacaacccccattttcttccatcagtttataactttgttactatgatcaacttcactgtaacattccaaggtttgcaagatcaactcttgtctactgtggtaactcatgaagttcctcatttagaagatcaacgttccaagttactggagagtatttcccttgatgccataactcttgaagaactagaggaaaaaacattaaatttactgcagaaagcactaggtaagtcaagatatttagtgatagtaagagatctttgcaaaggatagaataaaaagttataagaaccaaattttgaatttgagccaaaaataccaaatctccatttccaccaggtaactgataaaggtaggtgaatcaccccatttctaaacttaaatattgtgaattttggtgtccctcagttccacttttgcttcagctcattgtgttgtagaacatttgccaccctgtaactggtataagttctaagacaaatcttacggaatctagttagttccctccaaggctctatgcctgtacttcaggtacagacatctgttatatgtctcaagttagattacagagactcaatgattgggttttccccaagtattaataatgaaaagatattttattttatttttctttattttttattttttttagacagtcttactccatcacccagtctggagtgcagtggcgcaatctcggctcactgcaacctccgcctcctggattccagcaattctccagcctcaacttcctgagtacctgggattaccagcgcatgccaccacacccgacttaataactaaaagatatttttaaagaaaataatccagtgacttttatgtatcccattaaaacatgctgttggccgggcacggtggctcacgcctgtaatcccaacactttgggaggccgaagcaggtggatcacccgaggtcaggagttcgagaccagcctgaccaacatggagaaaccccatctctactaaaaatacaccagcctgaccaacatggagaaaccccgtctctactaaaaatacaaaattagccagacttggtggcgcatgcctgtaatcccagctacttgggaggttgagacaggagaattgcttgaacccaggagatggaggttgcggtgagtcaagatggtgccattgcactccagcttgggttagaagagcaaaactccttcaaacaaacaaacaaaaaaagcttttaattaaagtagcagtagaaattattttcttcttcagcac

SEQ ID NO: 673609 - DNA, 2990 bp, Homo sapiens
gaattgttaatgtgcattctctccttgtatgcaaagctacaggaaaggccacttataataagagccttctgggtaagcaagtaattggcaaaggaaactagaagactttagccatccttaggctggtgcttttaacttcttcccaggaattctgacggactgactccttaccaagcggtgctgactcttaaacctgttggtcgctgtgtcctccccactgtgcagggctgcagagtctctcatcaaattattactccttagaattctctcttctgtggccgggcgtggtggcgcacgcctgtaatcccagcactttgggaagctgaggtgggtggatcacctgaggtcaggagttcgagacaagcctgaccaacatggtgaaactcctgtctcaatgaaatacaaaaaaaaaaaaaaaaaaaattagccaggtgtggtggtgcatgcctgtaatcccagctacatgggaggctgaggcaggagaatcgcttgaacctgggaggcagaggttgcagtgagctgagatcgcaccattgcactccagcctgggcgacaagagtgaaactctgtctgaaaaaataataataataattctctcttccattaataaaacagtttccaaagtatgttcctcaaaacatttccatggtttaataggtatcactcaaaaaagggatcccatggctttttaaagtgggctaaaggtaacagtcctacgggactttaaaacccctttattcaccaaaccctcttcagaaaatagtgttgtatagactacactttggaaaacactgcattaacccattcttttttcttgctagatataatttgcttgattaagtaacagtgctaaaaatgctaatgaagttacattttcctgaatagacaacatggtccccatgttaggaatgtgtgttgagaagctgctggagggcactgttgtagagggcaggcttcagtgatagacctcactctgtcattttctggccatgtgatatgggcaatttgtttaatatcattaagcttcaatttcacccttcataaagtggaatgaagtattgtctctgctttattaatctgcccactcttcactatgactgctgctgacaccaccctgctccacgccaccatcatttctcacatgtaacccagtctgccagcttccctcttcctcctctgcctctcctcccaggctattctcaagatggctgctacatgttgggtacaatgtacactgctcaggttatgggtgcacggaaatttcagacttcaccaccatacaattaatccatgtagctttactyctaaagctattgaaatttttttttaaatgatagctgctagagaagtctgatttaaaaagaccatgtcactcctcaaatccctccattggcttctcactcactcaggtaaaaaccatggttttcacaatgatctagtggcaagtcaaaacttctactatttaacatttttctgtactccatccttatgtgtaaactaaacatagtatgtacacagtctgtggttgtatttttttaagacttcaatgcaaatgtattcatataatataaattgaaagtgtactttgtatacaaagctgaaaaacactaaaaatcttgtgtacttccaggaaaaatgctttatgtatttttaaataaattggttcatttttttcttctacatgttctttgaataactggtgcctttctcatgttcaggttatacttatctacagaaatagacaacccccattttcttccatcagtttataactttgttactatgatcaacttcactgtaacattccaaggtttgcaagatcaactcttgtctactgtggtaactcatgaagttcctcatttagaagatcaacgttccaagttactggagagtatttcccttgatgccataactcttgaagaactagaggaaaaaacattaaatttactgcagaaagcactaggtaagtcaagatatttagtgatagtaagagatctttgcaaaggatagaataaaaagttataagaaccaaattttgaatttgagccaaaaataccaaatctccatttccaccaggtaactgataaaggtaggtgaatcaccccatttctaaacttaaatattgtgaattttggtgtccctcagttccacttttgcttcagctcattgtgttgtagaacatttgccaccctgtaactggtataagttctaagacaaatcttacggaatctagttagttccctccaaggctctatgcctgtacttcaggtacagacatctgttatatgtctcaagttagattacagagactcaatgattgggttttccccaagtattaataatgaaaagatattttattttatttttctttattttttattttttttagacagtcttactccatcacccagtctggagtgcagtggcgcaatctcggctcactgcaacctccgcctcctggattccagcaattctccagcctcaacttcctgagtacctgggattaccagcgcatgccaccacacccgacttaataactaaaagatatttttaaagaaaataatccagtgacttttatgtatcccattaaaacatgctgttggccgggcacggtggctcacgcctgtaatcccaacactttgggaggccgaagcaggtggatcacccgaggtcaggagttcgagaccagcctgaccaacatggagaaaccccatctctactaaaaatacaccagcctgaccaacatggagaaaccccgtctctactaaaaatacaaaattagccagacttggtggcgcatgcctgtaatcccagctacttgggaggttgagacaggagaattgcttgaacccaggagatggaggttgcggtgagtcaagatggtgccattgcactccagcttgggttagaagagcaaaactccttcaaacaaacaaacaaaaaaagcttttaattaaagtagcagtagaaattattttcttcttcagcac

SEQ ID NO: 673610 - DNA, 2990 bp, Homo sapiens
gaattgttaatgtgcattctctccttgtatgcaaagctacaggaaaggccacttataataagagccttctgggtaagcaagtaattggcaaaggaaactagaagactttagccatccttaggctggtgcttttaacttcttcccaggaattctgacggactgactccttaccaagcggtgctgactcttaaacctgttggtcgctgtgtcctccccactgtgcagggctgcagagtctctcatcaaattattactccttagaattctctcttctgtggccgggcgtggtggcgcacgcctgtaatcccagcactttgggaagctgaggtgggtggatcacctgaggtcaggagttcgagacaagcctgaccaacatggtgaaactcctgtctcaatgaaatacaaaaaaaaaaaaaaaaaaaattagccaggtgtggtggtgcatgcctgtaatcccagctacatgggaggctgaggcaggagaatcgcttgaacctgggaggcagaggttgcagtgagctgagatcgcaccattgcactccagcctgggcgacaagagtgaaactctgtctgaaaaaataataataataattctctcttccattaataaaacagtttccaaagtatgttcctcaaaacatttccatggtttaataggtatcactcaaaaaagggatcccatggctttttaaagtgggctaaaggtaacagtcctacgggactttaaaacccctttattcaccaaaccctcttcagaaaatagtgttgtatagactacactttggaaaacactgcattaacccattcttttttcttgctagatataatttgcttgattaagtaacagtgctaaaaatgctaatgaagttacattttcctgaatagacaacatggtccccatgttaggaatgtgtgttgagaagctgctggagggcactgttgtagagggcaggcttcagtgatagacctcactctgtcattttctggccatgtgatatgggcaatttgtttaatatcattaagcttcaatttcacccttcataaagtggaatgaagtattgtctctgctttattaatctgcccactcttcactatgactgctgctgacaccaccctgctccacgccaccatcatttctcacatgtaacccagtctgccagcttccctcttcctcctctgcctctcctcccaggctattctcaagatggctgctacatgttgggtacaatgtacactgctcaggttatgggtgcacggaaatttcagacttcaccaccatacaattaatccatgtagctttacttctaaagctattgaaatttttttttaaatgatagctgctagagaagtctgatttaaaaagaccatgtcactcctcaaatccctccattggcttctcactcactcaggtaaaaaccatggttttcacaatgatctagtggcaagtcaaaacttctactatttaacatttttctgtactccatccttatgtgtaaactaaacatagtatgtacacagtctgtggttgtatttttttaagacttcaatgcaaatgtattcatataatataaattgaaagtgtactttgtatacaaagctgaaaaacactaaaaatcttgtgtacttccaggaaaaatgctttatgtatttttaaataaattggttcatttttttcttctacatgttctttgaataactggtgcctttctcatgttcaggttatacttatctacagaaatagamaacccccattttcttccatcagtttataactttgttactatgatcaacttcactgtaacattccaaggtttgcaagatcaactcttgtctactgtggtaactcatgaagttcctcatttagaagatcaacgttccaagttactggagagtatttcccttgatgccataactcttgaagaactagaggaaaaaacattaaatttactgcagaaagcactaggtaagtcaagatatttagtgatagtaagagatctttgcaaaggatagaataaaaagttataagaaccaaattttgaatttgagccaaaaataccaaatctccatttccaccaggtaactgataaaggtaggtgaatcaccccatttctaaacttaaatattgtgaattttggtgtccctcagttccacttttgcttcagctcattgtgttgtagaacatttgccaccctgtaactggtataagttctaagacaaatcttacggaatctagttagttccctccaaggctctatgcctgtacttcaggtacagacatctgttatatgtctcaagttagattacagagactcaatgattgggttttccccaagtattaataatgaaaagatattttattttatttttctttattttttattttttttagacagtcttactccatcacccagtctggagtgcagtggcgcaatctcggctcactgcaacctccgcctcctggattccagcaattctccagcctcaacttcctgagtacctgggattaccagcgcatgccaccacacccgacttaataactaaaagatatttttaaagaaaataatccagtgacttttatgtatcccattaaaacatgctgttggccgggcacggtggctcacgcctgtaatcccaacactttgggaggccgaagcaggtggatcacccgaggtcaggagttcgagaccagcctgaccaacatggagaaaccccatctctactaaaaatacaccagcctgaccaacatggagaaaccccgtctctactaaaaatacaaaattagccagacttggtggcgcatgcctgtaatcccagctacttgggaggttgagacaggagaattgcttgaacccaggagatggaggttgcggtgagtcaagatggtgccattgcactccagcttgggttagaagagcaaaactccttcaaacaaacaaacaaaaaaagcttttaattaaagtagcagtagaaattattttcttcttcagcac

SEQ ID NO: 673611 - DNA, 2990 bp, Homo sapiens
gaattgttaatgtgcattctctccttgtatgcaaagctacaggaaaggccacttataataagagccttctgggtaagcaagtaattggcaaaggaaactagaagactttagccatccttaggctggtgcttttaacttcttcccaggaattctgacggactgactccttaccaagcggtgctgactcttaaacctgttggtcgctgtgtcctccccactgtgcagggctgcagagtctctcatcaaattattactccttagaattctctcttctgtggccgggcgtggtggcgcacgcctgtaatcccagcactttgggaagctgaggtgggtggatcacctgaggtcaggagttcgagacaagcctgaccaacatggtgaaactcctgtctcaatgaaatacaaaaaaaaaaaaaaaaaaaattagccaggtgtggtggtgcatgcctgtaatcccagctacatgggaggctgaggcaggagaatcgcttgaacctgggaggcagaggttgcagtgagctgagatcgcaccattgcactccagcctgggcgacaagagtgaaactctgtctgaaaaaataataataataattctctcttccattaataaaacagtttccaaagtatgttcctcaaaacatttccatggtttaataggtatcactcaaaaaagggatcccatggctttttaaagtgggctaaaggtaacagtcctacgggactttaaaacccctttattcaccaaaccctcttcagaaaatagtgttgtatagactacactttggaaaacactgcattaacccattcttttttcttgctagatataatttgcttgattaagtaacagtgctaaaaatgctaatgaagttacattttcctgaatagacaacatggtccccatgttaggaatgtgtgttgagaagctgctggagggcactgttgtagagggcaggcttcagtgatagacctcactctgtcattttctggccatgtgatatgggcaatttgtttaatatcattaagcttcaatttcacccttcataaagtggaatgaagtattgtctctgctttattaatctgcccactcttcactatgactgctgctgacaccaccctgctccacgccaccatcatttctcacatgtaacccagtctgccagcttccctcttcctcctctgcctctcctcccaggctattctcaagatggctgctacatgttgggtacaatgtacactgctcaggttatgggtgcacggaaatttcagacttcaccaccatacaattaatccatgtagctttacttctaaagctattgaaatttttttttaaatgatagctgctagagaagtctgatttaaaaagaccatgtcactcctcaaatccctccattggcttctcactcactcaggtaaaaaccatggttttcacaatgatctagtggcaagtcaaaacttctactatttaacatttttctgtactccatccttatgtgtaaactaaacatagtatgtacacagtctgtggttgtatttttttaagacttcaatgcaaatgtattcatataatataaattgaaagtgtactttgtatacaaagctgaaaaacactaaaaatcttgtgtacttccaggaaaaatgctttatgtatttttaaataaattggttcatttttttcttctacatgttctttgaataactggtgcctttctcatgttcaggttatacttatctacagaaatagacaacccccattttcttccatcagtttataactttgttactatgatcaacttcactgtaacattccaaggtttgcaagatcaactcttgtctactgtggtaactcatgaagttcctcatttagaagatcaacgttccaagttactggagagtatttcccttgatgccataactcttgaagaactagaggaaaaaacattaaatttactgcagaaagcactaggtaagtcaagatatttagtgatagtaagagatctttgcaaaggatagaataaaaagttataagaaccaaattttgaatttgagccaaaaataccaaatctccatttccaccaggtaactgataaaggtaggtgaatcaccccatttctaaacttaaatattgtgaattttggtgtccctcagttccacttttgcttcagctcattgtgttgtagaacatttgccaccctgtaactggtataagttctaagacaaatcttacggaatctagttagttccctccaaggctctatgcctgtacttcaggtacagacatctgttatatgtctcaagttagattacagagactcaatgattgggttttccccaagtattaataatgaaaagatattttattttatttttctttattttttattttttttagacagtcttactccatcacccagtctggagtgcagtggcgcaatctcggctcactgcaacctccrcctcctggattccagcaattctccagcctcaacttcctgagtacctgggattaccagcgcatgccaccacacccgacttaataactaaaagatatttttaaagaaaataatccagtgacttttatgtatcccattaaaacatgctgttggccgggcacggtggctcacgcctgtaatcccaacactttgggaggccgaagcaggtggatcacccgaggtcaggagttcgagaccagcctgaccaacatggagaaaccccatctctactaaaaatacaccagcctgaccaacatggagaaaccccgtctctactaaaaatacaaaattagccagacttggtggcgcatgcctgtaatcccagctacttgggaggttgagacaggagaattgcttgaacccaggagatggaggttgcggtgagtcaagatggtgccattgcactccagcttgggttagaagagcaaaactccttcaaacaaacaaacaaaaaaagcttttaattaaagtagcagtagaaattattttcttcttcagcac

SEQ ID NO: 673612 - DNA, 628 bp, Homo sapiens
aagtctttaaaaaggtgtttattcacgcaggattaaaagggaaacccactgttctgatggttcccaatttaaacatagaacaagtaagtactttttgtctttgctrtttgctgaagtttgatatctatgtggctaccccctccccaaaaatttaatatttgaaaagaaaacaagaaaatatttatcaatggttctattaccctacaatatcagttttcttgcagtattctctgttcttatctagtcatagcccacacagtttatatatttgtaatgacgccataggtagttatgaataaatatttcaataaaggtattttctatgtcattatcttgttcattttaattgacagattggaagtaatttatctgtgtagctgaggtcatctgtcttatatcagaactagctttataatctgtattttaaaaaccctttcatctatatccagtatctgtaatctacagttagatatgtaatctacaatctgctcttacagcatccaggcttctgtttctctccattactcttctgctctattttcactgtcagatgcaggactttccttacagaatatgttatttttgtcatatatatatgtgtgtgtgtgtgtgtatgtgtgtgtataga

SEQ ID NO: 673613 - DNA, 1160 bp, Homo sapiens
tacagaaaatatccagtatttatgattgcatacacttagaatgtgaaaggtgtttcaaatcatctggtccaataccttgaggtctagacatttgcttaaggtcaaaataaattaataatagtctaatctggaatccatagctcctggttcaaaaccaatagatctttctacaacattatctgtgagaaaaaggtagattaaattaaggtaactttgattcatgctgactcatgtccctctcaaaattcatactgaaggccttaaccccgaaactgactatactggagaaggaaagcccgtgtaaagacacaacaagaaagcagaatctgcaatccaggaagagaatcctcacaagaaaccaaacttgccaacaccttgatcatggtcttccagcctccagaactgtgagaaaataaatgcctattgttaaagctacccagtctgtggtatttcgttatggcagcccaagtggaacaagacaactgaggacagtgtttttagtgtttttttctataaaatgggtatgacatttgcattaatctaataggaattttttcatgagaataaatgtagagacgattgaaaagtgttaggtactatgttaagataaatactattatatgtatggaagaaaactttttaaagtcatagttgatataaggcacaaaaacatcttctttcaatacaaactgaattgaagtaagattggaagttaaacccagaagagacaggtaaagtaagtgctacataaagaaaactttgtctctaaaatgactagtgtggaaccagatcattttcaaattccttctagctctaaaattccatcacccttgtgatatggatcsgagtgagaaaacatactaaaaagccaagacttatatgacttatattcaaatcatttaaagggcccatgccaaaatatactgacagctgacatttccaaagctttcattttaaacaagtatattaacacaaaatgtgataagtccattgaatctgaactgcttgtgttttctttttaagtacaactttttagcagttattgaccacacaggatgaattatccatttttacaatgagaacactgaaattaacaaaggtaaagtaacttgctaagatcaagtttatttgatcccttgccacaaatttttctcaagatc

SEQ ID NO: 673614 - DNA, 2593 bp, Homo sapiens
ctagagtggatacagaagcccgctggagtaagaagacaaggaagaatgggaaacctccacctagttttctgtcagttgctagaatctaggggctaggccgcttggttatttctggatcctacagaaggatcattctaaaggtagcttcattttagaattaaccgcaaatagggaatgtcccttctacatttggaacttgtgttaaaaatttgcactcatttaagttttaaaaagttgacattccatctgacaaaggagtttcatatgcttaaagcctttagctaaaccaatagagtaaacaaatatctactactcaattacatatacaaatgcgttttatattgtaattgtaattttcagggggacaggcactgtactaagttcattacctacattatgtaagttgttctgcacaaaaattttgagaggtaggcatttttccactttacagataaaaaagtcaagtggctgataaatttgcccaggctcactgagctagttaagtggtagtgtggagatagcaaccttggtctttgtgactccaaagggcattatatttaagcatttgacctgctagtacctgccacctggggaatttccgcctaatgaccatacggataaggaggcttgtaacattgagtacacctagcccaggagtctcacagagacacctaaggaatattatgagccccttttttggtatcgtctgtttggacttgacttcactgcctacttctcagttgttaacatttgtattttacaacctgacccaaactactttctaccggaaaaataggccttatgtttgttcttcctaagcttactttaaaaatggaaattaaggctgggtgcagkggctcatgcctgtaatcccagcagtttgggaggcggaggtgggcggatcatgaggtcaggaaatcgagactatcctggctaacacagtgaaactccgtctctaccaaaaatacaaaaaattagccagttgtggtggcgggagcctgtagtcccaggtactcaggaggctgaggcaggagaatggcgtgaacccgggaggcggagcttgcagtgagccgagatcaagccactgcactccagcctgggcgacagagcgagactctgtctcaaaaaataaataaataaataaataaataaaattaattaaaaaaaattcctgatcattaaattaatgcttgctctgttgttaaagttcataaaaaagaagaataatgaagagaaagttaattttactctacggccaagtataactactctttacttgtttggtacacagtagaggctatcttggatatgccgtatgcgtagattgtctctgtgctttcagctacagcgtttttgctgcctataatctttcccattctttctcatgggcaaactttttttgcctaatttgtgagaccttcctttatttttgtttccccatgtattcttacagcatttatatggtattatactcatttacttatttgtcttgtttagattttgaattcctaaagcaaaaatctaaatccattagaaaaaagcaaaagagagaagagatgagacagatgcacaaatgatttcacataccagtttgcgaactggaattcttctatggtgaaatttcttcagctcagcagagaaattaaaaacaaaattacagattgagtatgccaaatctgaaaatctgaaattcagaatgctcccaaatccaaaactttttgagtacttatatgatgctcaaaggaaatgctccttgaaacacttcagattttggattttcagatttgagatgctcaactggtatgtataatgcaaatgttccccaatctgaaaaaatctgaaatccagaacacttctggtccaaagcatttcagatgagatatatgaatttttcatttagttaaatttcttcactcttaaggaccatgttttattttgaaattgtctatcctattttttaatatgataatagatagtagttgttcttcagatatttttactttggagaataaaaagttgatagctttatttgcctaccatttgtttcatttttttctcttgacctgtaagatcctaaagtctagtaaggatagggaataggccataatgctgatgtgatcctaatctacttgctttgcttgctataggcattctctgcattctttctggatatgagagcctaagcctgaaggtggatctgagcttgatggtgtttgaaaaataagaaatggttaaaattggcagatggtgctagggtcaaaaacaagctattagtcaattttgatgcaagttatagaggttaattgaagtttgttactgctgcatcacatgcaaataggtggaatttgctattattgaaggataagtttggattaatctgaattaagataatagattaaatgcactttgagggatcctgggggatggacactgttaaccctttgccatgtatctccatttctctataaatatgtccatggtagttttaaaacctggctgcaacttctttgatactcatctgataacaaaatagagtctgtgttccctctctttacatgtatgtgggcttgtgattgattttaaccaatagaag

SEQ ID NO: 673615 - DNA, 2593 bp, Homo sapiens
ctagagtggatacagaagcccgctggagtaagaagacaaggaagaatgggaaacctccacctagttttctgtcagttgctagaatctaggggctaggccgcttggttatttctggatcctacagaaggatcattctaaaggtagcttcattttagaattaaccgcaaatagggaatgtcccttctacatttggaacttgtgttaaaaatttgcactcatttaagttttaaaaagttgacattccatctgacaaaggagtttcatatgcttaaagcctttagctaaaccaatagagtaaacaaatatctactactcaattacatatacaaatgcgttttatattgtaattgtaattttcagggggacaggcactgtactaagttcattacctacattatgtaagttgttctgcacaaaaattttgagaggtaggcatttttccactttacagataaaaaagtcaagtggctgataaatttgcccaggctcactgagctagttaagtggtagtgtggagatagcaaccttggtctttgtgactccaaagggcattatatttaagcatttgacctgctagtacctgccacctggggaatttccgcctaatgaccatacggataaggaggcttgtaacattgagtacacctagcccaggagtctcacagagacacctaaggaatattatgagccccttttttggtatcgtctgtttggacttgacttcactgcctacttctcagttgttaacatttgtattttacaacctgacccaaactactttctaccggaaaaataggccttatgtttgttcttcctaagcttactttaaaaatggaaattaaggctgggtgcaggggctcatgcctgtaatcccagcagtttgggaggcggaggtgggcggatcatgaggtcaggaaatcgagactatcctggctaacacagtgaaactccgtctctaccaaaaatacaaaaawttagccagttgtggtggcgggagcctgtagtcccaggtactcaggaggctgaggcaggagaatggcgtgaacccgggaggcggagcttgcagtgagccgagatcaagccactgcactccagcctgggcgacagagcgagactctgtctcaaaaaataaataaataaataaataaataaaattaattaaaaaaaattcctgatcattaaattaatgcttgctctgttgttaaagttcataaaaaagaagaataatgaagagaaagttaattttactctacggccaagtataactactctttacttgtttggtacacagtagaggctatcttggatatgccgtatgcgtagattgtctctgtgctttcagctacagcgtttttgctgcctataatctttcccattctttctcatgggcaaactttttttgcctaatttgtgagaccttcctttatttttgtttccccatgtattcttacagcatttatatggtattatactcatttacttatttgtcttgtttagattttgaattcctaaagcaaaaatctaaatccattagaaaaaagcaaaagagagaagagatgagacagatgcacaaatgatttcacataccagtttgcgaactggaattcttctatggtgaaatttcttcagctcagcagagaaattaaaaacaaaattacagattgagtatgccaaatctgaaaatctgaaattcagaatgctcccaaatccaaaactttttgagtacttatatgatgctcaaaggaaatgctccttgaaacacttcagattttggattttcagatttgagatgctcaactggtatgtataatgcaaatgttccccaatctgaaaaaatctgaaatccagaacacttctggtccaaagcatttcagatgagatatatgaatttttcatttagttaaatttcttcactcttaaggaccatgttttattttgaaattgtctatcctattttttaatatgataatagatagtagttgttcttcagatatttttactttggagaataaaaagttgatagctttatttgcctaccatttgtttcatttttttctcttgacctgtaagatcctaaagtctagtaaggatagggaataggccataatgctgatgtgatcctaatctacttgctttgcttgctataggcattctctgcattctttctggatatgagagcctaagcctgaaggtggatctgagcttgatggtgtttgaaaaataagaaatggttaaaattggcagatggtgctagggtcaaaaacaagctattagtcaattttgatgcaagttatagaggttaattgaagtttgttactgctgcatcacatgcaaataggtggaatttgctattattgaaggataagtttggattaatctgaattaagataatagattaaatgcactttgagggatcctgggggatggacactgttaaccctttgccatgtatctccatttctctataaatatgtccatggtagttttaaaacctggctgcaacttctttgatactcatctgataacaaaatagagtctgtgttccctctctttacatgtatgtgggcttgtgattgattttaaccaatagaag

SEQ ID NO: 673616 - DNA, 2593 bp, Homo sapiens
ctagagtggatacagaagcccgctggagtaagaagacaaggaagaatgggaaacctccacctagttttctgtcagttgctagaatctaggggctaggccgcttggttatttctggatcctacagaaggatcattctaaaggtagcttcattttagaattaaccgcaaatagggaatgtcccttctacatttggaacttgtgttaaaaatttgcactcatttaagttttaaaaagttgacattccatctgacaaaggagtttcatatgcttaaagcctttagctaaaccaatagagtaaacaaatatctactactcaattacatatacaaatgcgttttatattgtaattgtaattttcagggggacaggcactgtactaagttcattacctacattatgtaagttgttctgcacaaaaattttgagaggtaggcatttttccactttacagataaaaaagtcaagtggctgataaatttgcccaggctcactgagctagttaagtggtagtgtggagatagcaaccttggtctttgtgactccaaagggcattatatttaagcatttgacctgctagtacctgccacctggggaatttccgcctaatgaccatacggataaggaggcttgtaacattgagtacacctagcccaggagtctcacagagacacctaaggaatattatgagccccttttttggtatcgtctgtttggacttgacttcactgcctacttctcagttgttaacatttgtattttacaacctgacccaaactactttctaccggaaaaataggccttatgtttgttcttcctaagcttactttaaaaatggaaattaaggctgggtgcaggggctcatgcctgtaatcccagcagtttgggaggcggaggtgggcggatcatgaggtcaggaaatcgagactatcctggctaacacagtgaaactccgtctctaccaaaaatacaaaaaattagccagttgtggtggcgggagcctgtagtcccaggtactcaggaggctgaggcaggagaatggcgtgaacccgggaggcggagcttgcagtgagccgagatcaagccactgcactccagcctgggcgacagagcgagactctgtctcaaaaaataaataaataaataaataaataaaattaattaaaaaaaattcctgatcattaaattaatgcttgctctgttgttaaagttcataaaaaagaagaataatgaagagaaagttaattttactctacggccaagtataactactctttacttgtttggtacacagtagaggctatcttggatatgccgtatgcgtagattgtctctgtgctttcagctacagcgtttttgctgcctataatctttcccattctttctcatgggcaaactttttttgcctaatttgtgagaccttcctttatttttgtttccccatgtattcttacagcatttatatggtattatactcatttacttatttgtcttgtttagattttgaattcctaaagcaaaaatctaaatccattagaaaaaagcaaaagagagaagagatgagacagatgcacaaatgatttcacataccagtttgcgaactggaattcttctatggtgaaatttcttcagctcagcagagaaattaaaaacaaaattacagattgagtatgccaaatctgaaaatctgaaattcagaatgctcccaaatccaaaactttttgagtacttatatgatgctcaaaggaaatgctccttgaaacacttcagattttggattttcagatttgagatgctcaactggtatgtataatgcaaatgttccccaatctgaaaaaatctgaaatccagaacacttctggtccaaagcatttcagatgagatatatgaatttttcatttagttaaatttcttcactcttaaggaccatgttttattttgaaattgtctatcctattttttaatatgataatagatagtagttgttcttcagatatttttactttggagaataaaaagttgatagctttatttgcctaccatttgtttcatttttttctcttgacctgtaagatcctaaagtctagtaaggatagggaataggccataatgctgatgtgatcctaatctacttgctttgcttgctataggcattctctgcattctttctggatatgagagcctaagcctgaaggtggatctgagcttgatggtgtttgaaaaataagaaatggttaaaattggcagatggtgctagggtcaaaaacaagctattagtcaattttgatgcaagttatagaggttaattgaagtttgttactgctgcatcacatgcaaataggtggaatttgctattattgaaggataagtttggattaatctgaattaagataatagattaaatgcactttgagggatcctgggggatggacactgttaaccctttgccatgtatctccatttctctataaatatgtccatggtagttttaaaacctggctgcaacttctttgatactcatctgataacaaratagagtctgtgttccctctctttacatgtatgtgggcttgtgattgattttaaccaatagaag

SEQ ID NO: 673617 - DNA, 676 bp, Homo sapiens
  misc_feature 645: n = A,T,C or G
ttttgtatttttagtagagatggggtttctccatgttggtaaggctggtctcraactcccgacctcaggtgatccacccaccttggcctcccaaaagtgctgggattacaggcatgagccactgcacccggccagtaaaagttttttgcatagatttctttccaaccacacagtatgtacaccttggcaatggaaaatatatttcatattgttttgtaaatatactaaggattcaataaatctctgatgaaataacgaattcttaatcagttgtaagtattttcatactgcttacctttggctgtaaaagtaaatgctcccatgcatgaatcaaactctccacaattccttctccaaataaacctgcatcgacagtttctgttacaactagggacactctatagaatgattttttaaagatatatgtaagtaaaatatcatgctattatataaagatgtcaaagctgagaggagaaaggaagagtatattatagaaacagtccatatgtaatatatcctaatacatttcatttttaagatctactactgaatcttgaggaactttactcgaatgttccttaagctcctttgttctccactggctccttctccttggtttggaagatggagggtggggggaggtgngggaatgacaaacttcacttggccttgttct

SEQ ID NO: 673618 - DNA, 676 bp, Homo sapiens
  misc_feature 645: n = A,T,C or G
ttttgtatttttagtagagatggggtttctccatgttggtaaggctggtctcgaactcccgacctcaggtgatccacccaccttggcctcccaaaagtgctgggattacaggcatgagccactgcacccggccagtaaaagttttttgcatagatttctttccaaccacacagtatgtacaccttggcaatggaaaatatatttcatattgttttgtaaatatactaaggattcaataaatctctgatgaaataacgaattcttaatcagttktaagtattttcatactgcttacctttggctgtaaaagtaaatgctcccatgcatgaatcaaactctccacaattccttctccaaataaacctgcatcgacagtttctgttacaactagggacactctatagaatgattttttaaagatatatgtaagtaaaatatcatgctattatataaagatgtcaaagctgagaggagaaaggaagagtatattatagaaacagtccatatgtaatatatcctaatacatttcatttttaagatctactactgaatcttgaggaactttactcgaatgttccttaagctcctttgttctccactggctccttctccttggtttggaagatggagggtggggggaggtgngggaatgacaaacttcacttggccttgttct

SEQ ID NO: 673619 - DNA, 649 bp, Homo sapiens
cagggttacccagtaacaaatagacttggagttagaacccaaatctgtctcattgcaaacccatgctccttccataatacaacctgacatatattgactgcccactagacaccgggctacctgggaggctactggtattgttatttccgtttagagaaatggaacacggaggagtaagtcacctacctgagttgcacagttggtcaaagtaggaaaacaccctgagcagctgggggagggtcatttctgggcctgcttctgactcacatccaggagtggcactggggagaasgagttgttaaacctgtaaactgtgaagatggtagtttattcaaataaccactaattcaagaccacgtcttagaaatgtctttgtctgtggggaaaaacctgattcttctcacttcccactttcctcacccctgatacaacacccacaccatcagtttggtgtttcccattctagatgagtgatttcaccactgtgtgttgaccaaccttgacgctcccatcttcctcgctgcccaccatcaccaccaaatcctttcggcccttctcctcctttctaaccccactgccattgccttagtggaagcagccacttagatgaacaattacgacagtctcttcacctctgtctttcctcact

SEQ ID NO: 673620 - DNA, 614 bp, Homo sapiens
cctcctactgttgacaaaagcattcctcctctgccctagcctatacggtttttctttcctcttcctatgttgctctcctccccacaaacctcagccctctctcctattgctttcttatatggattgccacagcttctccatcaggaaaaaagaaaacactcatcttcttcaggcgaagccataaattacaggattatcattgttaggttagagactgtgtcagccaggttctgctgggttctgatacaacaaaccctcaaatctcagtggcctgcacaaaggtttatttatagctcacataacatgttagcaacgggtcaactgaggctttgcctcacatgattcctttatcatgggatctggactgaagaagcagtctgtaagacatgcattctcatagcagagggaaaaagtaatggcacaaccacacattgacttttgaaatttctgctcagatgtgrcatatatcacatatcctcacactctgtgtgccaaaacaagccttatgaccaagcatagtatcaatgtggtagggaattatatgctttctccaggcagggagaatgtcagtaacatggtaatgagtagagatatattttcaaagcagcaaattg

SEQ ID NO: 673621 - DNA, 598 bp, Homo sapiens
tcccctggacaactcctaaaataggagcccatcctcctgtgcaaaggtgggagcggataggtgatccctaatgggatctttctttccccacaataccctgaattctcttaaatgagttatcccggtgcctcctgaatgtctgagctccgcccctgcttcaacattcccatcacttctgagagatgttcttaacatttcattaaatgttgcaaagcttgacagctaggcagtctggattcagttacagccatgatgctacctatccatgaccctatggtggttttaagaatgaaaacatactggctgggcatggtggctcatgcctgtaatcctagcactttgggaggccaaggcaggcagatcacttgagcccaagagctcaagaccagcctgggcaacatggcraaaccccatctctaacaaaaatacaaaaattagttgggtgtggtggtgagcacctgtggtcccagctacttgggagactgaggtgggaggatcacttgagcccaggaggcagaggttgcagtgagctaagaccacaccactgcactccagcctgagtgacagagtgagactctgtctcaaaaaagaaataata

SEQ ID NO: 673622 - DNA, 1532 bp, Homo sapiens
ggaatttaggatatgtaattgccraatatttctttgaaagctgcatttacaaattacattcctccggttttcttcccaaataatttttgacattctcttttggtctatgtggaaagattggtcttgaactatcacctttttgaggagagaattctttgaagtatttcagactatcctaagaatgcatagagcagtctttggtactgaagaaaattacatgtcaaaacttttcagagaccattatgaaaagcaactgaggaaggtggcatataacacttaggcattataaaatgtaataattctagaaaacttaatttacatatttgaacaatgaacctaaagttatcagtattttttttaaatacgtgaggaaatccctgcttcctgtataggcactaagacataaaaccatatgaaaatagcaaaaacattctttagaaattaattataaaaaataaccagaaaaggtatggcttatatttgcttattttaaagcaaaacttataagtttactgaatgctaaatatgtaggcagttttgtttaaagcagacaaggtagaaaggaaaccaacacatttgggcagtaacctagagctgtagttaaacctgtggatttcagactaaaagaaggctgtttttgaatcctatcattagctgtagagccctgggcaaatttctaaacttctataaatttcagttgccttatctgagatacatagaaatgataatagtgtttctttcataatgtcattacaacgattgagctttaaggcttagtatagtttctggtaagtgcatataattctgagagcacttctttatgcctgtattatctcatttaaactgcacagtaaccttgtgaaaaaccttgtatttagaatacattacctgatgaagaaaatatgttttcccaatagagtcataaatatgcttcagacagtttgtcattaagaaaatgctctaaatttactttcctttatgatgttgtgtcattggatttcatcattcataaaatctttttagtggacaacaaaaaatgtttatttagtgtatgaaagaaaaataaaactccaggaccccaaattcactaagccaaagggaaagttaggttttggaactgagtcacacacaaaaaaattaccttcctttcgttttcaaacagataactgtaatttcacatgcttacttcatcttatgtaacatgtagatttaatgggcataagttgtagggacatggatgaaattggaaaccatcattctcagtaaactatcgcaagaacaaaaaaccaaacaccgcatattctcactcataggtgggaattgaacaatgagatcacatggacacaggaaggggaatatcatactctggggactgtggtggggtcgggggacgggggagggatagcattgggagatatacctaatgctagatgacacattagtgggtgcagcgcaccagcatggcacatgtatacatatgtaactaacctgcacaatgtgcacatgtaccctaaaacttagagtataataaa

SEQ ID NO: 673623 - DNA, 1532 bp, Homo sapiens
ggaatttaggatatgtaattgccawatatttctttgaaagctgcatttacaaattacattcctccggttttcttcccaaataatttttgacattctcttttggtctatgtggaaagattggtcttgaactatcacctttttgaggagagaattctttgaagtatttcagactatcctaagaatgcatagagcagtctttggtactgaagaaaattacatgtcaaaacttttcagagaccattatgaaaagcaactgaggaaggtggcatataacacttaggcattataaaatgtaataattctagaaaacttaatttacatatttgaacaatgaacctaaagttatcagtattttttttaaatacgtgaggaaatccctgcttcctgtataggcactaagacataaaaccatatgaaaatagcaaaaacattctttagaaattaattataaaaaataaccagaaaaggtatggcttatatttgcttattttaaagcaaaacttataagtttactgaatgctaaatatgtaggcagttttgtttaaagcagacaaggtagaaaggaaaccaacacatttgggcagtaacctagagctgtagttaaacctgtggatttcagactaaaagaaggctgtttttgaatcctatcattagctgtagagccctgggcaaatttctaaacttctataaatttcagttgccttatctgagatacatagaaatgataatagtgtttctttcataatgtcattacaacgattgagctttaaggcttagtatagtttctggtaagtgcatataattctgagagcacttctttatgcctgtattatctcatttaaactgcacagtaaccttgtgaaaaaccttgtatttagaatacattacctgatgaagaaaatatgttttcccaatagagtcataaatatgcttcagacagtttgtcattaagaaaatgctctaaatttactttcctttatgatgttgtgtcattggatttcatcattcataaaatctttttagtggacaacaaaaaatgtttatttagtgtatgaaagaaaaataaaactccaggaccccaaattcactaagccaaagggaaagttaggttttggaactgagtcacacacaaaaaaattaccttcctttcgttttcaaacagataactgtaatttcacatgcttacttcatcttatgtaacatgtagatttaatgggcataagttgtagggacatggatgaaattggaaaccatcattctcagtaaactatcgcaagaacaaaaaaccaaacaccgcatattctcactcataggtgggaattgaacaatgagatcacatggacacaggaaggggaatatcatactctggggactgtggtggggtcgggggacgggggagggatagcattgggagatatacctaatgctagatgacacattagtgggtgcagcgcaccagcatggcacatgtatacatatgtaactaacctgcacaatgtgcacatgtaccctaaaacttagagtataataaa

SEQ ID NO: 673624 - DNA, 1878 bp, Homo sapiens
ttatagatatctgtatctgtctatccatccatctacccacttatctgtaatcaattttctccatagcaaatgttcacagaaatggaacttctgaatcaaataataggtatatttaagtttttaattattcaaaactatgttctcattatctcttgtcttcaatttttagaagttctttgtatattattaatattttatcagtgcatgttcttttcaccaggaacagaagctaagtgttccagttatctattgttgtgtatcaaataaacacaaatcttagtgatttaaaacaactattttattattcttcatagcatttgactaacctcagctgcgcagtttgtttgttgtttgttttttgttttgagaatctctctcatgcactacatgttagatagcgactgggttacagtcatttgaagactcaactgagttgattatccaaaatgaattttatttcctcacagataggatactgatatagttgggggtgggagatctctgggcatctttttcyttctctctttttttttttttttttttgagacaatctggccctgtcgcctaggatggagtgcattggcgtaatctcagtttactgcaacctctgcctcctgggtgcaagcaattctcctgcctcagcctctgagcagctgggactacgggcatgtgccaacacacccagctaatttttgtatttttagtagacagggtttcattatgttggccaagctggtcttgaactccttacctcaaatgatccaccctccttggcctaccaaagtgctggcattacaggcctgagccacagcacccagctccctttctttctctctccacatagcctctccatatgaatagctaaggctatcttacatcacagtggtctcagagttgtcaaaccccttacggggtaactagctttcctcagagtaagtatttccagagtacaggcagaagcttcaagacctcttgaaacctagccgtagaagccacacagcattactcacaccactttctgtcagttagaagtcatttacagtgttaaaacagagccaggggaaggaaatcagataggggcatgaacactagaagagatagtatgttttctaatatacttatttaagattattttttgcaagcattttctcaattttattcttcatccaacaaggttttatatgttctattttctgtatcattgagatcaaatattttctaattctaacattcctaacactaatcttctatcaaatttaaataccgatttgtatgcagtcagctttccaaggtaatacttctgcagtttattatatttttgccatggtaaaacagctattattggctttttgacccgctactgagttgcataaccaatactatttattttatgttattttacatacataagcccatttctgatatgaaactcagtatttctccttttatagactcagctagatgtaatggagattcaacgtctccattacataaaacaaaatttcacttccttttctagttaaaaaaaaaaaagactatctggaactagatagtctgttgctgctatgcagactctgtttcaccgggttgccaggaaccctcaacttcccttgcaccaaacttcggttaatgccattatacatactgagaaggagataatccaatatattcacatcctatacaatggtttaacaaaatggagaaggagggttgccttttcttttaagatcactaaaaagtatctgccccaaaatctgcaactacaattctaaaacattataaatataatcttattttggttatcacattacctctagcagaaactagggattgtattcacaattctgggttatcacattcctacaaaaaatactgata

SEQ ID NO: 673625 - DNA, 1878 bp, Homo sapiens
ttatagatatctgtatctgtctatccatccatctacccacttatctgtaatcaattttctccatagcaaatgttcacagaaatggaacttctgaatcaaataataggtatatttaagtttttaattattcaaaactatgttctcattatctcttgtcttcaatttttagaagttctttgtatattattaatattttatcagtgcatgttcttttcaccaggaacagaagctaagtgttccagttatctattgttgtgtatcaaataaacacaaatcttagtgatttaaaacaactattttattattcttcatagcatttgactaacctcagctgcgcagtttgtttgttgtttgttttttgttttgagaatctctctcatgcactacatgttagatagcgactgggttacagtcatttgaagactcaactgagttgattatccaaaatgaattttatttcctcacagataggatactgatatagttgggggtgggagatctctgggcatctttttccttctctytttttttttttttttttttgagacaatctggccctgtcgcctaggatggagtgcattggcgtaatctcagtttactgcaacctctgcctcctgggtgcaagcaattctcctgcctcagcctctgagcagctgggactacgggcatgtgccaacacacccagctaatttttgtatttttagtagacagggtttcattatgttggccaagctggtcttgaactccttacctcaaatgatccaccctccttggcctaccaaagtgctggcattacaggcctgagccacagcacccagctccctttctttctctctccacatagcctctccatatgaatagctaaggctatcttacatcacagtggtctcagagttgtcaaaccccttacggggtaactagctttcctcagagtaagtatttccagagtacaggcagaagcttcaagacctcttgaaacctagccgtagaagccacacagcattactcacaccactttctgtcagttagaagtcatttacagtgttaaaacagagccaggggaaggaaatcagataggggcatgaacactagaagagatagtatgttttctaatatacttatttaagattattttttgcaagcattttctcaattttattcttcatccaacaaggttttatatgttctattttctgtatcattgagatcaaatattttctaattctaacattcctaacactaatcttctatcaaatttaaataccgatttgtatgcagtcagctttccaaggtaatacttctgcagtttattatatttttgccatggtaaaacagctattattggctttttgacccgctactgagttgcataaccaatactatttattttatgttattttacatacataagcccatttctgatatgaaactcagtatttctccttttatagactcagctagatgtaatggagattcaacgtctccattacataaaacaaaatttcacttccttttctagttaaaaaaaaaaaagactatctggaactagatagtctgttgctgctatgcagactctgtttcaccgggttgccaggaaccctcaacttcccttgcaccaaacttcggttaatgccattatacatactgagaaggagataatccaatatattcacatcctatacaatggtttaacaaaatggagaaggagggttgccttttcttttaagatcactaaaaagtatctgccccaaaatctgcaactacaattctaaaacattataaatataatcttattttggttatcacattacctctagcagaaactagggattgtattcacaattctgggttatcacattcctacaaaaaatactgata

SEQ ID NO: 673626 - DNA, 1878 bp, Homo sapiens
ttatagatatctgtatctgtctatccatccatctacccacttatctgtaatcaattttctccatagcaaatgttcacagaaatggaacttctgaatcaaataataggtatatttaagtttttaattattcaaaactatgttctcattatctcttgtcttcaatttttagaagttctttgtatattattaatattttatcagtgcatgttcttttcaccaggaacagaagctaagtgttccagttatctattgttgtgtatcaaataaacacaaatcttagtgatttaaaacaactattttattattcttcatagcatttgactaacctcagctgcgcagtttgtttgttgtttgttttttgttttgagaatctctctcatgcactacatgttagatagcgactgggttacagtcatttgaagactcaactgagttgattatccaaaatgaattttatttcctcacagataggatactgatatagttgggggtgggagatctctgggcatctttttccttctctctttttttttttttttttttgagacaatctggccctgtcgcctaggatggagtgcattggcgtaatctcagtttaytgcaacctctgcctcctgggtgcaagcaattctcctgcctcagcctctgagcagctgggactacgggcatgtgccaacacacccagctaatttttgtatttttagtagacagggtttcattatgttggccaagctggtcttgaactccttacctcaaatgatccaccctccttggcctaccaaagtgctggcattacaggcctgagccacagcacccagctccctttctttctctctccacatagcctctccatatgaatagctaaggctatcttacatcacagtggtctcagagttgtcaaaccccttacggggtaactagctttcctcagagtaagtatttccagagtacaggcagaagcttcaagacctcttgaaacctagccgtagaagccacacagcattactcacaccactttctgtcagttagaagtcatttacagtgttaaaacagagccaggggaaggaaatcagataggggcatgaacactagaagagatagtatgttttctaatatacttatttaagattattttttgcaagcattttctcaattttattcttcatccaacaaggttttatatgttctattttctgtatcattgagatcaaatattttctaattctaacattcctaacactaatcttctatcaaatttaaataccgatttgtatgcagtcagctttccaaggtaatacttctgcagtttattatatttttgccatggtaaaacagctattattggctttttgacccgctactgagttgcataaccaatactatttattttatgttattttacatacataagcccatttctgatatgaaactcagtatttctccttttatagactcagctagatgtaatggagattcaacgtctccattacataaaacaaaatttcacttccttttctagttaaaaaaaaaaaagactatctggaactagatagtctgttgctgctatgcagactctgtttcaccgggttgccaggaaccctcaacttcccttgcaccaaacttcggttaatgccattatacatactgagaaggagataatccaatatattcacatcctatacaatggtttaacaaaatggagaaggagggttgccttttcttttaagatcactaaaaagtatctgccccaaaatctgcaactacaattctaaaacattataaatataatcttattttggttatcacattacctctagcagaaactagggattgtattcacaattctgggttatcacattcctacaaaaaatactgata

SEQ ID NO: 673627 - DNA, 1878 bp, Homo sapiens
ttatagatatctgtatctgtctatccatccatctacccacttatctgtaatcaattttctccatagcaaatgttcacagaaatggaacttctgaatcaaataataggtatatttaagtttttaattattcaaaactatgttctcattatctcttgtcttcaatttttagaagttctttgtatattattaatattttatcagtgcatgttcttttcaccaggaacagaagctaagtgttccagttatctattgttgtgtatcaaataaacacaaatcttagtgatttaaaacaactattttattattcttcatagcatttgactaacctcagctgcgcagtttgtttgttgtttgttttttgttttgagaatctctctcatgcactacatgttagatagcgactgggttacagtcatttgaagactcaactgagttgattatccaaaatgaattttatttcctcacagataggatactgatatagttgggggtgggagatctctgggcatctttttccttctctctttttttttttttttttttgagacaatctggccctgtcgcctaggatggagtgcattggcgtaatctcagtttactgcaacctctgcctcctgggtgcaagcaattctcctgcctcagcctctgagcagctgggactacgggcatgtgccaacacacccagctaatttttgtatttttagtagacagggtttcattatgttggccaagctggtcttgaactccttacctcaaatgatccaccctccttggcctaccaaagtgctggcattacaggcctgagccacagcacccagctccctttctttctctctccacatagcctctccatatgaatagctaaggctatcttacatcacrgtggtctcagagttgtcaaaccccttacggggtaactagctttcctcagagtaagtatttccagagtacaggcagaagcttcaagacctcttgaaacctagccgtagaagccacacagcattactcacaccactttctgtcagttagaagtcatttacagtgttaaaacagagccaggggaaggaaatcagataggggcatgaacactagaagagatagtatgttttctaatatacttatttaagattattttttgcaagcattttctcaattttattcttcatccaacaaggttttatatgttctattttctgtatcattgagatcaaatattttctaattctaacattcctaacactaatcttctatcaaatttaaataccgatttgtatgcagtcagctttccaaggtaatacttctgcagtttattatatttttgccatggtaaaacagctattattggctttttgacccgctactgagttgcataaccaatactatttattttatgttattttacatacataagcccatttctgatatgaaactcagtatttctccttttatagactcagctagatgtaatggagattcaacgtctccattacataaaacaaaatttcacttccttttctagttaaaaaaaaaaaagactatctggaactagatagtctgttgctgctatgcagactctgtttcaccgggttgccaggaaccctcaacttcccttgcaccaaacttcggttaatgccattatacatactgagaaggagataatccaatatattcacatcctatacaatggtttaacaaaatggagaaggagggttgccttttcttttaagatcactaaaaagtatctgccccaaaatctgcaactacaattctaaaacattataaatataatcttattttggttatcacattacctctagcagaaactagggattgtattcacaattctgggttatcacattcctacaaaaaatactgata

SEQ ID NO: 673628 - DNA, 1878 bp, Homo sapiens
ttatagatatctgtatctgtctatccatccatctacccacttatctgtaatcaattttctccatagcaaatgttcacagaaatggaacttctgaatcaaataataggtatatttaagtttttaattattcaaaactatgttctcattatctcttgtcttcaatttttagaagttctttgtatattattaatattttatcagtgcatgttcttttcaccaggaacagaagctaagtgttccagttatctattgttgtgtatcaaataaacacaaatcttagtgatttaaaacaactattttattattcttcatagcatttgactaacctcagctgcgcagtttgtttgttgtttgttttttgttttgagaatctctctcatgcactacatgttagatagcgactgggttacagtcatttgaagactcaactgagttgattatccaaaatgaattttatttcctcacagataggatactgatatagttgggggtgggagatctctgggcatctttttccttctctctttttttttttttttttttgagacaatctggccctgtcgcctaggatggagtgcattggcgtaatctcagtttactgcaacctctgcctcctgggtgcaagcaattctcctgcctcagcctctgagcagctgggactacgggcatgtgccaacacacccagctaatttttgtatttttagtagacagggtttcattatgttggccaagctggtcttgaactccttacctcaaatgatccaccctccttggcctaccaaagtgctggcattacaggcctgagccacagcacccagctccctttctttctctctccacatagcctctccatatgaatagctaaggctatcttacatcacagtggtctcagagttgtcaaaccccttacggggtaactagctttcctcagagtaagtatttccagagtacaggcagaagcttcaagacctcttgaaacctagccgtagaagccacacagcattactcacaccactttctgtcagttagaagtcatttacagtgttaaaacagagccaggggaaggaaatcagataggggcatgaacactagaagagatagtatgttttctaatatacttatttaagattattttttgcaagcattttctcaattttattcttcatccaacaaggttttatatgttctattttctgtatcattgagatcaaatattttctaattctaacattcctaacactaatcttctatcaaatttaaataccgatttgtatgcagtcagctttccaaggtaatacttctgcagtttattatatttttgccatggtaaaacagctattattggctttttgacccgctactgagttgcataaccaatactatttattttatgttattttacatacataagcccatttctgatatgaaactcagtatttctccttttatagmctcagctagatgtaatggagattcaacgtctccattacataaaacaaaatttcacttccttttctagttaaaaaaaaaaaagactatctggaactagatagtctgttgctgctatgcagactctgtttcaccgggttgccaggaaccctcaacttcccttgcaccaaacttcggttaatgccattatacatactgagaaggagataatccaatatattcacatcctatacaatggtttaacaaaatggagaaggagggttgccttttcttttaagatcactaaaaagtatctgccccaaaatctgcaactacaattctaaaacattataaatataatcttattttggttatcacattacctctagcagaaactagggattgtattcacaattctgggttatcacattcctacaaaaaatactgata

SEQ ID NO: 673629 - DNA, 1878 bp, Homo sapiens
ttatagatatctgtatctgtctatccatccatctacccacttatctgtaatcaattttctccatagcaaatgttcacagaaatggaacttctgaatcaaataataggtatatttaagtttttaattattcaaaactatgttctcattatctcttgtcttcaatttttagaagttctttgtatattattaatattttatcagtgcatgttcttttcaccaggaacagaagctaagtgttccagttatctattgttgtgtatcaaataaacacaaatcttagtgatttaaaacaactattttattattcttcatagcatttgactaacctcagctgcgcagtttgtttgttgtttgttttttgttttgagaatctctctcatgcactacatgttagatagcgactgggttacagtcatttgaagactcaactgagttgattatccaaaatgaattttatttcctcacagataggatactgatatagttgggggtgggagatctctgggcatctttttccttctctctttttttttttttttttttgagacaatctggccctgtcgcctaggatggagtgcattggcgtaatctcagtttactgcaacctctgcctcctgggtgcaagcaattctcctgcctcagcctctgagcagctgggactacgggcatgtgccaacacacccagctaatttttgtatttttagtagacagggtttcattatgttggccaagctggtcttgaactccttacctcaaatgatccaccctccttggcctaccaaagtgctggcattacaggcctgagccacagcacccagctccctttctttctctctccacatagcctctccatatgaatagctaaggctatcttacatcacagtggtctcagagttgtcaaaccccttacggggtaactagctttcctcagagtaagtatttccagagtacaggcagaagcttcaagacctcttgaaacctagccgtagaagccacacagcattactcacaccactttctgtcagttagaagtcatttacagtgttaaaacagagccaggggaaggaaatcagataggggcatgaacactagaagagatagtatgttttctaatatacttatttaagattattttttgcaagcattttctcaattttattcttcatccaacaaggttttatatgttctattttctgtatcattgagatcaaatattttctaattctaacattcctaacactaatcttctatcaaatttaaataccgatttgtatgcagtcagctttccaaggtaatacttctgcagtttattatatttttgccatggtaaaacagctattattggctttttgacccgctactgagttgcataaccaatactatttattttatgttattttacatacataagcccatttctgatatgaaactcagtatttctccttttatagactcagctagatgtaatggagattcaacgtctccattacataaaacaaaatttcacttccttttctagttaaaaaaaaaaaagactatctggaactagatagtctgttgctgctatgcagactctgtttcaccgggttgccaggaaccctcaacttcmcttgcaccaaacttcggttaatgccattatacatactgagaaggagataatccaatatattcacatcctatacaatggtttaacaaaatggagaaggagggttgccttttcttttaagatcactaaaaagtatctgccccaaaatctgcaactacaattctaaaacattataaatataatcttattttggttatcacattacctctagcagaaactagggattgtattcacaattctgggttatcacattcctacaaaaaatactgata

SEQ ID NO: 673630 - DNA, 1392 bp, Homo sapiens
ttctagccaggtgcggtggctcacacctgtaatcccagcactttgggagactgaggcgagcagatcacctgaagtcaggagtttgagaccacactggccaacatggtgaaaccccgtctctgctaatacaaaaattagccaggcatggtggtgcacccctgtaatctgaactactcagaggctggagcaggagaatcacatgaactcgggaggtggaggttgcagtgagccgagatcgcaccattgcactctaccctgagcaacaagagtgaacctctgtctcaaaataaagaacaaatgtaatattttcttgaacataataggaagcagcaaaaatgtatcatatttgatacgtcaatgaagatgataagagcatatgatccagaaatcccagtttggggcaaatatccaaaggaattgaaatcaggatcttgaagaggcatttgcctcttgttccttgctgcattacttgcaataacaaaaatacagaaacaacctaaatgtccattaatggatgagtggataaagaaaatgtgggatatacatacaatgcaatgttatttgcaaggaaattcctgtcatttgtgacaacatggatgaacctggatgatatcatgctaagtgacataaaccagacacagaaagaaagatactgcatgatcttacttatatgtggaatacaaaacagtcaaattcatagtagagaatacaatggtggtggtcagaggctagggtaagagagaaatgaggaggtaacatgagatttggagaggacaaagcctcaaaaccacattaatgactctcatctataagggattactctgtgttctgtggtcattaggaagaactgtaagatattttctctctagtgcacccattatttttgcctctagattgttctctgtttttgttccacatgccccacagcagcagagaatacagcagtgacgttgttctcaaagtaaccaggtttatattttacccgaatttttctgctttctcgaattcctttttcctgattatgtatttgaacataccagattgtttcatactgaaatataatctggccttattagttttacattaaattcaaacttatttgaccttgactatatataaatattcatgtacagtaatataaaagaagactataacagtgtgttaataaatcttaaattattttcatttcctgtacttaaatagttgagtgtayacatttttgcattcagttaaatttaacatgtgctttcgtaatatggaaagtgaaatattaccatgctgtgtgggccatctgtactgggaaatatatttacctctgagtaaattttagtagcaagtattttgacttctgtgctattgagaaatttagacttcaccttataactctgaagt

SEQ ID NO: 673631 - DNA, 1341 bp, Homo sapiens
gttccttccacagtttttgtttagataaagtggtcagatttgatatttgttttatcttatggtggttgtattctagccattatcctatttgggaaatggccactgccttaaggaaattcgggcactgtaatttcatctttgctggagtgtgctgttatttattagataagtctcagtagaatattttrtaacagagttctcctgccacagtctaaaaacctgataagacttccccatacaacacctttgtatagattttttgttttgacagggtttcactccatcacccaggctggagtgcagagccttgatcatatctcactgcagcctcaacctcctgagcttaaaggatcctcccatctcagcctcctcaataggtggtactattggtgcatgccactgcacctggctaattttttttttttttttttttgcagaggcaaggtcttgctttgttgcccaggctgctggccttgaactccaggcttcaagcaatcatcccatcttggccttccaaaatgtggggattacaggcagcattttggaaggtgacctggataggcctagatcttattgtttaatatacagaaataatcatttttttaatcatgcaacctgtaaattatgtaaatctctattaaatgatatcatatgtcattatcaagtgcattagatctctcttcctctaactaacgaaactttcttctctctctgatagtgaagtggatagtgctgatctgatatcatcactattattggtcaaaattagcaaaagttataagaacatgtcaatgttctgaatttttcttattcttccaacacttggtcagcatgtagtttgtcatgagaaaccaagtataaaattttgcctcaatttttttctagtatatgacaaggaccatcagcattctagatgacaatatatatgatgacatctataagatgacaatatatatgtctttgccgactatccctatcaactatagcaatgctacgttttaaattatgttacttgtagtattctacttacaagtactaattctgcatcagccagaacatgttaagctatgagcaacaaatattcaccaaacaataactgaaaaaagtaagaagtttattgattttgcttaagatatagagaaatatggcaggtgctgttgcctaaatattggcggatccccaaaattcatatgttaaaacctagtcctaagtctggtggtgttaagaggtaggacgttggggaggtaatttggtcatgaggtcttcaactttttaattgggattggcaccattataaaagaggcccaaaggagcttatttccctcttctgccacatgagga

SEQ ID NO: 673632 - DNA, 895 bp, Homo sapiens
aatacttgttaaaagtacacttttttatactcaaagatgacatgaaattcataaactggtaaaagaactggaaaaagataaaatttatctaattagtagcacatatgatagcatgaatataatagccctggaaaactttaagtggtttttactacaacagttatattcctactgttccttgagggcattaaacatcgctgttactgacattttaagccaggacaactcactatagtattcagttccgtgctagtcaacctagaaactgtaattttgaattgctaacaatacagatgttttcctcttttctgaaaagcgtactaaccttaaatgaaaacatagtatttttaacaattatacctatgctttaccaaatgccttgcacaaattttttggtgagactcgtctatattttaaagtagyctttattttccattttaaatattctttctgcataaaccatataagcattacatttttttactacacagatttttttaccttaaatgtcttttaaatacttcattgctccaagccatatgcacacacccatatttcagtgtgattagtaaagtgcacacagtataaaagagttgtagattaaaaggagaatgtaaaagtatagagtataaagtttaaataccatctctaaagaatctacacatataaaaatcatgttggtaaaaccacaaaccaaccaatgcctggaaatctttccttttcaaatttcaaggcttttccaaacagagttttaaaacacttaaggcctttctgtgaagtaaatttaatgtgcatatgtgcatacatggaagtgcttaaaaataaaataatcccatctgtggaccattttaaaatttaactcttgtggtcataggacctagagtgaatgtcatct

SEQ ID NO: 673633 - DNA, 895 bp, Homo sapiens
aatacttgttaaaagtacacttttttatactcaaagatgacatgaaattcataaactggtaaaagaactggaaaaagataaaatttatctaattagtagcacatatgatagcatgaatataatagccctggaaaactttaagtggtttttactacaacagttatattcctactgttccttgagggcattaaacatcgctgttactgacattttaagccaggacaactcactatagtattcagttccgtgctagtcaacctagaaactgtaattttgaattgctaacaatacagatgttttcctcttttctgaaaagcgtactaaccttaaatgaaaacatagtatttttaacaattatacctatgctttaccaaatgccttgcacaaattttttggtgagactcgtctatattttaaagtagtctttattttccattttaaatattctttctgcataaaccatataagcattacatttttttactacacagatttttttaccttaaatgtcttttaaatacttcattgctccaagccatatgcayacacccatatttcagtgtgattagtaaagtgcacacagtataaaagagttgtagattaaaaggagaatgtaaaagtatagagtataaagtttaaataccatctctaaagaatctacacatataaaaatcatgttggtaaaaccacaaaccaaccaatgcctggaaatctttccttttcaaatttcaaggcttttccaaacagagttttaaaacacttaaggcctttctgtgaagtaaatttaatgtgcatatgtgcatacatggaagtgcttaaaaataaaataatcccatctgtggaccattttaaaatttaactcttgtggtcataggacctagagtgaatgtcatct

SEQ ID NO: 673634 - DNA, 895 bp, Homo sapiens
aatacttgttaaaagtacacttttttatactcaaagatgacatgaaattcataaactggtaaaagaactggaaaaagataaaatttatctaattagtagcacatatgatagcatgaatataatagccctggaaaactttaagtggtttttactacaacagttatattcctactgttccttgagggcattaaacatcgctgttactgacattttaagccaggacaactcactatagtattcagttccgtgctagtcaacctagaaactgtaattttgaattgctaacaatacagatgttttcctcttttctgaaaagcgtactaaccttaaatgaaaacatagtatttttaacaattatacctatgctttaccaaatgccttgcacaaattttttggtgagactcgtctatattttaaagtagtctttattttccattttaaatattctttctgcataaaccatataagcattacatttttttactacacagatttttttaccttaaatgtcttttaaatacttcattgctccaagccatatgcacacacccatatttcagtgtgattagtaaagtgcacacagtataaaagagttgtagattaaaaggagaatgtaaaagtatagagtataaagtttaaataccatctctaaagaatctacacrtataaaaatcatgttggtaaaaccacaaaccaaccaatgcctggaaatctttccttttcaaatttcaaggcttttccaaacagagttttaaaacacttaaggcctttctgtgaagtaaatttaatgtgcatatgtgcatacatggaagtgcttaaaaataaaataatcccatctgtggaccattttaaaatttaactcttgtggtcataggacctagagtgaatgtcatct

SEQ ID NO: 673635 - DNA, 602 bp, Homo sapiens
taatttaaaatcttgcagccttcttgactgtttaagtattttcaacatttctgactattcactctgcatctttgaggcttctgaaaagcaaacctatttttctttctctccaaaacacacacacacacacacacacacacacacacaccacacccatacacgtatacacacaaatactcacacctcacagtggcgatctctggctagcagaaatatgatttgttttgttggtttgtttcgctttgcttgcctatattttgaaattttcttcgctrtagcaatatggtttctgtaataatgaacagtttgcctgtttgtttgttttaacaataaactaaacatcaacatttaagtttgcctcccaggcaaataaataaaacaccgttctgtattcttaccaacacgtggcattatcagaagtttccaattctggaaatccaatgggcatatagggttattcagagtggtgttaagttgcatttcctgattattaatgagacagccattggtgcttttgtcttgctctgcgtaaaacctaccttgttttaattattacattaaaatttttaaaaaataataaatcctgatatctggtaaggcag

SEQ ID NO: 673636 - DNA, 602 bp, Homo sapiens
taatttaaaatcttgcagccttcttgactgtttaagtattttcaacatttctgactattcactctgcatctttgaggcttctgaaaagcaaacctatttttctttctctccaaaacacacacacacacacacacacacacacacacaccacacccatacacgtatacacacaaatactcacacctcacagtggcgatctctggctagcagaaatatgatttgttttgttggtttgtttcgctttgcttgcctatattttgaaattttcttcgctgtagcaatatggtttctgtaataatgaacagtttgcctgtttgtttgttttaacaataaactaaacatcaacatttaagtttgcctcccaggcaaataaataaaacaccgttctgtattcttaccaacacgtggcattatcagaagtttccaattctggaaatccartgggcatatagggttattcagagtggtgttaagttgcatttcctgattattaatgagacagccattggtgcttttgtcttgctctgcgtaaaacctaccttgttttaattattacattaaaatttttaaaaaataataaatcctgatatctggtaaggcag

SEQ ID NO: 673637 - DNA, 593 bp, Homo sapiens
tgcttatactgaaaaagttatttgttgtttatctgaaaatcacatttacttggggcatcctgtatttgtcctggcagcccgacctagaacgccagagcaggaagcagccggcagtggtgggaagcactgaaacagcttcgggaggtcccactgtctcgcctggggagtctcttcagattcaggcctccagtccctccagggaaatctgaggagctgtctggcctgggtgatcactgaggctccctcgcagtccgtgagcctatctaagaaaaagccttttgccaatacgaataaaacaaccagcctaattagcgaatgttcacagttcagacaattgccgcctctgggctgtgtgcccctctcctgccgtccactaccccctccgggaggcggcccacctgctggtgcgtctgcattgggccctgcccagggctggtgtcctggtacttctccctgtctcctcacacctcctcctaactctgggacagacaacgccaggcgrcactgcatgagtttcgtattgcaaattaccacacagcggcttaagaacacaaacttactttaaagctctgaaagaaagtcagaattccaaa

SEQ ID NO: 673638 - DNA, 608 bp, Homo sapiens
tataattcccatcttacagatgagaaaactgaggcttatgtgaagttctggggacagcagcagaggttcaggtcattggctggctggaacaatgcctagcaagactagatatgaascgtgcaggctgctgaatgacacatcgaatcagatgtcaccagtgctctagcctttagggctagacatgttctccatggaacaccaatcaacctgtctttacctgaaaccagactcagaaaggttgtgagtccaagaatcattcaactctgaggatgcaaaaccacattcttggtagggagacaggacataagggaaggccagggacttccgaggagaccccaaaatgctttatgacaacccgaggattgatggttcttgaactaaagcccataggaaggaaaaacatcctgaatcctgaacaaataaatcctaacgttatttatttcaagaatcataggaataagtaagctcataatatttagtaagccaccaaagggcgaaacaaatctgcctcgctctttcaggtggagcttgccccagatttcccctaaggtgaaccctgggaaacttaggtgacattcactgcgaactctctagccagttcaaatgca

SEQ ID NO: 673639 - DNA, 608 bp, Homo sapiens
tataattcccatcttacagatgagaaaactgaggcttatgtgaagttctggggacagcagcagaggttcaggtcattggctggctggaacaatgcctagcaagactagatatgaagcgtgcaggctgctgaatgacacatcgaatcagatgtcaccagtgctctagyctttagggctagacatgttctccatggaacaccaatcaacctgtctttacctgaaaccagactcagaaaggttgtgagtccaagaatcattcaactctgaggatgcaaaaccacattcttggtagggagacaggacataagggaaggccagggacttccgaggagaccccaaaatgctttatgacaacccgaggattgatggttcttgaactaaagcccataggaaggaaaaacatcctgaatcctgaacaaataaatcctaacgttatttatttcaagaatcataggaataagtaagctcataatatttagtaagccaccaaagggcgaaacaaatctgcctcgctctttcaggtggagcttgccccagatttcccctaaggtgaaccctgggaaacttaggtgacattcactgcgaactctctagccagttcaaatgca

SEQ ID NO: 673640 - DNA, 614 bp, Homo sapiens
gccactgtactccagcctgggcaacataagaatacgctgtctcaaaataatgataataataataaaactcatttcccattcatctcctcaaccctggattctgggtttttctaaattaagaaaactgccataatctttcgaagctcagtttttatgaggcaattggatattattaacacatataataggatcacataagaaattcattattaaactaggggctacaaaatattctatcaaatatctatcaaccaatagattcattttagaggggtattttcaatattttatccttctaaggaaaatcttctatgaggagattaatttcaasatcatttttactaaataagcagtcaatggactctgtcaattagtgcccctggactaatgtggtctttatacacttagactgacctctgctggacagtctaataacctgtcatcatttttttttctctgagagtatgattaggaaaggggcattttccccaaattttatctagtatttagtaacaaatttacacagttcaacttacaaatattaatcaagccctctacaccacctaatggcaaaatcttatattgcattcggctgccagaggtgtgtccggagg

SEQ ID NO: 673641 - DNA, 1363 bp, Homo sapiens
  misc_feature 179, 180, 181, 182, 183, 184, 185, 186, 187, 188, 189, 190,191, 192, 193, 194, 195, 196, 197, 198, 199, 200, 201, 202,203, 204, 205, 206, 207, 208, 209, 210, 211, 212, 213, 214,215, 216, 217, 218, 219, 220, 221, 222, 223, 224, 225: n = A,T,C or G
  misc_feature 226, 227, 228, 229, 230, 231, 232, 233, 234, 235, 236, 237,238, 239, 240, 241, 242, 243, 244, 245, 246, 247, 248, 249,250, 251, 252, 253, 254, 255, 256, 257, 258, 259, 260, 261,262, 263, 264, 265, 266, 267, 268, 269, 270, 271, 272: n = A,T,C or G
  misc_feature 273, 274, 275, 276, 277, 278: n = A,T,C or G
gattatattagatactgcaaatgaaatatttagcacagtgcctgatacagctagtgctaaatgccaccactgtcatcatcaccacacactctatactatagttattagactacacatatctctctctcaatataattaaaattggtagagaaggaaatgtgtctgtcttatcactgttnnnnnnnnnnnnnnnnnnnnnnnnnnnnnnnnnnnnnnnnnnnnnnnnnnnnnnnnnnnnnnnnnnnnnnnnnnnnnnnnnnnnnnnnnnnnnnnnnnnngaattcccttaactggatttgtttttcaaaaggaactagaaattattagaacaaagtaaagaaacacttctaaattagtgatttcagaaagtagtccgtatttgacggtctcaacttcaaagacagtaccaggtgttagggttgggtagggggatgcctttggccagacgagggttgggggcaggtgaacagggtacagtcatggaaaagtccttcaatgagaaatttagacatcttattccgatctaacccaattctgtctctagttattactattataatttattgggtgtttaccgtttatcagccactttacctacatactctgtaatccttttgacatgcttgtgaggttggtattttggtctccacattaataaatggtcccacctgtatgaggraccaactgtggctgacagaagggctcacacactttcttctaccctccctgcctcccgtgccatattgagcacccctctgggccttggattctttgttgcaaaataaggggatacgatgagatcatttgtcaagtcttttccagaacagtgcaaggtgccttcatcctcaagcacagaagctctgcagaagacaattttcagagatgagtctctcctttcctcatcttctaggacagcgcttctcaaatgctaacacacatgagaaccacctagagatctttttagaatgcagattctcattgggaaggtcttgactggggcctgaggtcctgcatttctaatagcccaggtgctggtcatactttgtactgcaaggttctttagggaaatagtaataatatgctaccagactttttgacccaatgtacatattcataggtggatatgcagagtgtgatagaggagctccaggagaatgaagtagttggtttagaaaaatctgcattccctctgaaaagccctcctttactctaccagcactgaagttttcctattgtctagcttctcacaagatctttttcatttctcagctgaagcaatcacaaccatgttttgtcgttgcttttttttggtcattgtctaattcatctgtttttgtatctctagcatctagtgataatttga

SEQ ID NO: 673642 - DNA, 970 bp, Homo sapiens
tttgacatatttccatttttaatttatgtatatatttatgtataatatatgtacatatatatgtatgtggatacaagtatatatatttatacatatttacacacaagtgtatatacaagtaagtatatatgtatatagacatatatatattcctttattgatctgtcatgatggaagacccaggtaagtgtcttggagttgtttaagcagaatactctaggagatcttatttaaaataatttaggtaatcaattcatagtgtttacagatcctgtgtgctctgtgaatcaggttcatgctctttgcctatcgtgttttctactggcaccattatgtacagctcaggtagtccaagggtttgtgagttttgcatcacattttctttccttctagtcaacaagacagtataggttgggaagggagactcacagggttatatgttttggctgtgtccccacccaaatctcatcttgaattgtagttcccattatccctgcaggttgtgggagagacccagtggaggtaaatgaatcatgggggcagttactcctatgctgctgttctcatgatagtgagttagtgagttctcatgagatctgatggttttataacaagcctttccctctttgcttggcatttctccttcctgccatcatgtgaagaaggacatgtttgctttcccttcyaccatgattgtaagtttcctgaggcctccccagctatttggaactgtcagtcaattaaatctattttctttataaatcacccagtcttggacagttctttatagcagcatgagaatgaactaatacacagcggtatgttagggaaagaaagaaataattattttttctatcttcacgcatatccaccttattattttccatttcttactccagaatgaagctttcccaggaggactaaaaataaatctgaccagttccttgaagaatcacagcccacttctacc

SEQ ID NO: 673643 - DNA, 970 bp, Homo sapiens
tttgacatatttccatttttaatttatgtatatatttatgtataatatatgtacatatatatgtatgtggatacaagtatatatatttatacatatttacacacaagtgtatatacaagtaagtatatatgtatatagacatatatatattcctttattgatctgtcatgatggaagacccaggtaagtgtcttggagttgtttaagcagaatactctaggagatcttatttaaaataatttaggtaatcaattcatagtgtttacagatcctgtgtgctctgtgaatcaggttcatgctctttgcctatcgtgttttctactggcaccattatgtacagctcaggtagtccaagggtttgtgagttttgcatcacattttctttccttctagtcaacaagacagtataggttgggaagggagactcacagggttatatgttttggctgtgtccccacccaaatctcatcttgaattgtagttcccattatccctgcaggttgtgggagagacccagtggaggtaaatgaatcatgggggcagttactcctatgctgctgttctcatgatagtgagttagtgagttctcatgagatctgatggttttataacaagcctttccctctttgcttggcatttctccttcctgccatcatgtgaagaaggacatgtttgctttcccttccaccatgattgtaagtttcctgaggcctccccagctmtttggaactgtcagtcaattaaatctattttctttataaatcacccagtcttggacagttctttatagcagcatgagaatgaactaatacacagcggtatgttagggaaagaaagaaataattattttttctatcttcacgcatatccaccttattattttccatttcttactccagaatgaagctttcccaggaggactaaaaataaatctgaccagttccttgaagaatcacagcccacttctacc

SEQ ID NO: 673644 - DNA, 1287 bp, Homo sapiens
ggtctgtcagcatttttatgcaaagccttgttgtcacaagtttataacttgaaagggacaagaaaatgttttttaaaaagaactttaatacagagaaacttggcctggaaatgaattgctgtattcatttatctttaatgactttttaaggtccatcttggggcaaaagatatagatatcctartgatttaaaacatttggttgggattttctttgttttccaccataatagctttcaaaggcatttcagctataaaattgattaaaacatgaaattctctatgtgcatgaattttctaaaggacattaaagattagaaatttcatgtatcacctcctgacctgctgccacacattcaaaacacacaacaaaaataattaccttttcttacaaatgaaaaatcaggcatggagaagttacaaaggtttcaaagtcgaatatgcatagaactacgtaaaatttcaaaattatcttttaaattatttctctggacacttgctaattatttcttcccaaacaccattgctaaattctaaacaagaatagatagtcttgtgatgcatgtattaagtattcatttaacatttattctggaaaaaaataactgcacagattttaacgctaagaatttactgtgcctctgcagcagctgctctcacctgataaaattgtgatgattctttctgagcgattatgacttatcaggtcagtgaccaacaaactataaaatagattctaacagcccccaaagggttggtatagactcttgagtaaataatatatgtaagcgagaatggggcagagagagagagagagaaacacaaggagagagagaaataaagagaagagcacacacatgagtgttataggacaggaagacacagtccttgattttaatcccagttttctcactcagtagcacttcttgagaccaaaagtcagataaagagatagtactgtttttagcaagagagaggtcccatagcagctctatagaattttctggtatatgttgttttgcgctggatttcatccatgaacttgttactttgcctgtactttacatatatatctgagaaggcaaccagtgacttctaggaaaatccttaaaatgaactctagagaaggaatatgaggatagtacattccattttagtgtcttgttctacttaagaccttaatgaatagaattgctattcagataagtttacattggatttaaaggaattcaaggaaacctcaataaaggaatcagactgtgtgataaaaatggccaaagctctaagc

SEQ ID NO: 673645 - DNA, 1287 bp, Homo sapiens
ggtctgtcagcatttttatgcaaagccttgttgtcacaagtttataacttgaaagggacaagaaaatgttttttaaaaagaactttaatacagagaaacttggcctggaaatgaattgctgtattcatttatctttaatgactttttaaggtccatcttggggcaaaagatatagatatcctagtgattkaaaacatttggttgggattttctttgttttccaccataatagctttcaaaggcatttcagctataaaattgattaaaacatgaaattctctatgtgcatgaattttctaaaggacattaaagattagaaatttcatgtatcacctcctgacctgctgccacacattcaaaacacacaacaaaaataattaccttttcttacaaatgaaaaatcaggcatggagaagttacaaaggtttcaaagtcgaatatgcatagaactacgtaaaatttcaaaattatcttttaaattatttctctggacacttgctaattatttcttcccaaacaccattgctaaattctaaacaagaatagatagtcttgtgatgcatgtattaagtattcatttaacatttattctggaaaaaaataactgcacagattttaacgctaagaatttactgtgcctctgcagcagctgctctcacctgataaaattgtgatgattctttctgagcgattatgacttatcaggtcagtgaccaacaaactataaaatagattctaacagcccccaaagggttggtatagactcttgagtaaataatatatgtaagcgagaatggggcagagagagagagagagaaacacaaggagagagagaaataaagagaagagcacacacatgagtgttataggacaggaagacacagtccttgattttaatcccagttttctcactcagtagcacttcttgagaccaaaagtcagataaagagatagtactgtttttagcaagagagaggtcccatagcagctctatagaattttctggtatatgttgttttgcgctggatttcatccatgaacttgttactttgcctgtactttacatatatatctgagaaggcaaccagtgacttctaggaaaatccttaaaatgaactctagagaaggaatatgaggatagtacattccattttagtgtcttgttctacttaagaccttaatgaatagaattgctattcagataagtttacattggatttaaaggaattcaaggaaacctcaataaaggaatcagactgtgtgataaaaatggccaaagctctaagc

SEQ ID NO: 673646 - DNA, 669 bp, Homo sapiens
tccaaaaccccaaaagccctcttcatatttccttccaatcaccatgccccagccccattaaaggtaaccactgcttcaatttctaaaaacattaattcatttaccctggctttgtagtttgcagtaatgacattgtaggtgaagaaaaatattacatttaccttcttaggactttccactgggcctgagaattaaactgatatgaaacatagcaacagcgtaaaatcacgcaaatttatttaatataaattttatgtgatacaggagccctcctaagcaaataaagacacaaagaagcaattagagtcaaatgctgttatagtatatccacatttttcagttttacactataaagtgtaatgaaytgtaaaagcttgaaaaggcaaagatgcagaggccagggtagtcagttaagtaaagttaggacagctaattgagcccctcgcccagataaaaattagtttaacaggatttgtttgcagaaacttctctaggttttcacttcctattcttgacaatgagaatattactttcttccctggtatagggagactatctttgacatagcgggggttatatctcctgctttccataaatgttgtttatgagcttcatttagtttatgtgtgtcgtaaatcaatcattcagatttttgcatagcattttctt

SEQ ID NO: 673647 - DNA, 1330 bp, Homo sapiens
tgtatcaaaatcaaaaagaaagtccaagtcctgagtgtgactttgagggtttttgtttttcttctaagtgaacactctgttcttgttcttataaagttaaggtaaaaattgagatttatccacttccttatttgttgattcaatcaacatatattaaacaagtcagtctgtgagctgcattctgagaatccttggacacatgctggcatgaaagggaacacgtgcacacacgcagaggagaaagacatgtggaatagacaaccataataactgcagagagagcagtgatggacttgtgtgcagtatgggcaccagcagtgttctccatcgtgtgttcatgtgcagcatctgtcctcaagaggtggaacccatttcccctcccctggaacctgggctgcccagacttttggccaacaggattcggcagaagagtaaatgtgctacctctgagcccagacctcaggaggctttacagctatcgtgttcacctgttggaggttagctccaagctggagacccaggctagagcattgactagtgagagttcatgtgggaagagagaagacaggtagatgaggatggagccaccccagtcgacacatgtggaggaatgatgagccttccctcttgcaccctgcccagaccctgaagcacagccttgcaggcaacaggaatgttgtgattttgagccactgtgttttggggtggtttgttatacagcaactgataactaaagcaatgctgagagtaacctatgtaacatggagtaaagggaaaataacgatgagttctacatggcttgcctgaatgtctccctgaggctgtgatgtgcactgtgatggcaaaacaccttatcaaaagtttctattgtcaagcttccaactcagaaaactcatttgtatatagcaacagcacacccccatgctgacgacacaccaggtgctgtgctcagcacctcacactcacctcattcaggactctcagctccctcccaaggcaggcgtgtgtgaacatcatctcccctctaccagtgggaaaactgagactggtgggagggggtgtggggactggggtttgagctgtgtgtccacagtcacacagctcttaagtgacatgacaaggaatcacttccaggagctccagcaccattgttagggtttttgtctccacatgtctctctgcctggagatggctcaggacaggagccctggctttgccacttaaagattcaatgggcctttggtaagccatckagctgctgtaggcccagctgtcaaatctgtaaaagcagggagttggatgagctcaatgattttcaaaatgtgagccc

SEQ ID NO: 673648 - DNA, 602 bp, Homo sapiens
tgtattcaatactattaacgtttattatcatcttagtggtaaaagcactagactaggcattggaaggcctggtttcttctgtctttgctacttactaactgaataaattggggcaagacatttaacacctctgattctcagatctaagtctattaacatctctgatacctcacaaatatgttgtgaagagcaaataaatggttcataggactgttcagatgttcaatgtcatttgaaccacagaaagttttataaaagkaatacattgttttcatcaaaatagctgttaataatagtaaaacccagcagccaagcttattcggagggtcacagattaaggtctggttgttacagagctagtgaccctgagccagcagatgtcagcacaccaagaagaatattaagctctttatattgtgaagcttgcaaattatcaggttttgcccactttgattccaacaatctcaacttcagtaaccatataatccaaatatctgaagacagcaaaaccagagagatgtcttaactttgtgaacaaagcagtaatggtcttgcctaaacagctatcattcctcagcaagaattatcttcacccttactca

SEQ ID NO: 673649 - DNA, 585 bp, Homo sapiens
atgaaaatgaaatctaagaaagaggaaaatatgagatctgcaatatagttgatcttcttcagactagaaccttctcaggtgttacctgggcataactacaggcttgcacatgcacatagctttctagatactcaggaatatgcaggtgtttttcaaagtctcctatgaacatctcattccacatttttttctcttttaagtgctktgtcaactttctgatagccccaactgttattatctcctctggcagctacaatgtttaacaatgcttgttgattgttttttgttttggtttggttttttaatgctgggaaaaaaaggttgtttgcagtgagcaaattctaagtcagctcaagcaaaggcaggctctgcaagtgagggttctgggaaactgccacacaggttaaataatgacacttctctgaactgggcttttgaggaacaattctgcctcttccagtagcttttagactgctagtttcatgactgttgtgattgcaagaatttaaggctaccaaaaattggaaatagaagggtgagaatatggcaagttaaaatgtcagtttgtgattcatctatcttttt

SEQ ID NO: 673650 - DNA, 1945 bp, Homo sapiens
tcctgccttattaataagcatacctaatcaatgcaatatttcaagcaactggttgatcatccaatttcatggctcaaagttgttcactaaactggatcatctagagacatctttaatttctgttacagcagatgtctcaaatttgttttatattttttactgaggtttcaatgaggatcccatctactgtacttattcttccttaaagcatttagcaatactctgtacaaatttaagcagaaacatttttatttccctataaaagtatacaagtaaaaaaatgaaattgttaaggatgtactaaatgcagtctaaaagaagatgtgaatgatactaaaaggggacatcctgagttatctgccagtttcgtggtttttcttggagattcctaggtccaaggtgcctgctgctctttcattccttcagaggggttgtttatgcaggtgacgtcactactcttaccacatacaattggtcccagagtgtgtgccggccacaaaggcacctatgtagagtctggctagcagagtgtatgttgtcctggagagagcacttttaccaactgggctgcctaaaaatggatgagactggcagacccaatcaaattttcrtctcctttgtgaggtttgaatgggacattcaaaggaaggctgaagacaataagggggtaaagttgctgagagatcagcagaaaggaagcagtaagcagaaactatggggttgcagaactctgggttaagaaaatgcctcaatagagaggagaataatgagggtcagcttgcaagtgacagcaggcgctatagacagagagagagaatggctgagttggcacgatgtggagtactaaaacagggagggaaggctgacatgcgttgagggaacaccttggttctctagagctgtttttatcctaaatgatcatccagtttgccatggtacctggctatgtggttatggtggtattctaaaagctgttttgaactctatgagccaaattaagagtctattttgctcttcctcatttccccatgtatcttctcaatataccacagccagagtgtatggctgctcttagtagacaaactggcacaatatttatttgtggggatagtggagaatagatgatctctagcttagatcatgtgcaatcataatgtagtgaaaagttaataggtttagaaaaaaatcttacattaaaagtagtagtaaaagcattgtcaataatttcccaaactgatttttaaaggacactgtgttgaagctattcttaaaaatggggtttggggatgaaaataatatgttatgtgtgagtaggatttatgatgcacattagcttattaaaaactccgtgaagtcttgcaattaagaacaaatattacttatgtttaataaagcaagagaaaacaccttttttcatttcatcagagcaacaaatagtatctcaccaaatttttttcatggtatgcagtttctaaaacttcagtttatataaatgatcttaataaccatattacctcttataaaagatagctgcccttgagattgcatttaactgtgaattattctgaactttggaattattattgcctcaaatttcctgcaagaagtcttaaaaatcatactaaatgcatattagttattaaaagttctgtaaataccggcttgaaaaatttctttctgtctcttcctacccaccctatagttgtctgtgctagaagaggattttctttgtgaattgtcaatgcaacttaaaggttttgcacaaaaattttctaatctgagtaaataggaagaatgataaaatgtggatataatcatcttaactcctttgaaacaatatgataagaatagaagggaccaataggaatttggataaacacatgtttcaacccctctgtgtgggtataactgggttgagataatccttaccacagggtattaaaat

SEQ ID NO: 673651 - DNA, 1095 bp, Homo sapiens
agctggaaaaattttgaaaaaagaagaaaaatgagaggaaaatagctttgatatgcatgaaaatttattattaagccacaataattataatagtgggttaacagtgcataaattgatgaataaaccaaaggaaaatgattgaaaacctagaaatagtttaaaatgaatatgagcaaatttagaatacaatatttcagtataataaatgatatgttttggctgtgtttccactcaaaactcatcttgaattgcagttcccatgatccccatgtgatatgggaggaaccctgtgagaggtaattgaatcgtggaggggattagccccatgctgttcttgtgatagtgagtgatgagttctcaggagatcagatagttytgtaaggggctttctcccccttggtcagcacttctctctccagctgccatgtgaagaaggatgtgtttgtgtcccgtactgccatgattgtaagtttcctgaggcttccctagccatgtggaactgagtcaattacccagtctttcctttctaaattacccagtctcaggtagttatttatagcaatgtgataacagattaatacaataaatcactggggaaaatgatagaatagcagaataaactctgaacagattataaatttaaggataagaaatgaaaccataaaaataaaaagaaaaattgtggaaatattttttaatcttagttttgggaagatctttctggttgtaattcaaaatttgtgaagtcataaaaaatatttgtctaattgaaccaaaaaaaaaattaaaagtgttctatatagcacttttggtcttctagtacattgtctttcatttcaggcctaaacaaatgattcaatttaattgcagtaataataatggaacatttacaaccaagttaatgcatgaataggcaataccaattacatcagaactaccagttggttgacagtttaaccactgattgtaaaatcaaagatgtaaaaagcttttgagatagaagtgtcaatattaatgatatctatagtacaaaatatatacttgtattattgaaagtagagcaagcattctatgtaccagtttgaatctaagata

SEQ ID NO: 673652 - DNA, 597 bp, Homo sapiens
ctctcttttgttgaaatgaccatcttctcattgtattctcacatggtgtagagcagagagaaagatcatctctctcctgtattttctcataagagcatgattccactcatgactcttccaccctcatcacctacttacctcccaaggcacaatctttaaaatgtcattacgttgaggttttaggcttcaacataaaaatgtttgagatacacataccttcagtacccctgttcttctatctttctttaagggacagaagtttgagtttgtttggggtcccattcatttcttccataaaggagagatgtaagtgtctttaattctgacattgcagtattctagtcattttatttttttattctcgatgagaaagattacctaaaaccttttccactgcctggagtaactaattttttgttcttttttctgaaagaaagsatttatcctttccattttcttttcttttggatggtcaaagatttagtttatgattccaatgcattgtttacagtggtaaagtctattagaatcaacagtttctacttttttcaccaccttgaagaccacatccttaaatttgtaatataaacataaagt

SEQ ID NO: 673653 - DNA, 440 bp, Homo sapiens
catctagcttcatttcccgtggaatactaattgacatcaaggtttctatagggataagaaacaagaccagatgagcaacctctcagcaatagaaaaagctccttcggaagattatgtatggcattgattgtttcagggaattgattgtctttaatctaattctaagccacctgatccaaatctcttaaaattggaaatygtttggtaatttccagttccacagctgtctcacacaagacacaatctttccttgctcttctagaacatggctgattaattttaggtgttttaaattttttgaaaactgaagaatacttcaagtcacctgtatggaaaagggtattttgatccttgattgtatctgatcttctcagtcattggtgaaccagaattgaaactgcttgtgtttctaacacacacatgatcttttcaatgcttta

SEQ ID NO: 673654 - DNA, 2296 bp, Homo sapiens
  misc_feature 1756, 1757, 1758, 1759, 1760, 1761, 1762, 1763, 1764, 1765,1766, 1767, 1768, 1769, 1770, 1771, 1772, 1773, 1774, 1775,1776, 1777, 1778, 1779, 1780, 1781, 1782, 1783, 1784, 1785,1786, 1787, 1788, 1789, 1790, 1791, 1792, 1793, 1794: n = A,T,C or G
  misc_feature 1795, 1796, 1797, 1798, 1799, 1800, 1801, 1802, 1803, 1804,1805, 1806, 1807, 1808, 1809, 1810, 1811, 1812, 1813, 1814,1815, 1816, 1817, 1818, 1819, 1820, 1821, 1822, 1823, 1824,1825, 1826, 1827, 1828, 1829, 1830, 1831, 1832, 1833: n = A,T,C or G
  misc_feature 1834, 1835, 1836, 1837, 1838, 1839, 1840, 1841, 1842, 1843,1844, 1845, 1846, 1847, 1848, 1849, 1850, 1851, 1852, 1853,1854, 1855: n = A,T,C or G
tgaggatcttatctctgaaatagcagagagggagagagagacaaggcaaatgtggcaaaatgttaacagtaaataaataaacctaattaaggtatatatgaagttttattataattatcttgcaattcttctgtattcttgaattttgtttttcgaaataaaatgtttaatttaaaaagtagagatgggccaggtgcagtggctcatacctgtaatcccagcactttgggaggccaaggtgggcagacagcttgagtacagaagtcgagaccagcctaaggaacataggaaaaccctgtctctacaaaaaataccaaaattagctgggcatggtggcgtgcgcctgtggtcccagstactcaggggctgaggtgggagaatcacttgagcccaggagatggaggttgcagtgagtcgagatcaccccactgcactccaacctgggcaacacagtgagactctctctcaaaaaaaaaaaaggagaggtgaaccagcctggacattgcccgagacactgatctaaaagggtgctaaaatctcactggaaatgtaacttgaaaaaaaatgtatagtgaaaacataccataagcttccatttgcatagcattcaaaatagggtgtaggggatgaggaaatggcagcctaggaggaaaacagctgcggttataaaatggcaacaggaaggatccttggaaatgttccatatcttgactgtagtgatggccacacaaagccacacacgtgaactaaatacacacgtgcatgtgcgcatgtgtgcgcgtgcgcgcgcgcgcgcacacacacacacacacacacacacacacacacacacaccctacaaaggagtacatgtagaactgcctaaatctgagtaaggtggaatgattgtatgaatgtcaatttgctcgtttttatattgtactatgctacatggagaaagactaggtgaagagtatacgggatctttattacttagtacaactacatgtaaatctacaattgtcacaaaataagaatgtttaacaataggtaaattttatgatatttaaattaaatctcaataaaactgttaaagctgactgagatggcatatgcctgtagtcccagctacttgggaggctgaggtgggagaatcccttgaactcaggagtttgagatcggtccaggccaaataaacagacctctgtcttaaaataaataaaattttcaaaaagtaaataaaactgttaaaaaaaaaaaaaaagtaatgagtccagccacacgggagcatatcatgattgttctaagttagtgcttctcagtggaagcgggacactgagaaaatgggtgtttttgtttgttaccatcatggggcacttttgggattcaatgaatgttagattgcctgcattccacactatagaattacacaacaaagaatcaaacaagggccaggcccggtggctcacgcctgtaatcccagcactttgggaagctgagatgggcggatcacgaggtcaggagttcaagaccagcctggccaacatggtaaaaccctgtctctactaaaaatataaaacttagctgggcatgatggcacgtgcctgtattcccagctactcaggaggctgaggcaggagaattgcttgaaccgggacccgaggggcggaggttgcagtgagccaagatcatgtcactgcactccagcctgggctacagagcaagactccgtctcaaaaaaaaaaagaatcaaacaagacccatactgtcagatatnnnnnnnnnnnnnnnnnnnnnnnnnnnnnnnnnnnnnnnnnnnnnnnnnnnnnnnnnnnnnnnnnnnnnnnnnnnnnnnnnnnnnnnnnnnnnnnnnnnnccttaaaaaaacaaacaaaaacaaaacaaaacaaaaaaacacagagccatccattaggaagtctgattttttattttattttttatttttagagacagggtcttgcattgtcacccaggctggagtgcagtggtgtgatcacagctcactgcagcctcaacctcctgggcttaagtaatcctcccacctcagcctccagagtagctgggactacaggcatgcaccattacattcggctaattaaaaaaatttttttgtacagacagcgtctcactatgttgcccagactgactgcaaactcccaggctcaagtgatcttcctgccttggcctcccaaagtactgggattagaggtatgaacaaccacacctacccaagagtctgtattttaaaaaggaaacacactctaagagttcattcacaaaaaataaacccattact

SEQ ID NO: 673655 - DNA, 2296 bp, Homo sapiens
  misc_feature 1756, 1757, 1758, 1759, 1760, 1761, 1762, 1763, 1764, 1765,1766, 1767, 1768, 1769, 1770, 1771, 1772, 1773, 1774, 1775,1776, 1777, 1778, 1779, 1780, 1781, 1782, 1783, 1784, 1785,1786, 1787, 1788, 1789, 1790, 1791, 1792, 1793, 1794: n = A,T,C or G
  misc_feature 1795, 1796, 1797, 1798, 1799, 1800, 1801, 1802, 1803, 1804,1805, 1806, 1807, 1808, 1809, 1810, 1811, 1812, 1813, 1814,1815, 1816, 1817, 1818, 1819, 1820, 1821, 1822, 1823, 1824,1825, 1826, 1827, 1828, 1829, 1830, 1831, 1832, 1833: n = A,T,C or G
  misc_feature 1834, 1835, 1836, 1837, 1838, 1839, 1840, 1841, 1842, 1843,1844, 1845, 1846, 1847, 1848, 1849, 1850, 1851, 1852, 1853,1854, 1855: n = A,T,C or G
tgaggatcttatctctgaaatagcagagagggagagagagacaaggcaaatgtggcaaaatgttaacagtaaataaataaacctaattaaggtatatatgaagttttattataattatcttgcaattcttctgtattcttgaattttgtttttcgaaataaaatgtttaatttaaaaagtagagatgggccaggtgcagtggctcatacctgtaatcccagcactttgggaggccaaggtgggcagacagcttgagtacagaagtcgagaccagcctaaggaacataggaaaaccctgtctctacaaaaaataccaaaattagctgggcatggtggcgtgcgcctgtggtcccagcwactcaggggctgaggtgggagaatcacttgagcccaggagatggaggttgcagtgagtcgagatcaccccactgcactccaacctgggcaacacagtgagactctctctcaaaaaaaaaaaaggagaggtgaaccagcctggacattgcccgagacactgatctaaaagggtgctaaaatctcactggaaatgtaacttgaaaaaaaatgtatagtgaaaacataccataagcttccatttgcatagcattcaaaatagggtgtaggggatgaggaaatggcagcctaggaggaaaacagctgcggttataaaatggcaacaggaaggatccttggaaatgttccatatcttgactgtagtgatggccacacaaagccacacacgtgaactaaatacacacgtgcatgtgcgcatgtgtgcgcgtgcgcgcgcgcgcgcacacacacacacacacacacacacacacacacacacaccctacaaaggagtacatgtagaactgcctaaatctgagtaaggtggaatgattgtatgaatgtcaatttgctcgtttttatattgtactatgctacatggagaaagactaggtgaagagtatacgggatctttattacttagtacaactacatgtaaatctacaattgtcacaaaataagaatgtttaacaataggtaaattttatgatatttaaattaaatctcaataaaactgttaaagctgactgagatggcatatgcctgtagtcccagctacttgggaggctgaggtgggagaatcccttgaactcaggagtttgagatcggtccaggccaaataaacagacctctgtcttaaaataaataaaattttcaaaaagtaaataaaactgttaaaaaaaaaaaaaaagtaatgagtccagccacacgggagcatatcatgattgttctaagttagtgcttctcagtggaagcgggacactgagaaaatgggtgtttttgtttgttaccatcatggggcacttttgggattcaatgaatgttagattgcctgcattccacactatagaattacacaacaaagaatcaaacaagggccaggcccggtggctcacgcctgtaatcccagcactttgggaagctgagatgggcggatcacgaggtcaggagttcaagaccagcctggccaacatggtaaaaccctgtctctactaaaaatataaaacttagctgggcatgatggcacgtgcctgtattcccagctactcaggaggctgaggcaggagaattgcttgaaccgggacccgaggggcggaggttgcagtgagccaagatcatgtcactgcactccagcctgggctacagagcaagactccgtctcaaaaaaaaaaagaatcaaacaagacccatactgtcagatatnnnnnnnnnnnnnnnnnnnnnnnnnnnnnnnnnnnnnnnnnnnnnnnnnnnnnnnnnnnnnnnnnnnnnnnnnnnnnnnnnnnnnnnnnnnnnnnnnnnnccttaaaaaaacaaacaaaaacaaaacaaaacaaaaaaacacagagccatccattaggaagtctgattttttattttattttttatttttagagacagggtcttgcattgtcacccaggctggagtgcagtggtgtgatcacagctcactgcagcctcaacctcctgggcttaagtaatcctcccacctcagcctccagagtagctgggactacaggcatgcaccattacattcggctaattaaaaaaatttttttgtacagacagcgtctcactatgttgcccagactgactgcaaactcccaggctcaagtgatcttcctgccttggcctcccaaagtactgggattagaggtatgaacaaccacacctacccaagagtctgtattttaaaaaggaaacacactctaagagttcattcacaaaaaataaacccattact

SEQ ID NO: 673656 - DNA, 2296 bp, Homo sapiens
  misc_feature 1756, 1757, 1758, 1759, 1760, 1761, 1762, 1763, 1764, 1765,1766, 1767, 1768, 1769, 1770, 1771, 1772, 1773, 1774, 1775,1776, 1777, 1778, 1779, 1780, 1781, 1782, 1783, 1784, 1785,1786, 1787, 1788, 1789, 1790, 1791, 1792, 1793, 1794: n = A,T,C or G
  misc_feature 1795, 1796, 1797, 1798, 1799, 1800, 1801, 1802, 1803, 1804,1805, 1806, 1807, 1808, 1809, 1810, 1811, 1812, 1813, 1814,1815, 1816, 1817, 1818, 1819, 1820, 1821, 1822, 1823, 1824,1825, 1826, 1827, 1828, 1829, 1830, 1831, 1832, 1833: n = A,T,C or G
  misc_feature 1834, 1835, 1836, 1837, 1838, 1839, 1840, 1841, 1842, 1843,1844, 1845, 1846, 1847, 1848, 1849, 1850, 1851, 1852, 1853,1854, 1855: n = A,T,C or G
tgaggatcttatctctgaaatagcagagagggagagagagacaaggcaaatgtggcaaaatgttaacagtaaataaataaacctaattaaggtatatatgaagttttattataattatcttgcaattcttctgtattcttgaattttgtttttcgaaataaaatgtttaatttaaaaagtagagatgggccaggtgcagtggctcatacctgtaatcccagcactttgggaggccaaggtgggcagacagcttgagtacagaagtcgagaccagcctaaggaacataggaaaaccctgtctctacaaaaaataccaaaattagctgggcatggtggcgtgcgcctgtggtcccagctactcaggggctgaggtgggagaatcacttgagcccaggagatggaggttgcagtgagtcgagatcaccccactgcactccaacctgggcaacacagtgagactctctctcaaaaaaaaaaaaggagaggtgaaccagcctggacattgcccgagacactgatctaaaagggtgctaaaatctcactggaaatgtaacttgaaaaaaaatgtatagtgaaaacataccataagcttccatttgcatagcattcaaaatagggtgtaggggatgaggaaatggcagcctaggaggaaaacagctgcggttataaaayggcaacaggaaggatccttggaaatgttccatatcttgactgtagtgatggccacacaaagccacacacgtgaactaaatacacacgtgcatgtgcgcatgtgtgcgcgtgcgcgcgcgcgcgcacacacacacacacacacacacacacacacacacacaccctacaaaggagtacatgtagaactgcctaaatctgagtaaggtggaatgattgtatgaatgtcaatttgctcgtttttatattgtactatgctacatggagaaagactaggtgaagagtatacgggatctttattacttagtacaactacatgtaaatctacaattgtcacaaaataagaatgtttaacaataggtaaattttatgatatttaaattaaatctcaataaaactgttaaagctgactgagatggcatatgcctgtagtcccagctacttgggaggctgaggtgggagaatcccttgaactcaggagtttgagatcggtccaggccaaataaacagacctctgtcttaaaataaataaaattttcaaaaagtaaataaaactgttaaaaaaaaaaaaaaagtaatgagtccagccacacgggagcatatcatgattgttctaagttagtgcttctcagtggaagcgggacactgagaaaatgggtgtttttgtttgttaccatcatggggcacttttgggattcaatgaatgttagattgcctgcattccacactatagaattacacaacaaagaatcaaacaagggccaggcccggtggctcacgcctgtaatcccagcactttgggaagctgagatgggcggatcacgaggtcaggagttcaagaccagcctggccaacatggtaaaaccctgtctctactaaaaatataaaacttagctgggcatgatggcacgtgcctgtattcccagctactcaggaggctgaggcaggagaattgcttgaaccgggacccgaggggcggaggttgcagtgagccaagatcatgtcactgcactccagcctgggctacagagcaagactccgtctcaaaaaaaaaaagaatcaaacaagacccatactgtcagatatnnnnnnnnnnnnnnnnnnnnnnnnnnnnnnnnnnnnnnnnnnnnnnnnnnnnnnnnnnnnnnnnnnnnnnnnnnnnnnnnnnnnnnnnnnnnnnnnnnnnccttaaaaaaacaaacaaaaacaaaacaaaacaaaaaaacacagagccatccattaggaagtctgattttttattttattttttatttttagagacagggtcttgcattgtcacccaggctggagtgcagtggtgtgatcacagctcactgcagcctcaacctcctgggcttaagtaatcctcccacctcagcctccagagtagctgggactacaggcatgcaccattacattcggctaattaaaaaaatttttttgtacagacagcgtctcactatgttgcccagactgactgcaaactcccaggctcaagtgatcttcctgccttggcctcccaaagtactgggattagaggtatgaacaaccacacctacccaagagtctgtattttaaaaaggaaacacactctaagagttcattcacaaaaaataaacccattact

SEQ ID NO: 673657 - DNA, 2296 bp, Homo sapiens
  misc_feature 1756, 1757, 1758, 1759, 1760, 1761, 1762, 1763, 1764, 1765,1766, 1767, 1768, 1769, 1770, 1771, 1772, 1773, 1774, 1775,1776, 1777, 1778, 1779, 1780, 1781, 1782, 1783, 1784, 1785,1786, 1787, 1788, 1789, 1790, 1791, 1792, 1793, 1794: n = A,T,C or G
  misc_feature 1795, 1796, 1797, 1798, 1799, 1800, 1801, 1802, 1803, 1804,1805, 1806, 1807, 1808, 1809, 1810, 1811, 1812, 1813, 1814,1815, 1816, 1817, 1818, 1819, 1820, 1821, 1822, 1823, 1824,1825, 1826, 1827, 1828, 1829, 1830, 1831, 1832, 1833: n = A,T,C or G
  misc_feature 1834, 1835, 1836, 1837, 1838, 1839, 1840, 1841, 1842, 1843,1844, 1845, 1846, 1847, 1848, 1849, 1850, 1851, 1852, 1853,1854, 1855: n = A,T,C or G
tgaggatcttatctctgaaatagcagagagggagagagagacaaggcaaatgtggcaaaatgttaacagtaaataaataaacctaattaaggtatatatgaagttttattataattatcttgcaattcttctgtattcttgaattttgtttttcgaaataaaatgtttaatttaaaaagtagagatgggccaggtgcagtggctcatacctgtaatcccagcactttgggaggccaaggtgggcagacagcttgagtacagaagtcgagaccagcctaaggaacataggaaaaccctgtctctacaaaaaataccaaaattagctgggcatggtggcgtgcgcctgtggtcccagctactcaggggctgaggtgggagaatcacttgagcccaggagatggaggttgcagtgagtcgagatcaccccactgcactccaacctgggcaacacagtgagactctctctcaaaaaaaaaaaaggagaggtgaaccagcctggacattgcccgagacactgatctaaaagggtgctaaaatctcactggaaatgtaacttgaaaaaaaatgtatagtgaaaacataccataagcttccatttgcatagcattcaaaatagggtgtaggggatgaggaaatggcagcctaggaggaaaacagctgcggttataaaatggcaacaggaaggatccttggaaatgttccatatcttgactgtagtgatggccacacaaagccacacacgtgaactaaatacacacgtgcatgtgcgcatgtgtgcgcgtgcgcgcgcgcgcgcacacacacacacacacacacacacacacacacacacaccctacaaaggagtacatgtagaactgcctaaatctgagtaaggtggaatgattgtatgaatgtcaatttgctcgtttttatattgtactatgctacatggagaaagactaggtgaagagtatacgggatctttattacttagtacaactacatgtaaatctacaattgtcacaaaataagaatgtttaacaataggtaaattttatgatatttaaattaaatctcaataaaactgttaaagctgactgagatggcatatgcctgtagtcccagctacttgggaggctgaggtgggagaatcccttgaactcaggagtttgagatcggtccaggccaaataaacagacctctgtcttaaaataaataaaattttcaaaaagtaaataaaactgttaaaaaaaaaaaaaaagtaatgagtccagccacacgggagcatatcatgattgttctaagttagtgcttctcagtggaagcgggacactgagaaaatgggtgtttttgtttgtyaccatcatggggcacttttgggattcaatgaatgttagattgcctgcattccacactatagaattacacaacaaagaatcaaacaagggccaggcccggtggctcacgcctgtaatcccagcactttgggaagctgagatgggcggatcacgaggtcaggagttcaagaccagcctggccaacatggtaaaaccctgtctctactaaaaatataaaacttagctgggcatgatggcacgtgcctgtattcccagctactcaggaggctgaggcaggagaattgcttgaaccgggacccgaggggcggaggttgcagtgagccaagatcatgtcactgcactccagcctgggctacagagcaagactccgtctcaaaaaaaaaaagaatcaaacaagacccatactgtcagatatnnnnnnnnnnnnnnnnnnnnnnnnnnnnnnnnnnnnnnnnnnnnnnnnnnnnnnnnnnnnnnnnnnnnnnnnnnnnnnnnnnnnnnnnnnnnnnnnnnnnccttaaaaaaacaaacaaaaacaaaacaaaacaaaaaaacacagagccatccattaggaagtctgattttttattttattttttatttttagagacagggtcttgcattgtcacccaggctggagtgcagtggtgtgatcacagctcactgcagcctcaacctcctgggcttaagtaatcctcccacctcagcctccagagtagctgggactacaggcatgcaccattacattcggctaattaaaaaaatttttttgtacagacagcgtctcactatgttgcccagactgactgcaaactcccaggctcaagtgatcttcctgccttggcctcccaaagtactgggattagaggtatgaacaaccacacctacccaagagtctgtattttaaaaaggaaacacactctaagagttcattcacaaaaaataaacccattact

SEQ ID NO: 673658 - DNA, 2296 bp, Homo sapiens
  misc_feature 1756, 1757, 1758, 1759, 1760, 1761, 1762, 1763, 1764, 1765,1766, 1767, 1768, 1769, 1770, 1771, 1772, 1773, 1774, 1775,1776, 1777, 1778, 1779, 1780, 1781, 1782, 1783, 1784, 1785,1786, 1787, 1788, 1789, 1790, 1791, 1792, 1793, 1794: n = A,T,C or G
  misc_feature 1795, 1796, 1797, 1798, 1799, 1800, 1801, 1802, 1803, 1804,1805, 1806, 1807, 1808, 1809, 1810, 1811, 1812, 1813, 1814,1815, 1816, 1817, 1818, 1819, 1820, 1821, 1822, 1823, 1824,1825, 1826, 1827, 1828, 1829, 1830, 1831, 1832, 1833: n = A,T,C or G
  misc_feature 1834, 1835, 1836, 1837, 1838, 1839, 1840, 1841, 1842, 1843,1844, 1845, 1846, 1847, 1848, 1849, 1850, 1851, 1852, 1853,1854, 1855: n = A,T,C or G
tgaggatcttatctctgaaatagcagagagggagagagagacaaggcaaatgtggcaaaatgttaacagtaaataaataaacctaattaaggtatatatgaagttttattataattatcttgcaattcttctgtattcttgaattttgtttttcgaaataaaatgtttaatttaaaaagtagagatgggccaggtgcagtggctcatacctgtaatcccagcactttgggaggccaaggtgggcagacagcttgagtacagaagtcgagaccagcctaaggaacataggaaaaccctgtctctacaaaaaataccaaaattagctgggcatggtggcgtgcgcctgtggtcccagctactcaggggctgaggtgggagaatcacttgagcccaggagatggaggttgcagtgagtcgagatcaccccactgcactccaacctgggcaacacagtgagactctctctcaaaaaaaaaaaaggagaggtgaaccagcctggacattgcccgagacactgatctaaaagggtgctaaaatctcactggaaatgtaacttgaaaaaaaatgtatagtgaaaacataccataagcttccatttgcatagcattcaaaatagggtgtaggggatgaggaaatggcagcctaggaggaaaacagctgcggttataaaatggcaacaggaaggatccttggaaatgttccatatcttgactgtagtgatggccacacaaagccacacacgtgaactaaatacacacgtgcatgtgcgcatgtgtgcgcgtgcgcgcgcgcgcgcacacacacacacacacacacacacacacacacacacaccctacaaaggagtacatgtagaactgcctaaatctgagtaaggtggaatgattgtatgaatgtcaatttgctcgtttttatattgtactatgctacatggagaaagactaggtgaagagtatacgggatctttattacttagtacaactacatgtaaatctacaattgtcacaaaataagaatgtttaacaataggtaaattttatgatatttaaattaaatctcaataaaactgttaaagctgactgagatggcatatgcctgtagtcccagctacttgggaggctgaggtgggagaatcccttgaactcaggagtttgagatcggtccaggccaaataaacagacctctgtcttaaaataaataaaattttcaaaaagtaaataaaactgttaaaaaaaaaaaaaaagtaatgagtccagccacacgggagcatatcatgattgttctaagttagtgcttctcagtggaagcgggacactgagaaaatgggtgtttttgtttgttaccatcatggggcacttttgggattcaatgaatgttagattgcctgcattccacactatagaattacacaacaaagaatcaaacaagggccaggcccggtggctcacgcctgtaatcccagcactttgggaagctgagatgggcggatcacgaggtcaggagttcaaraccagcctggccaacatggtaaaaccctgtctctactaaaaatataaaacttagctgggcatgatggcacgtgcctgtattcccagctactcaggaggctgaggcaggagaattgcttgaaccgggacccgaggggcggaggttgcagtgagccaagatcatgtcactgcactccagcctgggctacagagcaagactccgtctcaaaaaaaaaaagaatcaaacaagacccatactgtcagatatnnnnnnnnnnnnnnnnnnnnnnnnnnnnnnnnnnnnnnnnnnnnnnnnnnnnnnnnnnnnnnnnnnnnnnnnnnnnnnnnnnnnnnnnnnnnnnnnnnnnccttaaaaaaacaaacaaaaacaaaacaaaacaaaaaaacacagagccatccattaggaagtctgattttttattttattttttatttttagagacagggtcttgcattgtcacccaggctggagtgcagtggtgtgatcacagctcactgcagcctcaacctcctgggcttaagtaatcctcccacctcagcctccagagtagctgggactacaggcatgcaccattacattcggctaattaaaaaaatttttttgtacagacagcgtctcactatgttgcccagactgactgcaaactcccaggctcaagtgatcttcctgccttggcctcccaaagtactgggattagaggtatgaacaaccacacctacccaagagtctgtattttaaaaaggaaacacactctaagagttcattcacaaaaaataaacccattact

SEQ ID NO: 673659 - DNA, 1334 bp, Homo sapiens
cttctaaggaattccaccgtttattccccatctgtgaatacagttttcgttgatgaaccaaagcaaagataaaaggactcagaaaaagaggcgcatgaaaatgatcaagggaataaaatagtacttaggtcacaacaacaacaacaaaaataggccttatccatttggaaagaaaattaagagtgtattcttttcttttttttaaaaaattttaaatttttatttttgcccaggctggtcttaaactcctgagctcaagcgatacgtgggccttggcctccctgagggttgggattataggcattagccaccatgcccagccaaaacagtgtgttctaaaaaatcatgatgtttttggacagaatgattaaaaatttgctcctcaaattctagcataccagatgttcaggaacactccaaggggcaagtttcaatataaacagaacataaagacttcacagagtccaaaaaagttaaagaatttagaaagatttctatatgttgctacagagagattaagcatgtatgaggtatgctgttaatgtctaagaatgttataatggagaaaaacctctgctttttcaatgtatttgttccacatcaacgccttcaaactacagccaaaaatctcaccatttcttaggccaggcacagtggctcacgcctgtaaacccaacactttgggaggctgaggtgggcggatcacttgagtccaggagtttgagaccagcctgagcattttttattttttattttacaaaaaataaaaaattagctgggcctgatggtgagcgcctgtggccccagctactcaggaggctgaggagcaggattgcttgagtccaggaggttaaggctgcagtgagctgcttcaggccactgcactccagcctgggtgacagagtggggtgccatctcccaaaaaacaccaaaaaataaataataaaaaataataaatattgcataatttagctaattattctctttacagcttatttgcctctccccaggagaattttgtgttttgttcaatgatgtattctgaacacctaatcaattctttcttttcccccctcaactgttattttaacttctggggtacatatgygggatgtgcaggtttgttacataggtaaatgtgtgccatggtggtttgctgcacagatcatccaatcaacactaatgaattctgatcctctaagacattttctttcttttttttttttttttgagacagagttgcactcttgttgcccaggctggagtgcagtggcgcgatctcggatcaccgcaacctccgcctcccaggttcaagtgattctcctgcctcagcc

SEQ ID NO: 673660 - DNA, 555 bp, Homo sapiens
tttttttttttttgagacggagtctcgctctgtcgcccaggctggagtgcagtggcacgatctcggctcattgcaagctccgcttctcgagttcacgccattctcctgcctcagcctcctgagtagctgggactacaggcgcccaccaccacgcccggctaattttttttgtatttttagtagagacagggtttcaccgtgttagccagaatggtctcgatctcctgaccttgtgatccacccgcctcgatctcccaaagtgctgggattacaggcatgagtcaccgtgcccggcctcctcatcccttcttatcacacctgctattatagtgcctttcctacagagaggtcyttaaaaatatttgaaaataaatgcgtgctagaagaagggatggagaaggcacacactaagatgctttaggagaaagcattgacagcattcttggagaaaaaattttaacttgtctgagagggtggttgaaactggaactccagagatagatgctggaagaccctgggaactgcaaggaagcaaataatgacatccaggcaagg

SEQ ID NO: 673661 - DNA, 599 bp, Homo sapiens
caaggcactaagtaagtactctcttaaaaaacagagagtgaggatgccctgtttcacaacttaattccaaaaagccaagtcagacgaaatcgacccactttcctgctaagggtttgtcccaagaggcgagctcttctctgtccgctccagccaagctggccgattgcccctgagcactggacacaaccttggtgtcccggtttcgggtcagggttactttccaattgttaggcacgactttgtgcgtgcgtgcgagactgtggactcggaggtgcgcatttggggcgtagccgagccatttaaaccagcgaatccgcgttcaycttgtccttccacctctgccctatctcggcagatgctccacggatttgcacgaactcccgagtcttgacctccctcccctctccgggctgccgggacaactcggggcggccactcttgccaggaggcgtaagtaaggatgaagttggaaaaactgaactaggtctagggcacgctctgcaacacagtcggggagacgcttcagagggccggagagggaggcaagttgccacggcgcgaagggggcgggccggcttgggccgctcgcatttcctgtg

SEQ ID NO: 673662 - DNA, 935 bp, Homo sapiens
tcaagtgtgtttgttgaaagagaggaaggaaggactaaaggaaggaagaaaaggaggtgaaaaataatgaaagttgatccgagaactttctctggattgccagcactcattgtgccctttttgctttcctgtctggattttaaaaggagatgttaattgcagctccagataaagacattagcttcccaaattattttcaggctacccaatgtgcaaatccagtcacagagccagagctggggcctctgccatagactaattacactttttcttttaattcctccagtgttttcagggtccctaaaagctgctttccccggactccccactgaacttctgcccttcatatttataaccccctagtttctctccttcctggtttcccagacagtggtgcagacaaaaggaccatttataacagcttttctgacagctggacattatttaattacaacttctggcagccacatagtgtgctggaggctatttaaagttctaggtggcaggaggagaaatggggaaacgtataacccttgggggcaggagtgaggaaagccagtgtgggcagtgaccagaacagactctcagggccctgctctgaagtggcatttctcagagccccaccctgtagcatcagagtctctgtggaagaaggcagagatgatgccagccccccaaggcatctcctggggtagaaggggagtggcagaaccagcagcatcaaactgaatagaattgttgtttgtycagatcagccatctgtgttttacagagcaagaaactgaggcacagagaggaaaaaggacttgtccaaagccacacagcaactggtacatttctgaggaagtcctctaagcatcctgaaccttcttgctgcccctgtgaatgagcagcccctgccctgcctggttttccacatagcagccacacactga

SEQ ID NO: 673663 - DNA, 1491 bp, Homo sapiens
gaatatcctatgattaatcatttgttttatctcacattacctactcaacagtctcagaaagacaatataaatactaccaccacaaatatgactactggaaaaaattagaaaaaaatctgcatatattctccacattgtcctctgaacttttgtagttgtattatatctacattttcaaatcagatagccattgcataccttactctccgttctaaccttcatttggtcttagtttcataaggctatgcatttaacgctcactgccaaacctttactatcaatggctctttggttattttgcttatctgaagcttattctctagtaaatccctcaagaagtgctcattgtcttgagttcttgtatatcgatgagttacctatgtcctttgtacataaaagtcagtttttctggataaaaaatccttgcattgtattttctttctttaagtatcttaaaaatattactttgtttcctgctagcataaagcattgttgtcaaaaagtctggtaataacctaattttcctttcctttataagctatttccttttttggctagatgcctaaataattttttcttcttaaagtgcagtaattttaccagaatatattttggtgttggtcactcaagcacaatttttcaggtacactgtgtttgtgttctttctatatgcagatttagatttgttattatctatatcattatttcaggaaagccttgaattataatgtctagtatttgctccatttccttactttggttttctttttcagggacttctattattatgtaatagatattctatgccactgttcagtattttcattttctctcaaataccatttgtctttttgttctatttattttatttatttattatttatttatttattttttgagaggaggtctcgtaatgttgcccaggctggtcttgaactcttggatactgacaagccttctgcctcagggactatagtgcttaccaccctgtccggcttacttctttttgatttttaaaaattttctcctttttaccttctgtttctcttacctattgtttctctgtgccccacccccacctcatgtagtggaaatctgcatatactttttgactccctaagccattgtttttttaacttttatgttcaggagtacatgtgcaggtttgttatgtgggtaaacttgtgtcatggagattttttgtacagattatttcgtcacctaggggtttttttgtttttgttttgttttgttttttgaaacaaacaaaaatcctgctctgtcacccaggctggagtgcactggcacgatctacgctcactgcaacctctgcctccaagttcaagcgattctcctgtctcagcctcccaagtagctgggactacaggcacacaccaccaygccccactaatttttgtattttagacggggtttcaccatgttggccaggctggtcttgaactcctgacctcaagagatccacccgccttg

SEQ ID NO: 673664 - DNA, 1153 bp, Homo sapiens
ccagatgcaaataaatatatacattcttaaagtagtgggttaataacctgaaaaaatgtgtgagcagggttaagtgggaggagagaccacagagagatctactataaacaaggaagccctgtgaacactgattcaacacactatctcatttaactttcattcccaccctgcaagacagggactttttagcctcagtttacagacaaggaaactgaagcccagggagagtaaatccttggcttggggctatgcagtggtaagtggccaggtcaggattataattcagttgttctgaccaggttcttccttcactagaagctgattccaccygtcgtgtcccaggaagctactatctgctccagacattcctggtgccccgctccctgccaggtaaaaatgacagccaactggcctgtatgtgcctggatgctgctgcaggaagagtcttcattttccaaatctggacgtccctgccaatgaccacctgacaacaggcatctgctccccctgcttcagagaaaagctggcctcctctagcaaccagtcctgggggtcattcaaaatatttactgagcatccaccctgtattgggcactggggaatgcatgacagagaattacaaagatggttgaaacatgatccctgccctcaactaaccaattatctgctggggaagttggacattaacccaattttgacgccatgttgtgctaagtgcttttgtgaagctgagactcacgtcagggcaggacagttgctggaacacgcaactcagcctggaggtatctgggaaggcttcgaagaggaggtgatgaattcaagccttgacaaatggtgaatatttgcaagacacagggcggtccaggtagacgggacaaagtctgggcaaaggcacagtcgcttttcaggggcttctgtggggattcccccatgactttcacacagagaagagatcggatttcattttgatgagcagattgggggtagtgataatgagaggagccagagttggttcaagaattaggcagggctgagcctgggggccatggagtggaagtgaacacagaagtgaacacagactggaaaatgcagagggaagaaaataaggctgaggctgaaagtctctcatgtacgaaaggctttatgataccca

SEQ ID NO: 673665 - DNA, 600 bp, Homo sapiens
agttttctatttatatagaataaaaagatggtagacactaaaactataagatatctactccaaagaaatttcaagaaaagcttctattgcaaatgttctgtgtcctttgaaggcaragaactcataattttgaagtgaaagagtctttaagatcatccatggaatgtttgcaattgtacagatgaggaaactattaataatttaataaactaataattctcagaaagagcaggtaatggacaagcctaagttcccagagtttgggagctgcaaaattgagattaagacccatgttccaggctgggcatggtggctcatgcctgtaatcccagtactttgggaggccaaggcaggcagatcacttgagatcaggtgtgcaagaccaaccagcctgggcaacatggcaaaaccctgtctcaactgaaaaacaaaaattagccaggtgtggtggtgcatgcctgtaatcccagctactcaggaggctgaggcatgagaatcgcttgaacctagtaggtggaggttgcagtaagccaagatcacaccactgctctccagcctgggtgacagaatgagactctgtcaaaaaacaaacaaacaaaa

SEQ ID NO: 673666 - DNA, 1099 bp, Homo sapiens
gatgttctagttggcaagtttaacacatactctactcccacaaaattggataacattttgatcacatcataccaccagtcttgccactattatagaggtactccttcttggtaagaaggcatgtatagcttccttacaattatgatttcagctagactagcttccctttctcttaggcttaaagttaattgaccattgaagtactgacatttttgagaaattcatttcacttggatttttttttccatgtttgatattactagcttcacatcagcataaagaagtactcattcctttaattcatattcttgtttttggaaatatagtaggtctaaaatcacttcgttgtccaaaatatcttagtgatatgaaatatgcagagaaaacactcatccttttgtttagagtgaaccagctgaaagaaatcttggacattgtctcgttcaggcttctcattttcctttccagagaactggaaagcagagtggttcagtgacttgccctcagttgtacattaattygttagcagtagagcttcgattacatttcccaagccagcactcttttcagtccgtcgtgttgcagtcaaagctagtctaaagcactaaatgtattcttttttttcaaaatgaaaataggtgtaattttttcatgatccaatgatgaaaatcattcattctcattgtagaaagatagtaacacacctaaaagagtggagtcaattttgaagatgaattctgttgatataaaacagggtttcagtagttctagttagctgtattggcattaccttgtgtagtagtctgttctcacactgctaataaagacatagctgagactgggcaacttataaacaaaaggggtttaattgactcaacagttccacatggctggggaggcctcacaatcatggcagaaggcaaagaggaagcaagacacggcttacatggtggcaggcaacagagcgtgtgcagaagaagtcccctttataaaaccatcagatctcctgagacttattcactatcatgagaacagcatgagaaagacctgccgtgattcagttacctcccacgggttccctctcatgacacatgggaat

SEQ ID NO: 673667 - DNA, 1847 bp, Homo sapiens
tgcagggtttttaaaatatataatgacttattttcctttggataaatacccagtagcaggattgctggatcaaatggtagatttacttttagtcctttaagaaaaatctctatactgtttttcatagagattgtactaatttacattcccaccagtagtgtataagcattcccttttcgccacacccatgccaacatctattgtttttttgactttttaataatggccattctgactgagtaagttggcatctcactgtggatttaatttgcatttctctgatgattagcaatgctgagcatttttttcatatgtttatgggccccttgtatatcttcttttgagaaatgtctatccatatcacgtgcccactttttgacaggattatttgctttttttttcttgctgatttatttgagttccttgtagattctggatataagtcctttgctggatgcacaggttgcaaatacttccttccattctgtgggttgtctgtttactccaatgattatttattttgctatgcaggagcttataagtatatatattttaaaagtgcttgtggaaaattttaatgtaatggaattcctcttattgtgtgatcatctctacatacccttctattaatcttaaatattagtttaagattactcgtgagtcttaagattattggtgaatctgattattggtgattattagtttaagattattggtgaatgtactccttttagatgaagctgtcaaaggacgagaaccatataataataaatattagcaaatagcataaataaaataataaacataaaaatagcatatttttatgctaagtacagtaagcatactgtacttagcaccatggctctgcagcaagacattattttaagttagatgctcaatataaattatacattaaaaaatttatcagaacttgaaaactttcacaatcggatccaatcatttccttggaatgtgtgaggtgttacaaatgccgcctaattctttttgaagctcgaggaaaaggcaaaagtcttgtaacatactgaaatgatttgaatgattttaccgtaaaatggcttggatttgctcatctggctccaagttcagaagaatgaccaacaaactgacttatgttctcagcagtgtagacactgaagggcctgagcagatgttgaaggcttactccaggccaatgcatgaggttgtttttttttttgttttttttttgtggtttctcttaagtgtttgctaatatctaccacattgcatactcaatgttccttttcaactggcctgcctgctcataatataaagcagatgatttcatctttcacagcgcctttttgctacagtgaactgaagtctgcagagttcagacttctctaataacatccatgtttctttaagaacaggaaaatcccttccccttaaaaggtttgctcctcagtcctgagttctataatacaatattatatgtaattcctgtttaaacaatagtctacatttcctccaagtactcatttaggcttctgctatattacatttttaagatatgctgtacctttagtaagcacaaattgcatttcctattagaggagaataacgtcacttatttcggttagaaatgcttcattttaaataaacagaacagaaatggtttccttattcagtgttaaatgaaagtaaaagagccctttaataaagacaatgaaggaaatgtatgtatgttttttatattattttattttgkttatttaattaatttatttatttattggagactgagtctcactctgtcacccaggctggagtgcagtggtgtgatctcagctcactgcaacctccgc

SEQ ID NO: 673668 - DNA, 1219 bp, Homo sapiens
gctaactaacatatgtatcacttcacatgtattacatgatgctttgaaaggtgtacattatggaatggctaaatcaagctaactaacatatgtatcacttcacatatgcttttttgtgatgagaacattcaccattattgtacaatagattcttgaacctgtttcccctatctaactgaaattttgtatcctttgaccaacatgatttaaaaaaaaaattctgctgccttgctggctttaccttaagctctgctttctctgctttattttttctataattcctgcatattgaagcaactttacttttataaatactaactaatcatattaaaaatctagtactgtctaatgtatttagggttaaagatataaatatacctatgattattggaatgctgaattatatgtctatatatgtctcccttaattttacactacagtgttaaaatagtatctaaatctaatcctacttttaggaatacctaacaaaaaattcagccattccctcaactctgttgaaagctctgtttctcactaaagcctatattggctttagtgaagcaaaataatttaaaacagcccaaaatgcttttttaaaagtatattttaaatactgtaaaataacaaggaagtatacaaaaactatttatggataaatggacttgtgattggaaacattaatatcagccaaatttccaaaagcagtttcacttaatggctgaaataaaatggagaaaaatgtatgaaaggttgcctaacaaatagattaggcataaatgactaaaaatgaatctgaaattttaaaaaaatctgaaagaaactgaactgctgaaaatatgcattgaaagttacaaagcagtcctagtggtgcatggaaatgaccagtatataaaatgccaatgactgaaaatacggagttttctctccagtatttgtttctttgaccaattcatctagagccaatagagtactgtatccttaataactggtattgcttttcaggaaaataaaatatgayataccatttagttttattaggaagctaataggtgtacagggttttcattgctgataaggctgaacattttctagtgttcctttcttgttggtgtaatgtttttatatctttaaccacttatctaggggaaagtagtattaaccataagggtgtatcagaactttattattttctatattaagttatttctccatcaaaatc

SEQ ID NO: 673669 - DNA, 702 bp, Homo sapiens
tctcctggtactgacatttgctctacttgtattcttttttgaggagcaagagtgataatttcctaccagaaaaatttcatagacttggactcagattttcagttcatttcccaaaaaagacccacacatttgatactcatttggaagtatacagccaagaaaacctgagttcagagttagacaagaaatgcattttttatgagatttttgagtccagcagatgtgcgtcaaatcaatcgtttaaatgctaccatccccacagctgtagatcagttgaaaccttctgaccttgatcttttcatgtgggrattcagggagtctaacttcactcttggcttctccactcttcctcacactcttgcctaagtcagagtcaatgctatgatccaattttgatacttttggtacttatgatacaattttggctttgtcataagattcagcctcatccagcacaccccttcagttgactggatccttgcctggagcctgccttagtaaccggcttgggtgccctggtcctcctaggactgaagacttctgttctcaacttacacatttccttctgcccttcagtcctgtgtttatgtattagtccattcccatggtgctaataaagacatacccaagactgtgtgtttataaaggaaagaggtttaattgactcacagttccacagggctggggaggcctcaggaaact

SEQ ID NO: 673670 - DNA, 662 bp, Homo sapiens
ataagtgcctgctgagtgccagaaactcttttaagcactatgacctggagatacagcagaaaattatatacatatgtgtgtatgwatgcagaatatatatagaatatatatgtataagaatatatatatacattcttaactttacaaagaagttcagcaatgaacaaatacatatacagtatgtcatgaggtcaggctaggcagaaaaatagagctatataatcagggcagatagtgataggggtatgggagggatgttttgagaagttctctctgttaaaatgacatctgagcaggacctgaattatgggagagactaagatgtgtggatatctgggggaaattatttcaagcacagagaagagtgcccaaaatcctgagactaaaataatcttgctattctggaagaatggcaagaaagtctttgtgtctgtcgtgagtgacagaggagagaatggcagacaatcaaacgggtggtcagagtaaggatactgaatatagtttaacaaggaaggaaagcattttgaggatagaattttctgtgctttttagttgcctttggcttcctgttataaatatctgaactattttattttttaagaaaactccagtaaaacaggcaactcaatattgtaattcttgaagtatttgttctcatggat

SEQ ID NO: 673671 - DNA, 662 bp, Homo sapiens
ataagtgcctgctgagtgccagaaactcttttaagcactatgacctggagatacagcagaaaattatatacatatgtgtgtatgtatgyagaatatatatagaatatatatgtataagaatatatatatacattcttaactttacaaagaagttcagcaatgaacaaatacatatacagtatgtcatgaggtcaggctaggcagaaaaatagagctatataatcagggcagatagtgataggggtatgggagggatgttttgagaagttctctctgttaaaatgacatctgagcaggacctgaattatgggagagactaagatgtgtggatatctgggggaaattatttcaagcacagagaagagtgcccaaaatcctgagactaaaataatcttgctattctggaagaatggcaagaaagtctttgtgtctgtcgtgagtgacagaggagagaatggcagacaatcaaacgggtggtcagagtaaggatactgaatatagtttaacaaggaaggaaagcattttgaggatagaattttctgtgctttttagttgcctttggcttcctgttataaatatctgaactattttattttttaagaaaactccagtaaaacaggcaactcaatattgtaattcttgaagtatttgttctcatggat

SEQ ID NO: 673672 - DNA, 617 bp, Homo sapiens
tgctaagtataaaataatgacataagtgaatatgttaatctacacttagtatacaacaaaacactattcacaatgtaccgtcaacttggtgtgaatgttaartttttgctagaaatgcacaaaagatgtttcattaagagtttgatttcactttatttgtaaatgtgtcttaatagactttattatagccattgtgttgagttgaagtgctcaattattcctactattttatgttaaattgtactattatctaggaaaataaaaggctgagttgaagaatctaatgcttattcaattgtaagtattgtcccatgaaagcagagactcttcatttccattcttttgtaaattcatggtgtcacaagtaggatttttatttattacttttaatcttcaataaacacaaattataaatcacattctttggatactaaaaccattactagctattgttagacttaatagactttattgtccccattttggtgagttgaagcattcagttgagtgcaatgagatgtattcaattgtggtaacattagaaaagtttcatgtttaaacggtgatctctgagaagttactcttgtaaatttaagttatgctgacttggacaactc

SEQ ID NO: 673673 - DNA, 617 bp, Homo sapiens
tgctaagtataaaataatgacataagtgaatatgttaatctacacttagtatacaacaaaacactattcacaatgtaccgtcaacttggtgtgaatgttaagtttttgctagaaatgcacaaaagatgtttcattaagagtttgatttcactttatttgtaaatgtgtcttaatagactttattatagccattgtgttgagttgaagtgctcaattattcctactattttatgttaaattgtactattatctaggaaaataaaaggctgagttgaagaatctaatgcttattcaattgtaagtattgtcccatgaaagcagagactcttcatttccattcttttgtaaattcatggtgtcacaagtaggatttttatttattacttttaatcttcaataaacacaaattataaatcacattctttggatactaaaaccattactagctattgttagacttaatagactttattgtccccattttggtgagttgaagcattcagttgagtgcaatgagatgtattcaattgtggtaacattagaaaagtttcatgtttaaacggtgatctctgagaagttactcttgtaaatttaagttatgcygacttggacaactc

SEQ ID NO: 673674 - DNA, 2026 bp, Homo sapiens
agtggtaggaataaaatctgattagagatttaaattaatttggaaacttatggtgaagggtttcatttagttatttcttaatgatttcttaattaataaaaatcacattaaccagaattggcctttcctttaatcgaatgtgaaagtgtgattacttttggaatcaagttaaaatttaatatttaagctagtttatcattctcaactctttgtccagtcctcaatatgagaatctaaagcatgctttaaatatctaattagttctaatgcatagcacaatgcctgacatatagtaggtatatgacattggtgaatgatttaatacttaaacaaaacaaaattcttgttctcaaataaaaaataaaataagccttttktttttgtcagggtctctgttgcccaggttcgagaacagtggcacaatcatagcttactgtaaccttgaatttctgagctcaagcaatcctactgcctcaaactactgagtagccaggactatgggcatgtaccactaagcccagctcatctgtttttatttttcatagagatgggggttgccatattgcccacactggtcttgaacccatggctcaaactatcctccagtctcagcctcctgaagcactgggaaaaacctttctctttaaaagaaagacatacttgttattcataagaaaaaagaaagattttaaaacaaatatatctttaccttataataagttgatgacatatataaagtatcttactaaaatgttatagtttgacacaaaacttaaaatagttggacttcagattcacaccatattatgttgagctcagaatttttatccatttgcgtacaaactaatgaaatatgaataattaaagaatagtttgtacattgtactaaattcaatgtctctaaaattttcctgtgttattcgttcttaaataaactgaaataagccaataaacttcgaacattcctggctacattttcagatttctaagatgtttctgaagtcatctttcctgatataattatattgtaataaagtacccatcatatcataaattgttattttaatgatactaacataggcatttaattattaagtaatcctaaagctgacattaaaattactatgaaattgttagtttcaaaatagtaaataaaacaacttttatattttttaatgtttttattatagtttctttgtaccagtaattattgaaatattctaataactcaaaaatgattttaactaaataacttcacttttaaaagaaatctaacaacttaattcaaccaaagtaaataacaccttttgtattattactcctagatgttgtttaagtctttaaaacaatttctaaaactccaagtttatttaattttttctacaatgtgaaaggtaaagtctcttatctaaaacctgtaaaaaacaagtttaatattggttttttaaaagccttactctcaaatctggttcttgaactgttaatcgtaaaaatagcatgactatgtgaaaatactagattgttcttttaattataactctgaactatattgtaaatccatttgttagctttcttcttctttgtcatctaattccatttctagcacttagcatagtgtggagagagttttaggtcgttagtaaacaaaagaatgagcaaactaatagatgggcatgaaaagcactaaatttatgtcttgctgctgtcatatagtagctaagattctgatctcatcacatatgtggacacacaagctttcgctaagatatatacagcattgtttggtttacaatattcttttacctatagtattgaagttgatgctcagaggagctatgtggaaatggccggaaggaaaattattatccacaattcataatatagaaaggtgaaggtagggcattaagcctcagttttatgttgaattgagatgatattatttatagctgaactgtggaaaggagtcagtaagaatttagtataagggtatttggtccaaaattgctttcttctgatcacataaaaa

SEQ ID NO: 673675 - DNA, 2026 bp, Homo sapiens
agtggtaggaataaaatctgattagagatttaaattaatttggaaacttatggtgaagggtttcatttagttatttcttaatgatttcttaattaataaaaatcacattaaccagaattggcctttcctttaatcgaatgtgaaagtgtgattacttttggaatcaagttaaaatttaatatttaagctagtttatcattctcaactctttgtccagtcctcaatatgagaatctaaagcatgctttaaatatctaattagttctaatgcatagcacaatgcctgacatatagtaggtatatgacattggtgaatgatttaatacttaaacaaaacaaaattcttgttctcaaataaaaaataaaataagccttttttttttgtcagggtctctgttgcccaggttcgagaacagtggcacaatcatagctyactgtaaccttgaatttctgagctcaagcaatcctactgcctcaaactactgagtagccaggactatgggcatgtaccactaagcccagctcatctgtttttatttttcatagagatgggggttgccatattgcccacactggtcttgaacccatggctcaaactatcctccagtctcagcctcctgaagcactgggaaaaacctttctctttaaaagaaagacatacttgttattcataagaaaaaagaaagattttaaaacaaatatatctttaccttataataagttgatgacatatataaagtatcttactaaaatgttatagtttgacacaaaacttaaaatagttggacttcagattcacaccatattatgttgagctcagaatttttatccatttgcgtacaaactaatgaaatatgaataattaaagaatagtttgtacattgtactaaattcaatgtctctaaaattttcctgtgttattcgttcttaaataaactgaaataagccaataaacttcgaacattcctggctacattttcagatttctaagatgtttctgaagtcatctttcctgatataattatattgtaataaagtacccatcatatcataaattgttattttaatgatactaacataggcatttaattattaagtaatcctaaagctgacattaaaattactatgaaattgttagtttcaaaatagtaaataaaacaacttttatattttttaatgtttttattatagtttctttgtaccagtaattattgaaatattctaataactcaaaaatgattttaactaaataacttcacttttaaaagaaatctaacaacttaattcaaccaaagtaaataacaccttttgtattattactcctagatgttgtttaagtctttaaaacaatttctaaaactccaagtttatttaattttttctacaatgtgaaaggtaaagtctcttatctaaaacctgtaaaaaacaagtttaatattggttttttaaaagccttactctcaaatctggttcttgaactgttaatcgtaaaaatagcatgactatgtgaaaatactagattgttcttttaattataactctgaactatattgtaaatccatttgttagctttcttcttctttgtcatctaattccatttctagcacttagcatagtgtggagagagttttaggtcgttagtaaacaaaagaatgagcaaactaatagatgggcatgaaaagcactaaatttatgtcttgctgctgtcatatagtagctaagattctgatctcatcacatatgtggacacacaagctttcgctaagatatatacagcattgtttggtttacaatattcttttacctatagtattgaagttgatgctcagaggagctatgtggaaatggccggaaggaaaattattatccacaattcataatatagaaaggtgaaggtagggcattaagcctcagttttatgttgaattgagatgatattatttatagctgaactgtggaaaggagtcagtaagaatttagtataagggtatttggtccaaaattgctttcttctgatcacataaaaa

SEQ ID NO: 673676 - DNA, 790 bp, Homo sapiens
tttcccactttataacttatggttaacctctgcactctgtttcaaaagccaatattgatcaaagtaatgcttttgaagttaagatgacaacaacaacaatgcaaaaatcaacagtccagtttttgcatttgaaagaaatagtttctaaaactcttgaaaatctaaactacatttttaggttttattttcactgagttcttttgtgttttatatttcaattttacagttaactgaaaaataatcatcactttaattcayattaaaccatcatttactcacactaatttacattaaataaattgttctaaaatggaataatatactgactattatctaaacaaatttaactgttctaaaatggaataatatactgactattatctaaacaaatttctgggaacccattatttgttatgcactatgcttggatacaaagatttagggaataaacaatacacagtatgagcttttcaaagcttacttttccaggtagagacataagcatagacaaaagtataatgcataatggaaatattattatataatcatggcagcaagtcagagtatctaaattagtttattaaaagttgatatgctctatgaaagacatcaacttggtctagacatatctgaaaaagattaaagcaggcattttaaacaaatactattaactgaattgtactcataaaagcagaaaagaccaaataaattataagaatgaactaaaatacttcctcaacgtattatacagtaaaaataaactctctgggaaagagaaaataggcaaaaa

SEQ ID NO: 673677 - DNA, 603 bp, Homo sapiens
tggaccagtcrggaacaagggctagaagtaaaatgtaattacttgctataccatcttcccatagtctttagtgaaaagcactaaaggcctgaatttctctagtattaataaaaatgaaagcacttttaagcattatagtcagcatactcctaagattaggggaaaacaccaagacaattatgatctttctaaactttgggggagtagactcacataagttctgcaaaatataattagcacttacccattcagacaaagaaagaaatgcacctcctttatttatttatttttcctttattttttatttatttatttttttctgagatggaatctcgctccgtcacccaggcgggagtgcagtgacatgatctcggctcagtgtaacctccacctccccggctcaagcgattctcttgcctcagcttccccagtagctgggattacaggcacccaccactatgcccagctaatttttttgtattttaatagagacagggttttcaccatgttggccaggctggcttcgaactcctgacctcaagtgttctgccagccttgacctcccaaactgctaggattacatgtgtgggccactgtgcccaa

SEQ ID NO: 673678 - DNA, 603 bp, Homo sapiens
gaatctgtttccagactattcagatccactkattattggtttaatgttgagctaataccacactttcatttactaaaactttaaaatatggtttgatgatgactatcccagttgctataagctcccccatccccaccagcaaccagactatggtccctaaatactatttcccactaaaaagaaccaaggttttttggtgaaatggctgattcctagtctgaggcaggaaatgtataaaatgagtctgggcatcttgtcacaccagaaaataaggaagctacaaaagaatattaagaacttgccaaagcacttagaagcaaacctgaagaggccaaagctgggacaatacgaatatcaaaatgaataatagtggagtaaaagaacattaagtacttataaatctatgagttcgaaatgacactaaaataataataattgtgtagtgaaaggagccacttacacttttattccatgatccctagacccatggggaaactttagcatataatggtctctgattcaaagactatacaatactgcatcctaagagacagaaccctatcctttcagatttgtatctactaaatggcggtataactgagt

SEQ ID NO: 673679 - DNA, 1794 bp, Homo sapiens
taaaatagaaggaagccgagagggtatgatttgggtatttcacatccgctcactcaaatatcccccccttcccctggccagacctgcctatcttgacttattgaaccataaaggatgggcagctcctaataacctcctccaggtgccttgtactgagagtttagcttaaggcaacttctatgaagaaactccacattttgagtcttggagttctgagcctgggggtggcaggtgtcccagcaacaggcattcagactactgggctgtcagtgcagcctgctgcctcaaggacttcactgtgatcctgggaatggcaggcacagccacacccttagcaggccagttcctctgtgtagttcaaatttacccgaggccaagcttagattttacaccttttaccttcccaatgacatcacctaaaaatctcctgccttaactgctgctgtgcaattatcaatgctgacaaacagtggaaatagtataaaaaatatagaacaaagtraactgtgtcatcggaatgtatgatgcatctgcagagatttccctacaccaagaatgtgagttctgagaccttttcctcttcctcatcactaactgcgtattccattaactaaacagcaacctcgaaagaaatcaatactcggaaggtcctgtagtagcagccattccatggatgggacaccagaggtggggcaggagcaagggaggggttcctcaccctggcaggaaagctagaagcctagcctttgtcagtgaacacagcaaaccaagcttcttttctgaaatcttcttggaagcagatgaagtgcacacaaaagagggttcttctccacccccaggaggtgcattctggtggccaatgccagggaataatttcaaaggactgataaacctactaggaacaagacaggtcagtggccatttatgacctcccatacagaagaaaacaaacaaacactgctcctggaagatccagctcagaggatataagggcaaaatccaatttgccctgttttccataaggtgttgttatatatggatgaagggtttcagtttattttgtttcagccccataaacaaacatcgaaagtgtgtttacctagcgcctgcttcccatgtcttgctagagaacataagcaagacaaagaagaggagggactcccatcccagcacacctcagggtcctggatcctcaaggcactctgagtcctgagttgattctaggtatggggcctcttcacgggaaggaggcaattgtatttggaaaggatatcattatatcactgttgacacatcattgcattcctggtgtggtcactcattgagtgagtgctgcactgtggctccttaaaatggcttgtagttacgcatccagtggagccaggagggaaaaatcagacatcagtaacccacttgatgatactgcacattgtatgcaatcatgaatgctgacaagacacaggggaaagaggagaaaaataaatataacaaaggaaactgtcatgaaaacagatgatacatttccagggattcccctgaaccaggaatgtgcgactttcaagaccttcttctgttcctccccactaaccaagtattccattaattaaatggcaacctagcaagaaaccagtagttggaggtggagggttctcttgtctaggaagtcttagataatcccaagagacagacctccaaatcccactgtgatctgccttagaaggaactctacagaagccaggcaatacatggtatttacttcatgtaagaatcgtctactttcaagcgcttcctgtg

SEQ ID NO: 673680 - DNA, 1794 bp, Homo sapiens
taaaatagaaggaagccgagagggtatgatttgggtatttcacatccgctcactcaaatatcccccccttcccctggccagacctgcctatcttgacttattgaaccataaaggatgggcagctcctaataacctcctccaggtgccttgtactgagagtttagcttaaggcaacttctatgaagaaactccacattttgagtcttggagttctgagcctgggggtggcaggtgtcccagcaacaggcattcagactactgggctgtcagtgcagcctgctgcctcaaggacttcactgtgatcctgggaatggcaggcacagccacacccttagcaggccagttcctctgtgtagttcaaatttacccgaggccaagcttagattttacaccttttaccttcccaatgacatcacctaaaaatctcctgccttaactgctgctgtgcaattatcaatgctgacaaacagtggaaatagtataaaaaatatagaacaaagtaaactgtgtcatcggaatgtatgatgcatctgcagagatttccctrcaccaagaatgtgagttctgagaccttttcctcttcctcatcactaactgcgtattccattaactaaacagcaacctcgaaagaaatcaatactcggaaggtcctgtagtagcagccattccatggatgggacaccagaggtggggcaggagcaagggaggggttcctcaccctggcaggaaagctagaagcctagcctttgtcagtgaacacagcaaaccaagcttcttttctgaaatcttcttggaagcagatgaagtgcacacaaaagagggttcttctccacccccaggaggtgcattctggtggccaatgccagggaataatttcaaaggactgataaacctactaggaacaagacaggtcagtggccatttatgacctcccatacagaagaaaacaaacaaacactgctcctggaagatccagctcagaggatataagggcaaaatccaatttgccctgttttccataaggtgttgttatatatggatgaagggtttcagtttattttgtttcagccccataaacaaacatcgaaagtgtgtttacctagcgcctgcttcccatgtcttgctagagaacataagcaagacaaagaagaggagggactcccatcccagcacacctcagggtcctggatcctcaaggcactctgagtcctgagttgattctaggtatggggcctcttcacgggaaggaggcaattgtatttggaaaggatatcattatatcactgttgacacatcattgcattcctggtgtggtcactcattgagtgagtgctgcactgtggctccttaaaatggcttgtagttacgcatccagtggagccaggagggaaaaatcagacatcagtaacccacttgatgatactgcacattgtatgcaatcatgaatgctgacaagacacaggggaaagaggagaaaaataaatataacaaaggaaactgtcatgaaaacagatgatacatttccagggattcccctgaaccaggaatgtgcgactttcaagaccttcttctgttcctccccactaaccaagtattccattaattaaatggcaacctagcaagaaaccagtagttggaggtggagggttctcttgtctaggaagtcttagataatcccaagagacagacctccaaatcccactgtgatctgccttagaaggaactctacagaagccaggcaatacatggtatttacttcatgtaagaatcgtctactttcaagcgcttcctgtg

SEQ ID NO: 673681 - DNA, 1794 bp, Homo sapiens
taaaatagaaggaagccgagagggtatgatttgggtatttcacatccgctcactcaaatatcccccccttcccctggccagacctgcctatcttgacttattgaaccataaaggatgggcagctcctaataacctcctccaggtgccttgtactgagagtttagcttaaggcaacttctatgaagaaactccacattttgagtcttggagttctgagcctgggggtggcaggtgtcccagcaacaggcattcagactactgggctgtcagtgcagcctgctgcctcaaggacttcactgtgatcctgggaatggcaggcacagccacacccttagcaggccagttcctctgtgtagttcaaatttacccgaggccaagcttagattttacaccttttaccttcccaatgacatcacctaaaaatctcctgccttaactgctgctgtgcaattatcaatgctgacaaacagtggaaatagtataaaaaatatagaacaaagtaaactgtgtcatcggaatgtatgatgcatctgcagagatttccctacaccaagaatgtgagttctgagaccttttcctcttcctcatcactaactgcgtattccattaactaaacagcaacctcgaaagaaatcaatactcggaaggtcctgtagtagcagccattccatggatgggacaccagaggtggggcaggagcaagggaggggttcctcaccctggcaggaaagctagaagcctagcctttgtcagtgaacacagcaaaccaagcttcttttctgaaatcttcttggaagcagatgaagtgcacacaaaagagggttcttctccacccccaggaggtgcattctggtggccaatgccagggaataatttcaaaggactgataaacctactaggaacaagacaggtcagtggccatttatgacctcccatacagaagaaaacaaacaaacactgctcctggaagatccagctcagaggatataagggcaaaatccaatttgccctgttttccataaggtgttgttatatatggatgaagggtttcagtttattttgtttcagccccataaacaaacatcgaaagtgtgtttacctagcgcctgcttcccatgtcttgctagagaacataagcaagacaaagaagaggagggactcccatcccagcacacctcagggtcctggatcctcaaggcactctgagtcctgagttgattctaggtatggggcctcttcacgggaaggaggcaattgtatttggaaaggatatcattrtatcactgttgacacatcattgcattcctggtgtggtcactcattgagtgagtgctgcactgtggctccttaaaatggcttgtagttacgcatccagtggagccaggagggaaaaatcagacatcagtaacccacttgatgatactgcacattgtatgcaatcatgaatgctgacaagacacaggggaaagaggagaaaaataaatataacaaaggaaactgtcatgaaaacagatgatacatttccagggattcccctgaaccaggaatgtgcgactttcaagaccttcttctgttcctccccactaaccaagtattccattaattaaatggcaacctagcaagaaaccagtagttggaggtggagggttctcttgtctaggaagtcttagataatcccaagagacagacctccaaatcccactgtgatctgccttagaaggaactctacagaagccaggcaatacatggtatttacttcatgtaagaatcgtctactttcaagcgcttcctgtg

SEQ ID NO: 673682 - DNA, 1794 bp, Homo sapiens
taaaatagaaggaagccgagagggtatgatttgggtatttcacatccgctcactcaaatatcccccccttcccctggccagacctgcctatcttgacttattgaaccataaaggatgggcagctcctaataacctcctccaggtgccttgtactgagagtttagcttaaggcaacttctatgaagaaactccacattttgagtcttggagttctgagcctgggggtggcaggtgtcccagcaacaggcattcagactactgggctgtcagtgcagcctgctgcctcaaggacttcactgtgatcctgggaatggcaggcacagccacacccttagcaggccagttcctctgtgtagttcaaatttacccgaggccaagcttagattttacaccttttaccttcccaatgacatcacctaaaaatctcctgccttaactgctgctgtgcaattatcaatgctgacaaacagtggaaatagtataaaaaatatagaacaaagtaaactgtgtcatcggaatgtatgatgcatctgcagagatttccctacaccaagaatgtgagttctgagaccttttcctcttcctcatcactaactgcgtattccattaactaaacagcaacctcgaaagaaatcaatactcggaaggtcctgtagtagcagccattccatggatgggacaccagaggtggggcaggagcaagggaggggttcctcaccctggcaggaaagctagaagcctagcctttgtcagtgaacacagcaaaccaagcttcttttctgaaatcttcttggaagcagatgaagtgcacacaaaagagggttcttctccacccccaggaggtgcattctggtggccaatgccagggaataatttcaaaggactgataaacctactaggaacaagacaggtcagtggccatttatgacctcccatacagaagaaaacaaacaaacactgctcctggaagatccagctcagaggatataagggcaaaatccaatttgccctgttttccataaggtgttgttatatatggatgaagggtttcagtttattttgtttcagccccataaacaaacatcgaaagtgtgtttacctagcgcctgcttcccatgtcttgctagagaacataagcaagacaaagaagaggagggactcccatcccagcacacctcagggtcctggatcctcaaggcactctgagtcctgagttgattctaggtatggggcctcttcacgggaaggaggcaattgtatttggaaaggatatcattatatcactgttgacacatcattgcattcctggtgtggtcactcattgagtgagtgctgcactgtggctccttaaaatggcttgtagttacgcatccagtggagccaggagggaaaaatcagacatcagtaacccacttgatratactgcacattgtatgcaatcatgaatgctgacaagacacaggggaaagaggagaaaaataaatataacaaaggaaactgtcatgaaaacagatgatacatttccagggattcccctgaaccaggaatgtgcgactttcaagaccttcttctgttcctccccactaaccaagtattccattaattaaatggcaacctagcaagaaaccagtagttggaggtggagggttctcttgtctaggaagtcttagataatcccaagagacagacctccaaatcccactgtgatctgccttagaaggaactctacagaagccaggcaatacatggtatttacttcatgtaagaatcgtctactttcaagcgcttcctgtg

SEQ ID NO: 673683 - DNA, 1794 bp, Homo sapiens
taaaatagaaggaagccgagagggtatgatttgggtatttcacatccgctcactcaaatatcccccccttcccctggccagacctgcctatcttgacttattgaaccataaaggatgggcagctcctaataacctcctccaggtgccttgtactgagagtttagcttaaggcaacttctatgaagaaactccacattttgagtcttggagttctgagcctgggggtggcaggtgtcccagcaacaggcattcagactactgggctgtcagtgcagcctgctgcctcaaggacttcactgtgatcctgggaatggcaggcacagccacacccttagcaggccagttcctctgtgtagttcaaatttacccgaggccaagcttagattttacaccttttaccttcccaatgacatcacctaaaaatctcctgccttaactgctgctgtgcaattatcaatgctgacaaacagtggaaatagtataaaaaatatagaacaaagtaaactgtgtcatcggaatgtatgatgcatctgcagagatttccctacaccaagaatgtgagttctgagaccttttcctcttcctcatcactaactgcgtattccattaactaaacagcaacctcgaaagaaatcaatactcggaaggtcctgtagtagcagccattccatggatgggacaccagaggtggggcaggagcaagggaggggttcctcaccctggcaggaaagctagaagcctagcctttgtcagtgaacacagcaaaccaagcttcttttctgaaatcttcttggaagcagatgaagtgcacacaaaagagggttcttctccacccccaggaggtgcattctggtggccaatgccagggaataatttcaaaggactgataaacctactaggaacaagacaggtcagtggccatttatgacctcccatacagaagaaaacaaacaaacactgctcctggaagatccagctcagaggatataagggcaaaatccaatttgccctgttttccataaggtgttgttatatatggatgaagggtttcagtttattttgtttcagccccataaacaaacatcgaaagtgtgtttacctagcgcctgcttcccatgtcttgctagagaacataagcaagacaaagaagaggagggactcccatcccagcacacctcagggtcctggatcctcaaggcactctgagtcctgagttgattctaggtatggggcctcttcacgggaaggaggcaattgtatttggaaaggatatcattatatcactgttgacacatcattgcattcctggtgtggtcactcattgagtgagtgctgcactgtggctccttaaaatggcttgtagttacgcatccagtggagccaggagggaaaaatcagacatcagtaacccacttgatgatactgcacattgtatgcaatcatgaatgctgacaagacacaggggaaagaggagaaaaataaatataacaaaggaaactgtcatgaaaacagatgatacatttccagggattcccctgaaccaggaatgtgcgactttcaagaccttcttctgttcctccccactaaccaagtattccattaattaaatggcaacctagcaagaaaccagtagttggaggtggagggttctcttgtctaggaagtcttagataatcccaagagacagacctccaaatcccactgtgatctgycttagaaggaactctacagaagccaggcaatacatggtatttacttcatgtaagaatcgtctactttcaagcgcttcctgtg

SEQ ID NO: 673684 - DNA, 1478 bp, Homo sapiens
atccacctgcctcggcctccaaaaatgctgggattacaggcatgagccactgtgaccagccacaaaaataaaaaaattttaaatacatgctacagtgtttccaacaccagcaaagggctgaacctcccagacaccccaggctggagcccaggctgccacggcaggcacctcacagaagcgtatctgcggccagagagtaaaactgctctctccatattgcacgtgcttttctcaagaaacgctttctaatgccctgtaggactagaaacacaagcggtggtgtcttccggattttccaaagagatcaaactattatgaagcaaagtctccaggaacataaatgataagaatgctgggaaattctaaaagcactgcaaactccacacaataagggacatgaaaagagatgaatgggacactaaatgtgtctttcccccatgccctcataacctctccctgtgcagttctgacagaagggccccttgcaggccatcggacagcacagccaaggagcaggagccatctgtcctgcacttggatccgggtgacggccaatgcccacaacctcttgcccaccaaagagtggggtctcctctaggcacacactgggaggttaaaaccccattctaagttgctcctgttgtcctcggagcagtctcaagacttgaagtttggcacttggaaggcacccaattaaaggtcaaagtacataggagggctccatgccaggagatcttggcgttcttcttttgaagtctatgacggaaatgctgcattttgaaagctactgggggaagcattgtgagactgaggcaaacacagcagctgggcagaaaatagatctattaggctcctaccgtgggctgagagagctgctttgggatcggccccatgatgcgctttccctaccctgccacgaggctatcaccccccacagggaccacgggaggctgctgctgtacacaaaaggtcctcacctccyccaggcctggcccactcaacaatcctttcacagcttcctgctctattccttcttctgtgatccacagatactataattataaactacttttttcatggaacctgacctgctcctgccccatctcacttaagtgatgatgatgccactatcaaaaagaaaaatgcgaccaggcacagtggctcatgcctgtagtcccagcactttgggaggctgaggcaggagaactgcttgatctcaggggttcaaggctgctgtgagagatgatcatgccattgcactccagcctaggtgacagatagaggctctgtctcttaagaaaaaaaaaaaaaaagaaagaaaaggaaaaagaaaagaaaggaagaaataaaaaaagaaaaaagctatcagacatcaacttcctcaatagcatcatcctcccgcccctttacctgcatgcacctaaacctgtagccatcactcccccttcccacctgtctcagtggaagaggcgccattc

SEQ ID NO: 673685 - DNA, 1255 bp, Homo sapiens
tgtgtattcatctttcccatgccccatgtgaatcacagagctgggcctttagtgggagttaagtaaatgtttgtggatcaatgactgcttcagtcaataattgaatttttaggggcttttggaaggacttgtgggagaggaggaaattgagtgtatgttgtatctgttaaaattaaacttggtgctagtaacagacatctgaattaacagttgcaataaataattagaggtttatttttctaccatataacagtgtctggaggttaagaatctatggcagtatggcatcttcacgtccatcagggacccagccttcttttatctttctgctctttggtcttaaactcatgaattccaaccccaagattgcctgacggtaacaagataactactggaactccattgattacatccatgttttaggtaggaagaaggagaatggggagaaagacagcctttctagaaggctccattgacctccaccaacatttcattggccacttctaatttcgagggatattaggaaatatattctcttgtctgggcacattctcaatctgagtaaaatcttgcttctgttaggaagaagggaagaataaatcgtgggtaaaaaactgcaggctctgctttgcaagattgggtcttctttatggagaaggagaaggaaaggtattcagcaacacaacacttgtttcactcctgtcctctgagatgcacaggtttgggacattctttattgtgacctgataatgtggcaaatataaggcatcggagcctggggcacttaattagttccttgactattcaaatcctcctgccaagggcttggttaattgcatggacttctccttcattattttcagctgtttaaagtgcctctaagaacactcatcctctattttgtgtaatgaagcctctggtgaaaaatggagtctgacaggtatgtggacagaaatgccctgcaggggcrggcagaactggctgtgttagccggcaggtagatggacaaatagatggataaagtctttggtaaacatggagcattactcaacagcaaatttaccacctcttgctgactcaaaccagctcttgcagaatacttaatgacttctgctaaacaaaacactagagtttctcactttttaaaaagtctacaaaaatgaaagctactgtgtaaaatgagtgccaaatttccactcatatgtttgttcagctttctttgcttttctcccaaaccataacgaaatagacgcta

SEQ ID NO: 673686 - DNA, 1063 bp, Homo sapiens
caggaaaaaagattctatatgctcaatagtcatgtctctactttcacttctaatttaagtaatttgtgtcatctttcatggttaggttaaagtctgtcaattttactgatctttgcaaagaatcaacttttgtttcattgatcttcttcagtgtttttgctttatgtttcattgatttttgttataatcttcattactctatttttctacttgctttgcatttagtttgctctcctctactgtctaacagtagaagcataggttattgatttgaggaatttatttcagatatgggtgtttaaagctgtaaattttcacttaatactactttagctgcatctcatatattttgatatgttatacctctgttggatataagcatccaaattagtatgcttctcagtcccatgggaggaagagttgctggccacagaagtaaccaaagcactaatagctacatggcagagacatggcagaatgtgtgaggacaaaaagaaagatgcccccaaacccaggcactctctaggttctgggaggtatacagaggaggaagtggtgcagaccaaggagcatggaatcaaaaaaaatgaagccccctacaccaccaccactctagccacacagcctaagctcactcccttctctgtacctctctaagcttctaactgcaaaataacrtatctcctggtagctgttataacccctgatatgcatgtattaaactccttggttagtgctcctatagaaaaaaggaaatgcctgaaaacaagtgatagggttaggcaaaacttgcagtgaaacagaaaaactaaaatgaaaactattgttggtggcatctttgggctgactcaatatatttttgttacggcttaaaactggtatctgtgtgtatatgcttgtactgtaagagctcctgggtgtcagaaagaatattccagatcaagaaccaccacaggtagaaaactgataacaggactaattctcttgctgattgccatcagtggtgagtcaggatttagcacaatagtccctaccctctcacgtcctactggctgacaagtca

SEQ ID NO: 673687 - DNA, 1297 bp, Homo sapiens
cgaaagatgccaaggctaccgaagtcatgtcattaaagaatcaatgtttgaaaatcctgtttctaaccatcttcgagcagggcaaagacaaacacaagcacatatctgatctggaaaactgcctgtcctctgtgaaaattaccagcttcaggggctatgacttctacggtcttaaggtatctttcaaactgttaactatggggtttgactttttcttttcgttttttggtggggtggggaaggtcgggtcagtattttaagctgccagattactgccttgtttatagtaagagcaaaatgcaagagaggaacccaggactgagcagggcctgctctcctcaaacacactgaaagctggggaaagtcgttttatcttaaataaggtaacaaatgtgagagcacttcataggccaggaagcctctacaaatgttaaaagtgggtgttactactcttcgtctctctgggcctggatttcctcatttgaaacgttaagttgtttttgataagacaatttctaaaggtctctttgcactctaaagctctcacttcatgcttcttcagtagttaatttcaataagttttgccaacggaacctggaatcagacttcccagtcctgggtttagggttctttgagttttttttgtcaataaactgaaaaagactcatgatattctcaagcataattcaaaacatcatcaatctgaattgatttgaatcttaaactagaaataatgcacattgtgcatttcatgctgcatattaggaggaattggcatcccggagccccacagagagaagctgtggcttgggtcacttggggagtcactgtcaagagggatgcccagggtctgaagcaggaaatcatgatttcgggggttgcttggtcctttggaactgcaagccaaagcaaatagccaacaggtcaatccactgaggtggaaatgttttgttctctctttttccctcatgtacaggataagacctgggatgaagtcttggaaacacatcacaaactcccgaccgmtcaattagacctgaaaaagcagcaagaggccgtgtgggaacttttcacaagtgaatgcacctattttttggaccatttattagttcttaagatggtaatgccaggcttaatttttgtagtagatggaaaatattaatttgtttttttgggcacttgttttcctcttctgaaagaaataaagaaaagaaagagagaaaagaaagaaagagaaagagagacaaagagaaagaaaggaaggaaggaaaggaaggaagacaagaaaagaaaaaga

SEQ ID NO: 673688 - DNA, 640 bp, Homo sapiens
ggttgttcagcttatcttcattttatagcaatcaaattcctctatttatccatatttttcccccatgatgtattcagcacatctgctggcttggctagcacagtggctctggacggagggaccaatcaaagtcacctaggtcttagattgatcctttcctcagagtttaaaaaggggtatagagaaatgtgaccaatccctcgaggccatttcaaacttcacctccactatgacacacagctgcaaacatccccagccaggtgcttctgccctccaagaacccccttttcttccacctgggatactgctctgcttagagggcgacatccctcacttgaaatctcctggcccactgggtggagacagtgagatgagggaggagagaattctcaggagccagaccttctacacagccytagtagtcacttcccaagagctgggctcccacagaatcacactaaggccaggcagttgccactgtgttcctgctcccacagaatctacagggcaggcagtgaacaccttcctacttattctctttcagtttatcccaaaataccacttttgtcatgtcacttccttgcctaaacaccttccatgggtctccttatctatatttaaaaaaaaaaaatgtccagta

SEQ ID NO: 673689 - DNA, 401 bp, Homo sapiens
tgtagtcccaggtactctggaggctgaggtgagaggatcacctgagcccagggaggctgacgctgcagagaaccgtgattatgccattgcactccagcctgggcaacagagtgagaccctgtcctaaaaaaaaaaaaaaaaaaaaaaaaaactgaagccatgctgtgatttgacagaacccccaagaaaatacrtctatcatgtgccacatgatgatgtttcagtgacggaccccaaatacaacagtggtcctgtaagattataataccatatttttactgtaccttttctatacttagatatgtttagacacacaaatatttaccaatgtgttacaattgtctacagcattcagtacaataacctgctgtacaggtttgtagccgaggagcaataggcta

SEQ ID NO: 673690 - DNA, 610 bp, Homo sapiens
agaatgacactgtctattaaggatttaaaattaacattgaagatgtctatttagtcacacttgtcaygtcacaatgttcaacagctacacctggctagtagctgccatcttagagcagatacagtttatttccatcatcacaggaagttctttgtttcaaaactggtccaaaatctaatgtcctacttcttagctacatcttggatggcatggtaaggcctgtgaaccaaaaagttctttgtgcctcaccatacaacaatttttgcctttccttcctgtgccccaggcactttccaagacccagagctgtgggattaaggtaggaaaacaaaccaaaaccattttaatataaaaaggagaagaaaatttctcataatctgattaacagccaagataactactatgttttttaatcagctttgtaccttttccacacattcattctgtctcatttcttcctttcaatattcttaattggaaaagttctgagactgtgctagatttttcatcttgcctgggaggagcaaggtggacttttgttgggtgaagagctgtattcaggaaggagttgcagggactgtttctgagccatattctcccaacttgtaaa

SEQ ID NO: 673691 - DNA, 626 bp, Homo sapiens
ctgttgtatgctttgcgatctttggcaacacagttaacatctctgggtccttgtttcctgttccataaagtgggaatagtaatatctgcctgccagggctattgtacaataagataaacagtatgaaaagacactagcatggtacctggcacagagtattaatttcatagtattattcttctgacccagagaggtttcagtgtcccccaaagagaacactgcagaaattattgacacatacaccaaaaactttgtaaataacttctcagccacattcgggcctgttgtaaaatcatgtttaaaagttaattattttgtccttcttgcttaacagggtggaaacttgataaaatacacctgtgagttagggtttttgttatttcctacctgacagccagaaagaaaagtctgaaaattacttttttctctttactttgaattttcaagagctgatcaatttttatgttccctaaagaggagaattcaataaggcagtctggaatccaactaataatttttagtcgtgcattctagggtggaccttgatagaatgtttgttccatctttgtgttttatgttyactcttttaaactgggtaactgaatgttgaaatgttagcctgggta

SEQ ID NO: 673692 - DNA, 2504 bp, Homo sapiens
atttgtttagatatgtatgtttttatataatactttgggagatccggtacattgagcaagtgagactcacaagatgcaaccagacagtgaggttattcttccaagtacaatataacccatagaacccactccttatactcagcatttttctcatctttggataaacataggacaggccccatgacttttctggccactcttagataatgaggagtcatctgaccaatttgagtcacaaacaatctcatttcaattattctagacagaagatataaaaggaaagggaagtattccttggctaagtacacttgtagctggtagcagtgttctctgcacttggcctctattaaggagactttctgtctcatgagggactttgcaggcatctctcatgagctgttgccttgatggcaacaatagaatcatcctggttttttatagacaacacagcttaaaagtatttgagcaaaaaaaaaaaaaaaaaaagtgatgtcaaggtcataggcacttcttctgaattttgttttaatgatttgaactaatagtaatggaggtaaaaggtaaaatgggcagctaaaattttcctttcaatctattattttctatgtcattaggtgcaaaatgcagcatctctacaagaatattctctggaatgtgggttccatgaatggttaacagtagagaaaaaataatatttttatgaaatgctcatggaatctctggatcaaactgtcgtcaccatttaggcagtgcaggaaatcataaagaatggaaggagtggggaggggaatgggaaatcctgggagaacaatcagagggggagcattggtcagtgggagctgggtgctggagtcaagggtagggtgttgtatagcatttctcgcccttacctcatctgttaagtrgaaataatggttcctacttcaatggttatggctgcttcatgtcaagtcaaatttctttattttcattacttatctttctgtaatttctgagtgtactgtcactaagattgataagggacctatatcagaaattcgagtgggctcctttcacccagccaggagttgagctcagcctcagacctcaagggcagtcactgatggcgttaatgccccaccaatgaggttcttttgagatcaggcacctgtgcaggtggctctgctccccctgggctactctgagccacacgcatctttgtgagacctcttgcgattactgagttgagctttcagtcctgaaaggaatccatggagctatcctactcagcaattctgtcgcttggtgtctgtgtttaagcagtttgggggaaacaacaggccctccattcaccttctacatctggctgaatcattctccagttgacttttttttgtttttgagacagagtctcgctgtgtctcccaggctggagtgcaatggtgcaatctcagctcactgcaacctccgcctcatggtttcaagcaattctcctgcctcagcctcctgagtggctgggattacaggtgtgagccgctacgcctagctaatttttgtatttttagtagagacggggttttgccatgttggccaggttggtctcgaactcccaacctcagatgatccactcaccttggcctcccaaagtgctgggattatagggctgagccactgtgcccagctcagttgccatttttagaagccaaaccctactacctcttagtcctttctggtaattcagccagctcctctgattgtctttcacctgagagccaaatcggcccactctcatgttttatttgatcttgtcagtgttgggaggggatatatgtatacatacaaaaatttaacattaagacacttttagattaaaaaatataattcaagattctttatttatttttatttttttcctgagacagtctggctatgtcacctaggctggagtgcagtgacatgatctcggctcactgcaacctccacctcccaggttcaagcgattctcctgcctcagcctcctgagtagctgcgactacaggcacgcaccaccatgtctggctaattttttttgtacttttagtagagacggggtttcaacatgttggccaggctggtcttgaactcctgacctcaagtgatccagccgcctcggcctcccaaagtgctgggattacaggtgtgagccaccacacctggccagatttcaagattcttatcaaagatatttaactggagctgagaaactctgccctgtcagggtctgttctctctgagtttccatgtgggtgcccacttcagtcattaagctcatgggcccaacctctgtaggcatttgagtttgggacccctgtcttagactttaaagcactaagacctagggagtattcacccattttgctcctacccctgtggcatcttacctatgctcacaactccaagaatccctgcatttgtccttttgttccagtacaatgaagagttagaagaaagaagatacaaatgcacttaggaaacaggcctggctt

SEQ ID NO: 673693 - DNA, 674 bp, Homo sapiens
ttgaaacatgcttctcaatctcaatgcccccatctccagcgacatgcagctgagagacgctgttgcctttccctgagttgttcttcgttcccccgctaagtgtcctttaataaacccactgcatgtaatgcttgtgggcttaaaaccaataccactttgtgtgcactagctggagtgagcaggctgcagacagaagggaaatttttagaggatgtaccttctttccaccctcccacttaaatwatgtgttgtctgtaccagactcttgcaatccatagccatctctccacagtgcccttgctttccttcctgtgttcaattctgtctggtgtatttgctattctgactgattcaggtatggctgaaaatattttctaaccagttctaggacgctttggctttccccctctggtagttgtggttccggatgaatttcttgcccctgagtagatagaatccctggagggatctgtgtggtttcacttctgaggggaatcccatcaagttaagtgacttgaacttcctttccactaccagggaggcaaactaaggatatccaggggcttctaaggcaaactacggatattccaggttcttcccccaaggtctctctatcaggggtttcccatttccacgttccctacaaccctaggtcactagaagttggtagtggg

SEQ ID NO: 673694 - DNA, 1446 bp, Homo sapiens
  misc_feature 1145, 1146, 1147, 1148, 1149, 1150, 1151, 1152, 1153, 1154,1155, 1156, 1157, 1158, 1159, 1160, 1161, 1162, 1163, 1164,1165, 1166, 1167, 1168, 1169, 1170, 1171, 1172, 1173, 1174,1175, 1176, 1177, 1178, 1179, 1180, 1181, 1182, 1183: n = A,T,C or G
  misc_feature 1184, 1185, 1186, 1187, 1188, 1189, 1190, 1191, 1192, 1193,1194, 1195, 1196, 1197, 1198, 1199, 1200, 1201, 1202, 1203,1204, 1205, 1206, 1207, 1208, 1209, 1210, 1211, 1212, 1213,1214, 1215, 1216, 1217, 1218, 1219, 1220, 1221, 1222: n = A,T,C or G
  misc_feature 1223, 1224, 1225, 1226, 1227, 1228, 1229, 1230, 1231, 1232,1233, 1234, 1235, 1236, 1237, 1238, 1239, 1240, 1241, 1242,1243, 1244: n = A,T,C or G
tgggggatgaccacttcagcttactcgagagtcccagagattcctgggggcccctagaccttcttagtgacaggcacgataatttcaaattgcatttccacaggtccatgcaaagtgggggtcccacaggcacctcatctagcattaagcagtgccagcatgttgctttgaggagggtgagggatagtgtcaggttctacagctggctaaacctatgtccccagactgtaagcattcccaaagccttacttcctttctaagaaagatatgggctgttttttttttttggtttgtttcccacatttagtttttgctagaccaaacatgtgcacttgttttcactaagaacgcaggcctgcttggatctcaacgagtaatcaatctgtaaagaccgacccatcaggcctccagagcgtgcaaactggccctgcaaaacactcatgccaggcctccttccaggctgttcccgcacagccacaggctgcagaagcctctctraggactatggcgtggtcggggggtgcagagccgggggctagggacacaatgagctctttacactttcttcagatataaaaggtgtctctctctctctcacacacacacacacacacacacacagtgctatacatacacattattttttaaaagaacacccgaaaaaccctcaaatattaaggtaaaaaaaaataacgttgcagatctaactactgctaccaattacgagatatatatatatatatatatatatatatatatatatatgaaattccaccaatatgacctcacaatatacagtctattataacctattatttttgcttgctatattgagaacatctgtccctgtcattaatagtgcattgatatcaacatttttaatggttgtatatcgtccaattgtatgagtggctatatgggtcccaaattgttgggtaggcatttatttatttgctatttaatgaaaacactagggtgaacttctgtgcatgcacattttggggacacttgtctaactatctccttggtacggggtcctagaaggagaacttgctggtcacaggttaaatgggtcctgagttgacctacggacagattgtacctgtggacactccatgctgattttccaagggcacctaatcaannnnnnnnnnnnnnnnnnnnnnnnnnnnnnnnnnnnnnnnnnnnnnnnnnnnnnnnnnnnnnnnnnnnnnnnnnnnnnnnnnnnnnnnnnnnnnnnnnnnaatagacgggggggtgggggtaggaggtggaaattacagcaacacaattttattatacatccctgtcctacagccacttcccaggaggaacacttgtcacatttggatgaccaggggtgtgggacaggtagggagccaagctcccatgtttgaatggacttggctgggttgggatcagaggccagcaccaggtccaggatgg

SEQ ID NO: 673695 - DNA, 1615 bp, Homo sapiens
ggaagttactcggcaaataaataggcgtttgtggctgtcacgctgagcaatgaggagctggctggctgtgggggagggggagacagagagaggaagacaaagaggagagtgcagtgtgagtgcctggttgccaggttagttgtgttgggggaaaggagcttctaatggccaagaatagaagacctgaagttggctagtgcgtggctagtgcctgtaatcccagcactgtgggaggccaaggtggatgattcgcttgagcccaggagttcaagactagcctgggcaacatggaaaaaccccgtctctactaaaaatacaaaaagttagccaagtgtgatgacacatgcttatagtttcagctactcgggaggctgaggtgggaggatagcttgagcccaggaggcagaggttgcagtgagcccagattgaaccactgcactccagcctgggcaacagattgagaccctattaaaaaaaaaaaaaaaaaaggaaggaaggaaggaaggagaaaagaaaaaagaaaagaaaagaaaagaaaagaaaaatgacctgaagtcactggatttccttcgaggtagccagaaacagaggaaagggggcattgcccacttagggtaaaaagtagagcaccgaattgtggaaggctgcaggttttcatgtgtgcttgcccaagtgatgttccatgtcaggctctagggtccctgcagggacagagagggactaacatttacttacatgcctatagtatgtcaggcatatacttgtgcctttatatatatcagctctgtttttgtcattaaaacatccctgtagaaagataggcactgctgtcccattttacagatggggaaacccaagctctgagtggttcagcaaaccctgggtgcatacccccaccttgcccctgcaaaaccaacaaaaaaacgaaggccctgccttcctggagctgacatttaggttgattctgaaagtcagtaggcccagattttcactcttcatttttcttgtttggaatgagagagcacacagctgggtcgggggaaggagcgagggtctaggcctgcatccactcaccccaaaggaaaggagtaggggaccagtctgctggacatgcagacagcgattggagaaaagtcagcccagctatgaaccccattcctttcagtaygagccaagagggatggcatctgtcagagttgctggatttgggattttgcatcttgccaagtgtccatgaggaattggggaaactctccccctggctggactgaggcttcagcaagcattgttgctgcccagtggtgatcagctcagtgtccttggaaaagagcagaaagtggtatcacgaacatatcttctcctttgcttccttctcctcactcttcatcatcatcatcatcatcatcatcaaatatggatctgtgaggctacctctggggttgaaacttggttttgggcaaaatttgtgatgttctctctgcccaatccagcctcaggctacaaatgaatgtaaaaatctctaatttagtgccaagtaacagaaaacagctctacttatcttaagccaaaaagagggacttctcagaggcatactaatggaggatggcaagagggc

SEQ ID NO: 673696 - DNA, 1083 bp, Homo sapiens
caagaggatagaaagaagggaagggtggaaagaaggaaggaagaaagggtgggagggagggaagagtggtagttttggaaggaaggagggaatcagagctaaagataatacatgatatgagtcagtgttcaatgtccctgaagattaggggaatcaagctttgcttccaggagaattaacacaggagagccaacagagatgtggaaatttaggaagtcagaggagacattctttcaytcattcattcgttcattcattcacttgctcatttttacatgaattgactctagaacagatgctggagatacaaagatgcatgagacttgcccccatcctcaacagtcattcacagtctaatcagaaagagagccttgcatttggaatacaatatggagtaataatacctctgtgttcagcctgcacaaaatactctgtatgcatggtcatatgtcccttgaaacaactttatgaggaagatactactatagtctccatttgacagataaggaaactgaggcttagggaggtcaaataacttgcccaagtaaaacaactagtaagtagctgaaccacaaaacagagattcatgcagaaagctgtacaacagaagaaaccaggactacatctgcctcaaaggaaccagagaaggcttccaaagaaggcagcattttaaatgggttttgaaggatgtatagcagctatagaggcagagaagaggaaaaaagtcatttcaaacagaaagaacaggttgtgcattcaaaggtgaattgagaggagagaaaagcatgttcaggaaaagacaagacatttgtggccctgggagctgagatatgccctcgggaaggctggagatgatgtcaaagacgaagattggacaataatgcccatcaggccaggagccccctttctggattcgctgcttccactcttgtgtagaatgatctttttaaaatgttcatcaaatcaggcccccctcttattaaacatttcaaaggttttctgttctacttaaaacctaaaacccttcttttgtatgcaaggcctgaacagcctgcctttatcctgtagacaaaggggagatgg

SEQ ID NO: 673697 - DNA, 637 bp, Homo sapiens
ccttgtcatcttctccctggagcatgtcattcatggctgtctcctaagggcctagcttggtccctgcattcagtaggcaggtactatttgcaggggcaggacagcaaatggttagagcttaagctctgcatccaaaagggcctggattcagatctccactcagccatgtgttagctgtgcgaccctgggcaagctagcccgctgctcctcacactccacggtcgctgtgaggtgtaatgagatcgcacatataaattgattagtgcagggtctggaatgcagcaagcagatggccaatgartgtttggcaacactgcacttcagaatcgggctctacctagacagacttcatatcaaattccagctctcccacttaccagctgtgtgaccttgaacaagtcacttagcctctctgagtttaattcttcctctataaaatgggcttcatatttttaaaatggcaaagattctaaagattacaaacacaacacctgcgtcgcttccctctgtgtacagagcagcgttgttgcagtttgcgcgctaaggctgtagactgggctgcagtgccttttaaatacaccagctcctggtttggagctaatgggacacatgccggggacggctgggagtcacagcg

SEQ ID NO: 673698 - DNA, 602 bp, Homo sapiens
agagctataagagcctttttctaaaaggtgtatcacttcatgtttctctttggatcatagataagctaagtgagtcttaatacttaattgctaattccacaaccttttgttaagcaccttctatgtgctagtcattcacacagaggggaaagactgacaagacctccaaacacatggagcttctattctagtaaggaagacagaaaataaagcagtgtacaaatgtgggtagaatccttagattatgataagtactttgaaaaaaatactgggttgttatgcttgaaaagttttgatgggtcaggttaagctacttaacataaaattcaaaaaatgcttctcaaagagggcacatttaaaatgagacctgcgggaataagaagagacagacatgtaaaaaaatcagtgagaaagcattccaaggaattgcaatctcaatattccctagatgggaagtaatttgaactaayacagaaacttagagaacacgagggtgcctggggtttagtgagctattgaaggaagtctggtgcaaaaccagaaaggcaacgtgggccagattatgcagggttataaaggcgtggcaaaaagtttgggtttca

SEQ ID NO: 673699 - DNA, 645 bp, Homo sapiens
catattaatttttsaggaaaaaattattctaattgaagaagactggaaacttagccaaagctttatctgaaaaatgcccagaaaagcttcatgaaagagtctgtatcctttatgacagggcttactcctctcatcaaacaaaagccactattttttctttgatagtttggaatttatttgtctttgatattaagcaggtttattctaataaagaaaaaatagtggttactgacaaaagaatacctaattatagcagaactatcaataataaaaaatgtcagaagacaataacattctgttttccatttcttaagatggaattggctgggcatggtggctcacacctgtaatcccagcactttgggaggctgaggagggcagatcatggaggtcaggggttcgagaccagcttaaccaacatggagaaaccccatcttacttaaaaaatgcaaaaattagcctggtgtggtggcacatgcctgtatttccagctattcatgtgactgaggcacaagaattgcttgaacccaggagtcagagactgcagtgagccaagatcacgccactgcaccccagcctgggcaacagagtgagactatgtttcagaaaaacaaaacaaaacaaaaaaagaaggaattgattgca

SEQ ID NO: 673700 - DNA, 658 bp, Homo sapiens
ttacctttgatggcagttgtggcagaaacggctaactgaccacttgaaatctgtgcttccccttcacggtgtagggttattgctgggaagtgactgcccagccattgactacacgttcctgctctcttgaatctggagaggagcatattgctagttctgatcacagtgrtatatgagtagacatgaagtatgtcattgttcagccaaagaggcaaagtttctaatgtgctttcatcacaaactctctttcccattggtgaaaaccttagattccaagtgctgagatggtagtttcacaagaagaagaggaaaatacttagaggggaaatacctaaccagaactatctgttttggacttgaattttaaaaagtttttaaaaataaaataaataagaacctttattgagtgtagccaccaggtttggggattatttgttataacagctaatattgcttaccctgacaaatataagaagtgatgccgcttttccattttggtaattgtataagttttcttcaaaataagtttatttaaataagaaaatgagtacatttagagaacaatgttaaatcaacaatagtacaagtgtacacaaataagaaaaaaaatttttctcaaatgacccaatttgggaagcactggcctgtagcaagcata

SEQ ID NO: 673701 - DNA, 658 bp, Homo sapiens
ttacctttgatggcagttgtggcagaaacggctaactgaccacttgaaatctgtgcttccccttcacggtgtagggttattgctgggaagtgactgcccagccattgactacacgttcctgctctcttgaatctggagaggagcatattgctagttctgatcacagtggtatatgagtagacatgaagtatgtcattgttcagccaaagaggcaaagtttcyaatgtgctttcatcacaaactctctttcccattggtgaaaaccttagattccaagtgctgagatggtagtttcacaagaagaagaggaaaatacttagaggggaaatacctaaccagaactatctgttttggacttgaattttaaaaagtttttaaaaataaaataaataagaacctttattgagtgtagccaccaggtttggggattatttgttataacagctaatattgcttaccctgacaaatataagaagtgatgccgcttttccattttggtaattgtataagttttcttcaaaataagtttatttaaataagaaaatgagtacatttagagaacaatgttaaatcaacaatagtacaagtgtacacaaataagaaaaaaaatttttctcaaatgacccaatttgggaagcactggcctgtagcaagcata

SEQ ID NO: 673702 - DNA, 964 bp, Homo sapiens
cctacttgaaaggagtgtttgtaggttccagtaaagctttgtggcgaagaattgcaggacctgcagacaaactctcttcggcggtatgacttgcgatataattttgaggtggcccaccatggatttcaagtcgtcggagaagaacttgttcccaacattgaagagtttttagaaccgcatgacaaagaggtgaactaactggaagctctaaaatgggaacattgactcatattaatcttatgcagtaaaatgccatattcaattttaagaaagactgaaatgagagaggggagagcagatgcaggaaaaaaaaaaagactgagatgaaatattaacatacactttggcagggaagatgtgcaaggtgaggtgggcaaagaaacccagtggattacaaaaggtatgccataaatctgtgtaagtatttcaacattactgcttttgaccttaatattacaagaaaaatgtatctgaagattatgaaaatatgtatgtggggaaaattaatcgctttaaatcaaacttgtccaacccatggcccacaggctgcatgcggcccagacagctttgaataaagcccaacacaaattcataaactttcttaaaacattatgaaattttttgtgatttttctttttagctcatcatctattgttagtatcaatgtattttatgtgtggcccaaggcaattattcttcttcctgtgtggcccagggaagccaaaagattggacacccctgctttaatttgtatcagactaatttctgtatggcatataactcttyaagatctgtagaaaatgaaaacaatacataaagttaaaattaaataatacttgccatggaactcagcacttagcagttctgcccatccatactcttgagtactgatctcagtttcaacttttagttattcctactacttacctccctatatctaaataacatgcttaatacttaattt

SEQ ID NO: 673703 - DNA, 975 bp, Homo sapiens
aaaaaactgttcagtgaagtagactcacagaaaatccaggtgcaagaattagaaaacaagaacttaaaaatacctattataaayatgttgcagaaataagattaaaaggtagataccatgagtaaaaaagataatgaatctcagcggagaaataaaaaaattaagaagtaaacaaagggaaatttctggaactgagagtataatataccctatgaagaattcatataatagggtcaatggcagacataacagagcagaagaaaagatcagtaaactcagataagtcaatagaaattatccaaacagaaccaccaaaaaatgtaatatatatacataaaaacgcacatattttacatacacagttcatcctcaccatctgtggaggattggctccaggacctcttgtggatactaaaatctagaaatctttaagtccctgttacaaaatgctgtggtgtttgcatataacctacacacattcttttgtatactttaaatcactaaattatttataatacctaaaatactgtaaatgctgtctaaatcattgttatactctttagggaataatggcaagaaaagaagtccatacatgtttagcacagatgcactgtttttagaaaaatattttcaatctttggtttatgaaatccatggatgcagaatccatgaatatggaaggacaactgtatatataaatacatatacatacatatgtacatgcatgtatgcatacacacattgaaagagagagagggaatgaggcaaacaaaatatataaatagatcggccgggcgcagtggctcacgcctgtaatcccagcactttgggaggcgggcggatcatgaggtcaggagatcgagatcatcctggctaacatggtgaaaccctatctctactaaaaatacaaaaaattagcaggacgtggtggtgggcgcctgtagtcctagctactcgggaggctgaggcaggaga

SEQ ID NO: 673704 - DNA, 640 bp, Homo sapiens
aatctaactattacttttgtttgagaaacctcactaatacatatgtttgggagctctgagctcagtaattccccaaggggcaattcagtataacacagtaaattgtaattccatcagttatgggtcatctaccacaatctaaaaattttcttttgtaggttaaatgttaatctttaacaaaattacatctttctgagccacattttcctcttacaaagtaatttctaagtgtttagctttattttggaaaagagctgtaatactctttgaccacaatgggacaattttgtagcctatcatattgcttcggtaactgactggcagaatttatatgtgaaatacttctctagaccctgcactttcagaatagcctcaaaatgcaatatttttgataggagtaaaaaaaawaattatgtagcccaaagccattacaacattttatttcacttacatgcttttgagttttcagattcatatgatgagtatattcagtttattttaatctttattccaaagatacttctgtgttgcactgtcatctctttcaccattggtaaatgaacatatttgaagtacagacactttacattttttgcacatatatatttaaggcagaagtatttttattttattttaaaga

SEQ ID NO: 673705 - DNA, 685 bp, Homo sapiens
caaaagaggaaacattttaataacaatatcttatccatttttgtagattccttgaaatccagggaggagcacacaatgaaacagasactatgtcagttgtgatgtaggcatcatcatgctgaatattaagagtggaagtagattgattttgtctgctgcagaatgatggatatgaaagcaggtgtctggtgggcagcaggaactcatacctcatctcaataggcttcacatctgaaggctcatcttgcttctcagttacatgatgaagggagacaccatccaagcagtaaagataggagcacagcactgctgaaagcaaggctactcctatcgcacgttctgtcttcataaatgaagaacagaagaagagaaaataataaatttctatagaatgacagacaggcctaggcttagggaattcatgaaacaaacaaaccaactcttctcaaaattgagtgggaggaaaatggtcactaatgttgattgaactcctgcaagccaggcacttgatgtaaattatttcatttaatcttcagaacaacctaaaaaggcaggtattttatctttattttgtacgtgataaaatgacaactcaataaggtgaaacatatcaccattgccagtgagcagtaaatgctgaaagtggacagaggagaccatatctcagcatatggaggtgcatata

SEQ ID NO: 673706 - DNA, 496 bp, Homo sapiens
  misc_feature 277: n = A,T,C or G
ttcctctctattcatcttgtttctgataactcaggactatttctttgcacttgtgcatttgaattttgcctatgttttgaaagakaagtttcttttgtttaattttctcttcactaactacattttctgtctttctattctagagttagaactgttgccattttcaaactttgtaatttatcttcacacattatgcttacatgttcatcttcaagcagaaattgagtaaaattctgaaaagttatgattaaacacatggcattaacactgccatcantagagtttatgcttccagctgtctatcagtaggttgacattatcttgttttatttttatttatgttaactcctctggaattttatgtgctcaatttgcgatgaagagttatccctcgagaatgactgttggtgattaaaatatatctaaacgggtttttctgttattaaatatggttttcatattacagattagttcacctctgtagcccatatgaaaa

SEQ ID NO: 673707 - DNA, 635 bp, Homo sapiens
tgtgkttttttttctgcacaaacagacaatagttcgaaattttctgaccatctctaatgacagatcattataagtatactgcctagtagatatttcctggcaaaccattgactacaaataactgctttatgttcttataaattttattattttattattatttgagatcgagtcttgctctgtcgccaggctggagtgcattggcgcaatctcggctcactgcaacctccgactccctagttcaagagattctcctgcctcagcttctggagtagctgggattacagagacgcacgatcacgcccagataatttttgtatttttagtacagacagggtttcaccatgttggccagggtggtctcgatctcctgaccttgtgatccgcctgcctcgacctcccaaagtgctgggattagaggcatgagccactgcgcctggccaaaatcgtttttgaaataattgtagattgatagcaaaaccagatggtacagaaagcaaccatctgtcctcaatcagcttcccttaatgataccatcagataaataaagtatatctgtctaaattaagaaattctatttagtcaaattccattaattaaataatgaacactattttgtatattaatagttttct

SEQ ID NO: 673708 - DNA, 635 bp, Homo sapiens
tgtgtttttttttctgcacaaacagacaatagttcgaaattttctgaccatctctaatgacagatcattataagtatactgcctagtagatatttcctggcaaaccattgactacaaataackgctttatgttcttataaattttattattttattattatttgagatcgagtcttgctctgtcgccaggctggagtgcattggcgcaatctcggctcactgcaacctccgactccctagttcaagagattctcctgcctcagcttctggagtagctgggattacagagacgcacgatcacgcccagataatttttgtatttttagtacagacagggtttcaccatgttggccagggtggtctcgatctcctgaccttgtgatccgcctgcctcgacctcccaaagtgctgggattagaggcatgagccactgcgcctggccaaaatcgtttttgaaataattgtagattgatagcaaaaccagatggtacagaaagcaaccatctgtcctcaatcagcttcccttaatgataccatcagataaataaagtatatctgtctaaattaagaaattctatttagtcaaattccattaattaaataatgaacactattttgtatattaatagttttct

SEQ ID NO: 673709 - DNA, 677 bp, Homo sapiens
taatttgtgggggataattaaacttctttttacagcctggttcatacctgtgacaaattttgaccacggaattatatgtgaaaatgtcacttaatagaagaagcagctaaaagggccagtatttgctcttttctcactgtcgggagaccarcaatattccagttagagaatactctatcaactgtgtctctgaattaggacaacatagagcaaggctgaagccaacctgaaattaccatatagtacaggagagttaaattttaagccactgacattttgcagtcattgttactggcatacattatcctgattgatacagtagaaacattgcacatgaagataagtgatccaatttgagggatatttctcatgtaaaatggattaacatcatgatggattggataaaaggtctgtatcagagagaggtgtgaagttaaactccatctggtttcacaattgagaaccagatggatggagatgactgagcttagatagaaaagagaagaagatatgaattattgatcagaattaattctagatctctattccttaagactattacttgcagttatctttattatcttattccagcgttagtatcaatcccgttgagtaatcattaaacataaaagatcttctggtgtcaaagagatttttggacatgatagtcatattca

SEQ ID NO: 673710 - DNA, 677 bp, Homo sapiens
taatttgtgggggataattaaacttctttttacagcctggttcatacctgtgacaaattttgaccacggaattatatgtgaaaatgtcacttaatagaagaagcagctaaaagggccagtatttgctcttttctcactgtcgggagaccaacaatattccagttagagaatactctatcaactgtgtctctgaattaggacaacatagagcaaggctgaagccaacctgaaattaccatatagtacaggagagttaaattttaagccactgacattttgcagtcattgttactggcatacattatcctgattgatacagtagaaacattgcacatgaagataagtgatccaatttgagggatatttctcatgtaaaatggattaacatcatgatggattggataaaaggtctgtatcagagagaggtgtgaagttaaactccatctggtttcacaattgagaaccagatggatggagatgactgagcttagatagaaaagagaagaagatatgaattattgatcagaattaattctagatctctattccttaagactattacttgcagttatctttattatcttattccagcgttagtatcaatcccgttgagtaatcattaaacataaaagatcttctggtgwcaaagagatttttggacatgatagtcatattca

SEQ ID NO: 673711 - DNA, 1012 bp, Homo sapiens
atctttttcagctggtattttatcctgccaacttgtactaaattttgtaaattaacactgtaatagattatatgcaattaacaatgtcatgaacmcatggttattttatatataatgagttggcttatttgttaataggttttctcaataatgtaataagcaagtcaagagatatttaaaaatctcaatttttgactttagagacttgaaataaaactgttatttttgtcttttaaagatattggtagaaccctctgcaaagacagttaggtaggaggagaagaaaaagtaacaattatatttgaataagtttcttttgtttttccaggcggaaatgttataggaatatacttcagcatttttataaagaaggtacttagcttaggcatacagagcacacagtggcacataataattgcaccactgctttaccagtaccagaatcaggcattcactggaacaattttatgattttgtaacaacagaagcagttttctcaagttctgctttttttggccaaatatgctttcttttcattaatccaaaatctacctgtgtgaagaatcttaatttttttctagcttagggagaaataacacatggcaacattaacgaacaatgtggactttactatatgattttgtaagacttgaatttagcaagacaggtatgccccagaaaaactttaaaattgtagtaagcactaatatcttcattgtcttctgcctggagcagtgtgacaaactgcctgctcactctgcaaaaactttacattttcatctcccttgtttttcagcgttgcttctttgtttatgagcaagcaaccaggttctagatgttgagatcctcaaaatattttctcaatgaagaccagcctctaattgagaacatttttgtattagctgcttagagaatgaagtagtcttcacataattacgtacagtaaatctagcctttccaaacacacacatatacatgtacacattcacaaactttttctcttttctgctcc

SEQ ID NO: 673712 - DNA, 1012 bp, Homo sapiens
atctttttcagctggtattttatcctgccaacttgtactaaattttgtaaattaacactgtaatagattatatgcaattaacaatgtcatgaacacatggttattttatatataatgagttggcttatttgttaataggttttctcaataatgtaataagcaagtcaagagatatttaaaaatctcaatttttgactttagagacttgaaataaaactgttatttttgtcttttaaagatattggtagaaccctctgcaaagacagttaggtaggaggagaagaaaaagtaacaattatatttgaataagtttcttttgtttttccaggcggaaatgttataggaatatacttcagcatttttataaagaaggtacttagcttaggcatacagagcacacagtggcacataataattgcaccactgctttaccagtaccagaatcaggcattcactggaacaattttatgattttgtaacaacagaagcagttttctcaagttctgctttttttggccaaatatgctttcttttcattaatccraaatctacctgtgtgaagaatcttaatttttttctagcttagggagaaataacacatggcaacattaacgaacaatgtggactttactatatgattttgtaagacttgaatttagcaagacaggtatgccccagaaaaactttaaaattgtagtaagcactaatatcttcattgtcttctgcctggagcagtgtgacaaactgcctgctcactctgcaaaaactttacattttcatctcccttgtttttcagcgttgcttctttgtttatgagcaagcaaccaggttctagatgttgagatcctcaaaatattttctcaatgaagaccagcctctaattgagaacatttttgtattagctgcttagagaatgaagtagtcttcacataattacgtacagtaaatctagcctttccaaacacacacatatacatgtacacattcacaaactttttctcttttctgctcc

SEQ ID NO: 673713 - DNA, 1012 bp, Homo sapiens
atctttttcagctggtattttatcctgccaacttgtactaaattttgtaaattaacactgtaatagattatatgcaattaacaatgtcatgaacacatggttattttatatataatgagttggcttatttgttaataggttttctcaataatgtaataagcaagtcaagagatatttaaaaatctcaatttttgactttagagacttgaaataaaactgttatttttgtcttttaaagatattggtagaaccctctgcaaagacagttaggtaggaggagaagaaaaagtaacaattatatttgaataagtttcttttgtttttccaggcggaaatgttataggaatatacttcagcatttttataaagaaggtacttagcttaggcatacagagcacacagtggcacataataattgcaccactgctttaccagtaccagaatcaggcattcactggaacaattttatgattttgtaacaacagaagcagttttctcaagttctgctttttttggccaaatatgctttcttttcattaatccaaaatctacctgtgtgaagaatcttaatttttttctagcttagggagaaataacacatggcaacattaacgaacaatgtggactttactatatgattttgtaagacttgaatttagcaagacaggtatgccccagaaaaactttaaaattgtagtaagcaytaatatcttcattgtcttctgcctggagcagtgtgacaaactgcctgctcactctgcaaaaactttacattttcatctcccttgtttttcagcgttgcttctttgtttatgagcaagcaaccaggttctagatgttgagatcctcaaaatattttctcaatgaagaccagcctctaattgagaacatttttgtattagctgcttagagaatgaagtagtcttcacataattacgtacagtaaatctagcctttccaaacacacacatatacatgtacacattcacaaactttttctcttttctgctcc

SEQ ID NO: 673714 - DNA, 1012 bp, Homo sapiens
atctttttcagctggtattttatcctgccaacttgtactaaattttgtaaattaacactgtaatagattatatgcaattaacaatgtcatgaacacatggttattttatatataatgagttggcttatttgttaataggttttctcaataatgtaataagcaagtcaagagatatttaaaaatctcaatttttgactttagagacttgaaataaaactgttatttttgtcttttaaagatattggtagaaccctctgcaaagacagttaggtaggaggagaagaaaaagtaacaattatatttgaataagtttcttttgtttttccaggcggaaatgttataggaatatacttcagcatttttataaagaaggtacttagcttaggcatacagagcacacagtggcacataataattgcaccactgctttaccagtaccagaatcaggcattcactggaacaattttatgattttgtaacaacagaagcagttttctcaagttctgctttttttggccaaatatgctttcttttcattaatccaaaatctacctgtgtgaagaatcttaatttttttctagcttagggagaaataacacatggcaacattaacgaacaatgtggactttactatatgattttgtaagacttgaatttagcaagacaggtatgccccagaaaaactttaaaattgtagtaagcactaatatcttcattgtcttctgcctggagcagtgtgacaaactgcctgctcactctgcaaaaactttacattttcatctcccttgtttttcagcgttgcttctttgyttatgagcaagcaaccaggttctagatgttgagatcctcaaaatattttctcaatgaagaccagcctctaattgagaacatttttgtattagctgcttagagaatgaagtagtcttcacataattacgtacagtaaatctagcctttccaaacacacacatatacatgtacacattcacaaactttttctcttttctgctcc

SEQ ID NO: 673715 - DNA, 670 bp, Homo sapiens
tgaagtgaggaaagtaaacaaacaaaaaacaaaaaggaaacagcctggcattctacaggttacagctcatagaaaggaagaggttagtctgaacagcaccaaatgtagtgagacacactcrgtgattcatagtccatctaagaagcccaaattcccaaatttaccttctagagaatactagaatgcacaactttttctcatgccctcctctcttgctaggctatctgccttaagaaacaagaggcaaaggttcccatctgctggtgtaagtcagtcacctttattgtcatcaatattaataaaggcttaatcctgcagggcctatgcaacaggaattgcagaaggcttcctgatcacaggtattcacagtcgaaaataaacacagggacatggacacagctcaggatgtgcaaaactatcttaatacacagtggcattactgtaattatttatgcagaagtaaatgcttttctggaactgaaaataggggcaaatggtagccagccaccaggaaaagaaacttggagagtgtagtttcctgacagtgaatgctggtaagatggaactgttttcctgtcaaaccagaaaaatttcatggggaatgtgtgggcttcaggaacagggacaatgtgaaaagtagaaagcaaggccaagctgaggggtgctgacg

SEQ ID NO: 673716 - DNA, 670 bp, Homo sapiens
tgaagtgaggaaagtaaacaaacaaaaaacaaaaaggaaacagcctggcattctacaggttacagctcatagaaaggaagaggttagtctgaacagcaccaaatgtagtgagacacactcggtgattcatagtccatctaagaagcccaaattcccaaatttaccttctagagaatactagaatgcacaactttttctcatgccctcctctcttgctaggctatctgccttaagaaacaagaggcaaaggttcccatctgctggtgtaagtcagtcacctttattgtcatcaatattaataaaggcttaatcctgcagggcctatgcaacaggaattgcagaaggcttcctgatcacaggtattcacagtcgaaaataaacacagggacatggacacagctcaggatgtgcaaaactatcttaatacacagtggcattactgtaattatttatgcagaagtaaatgcttttctggaactgaaaataggggcaaatggtagccagccaccaggaaaagaaacttggagagtgtagtttcctgacagtgaatgctggtaagatggaactgttttcctgtcaaaccagaaaaatttcatggggaatgtgtgggcttcaggaacagggacaaygtgaaaagtagaaagcaaggccaagctgaggggtgctgacg

SEQ ID NO: 673717 - DNA, 1824 bp, Homo sapiens
aaacggagcatgacttgatatagttaggttttctctccccacctgaatctcatcttgaattgtaatctacataatcctcatcatgtccatgtgtgaagggagagaccaggtgcaggtaattgaatcattgggatggtttcccccatgctgttctcgtgatagtgagtgagttctaacgagatctgaggttttataagtggttctttccccctcgctcagcaagtctccttcctgccatcttgagaagaaggtgtcttgcttctcctttatctcctgccgtaattgtaagtttcctgaggcctccccagccatgctgaaatgtgagtcaattaaacctctttcctttataaattacccagtcttgggtatttccttatagtaatgtgaggacggaccgatagtacaactcatacaagtaatctcagaagggatgagacctgagaagtgtcagtggggcagaatatctgctttgtaatctgaacattgtagggagggatgtgatcaagtgaatttgttaagtggcagcatgatgccccatttctctatgtctccactattcatggcttgtaccatctctgtcaattgtgtatagacactgaaacattgcatactactctgtaagctaagttccctaccctgggtacttccaagcctatgaactcatttgctaaccaagaacaagagtcgcccacctcgaagtggttttagagatgaaatttatatcatactgaagaggagtcaggtggttttagaatcactgtttggaccttgaaatagaaatgcttattcataattaagagctttaaaagaagcagcagcagcagctgaagacttttaaatcttctttcccagtcattcactatgaaatctaactccattcctggagcgcaaattgatggcatttaggactttagtgttttccaggtatcaataaatccctgctagtgtctcttagtttttctaatagccaggaggaccagtaataaagtacaataaaaggttttagtaaaagaagtaacatttcctcatatcattaagatacgttttaggcattcttttaaaatctattatttgagtagcccatattttttacaattaatttttaaccattttattatgaaacgctacactacaaattaataactcgtcataatgctaaatgatgagttaatgagtgcagcacaccagcatggcacatgtatacatatgtaactaacctgcacattgtgcacatgtaccctaaaccttaaagtataataataattaaaaaaaaacaagaaaaagaaaaaaataaataatttttagtgtgctataatcatackaagggatattatatatcaatgacaataaacagttacatgcaacattatggacaatttcacaaagataacatgtagcaaactaagctagacttaaaagaatacatgctgtatggttccatttaaattaagccctaaaaataataaagctgaactttagtttttagcaacatgattaggtgatgaaattataaacaaaaggaagcaattattagtgaggtgggacatgtactaatgattgattagaggtttgaggggtattctgctatcttaccagtgtctgattacatgatactgttggtgataaaaggtgacggatttgtcacaaacaaggagctattcattttgtttaacataatacttaatctcacaatcactagctctgtgttcacaagtgccatattatttgtatcaaggcattattagtgaataacctttggttctaatattgtagcagtttacactttttctccattcagtccatctctgttcactcatgctttcc

SEQ ID NO: 673718 - DNA, 1824 bp, Homo sapiens
aaacggagcatgacttgatatagttaggttttctctccccacctgaatctcatcttgaattgtaatctacataatcctcatcatgtccatgtgtgaagggagagaccaggtgcaggtaattgaatcattgggatggtttcccccatgctgttctcgtgatagtgagtgagttctaacgagatctgaggttttataagtggttctttccccctcgctcagcaagtctccttcctgccatcttgagaagaaggtgtcttgcttctcctttatctcctgccgtaattgtaagtttcctgaggcctccccagccatgctgaaatgtgagtcaattaaacctctttcctttataaattacccagtcttgggtatttccttatagtaatgtgaggacggaccgatagtacaactcatacaagtaatctcagaagggatgagacctgagaagtgtcagtggggcagaatatctgctttgtaatctgaacattgtagggagggatgtgatcaagtgaatttgttaagtggcagcatgatgccccatttctctatgtctccactattcatggcttgtaccatctctgtcaattgtgtatagacactgaaacattgcatactactctgtaagctaagttccctaccctgggtacttccaagcctatgaactcatttgctaaccaagaacaagagtcgcccacctcgaagtggttttagagatgaaatttatatcatactgaagaggagtcaggtggttttagaatcactgtttggaccttgaaatagaaatgcttattcataattaagagctttaaaagaagcagcagcagcagctgaagacttttaaatcttctttcccagtcattcactatgaaatctaactccattcctggagcgcaaattgatggcatttaggactttagtgttttccaggtatcaataaatccctgctagtgtctcttagtttttctaatagccaggaggaccagtaataaagtacaataaaaggttttagtaaaagaagtaacatttcctcatatcattaagatacgttttaggcattcttttaaaatctattatttgagtagcccatattttttacaattaatttttaaccattttattatgaaacgctacactacaaattaataactcgtcataatgctaaatgatgagttaatgagtgcagcacaccagcatggcacatgtatacatatgtaactaacctgcacattgtgcacatgtaccctaaaccttaaagtataataataattaaaaaaaaacaagaaaaagaaaaaaataaataatttttagtgtgctataatcatacgaagggatattatatatcaatgacaataaacagttacatgcaacattatggacaatttcacaaagataacatgtagcaaactaagctagacttaaaagaatacatgctgtatgkttccatttaaattaagccctaaaaataataaagctgaactttagtttttagcaacatgattaggtgatgaaattataaacaaaaggaagcaattattagtgaggtgggacatgtactaatgattgattagaggtttgaggggtattctgctatcttaccagtgtctgattacatgatactgttggtgataaaaggtgacggatttgtcacaaacaaggagctattcattttgtttaacataatacttaatctcacaatcactagctctgtgttcacaagtgccatattatttgtatcaaggcattattagtgaataacctttggttctaatattgtagcagtttacactttttctccattcagtccatctctgttcactcatgctttcc

SEQ ID NO: 673719 - DNA, 1824 bp, Homo sapiens
aaacggagcatgacttgatatagttaggttttctctccccacctgaatctcatcttgaattgtaatctacataatcctcatcatgtccatgtgtgaagggagagaccaggtgcaggtaattgaatcattgggatggtttcccccatgctgttctcgtgatagtgagtgagttctaacgagatctgaggttttataagtggttctttccccctcgctcagcaagtctccttcctgccatcttgagaagaaggtgtcttgcttctcctttatctcctgccgtaattgtaagtttcctgaggcctccccagccatgctgaaatgtgagtcaattaaacctctttcctttataaattacccagtcttgggtatttccttatagtaatgtgaggacggaccgatagtacaactcatacaagtaatctcagaagggatgagacctgagaagtgtcagtggggcagaatatctgctttgtaatctgaacattgtagggagggatgtgatcaagtgaatttgttaagtggcagcatgatgccccatttctctatgtctccactattcatggcttgtaccatctctgtcaattgtgtatagacactgaaacattgcatactactctgtaagctaagttccctaccctgggtacttccaagcctatgaactcatttgctaaccaagaacaagagtcgcccacctcgaagtggttttagagatgaaatttatatcatactgaagaggagtcaggtggttttagaatcactgtttggaccttgaaatagaaatgcttattcataattaagagctttaaaagaagcagcagcagcagctgaagacttttaaatcttctttcccagtcattcactatgaaatctaactccattcctggagcgcaaattgatggcatttaggactttagtgttttccaggtatcaataaatccctgctagtgtctcttagtttttctaatagccaggaggaccagtaataaagtacaataaaaggttttagtaaaagaagtaacatttcctcatatcattaagatacgttttaggcattcttttaaaatctattatttgagtagcccatattttttacaattaatttttaaccattttattatgaaacgctacactacaaattaataactcgtcataatgctaaatgatgagttaatgagtgcagcacaccagcatggcacatgtatacatatgtaactaacctgcacattgtgcacatgtaccctaaaccttaaagtataataataattaaaaaaaaacaagaaaaagaaaaaaataaataatttttagtgtgctataatcatacgaagggatattatatatcaatgacaataaacagttacatgcaacattatggacaatttcacaaagataacatgtagcaaactaagctagacttaaaagaatacatgctgtatggttccatttaaattaagccctaaaaataataaagctgaactttagtttttagcaacatgattaggtgatgaaattataaacaaaaggaagcaattattagtgaggtgggacatgtactaatgattgattagaggtttgaggggtattctgctatcttaccagtgtctgattacatgatactgttggtgataaaaggtgacggatttgtcacaaacraggagctattcattttgtttaacataatacttaatctcacaatcactagctctgtgttcacaagtgccatattatttgtatcaaggcattattagtgaataacctttggttctaatattgtagcagtttacactttttctccattcagtccatctctgttcactcatgctttcc

SEQ ID NO: 673720 - DNA, 328 bp, Homo sapiens
ccagtaaacctgattttttaaaggagtcagacgtgccaattttaaaaacattgaaaaaatgaattaggctgggcgtggcggctcgcacctgtaatcccagcactttgggaggccgaggcaagtggatcacctgaggtcaggagttcaagacckgcctagccaacattgtgtaacctggtctctactaaaaatacaaaaattagccgggtgtggtggtgtgtgcctgtaatcccagctactcaggaggctgaggcaggagaattgcttgaactcaggaggcagaggttgcagtgagccaagatcgcaccattgcactccaacctgggca

SEQ ID NO: 673721 - DNA, 328 bp, Homo sapiens
ccagtaaacctgattttttaaaggagtcagacgtgccaattttaaaaacattgaaaaaatgaattaggctgggcgtggcggctcgcacctgtaatcccagcactttgggaggccgaggcaagtggatcacctgaggtcaggagttcaagaccggcctagccaacattgtgtaacctggtctctactaaaaatacaaaaattagccgggtgtggtggtgtgtgcctgtaatcccagctactcaggaggctgaggcaggagaattgcttgaactcaggaggcagargttgcagtgagccaagatcgcaccattgcactccaacctgggca

SEQ ID NO: 673722 - DNA, 649 bp, Homo sapiens
ggtgcgtgtctgtaatcccagctactcgggaggctgaggcaggagaagcacttgaatccgggaggcggagattgcggtgagctgagatcccgccactgcactacagcctggtgacagggttagactccatctcaaaaaaaaaaaaaaaaagaaagaaatgtttgtgaatatttttcaaccagtatgacataaaaatgctcctggtgtgttttgaagttttgggcttttctccttcccctttgacaaatattaaccaagaagtgatatacagaagaagttgtaatgatagtggaaagaagagggtaactggttgtgtgtgtatgtgcatgcacatatatatatactacatgggttgatgcaaattgcaattggttacatttgcagattaccatttgagtcagacttttcaaaatgagtagtaaaatttgcttttaacttaaaactatcctagaaataaaatttatttttaaaatgattactgaacagaatccctgtgtattgagcaccaccaacacattcccatgatagtaagtgttgagsgtatgctactgaattaagttgaaagaccactaagtgcacaggaagacccgagttacttatggacagatgtctgaagtggtgtaggactgtggaactcacagagtttatg

SEQ ID NO: 673723 - DNA, 649 bp, Homo sapiens
ggtgcgtgtctgtaatcccagctactcgggaggctgaggcaggagaagcacttgaatccgggaggcggagattgcggtgagctgagatcccgccactgcactacagcctggtgacagggttagactccatctcaaaaaaaaaaaaaaaaagaaagaaatgtttgtgaatatttttcaaccagtatgacataaaaatgctcctggtgtgttttgaagttttgggcttttctccttcccctttgacaaatattaaccaagaagtgatatacagaagaagttgtaatgatagtggaaagaagagggtaactggttgtgtgtgtatgtgcatgcacatatatatatactacatgggttgatgcaaattgcaattggttacatttgcagattaccatttgagtcagacttttcaaaatgagtagtaaaatttgcttttaacttaaaactatcctagaaataaaatttatttttaaaatgattactgaacagaatccctgtgtattgagcaccaccaacacattcccatgatagtaagtgttgagcgtatgstactgaattaagttgaaagaccactaagtgcacaggaagacccgagttacttatggacagatgtctgaagtggtgtaggactgtggaactcacagagtttatg

SEQ ID NO: 673724 - DNA, 848 bp, Homo sapiens
gaaaggactttctaagaataaaaagaataaaaattaaaaattactggaatgtacctcaaaaattaaatttctgcaaggtacaattgtctgtaaatctgacaaaatttaaaggtaattgaccaattgggaaaatatatttgtaaaatatatgatagagacttattatccctaatgcataaaatgtttttataatttaataagcaaagttaaataaccctagttaaaaatgggcacagatcatacaagacttgagatccagtcaggaaaacaaaaactaatttgggtattaaacagaaggatgtgacacagggagtgaattccttaggtgttggaagagctgagcttcagcagggcccaggagcagctcagagatttgccgcagcaggagccaccccttcccctgagccggagaggctgggcggtcgggagctggagccatggccggcctgctggggccacaggaaatacctgtcggtggctcaaggtagagaggtagaaaagtaatgtgtttgcttgttttctcttacattattccccagtctctcaccagatggccccagggtggtaaaggacacagagagaattcacaacagaaaaaaattaggctgtcagtaaatgtatgaaaatatgtcctgtcagagaaatgtatattgaaacaatgggatgaatttttcttttatggawtaggcaaggtattaaaaaatgataatacttaggccaggcatagtggctcatgcctgtaatcccagcactttggaagactgaggcgggcggatcacctgaggtcaggagttcgagaccagcctggccaacatggtgaaaccccgtgcctaccaaaaatacagaaa

SEQ ID NO: 673725 - DNA, 743 bp, Homo sapiens
tgcttccactttgtgcctttactgaaagaaaaatttagaaacatggcgagttttcttggcatcttattattttcatattttctctttccgtaaaagatgtttcatcccagcaaataaaatgcaatacagttttcaaagtcaaacaaaacccagcatattcacatatggtatttcctttctaaatatttcttgtctcctttaacttggcattctggttgggtcggtgctgagattcatcaatattattttgtgtgatttgacgaaacccatttccttagctcctatcccagagataatttttgttttgtttttctttgtgctctgaacaggcaaagccttcttagctgtcatataatctttagggatgctrttgggctcttgggagaaatattcctttattcaaagaaacgatctgtcagggtaggctagactcagcagcaaaccctggtagtgtttgacccatcacatcaagaaacttagcagcacttgtatgattgggaaggagaagaaggggatgtgaaataattgtattatcagggtctctagcctctctgctcctgtgctaaaaagatactagatgagtagccccaggagtaagtaatagtgaagagaaatgctttaaagtattttctcaaacttagcaaactttgtggactcccaaaaaggcataagaagataaaaggctgagtgatatgttcttctcaccaattgggtgattaaatgtctgagctgggggaaaactc

SEQ ID NO: 673726 - DNA, 798 bp, Homo sapiens
tgggtattttccccaaacatattctctgatcagttctcagcagaaaacttgaactgtatcctctgctgatctccaaggcacttgtgtgcactcactctccctctcttttgctttagctctcacactctctttcacacatctctctaaactctctgatactctgccctacagactcaagcctccctggattctcagctctattgcccgaagcaggttttcttttyttgcactgtgatctacaaatatccatataataagttatggcaatcatagatctcaccttatttctttccctctctttcagaaaacactatcctttactgactcaggtccaatgcctgaaaaccaccatttcttatattttgtcatttaaaaaaatggtttttagcaggaaggtatatcttgttcctcatggccagaagagaaagatccaatgattacttttatattttgtccaaatattactattgttatctatggaagtgttaagtcctgaatttttttctaaatgaaggcattttctcttaaaaatatatgaggcattcaataatagtatgcttggtatttttaactgaaactttttatttgccctttacttgaaagtatttctccttcaatatttttcatctaagaattccatcttgcttagccatttcactgggtcaaaagccttggacatattcttaatctctatttcttatgcacaacacacatataattaatccatgaattctctgagctctactttaatatatgtcactaattcgactaattgttgccaattctaccactatacta

SEQ ID NO: 673727 - DNA, 2094 bp, Homo sapiens
accagcctaaatcagctgactcacagaactagaaagggaattctggaaattcctgaaacttttgacataaagaacatacaatttcaactttgctaaataccacaaaattgctctccaaaatgattctactatttgaacactcaccaaatgcatgagtttttattcactcccacttttgcttccaattgtcagcacaaacattttaattttggctactctaacaggggagatattttatttctttgaatctgtatgtcacagattcctagtaaaggtgggcatctgttatcaayagatactccagtaagtatctcaacagatagaactttttaaaaaatgacttcagtagaggtattatgaaattaacaataaagttagtttgtttgaatcaggatccaaacaaggttcacacattacatttagattatgtgtatcacaagtctctcttaaaatattataattcttcctctttgtgtgctatttgttctttttctttaaacaactaaatcctttgtcttgtggaatatctaggtttcactgatcaaagcattgtgatgtcatttaacatgaccctccatcctcatattttttgtaaactgggagttagatctagaggcctgactagatatgtcgttttttaaacactgtttagtgtctctgtatgctttctattgccttacatcaaaagaaaaataatgtcccgtttgttcctcttttagtaatggaaagattaattagtgaattcaggtcatgtcagcctgatccatctattataaaatttaacatctagtgtttcttatctaacagttttagcaactattaatgaccattatctagacatatgaagttttgcaaatgtggttttctctatcatttcttctcatttattagctgtgattcttttcaaaagataactttcctctaccaattattttgctactctgacatgtaatccatgaaagaaaaattactaatctctcacatttgaaatacaaactgtcagaacctgggagatattgcaaccactttttcatccagtggacaagaagagctgactcaggaggtctagcacggggctatcttcagcaatcagtgcctttcccaatgcagctgtttgagcactgaatgcttgcagccaacccttcttgtattcaccctgagttatcttcttgagggtctttgtcagggctttatctgcagaacacctagacactatctctgacaaacaggctgggtagaaaccattgtagcaggaagagtgacattactgtctccttaattattattgatcagctttaattgtcttcaaggaagctttatactataagagactagaagcaacatgtggctacacttggcccattttcactcggcatgattttttctctacattttttggtatatatattagaactgataaaatatatgtataataaaatttaaaactcaagccaaagcttatattagtagcttctttcctcttaagatatttattgcacaatatcaagatcaactctagtgaagaaatattttagcctgaaaacacatggattttgttcagtgccattaacaggaaatatatcttacatgtcagtcccttgctatccatgactgctatgccaagtgctttaaaatatatgttacttttgacttcacaaaaactctgtaagtgtgctttataagtgaataaaatgctcacaatcatccagatcattaagtagtaaaactgatattgtaacctaggtcaaaattgttccaaggcctgtgtcttaatccatttgcatcgcaataaagaatatacctgaggctgggtaatttataaataaaataagtttggctcatggttctgcagactgtacaagaagcatggcaccagcatctgcttctgctgaggacctcaacctgcttccactcatagcaaaaggcaaagggaagtaggcatcacgtggtgaaaaagaaaggaagagaaagggaggtgccaggatatttttaacaatcagttctcatgggtggagagaaggaaactcttgagggagttaacagagttagaactcattactgggaatacagtaccaaactactcatgagggatcc

SEQ ID NO: 673728 - DNA, 2438 bp, Homo sapiens
tttttcctttacatacaccacttggctaactgtttagggcaagtggcccagctttcagcgtatttcagccttcaatatgccttcctcactaagtttaatcattactagcttttgattttaagtgagagacatgtgactcttcctttcacttgaacatttaagggccattttagggtgactaattggcttaattttaatatcttcgtgtctcaggaaataggcctgagaagagggagaaagatggggaacagacagtcagtcagaacacacacaagaattaacaggtgaaattctgtttgagaagtcaattatgtctacaacactggaaacagattttggtgtgatatattctctagtaactttaaatttgtttctcttccttcagcagtcagaacacatacaacatttatggattaagttgttgtcttatgtgggcatggcttgtggcactcccaaaacaattacaataatagcatcaaatattacagatcaccatgaaagttataataatagaataacttaaaagactgtaagaattaccaaaatgtgacacaaagacctgaagtgagcacgtgctttagaaaaatggtgccaatagacttgctcaactctcggtttccacagagcttcaatatgcgacgcatgcaacatctgcaaagtacaatgacacgaggcatccctgtataatttttaagccatgttgctttctacactagatcaaccatgtcttataataggaattatcttaactacagtgattaacatagtgcctgattctttacaattattcattttttggttaaatgaaggaaaacaaacaaatttaaagtaactagagaatatatcacaacagaatgtgctttaggtgctgtagacacaattggtttctcatacagaatttcatctgttaatccttagcctccctttaaatacacacattccttccaaatacaatacaaaaatgtagtgaataggagacttcattagttccttttcagtggttaaaagatgaagttttggcattttctttaaaataattcattgaaattatatattcaaaatatgtatattatttgggcccactattggtaagacttatgatttaataatctaaactcaatgatatccttaaataaataataatctcataatttaaactctaataatcacatgcttttataaactggaaaaaagtctctggatcatcttttctttcgcccacctcatattaccaatgacgtaacagaagcacatgaggcaaagcgactttgccaaggtcacgttaagtcaccgactgaccgccgaacagcacccggatgaattccagatcacccggctccccgcccagtgccacttccttcctttctgtcctctccaatttactcatctagaactaactgaccaagcagaaacaattgggagtagtcaggcctctattaataacaacttgcttgtcatatagtacaatatcgtttacaaagcacttcccaaatactttctctccttgaatccccgccgcaagaaccccagatgcaagatatttacctccgcttacaacacactaaggcctagaaagataaaatgaaatgtccaaggtcacagagctaaacttgaaccctgacctttttacaacayatctagttttctatacataaatccacagcaatttttgttacagagatagaatcaaagaaaaagaattattcactataatcccattaagccaagattctaaggcgacttcaccaatagatttgtgaagtgtttattaatatagaagatgatttcaaaagaatgttaatactaaccagatgaataacccatgcaaaagtaacagatgaattgttgaggaaaaggacaagacagtcacagaaatgaatgtccagaaaatggattcacacatcaaggacaagaaaggccttcattacccatttatttcagtttccgcttttgagttgaggaaactgaaacatctctaacctcaggcctcaagaagcagaaatcccaggttatcttcaacaacaaaggttgtaatagttgtagctccagaaatgccaccctttgaactgatgcagaagtctcttttttgggactcacaaaaggtcctgagaagtgcaatctcagtcactaatgccaggggtgtaactaatgacaaggctgtacttagaatgcaaggaggtgttcagagctggcttcatgggagctgaccgagaatggcacatccagtctttgtcaagaaggaagagaaccagaagacaggtcacaacacagatacacaaataataataaagaatcatgctgttccccattgttcaagaatgagaacaatagctgggtgcggtggctcacgcctgtaatcccagcactttgggaggctgaggcaaatgaatcacgaggtcaggagatcgagaccatcctggccaacatggtgaaacccc

SEQ ID NO: 673729 - DNA, 680 bp, Homo sapiens
aataaataatcaaactatttggggctggctttttggtgactttttgttgtagttgttgttgtgagacggagtctcactctgttgcccaggctggagtgcaatggcgtgatcccagctcactgcaacctccgcctcccaggttcaagcaattctcctcttcaacctcctgagtagctgagattacaggtgcatgmcaccatgcccagcttttttttttttttgtattttttttgtatttttagtagagacagggtttcatcattttaaccagggtggtcttgaactcctgacctcaggtgatccaccctccttggcctcccaaagtgctgggattacaggcgtgagccaccgtgccccgcctttggtgacttttaaaaacctcattgtataaattagggaagtaatgctggtggtagttttagtgctctgataagacctctaaaatcagaagcgccaaggtcctagaacaactctggggaggagtttcactcatttggcatgtctgtggctcatttaaaacaggaagtgctcacactcaatgcttctcagttgctactacttgtctaatccacacagtggtaactttgttggattataatgtctcttcattttattattaaggtatctttttatatctcatgatagattcatttggttgacacaaaatgaaatattaaggt

SEQ ID NO: 673730 - DNA, 680 bp, Homo sapiens
aataaataatcaaactatttggggctggctttttggtgactttttgttgtagttgttgttgtgagacggagtctcactctgttgcccaggctggagtgcaatggcgtgatcccagctcactgcaacctccgcctcccaggttcaagcaattctcctcttcaacctcctgagtagctgagattacaggtgcatgccaccatgcccagcttttttttttttttktattttttttgtatttttagtagagacagggtttcatcattttaaccagggtggtcttgaactcctgacctcaggtgatccaccctccttggcctcccaaagtgctgggattacaggcgtgagccaccgtgccccgcctttggtgacttttaaaaacctcattgtataaattagggaagtaatgctggtggtagttttagtgctctgataagacctctaaaatcagaagcgccaaggtcctagaacaactctggggaggagtttcactcatttggcatgtctgtggctcatttaaaacaggaagtgctcacactcaatgcttctcagttgctactacttgtctaatccacacagtggtaactttgttggattataatgtctcttcattttattattaaggtatctttttatatctcatgatagattcatttggttgacacaaaatgaaatattaaggt

SEQ ID NO: 673731 - DNA, 680 bp, Homo sapiens
aataaataatcaaactatttggggctggctttttggtgactttttgttgtagttgttgttgtgagacggagtctcactctgttgcccaggctggagtgcaatggcgtgatcccagctcactgcaacctccgcctcccaggttcaagcaattctcctcttcaacctcctgagtagctgagattacaggtgcatgccaccatgcccagcttttttttttttttgtwttttttttgtatttttagtagagacagggtttcatcattttaaccagggtggtcttgaactcctgacctcaggtgatccaccctccttggcctcccaaagtgctgggattacaggcgtgagccaccgtgccccgcctttggtgacttttaaaaacctcattgtataaattagggaagtaatgctggtggtagttttagtgctctgataagacctctaaaatcagaagcgccaaggtcctagaacaactctggggaggagtttcactcatttggcatgtctgtggctcatttaaaacaggaagtgctcacactcaatgcttctcagttgctactacttgtctaatccacacagtggtaactttgttggattataatgtctcttcattttattattaaggtatctttttatatctcatgatagattcatttggttgacacaaaatgaaatattaaggt

SEQ ID NO: 673732 - DNA, 677 bp, Homo sapiens
ggaagccttatgtgtaagtagtcagtggcttaatagaaccacaggattgtcatgggcactaaggaaatatctgactgaacgctacaaagggagttctaaaaagtctgtcaagtttctcaatgtttgcaagagagacaattctgcaattttgtgtaatctatttactactctctacttcagcattcatttacctaaaagaattagggcctattatgtgaaaaaataacaacycattgcaagactgcttctgtagataatgatctcaatgtaagaggggcagaataggtcaataaatctgtttccatatctcactcgttcactacctggatattggccaggctactcttagggatccccgattatttgcagattgttgaaatctctcctgtggccataaatatgagaaggtgagtctacaacttctctttgtaatttaaaataaaatcaaaaaaatttcactataaacagttgagtaatcacgggtcaggggtggtaaggatgcttatttctaaggaaagtaacttcaaccttgacctgtactcaaaataaatcccatccatcatcactcattttaatactctagtattccatgttaaggttggtgagtacttacaggtttaagaggagctgagtgaaaagagaaggttgagtttagaaatacagtagcttctgcttat

SEQ ID NO: 673733 - DNA, 677 bp, Homo sapiens
ggaagccttatgtgtaagtagtcagtggcttaatagaaccacaggattgtcatgggcactaaggaaatatctgactgaacgctacaaagggagttctaaaaagtctgtcaagtttctcaatgtttgcaagagagacaattctgcaattttgtgtaatctatttactactctctacttcagcattcatttacctaaaagaattagggcctattatgtgaaaaaataacaactcattgcaagactgcttctgtagataatgatctcratgtaagaggggcagaataggtcaataaatctgtttccatatctcactcgttcactacctggatattggccaggctactcttagggatccccgattatttgcagattgttgaaatctctcctgtggccataaatatgagaaggtgagtctacaacttctctttgtaatttaaaataaaatcaaaaaaatttcactataaacagttgagtaatcacgggtcaggggtggtaaggatgcttatttctaaggaaagtaacttcaaccttgacctgtactcaaaataaatcccatccatcatcactcattttaatactctagtattccatgttaaggttggtgagtacttacaggtttaagaggagctgagtgaaaagagaaggttgagtttagaaatacagtagcttctgcttat

SEQ ID NO: 673734 - DNA, 1517 bp, Homo sapiens
gttttaacattcatctgtaaagacagactcatttgtgggccgtaaaaaaaaacacacgtgctggaccggattttgttcatgggctacatgtagttcgccgactgccgctctatttagtctgctcccatttagctggaatccagacttaggatttctcagctctctgttgtgaatcgccaggtttcttctcagtttgttgcagaatcaatactctgttaaacaaaataaaaactgagttactataaaaatgaaatttaaaaaaaaagcagacatacaaaatatagcccccaacatttaattattagaattaataaacaaaattatcctgctaaattactacaaaagtttctgaacacttacattttcaatttccatatttatatagtggcaaaaagataataaagagctttgcagcctgatcccaaatagttccttcatctttttggacttttaaaaaatatattttctaactgcattgtagtataatttctaacatatatggcattgccaaaacttggaatgtgcttttctgcatcattagtgacttctgacttctccgattggaacacacgtatgtttgtttcctttgcaggcctaattggcaagactgcagataccctagaggaattgaggaaaggtggataaagcaactgattgctttttttcaggaccctttagtctatttcctttgtgaattcgttcatttggaggacaaccttagaatgagcattagttaccagattgagccatcaactatcttccgagagacaaactataatttcctgaatttattacccaatattttataccacttgtcttgcagtattttgctgttataagatgcatttattactgatgatttccatctactaaggcgtaagtcaaaccagcattccattttgtcactcttctgcatttcatatttagccaacttagagttcgatggaatagaaatacgctctatcgaaattactcaattactgtattcaaaagtttccacaaatgctgtaggtactaagagaatatttatgtaaattcacattttccaaccatgctcatctatgttagtttaaaatgcaagagttaaatttttcattttgtggtgatactattcccaagtgcattatgttcattgctttgaagaagcatctattacatcttaaaacacacttgccatcattttctttctttgtaagaatgaaaacactttagagctacagcagactcttaattaacttaagaaaaagatgaaaaaaaaagccttgcttcytttctctgtctctgtcaggctgcaggaggactacattcttgagtaggaaatgaaagatttacgacatttttgagactacaatttttaatgagatgcacattccttttctcatgtaagccttgtctcagggggtctcggagcagagagggaagggtttttttgtctgcgtctcctgatggtcctcactggatacgttttgtggagtgttcttctgtttaagaattattttctttcatatcgttttccc

SEQ ID NO: 673735 - DNA, 634 bp, Homo sapiens
gtctagagcctgggctcttaaccactaggtataatggtaagcaaacattggtgaaaaaaaagtccttatctaaaactatgaaaattaatgttaacatcatcaccaccaccatcatttaaatattggatatgcttgggtttaaagcacaatttagttctgctacttaggagctccatcgttaacatgtttcttaacctctgtaaaatggtacaatagctgtctttcagggttactgcgagattgttatgaatgtatgtaaaccaccgacacaacctcctggcacatcgcagttgctccaaaaggggtatttttattataagtatgataacggaagtgatacatgcatgctgcwtacattaactgcttaccagatgattaagcagatatgtctgaatatgaatacaaaatataaatcccacaccagcaaacgtctcaataaaacatttcaaaaaatgtattgggtcatgaaaatgaacttcctagatgtagtgttttacggttgtgtatcacatacgtataacttagggcataaggagaagtctcggcccagacttcacagcctcagttttgaaaaaagggtgtccatggtaggtgtttgatacgtgcttggggctgatgtttatgctgagtttca

SEQ ID NO: 673736 - DNA, 574 bp, Homo sapiens
attctatcaaagttatatttcaataaaactggctaaaaattttaaatactcttattgtctaaaggacaagaaatactttcagaccctgatatttcagaattagacaatataaaaatcaattaaatgatgataaaattctgttggtgtgattagattatatttcattttaaattgattttcatttaaaaaattatttttaattattttgggtacataatagcttattcatggggtacatgtgattttttgatacagacagacatgcaamgtgtaatgaacaaatcagggtaattggggtaatcatcacctcaaacattaccgcttctttgtgttaggatattctaattctacgtttttagttacttttgaaaatatacaataaattattattaactatagtgaccctattgggctattgaatactagatcttatttattttattgaactgtatttttgtgcccattttaagactaataattgactgttttattttcctaacagctgagctagccttatgggactggtcatggatcatgtttccctgtatggtcaaagaagagagacattgttatg

SEQ ID NO: 673737 - DNA, 574 bp, Homo sapiens
attctatcaaagttatatttcaataaaactggctaaaaattttaaatactcttattgtctaaaggacaagaaatactttcagaccctgatatttcagaattagacaatataaaaatcaattaaatgatgataaaattctgttggtgtgattagattatatttcattttaaattgattttcatttaaaaaattatttttaattattttgggtacataatagcttattcatggggtacatgtgattttttgatacagacagacatgcaaagtgtaatgaacaaatcagggtaattggggtaatcatcacctcaaacattaccgcttctttgtgttaggatattctaattctacgtttttagttacttttgaaaatatacaataaattattattaactatagtgaccctattgggctattgaatactagatcttatttattttattgaactgtatttttgtgcccattttaagactaataattgactgttttattttcctaacagctgagctagccttatgggactggtcatggatsatgtttccctgtatggtcaaagaagagagacattgttatg

SEQ ID NO: 673738 - DNA, 574 bp, Homo sapiens
attctatcaaagttatatttcaataaaactggctaaaaattttaaatactcttattgtctaaaggacaagaaatactttcagaccctgatatttcagaattagacaatataaaaatcaattaaatgatgataaaattctgttggtgtgattagattatatttcattttaaattgattttcatttaaaaaattatttttaattattttgggtacataatagcttattcatggggtacatgtgattttttgatacagacagacatgcaaagtgtaatgaacaaatcagggtaattggggtaatcatcacctcaaacattaccgcttctttgtgttaggatattctaattctacgtttttagttacttttgaaaatatacaataaattattattaactatagtgaccctattgggctattgaatactagatcttatttattttattgaactgtatttttgtgcccattttaagactaataattgactgttttattttcctaacagctgagctagccttatgggactggtcatggatcatgtttccctgtatggtcaaagaagagagacrttgttatg

SEQ ID NO: 673739 - DNA, 830 bp, Homo sapiens
tgtagggtgtatggttaatggagaggaagaagtcaattatttttaaatttctcatttgggctactgggtaaatgcagcaaaacttgagtaaaaatatatctcaatctttatatccttggagttttatgggttgtataaagcagttaacaaacataggtcaaaggagtaagtgaataaataaatgaatgaatgaaaagtgcaatgcagagaagagagagtaagatgtaatcactattttatactgtttaagggaagcatatcactatacagggtcctatgacaggtattatattttattacattttcacatagttaacacattcacacctatgtaatgtaatggttatacttatgaacttaaatacttttaatatatgaaaaaagttagccttggcggtctccagattccatgaagattagtagtactattcctcccagatccttcttacaacaaaagaactttgggtatatgtagcaaacaaacataggaagcctccaaaatgtagaaggaagatgttctgcctagggatctcagaacttgagggaagacatagcagtgggtccactggatttcttagtgccttccgtatatcctggacagggagatccagaagcctccaaccccaaacctccaatagacatggacacamagctccaaagaaaacctgtccctttagccaagagacatgaaaaaagattgcctgacagcagattttttttttttgcaatatcctccctagtccagctaaacaccaataaaaaacctcattcatcccaaggaagtagggaagaaattttcactccccaataagatggtgttggagtataaa

SEQ ID NO: 673740 - DNA, 1002 bp, Homo sapiens
gcgaaatgtcccacatttgggacatcccaaaatgtggtgtatttacctagccaatctcaagcaatattggaaagtcatgggcctttcttcttaggggcaggggtttcctgccaagatagctgcagtgctgagagtggactggaacacatactttaagtagtcaggctgctccctaagggggacagatgggaaggggctgggctaccttgcctcctctgtmccaaagtcatcactcaattaattctttctcttcaggcaaataaatgaaggggcagaaagaagccaagattctcctgatctaaaaacaagtgaagaacaaacaggggaataagtattttccccccaacagtcaaatctcaggaaacaagtttgtcccactgaatatccggttgcacacggctctatgtcatcattctgttgtgctggatattttctatttctcattctagactcagcttcttcctggcccacctgtggtgtgcctagaaacactgcagctgtgaatgctgcccccagtgaatgtggcttcgttgccctttggatttgggttgggtgtagctgaaagcaggggctgacaggagagaaggcaagaggagaatgaggctggaccccctctttaccagttcacttgctgtgttcctctagggaagccacagcccctgtcatgcagccacctccaagcagttaccttctctaggtccctgaaaccactgactccccaacccccatttgttttcatatcttaggacgtagcagctctggcttttgcctgacttggaatttctccccatccctcccttggtttcttaaaccctgccctcagctctgtagagtacttttattaaacagtccacaagtgccctgattgagtgagccacctgtttcctgtcagaaccctgactctcctgtccctattcctaagggcaggtggtccctgatgggagaaagcctgtcaaacgccagcctcttctcaaagccctcagtccagcccacaagctttga

SEQ ID NO: 673741 - DNA, 1002 bp, Homo sapiens
gcgaaatgtcccacatttgggacatcccaaaatgtggtgtatttacctagccaatctcaagcaatattggaaagtcatgggcctttcttcttaggggcaggggtttcctgccaagatagctgcagtgctgagagtggactggaacacatactttaagtagtcaggctgctccctaagggggacagatgggaaggggctgggctaccttgcctcctctgtcccaaagtcatcactcaattaattctttctcttcaggcaaataaatgaaggggcagaaagaagccaagattctcctgatctaaaaacaagtgaagaacaaacaggggaataagtattttccccccaacagtcaaatctcaggaaacaagtttgtcccactgaatatccggttgcacacggctctatgtcatcattctgttgtgctggatattttctatttctcattctagactcagcttcttcctggcccacctgtggtgtgcctagaaacactgcagctgtgaatgctgcccccagtgaatgtggcttcgttgccctttggatttgggttgggtgtagctgaaagcaggggctgacaggagagaaggcaagaggagaatgaggctggaccccctctttaccagttcacttgctgtgttcctctagggaagccacagcccctgtcatgcagccacctccaagcagttaccttctctaggtccctgaaaccactgactccccaacccccatttgtyttcatatcttaggacgtagcagctctggcttttgcctgacttggaatttctccccatccctcccttggtttcttaaaccctgccctcagctctgtagagtacttttattaaacagtccacaagtgccctgattgagtgagccacctgtttcctgtcagaaccctgactctcctgtccctattcctaagggcaggtggtccctgatgggagaaagcctgtcaaacgccagcctcttctcaaagccctcagtccagcccacaagctttga

SEQ ID NO: 673742 - DNA, 1396 bp, Homo sapiens
tgagggccttgataacaatgagcaataaaaataaaggatgaagcttgttagaggaaaagtaaagaccagactcccatgaacctgggtgatctggcccctgcttcctctccaaccttccctccctcaccatgttccagccaccagggactcctctcagttcctgggacagactgagctctcgctcactcagtcctctgtgctgcctcctcccatgggttcctcattcattsctgtttcagtgttcgctttttattgcctccgtagcacttagcacttcaagttcttaaaaatggcttctttttccgtttccctgccagaggcatgagggatttttttctctgatcttcactgcgagaagctggtagggctcctgaaggtaaacccacaaaagtgtgagcagcccctaagacgagccccctcagaatttttacatctcaatccggtccacactgagcttccagtaatttgtcaattacagttgaacacattcatcccaatcctggctcggccgagacgtctgctctcaggaaactgggattctctgtagccacccatctgtctctccagttttttgggggcagcagcttgccctgtaagcaaaattctctgatggatctaagagctgctgatttccagtgtgttcagcatttttcttgttgtgaggatgattccaagctccttacattgtagaccgaaaccaactatggtttttattgttaagttttgtctgcctcctctgctaggcagactgtctccaatttcttcactctgtttccccacgatgcctggcacatagaaggggcccgagacgcagggcttgtgaattaatgtgagaacctgggttcatccagtcatgtcaatttccttagttaggcatgaaatgtgtaatctctcaaagatcctttctagcacataaacgctgtgatgatgaagccaggggatttctttgggagatgtgacctgaagggtaattcaccaggccataaagactattaatagaaatgaaaattgcccaatttgctagccaatctcctgataagagttttgtgtataaccagaggacctcaactatcaaatgacgggatcccccagctcctaggggctcagaagaacagaagagactggaaggcctttttcatatttccaataaccacttggaaatggtatgtttctctattattaggaacatggactcaataatgccatttattagttttaaaaatatgagaatgaattaattactgctgactacatgctgttttgcttggatgacatggtatttcaaaacatgccattattgagaggaagaatattggccatcttcttgatgactgacttatttatttatcttaatggagatgggggtctcgttatgttgcccaggctagttctgaac

SEQ ID NO: 673743 - DNA, 638 bp, Homo sapiens
taaaggctgctgtgtcacataaaacttgtatgaaataaattacatgctcttcttctgttaacctttgtcaatttaattttcagatgaagccagggatccgactagggtcgagaaaaacatgttcctcccctacaagctcaacttttcccttccctcctttttgcagggtagattccccagaaagcacactctaagatggagattagtgagcaggaggtttattagggagttctcatggaatcaacatctggagaattgggaagggaaggaagtcaawttgggcagagggagaaactgagctacaatgtagtcatgaggaaggtctcagcccactcgacacggaattctttgctgggaatatctttctgagtcatccaagttgaggctgagaggctcgggactccacacccttttgtcaatcagtcattagatgcaggcttccatggaaggaggcgtgacagtggcaatgaggcagctctcttccaccaaggcaatcctctagggtgctgacaactgagggctgtcagcaggcagctctcccagaagctgggggcctaggtgcctctctccttaaggatgatttcggtagctcatcacagcctccgccccccactcctcctttttcctaatcatgctgc

SEQ ID NO: 673744 - DNA, 2609 bp, Homo sapiens
gcatgcagttcgtcagaacttaaatactgaggaagaagtggaaaatgtagcagacattggttttgattgtaacatgtgcagaccctatatgcctgcgtctaatggtaagagaataatttaaactgtgagtctgcactcttgtaccactcacttgcaccttactgtccataaccaatgaattagcttagctctactctattttgtctttgtgaaacttactttgacaagtattttatgaaaaatattattgttggttatacatgacttatcacaacttgttataaaacaatttacatgaaacaataaaaagcatatactttagatgtaaactataattttgcttccaaggaacatgatcttgtagttattgacaatatgttaaaatccaatgtgttgattctttcttagccaggttttcctccatgacttgagtatttccttcatcacttcttgttttgttgttgctttaaaaagtgcttttaactttagtgttcaaacatttattttaataaaatgagtatagaaacagaaattttaatcatatgtaagtatgtaaatacactctaccttttctgaaaagattacmtggatttttttttttcatttcagtgccttcctcagactgctgtggatcttcacttgtagcacaaattgtcacaaaagtaaaagagctagttaaaatttgaaatgctttacttaatttaattaatttactttgcttaatttttacataattggcttaccacttgtaaaatctgcttcaatcatatgggtgttctatccaaattctgtaatgttggtaatcatttccacaatgatatataaaatgtcatccagctttactggggcagtattcctataaatttcagcaagttggcaacaaaaataacagctcttagaataaccattaatgccatacttgctttggtttcattgatatattactgtgcttaattatcagttagcagaaaatacggcctagttagcaagcagatttcttttagaattaattcaatctcttaattttttaaaataattaataagcctagtatggtgattaatatgatattcttattaaacagtcattcttttgaatacttgtatttaatagcacctgatacaaaaacatttggatagtacagaaattgttctaaggaacaacagttttgtacatttaaaattaaatctgcaggatttgtacttatttattacttctccctattagtaattatgttgatactctgatttttccagatgagcttctggagtattctctcttctcttgtgtaaatagatccctgccttttgatcttttccaggaaaaagctcatagtggattagctgagcattgcatatatttgcagtgcttctaactctttttattgggacatgaacataaaaatgccaggaagacttttttgagacggagtctcaccctgttgcccaggctggagtgcagtggcacgatctcggctcactgcaacctccgcctcccgggttcaagcgattctcctgcctcagcctcacgtacagctgggattacaggtgcccgccaccacgccgggctaattttttgtatttttagaagagacagggtttcactgtgtttgccaggatggtctcgatctcctgacctcgtgatctgcctgccgcctcagcctcccagagtgctgggattacaggcatgagcccccacaacaggcccaggaagaccattttttaaaaacatgtaacatttctgcctataatccaaggaagtttgacctattgttcctagtttttattgggtatcatgaaattaattattcatgcatttcatagatacgtaattactttctagaactacagtcacattcccttgacatgggtattttggaacagtaatcagtcaaatttaaaatgaaagtttaaatttgtattcttgggattttgtaattttagacccacccaagacttatacccaggatggtgtgtgtttgactgaatcagggaagactcagttacagagcctcacagttacagttccaagaagaaaactgtcaaaaccaaaactgaaattgaagattataaatcagaatagcgtggccatccttcagacccctccagacatccaatcagaacattcaagggatggtgatatggatgatagtcgaggtaatactaatttattttccgtgaaatatgtgtgcaagaattacagcatataaagtaacttttgaaatatgtgtatggtttaccaaagggtaaatcacactgacttagataaccccgatgtgacccttgccatctccaaatgagtgatcttcttagaccttgccttttcgggttctcttcctttcacacattttagaacagacctaccttacagaaatctcaaggagcaccatatctttgaagatcacaggtggggaaatacagaggtcttgactttagtttgctagataacgacacaaaccttctcagatactgtgagcttggataataccatgtttaagttaaggtagttgaggcatacattctagaaatggaaaagctgtcatttaatattacttcaggtataacttcatattcaccagtgtgcatcataaagtattggtttataaacattt

SEQ ID NO: 673745 - DNA, 603 bp, Homo sapiens
tattgagaaatccatcattttccaaacttttctttctattggtgtaaaacagggatgaatggccatgagcacttcattgcctcatctcaggtgacacttytttgccctttgaaaagcctataatgtactttataatgtagtttaacttttccacttcacctcatgtaaacaaactgattttccaacttatcaatacagtatgaacatttctccaagtcaattaacaaaaagaggaaatatcactttaaatgaatgcacagtttctctatatagagaaaaataatatgtgtgcatatatgcatgtgtaaatatatgtatatgactaaattctacaagtttttaaactatctttttactgatggagactcatcatggtttttttccccctgtactacaaacaaagtagccataaacattctaacattctggagtatggtatcccttatatgaaatgcttgggaccaaaaatattgtagattttggattttttcaaattttgaaatattttcatatcataacatgatatgttaggaatgagacccaatctaaatttatttacattccctacatatagtatacatgtagcctgaaggtaattttatg

SEQ ID NO: 673746 - DNA, 603 bp, Homo sapiens
tattgagaaatccatcattttccaaacttttctttctattggtgtaaaacagggatgaatggccatgagcacttcattgcctcatctcaggtgacacttctttgccctttgaaaagcctataatgtactttataatgtagtttaacttttccacttcacctcatgtaarcaaactgattttccaacttatcaatacagtatgaacatttctccaagtcaattaacaaaaagaggaaatatcactttaaatgaatgcacagtttctctatatagagaaaaataatatgtgtgcatatatgcatgtgtaaatatatgtatatgactaaattctacaagtttttaaactatctttttactgatggagactcatcatggtttttttccccctgtactacaaacaaagtagccataaacattctaacattctggagtatggtatcccttatatgaaatgcttgggaccaaaaatattgtagattttggattttttcaaattttgaaatattttcatatcataacatgatatgttaggaatgagacccaatctaaatttatttacattccctacatatagtatacatgtagcctgaaggtaattttatg

SEQ ID NO: 673747 - DNA, 603 bp, Homo sapiens
tattgagaaatccatcattttccaaacttttctttctattggtgtaaaacagggatgaatggccatgagcacttcattgcctcatctcaggtgacacttctttgccctttgaaaagcctataatgtactttataatgtagtttaacttttccacttcacctcatgtaaacaaactgattttccaacttatcaatacagtatgaacatttctccaagtcaattaacaaaaagaggaaatatcactttaaatgaakgcacagtttctctatatagagaaaaataatatgtgtgcatatatgcatgtgtaaatatatgtatatgactaaattctacaagtttttaaactatctttttactgatggagactcatcatggtttttttccccctgtactacaaacaaagtagccataaacattctaacattctggagtatggtatcccttatatgaaatgcttgggaccaaaaatattgtagattttggattttttcaaattttgaaatattttcatatcataacatgatatgttaggaatgagacccaatctaaatttatttacattccctacatatagtatacatgtagcctgaaggtaattttatg

SEQ ID NO: 673748 - DNA, 603 bp, Homo sapiens
tattgagaaatccatcattttccaaacttttctttctattggtgtaaaacagggatgaatggccatgagcacttcattgcctcatctcaggtgacacttctttgccctttgaaaagcctataatgtactttataatgtagtttaacttttccacttcacctcatgtaaacaaactgattttccaacttatcaatacagtatgaacatttctccaagtcaattaacaaaaagaggaaatatcactttaaatgaatgcacagtttctctatatagagaaaaataatatgtgtgcatatatgcatgtgtaaatatatgtatatgactaaattctacaagtttttaaactrtctttttactgatggagactcatcatggtttttttccccctgtactacaaacaaagtagccataaacattctaacattctggagtatggtatcccttatatgaaatgcttgggaccaaaaatattgtagattttggattttttcaaattttgaaatattttcatatcataacatgatatgttaggaatgagacccaatctaaatttatttacattccctacatatagtatacatgtagcctgaaggtaattttatg

SEQ ID NO: 673749 - DNA, 611 bp, Homo sapiens
tgttgaacagctccttacatgtttattgactatatrtatttttttgtgtgtgaaatgtctccttaggtcttttgcttctttttctattaggtattttaatagtttttctttttgtaaaataagactcattcaatttacaaatgtcaataattttagaaaaagatcagcaaaaagcaaaagactctgttgtgaaccaactttcatcatgttagtcatgcaaaacttttaggttctttcttttttgtcttgataacaatagccacaaaagatttttgaagtagcaatggttagcttcttctccacaaccttgctaccagattaaaatgaatacatgtctcagactgaagtctgttatatagtcaaatacatattcaacaaatattcactagctagcaggtataaaactattcacaaatttgatctgcaggctccatgaaatctcagtcatctgctctttcaggtgtcagagtacaggttggcttatttctatgtcatctagtcagtctcatttgattgaaacaatggttggatatagaatgtatcagagattagtttccattcctaaggagacatgttactcagttcccttgtacacacaagagtgaacagat

SEQ ID NO: 673750 - DNA, 611 bp, Homo sapiens
tgttgaacagctccttacatgtttattgactatatgtatttttttktgtgtgaaatgtctccttaggtcttttgcttctttttctattaggtattttaatagtttttctttttgtaaaataagactcattcaatttacaaatgtcaataattttagaaaaagatcagcaaaaagcaaaagactctgttgtgaaccaactttcatcatgttagtcatgcaaaacttttaggttctttcttttttgtcttgataacaatagccacaaaagatttttgaagtagcaatggttagcttcttctccacaaccttgctaccagattaaaatgaatacatgtctcagactgaagtctgttatatagtcaaatacatattcaacaaatattcactagctagcaggtataaaactattcacaaatttgatctgcaggctccatgaaatctcagtcatctgctctttcaggtgtcagagtacaggttggcttatttctatgtcatctagtcagtctcatttgattgaaacaatggttggatatagaatgtatcagagattagtttccattcctaaggagacatgttactcagttcccttgtacacacaagagtgaacagat

SEQ ID NO: 673751 - DNA, 1497 bp, Homo sapiens
tattgccctccttgctttgtcaccccacaagtctgctttctggaaaaaacattcccccaatgaaatacttgcatatgaatgtttgccagatgttctgctttctggagaaccaagtctatgactgtagataccagaaagmatcctaaaaagcatacactcagcagcagattttaaaactggatcatttaagtataagatggcaataaggacccagtacttgtagtaatggggtagtaataatccatggcattagatagtatcataattactcattttttaaacttttgatttattgggataagatataggctgaagtcaggtagtgggttttgctatggctgtattgcttaaatggtacagaggcagtgatatttacaaagatcagtagagtagcctggcttttgtaaaccctctaccccagtggtagccaatttaataatacttatttgtattggtttttctttaaaaaagaaaatggtaagcttattcaactgtcaacttaaagtagctgtgaaaaccagaaggccaacatggaaattttagagcctaaaggagactcatctcttgcaacatcaggacaaactattgaatatcaggcatgaaatttaatggcaagagtggtaagatggccgagaaaagtgaatatagacttgatagtcgcccatgccaaactgaggccttcataacaaactgaggccttcataagaaacaaagggaactctgagacctgtgatggagatgtttggtggatgagcttgagaatcttgaactctccaattcccttaaattctccataaatgcacaagtagaggagagcaacctgtatacccttcaaggtctccccaggtgtgggtgacttgcaagctgacagatgtcctccttcagagctatccccaccacccctcattgtgcccaggcctataacagggtcaggtgttggcacagctgacagaagaatgtaaagcccatactcagggagggagtagcttacacttgaaggaatcgtaataactggctgacacatactacagggactgagagaacacacgtaagagaggcttttgagggttagtggtccaggaggagaaatataaagccagatagaggagaatttagtagaaaggagaactagccctgctacactatgggaatgctttcttgaaattagacatgatgggtccatggtaaattaggaggacatgccagcacctccttggctaagtagtaagaaagtaccaagaaaggagccagaagagtcagagagattgaaatgttaaagtggatttctcagtaagaacagaaaaccctgataggtgcagcaaatcaccatggcacacgtttacctatgtaacaaacctacacatcctgcacatgtaccctggaactttaaattaagttaaattaaaatgttttttaaaagaccaggaaaacccaatacacgtttctgtttcctgggagggcccagaggatacttccttcactaaagccacaagagtg

SEQ ID NO: 673752 - DNA, 597 bp, Homo sapiens
atgtggttgttccaaattcaggaattcactttggtaaactttctcttggagggtttcctccctttcccagctctctccaatgagcatggaaaatgaccacggacaaacctgagcgtagtatgtattatagaagcaagaagtagaaaatgcactaatgagccaaccagtggatcaactccacatttctacagttattaaggcagtgacatcagtcaaggctcatttacaggaagcagaaactagtctagctattttaagcagaacaagacaaggcagggaactaagtacctataaaattgtcagaaggtttggaagagtgagctgggcctccaggaataactcccggaaccaggggccaaactgaccctcggaggccagttagaaatacaggagttaaaagtgcagccctagtacaactcgccacagggaatattggctcctcctgckccaagctggggacagaaatcacaatactgagttcctctgccttcaaacgagcgatgcccaaacactgcaccggctgccaacactgctgtgaagtctgcaccatccagcagctaaaccctgtcatctccatgaccctacttgacagcagca

SEQ ID NO: 673753 - DNA, 651 bp, Homo sapiens
cctacttttgctttctgctgcgatagcgcagcactgaattaaacacaaattctcacagttgctgcactctccctctttcacgtacatagattctttctctatgcctcatggctacttctggggaatgggtgaagggtggcattggtgattcaagactgttttttctaccctcttcagcatctccttcattgatatgaagttaaacccaggtagtatasttgctcacctgatttttatttcttataaaggtgctttttttgtgtagatagttgctaaatttggtgtttctgtgggtggggataattggtggagccttctatttgaaccatcttgctccactccttctcctgatttactactttagttttattatatgcctgttgcttcttatttagacagtcttcaaattccccagcataagatttttcttcataaaatgataaagttggattagactatctcttatgtcctttctagtttataaatatttaggatacccatcccaggtaagtttgtgactatcttcccctatagaaagtcaaatgagaacacacagtcagaatggctttctcaagggcttctacagtcagtgaacttcttaagatattttccttaacacaatgtatcatgaacatgaccattttctcttga

SEQ ID NO: 673754 - DNA, 651 bp, Homo sapiens
cctacttttgctttctgctgcgatagcgcagcactgaattaaacacaaattctcacagttgctgcactctccctctttcacgtacatagattctttctctatgcctcatggctacttctggggaatgggtgaagggtggcattggtgattcaagactgttttttctaccctcttcagcatctccttcattgatatgaagttaaacccaggtagtatagttgctcacctgatttttatttcttataaaggtgctttttttgtgtagatagttgctaaatttggtgtttctgtgggtggggataattggtggagccttctatttgaaccatcttgctccactccttctcctgatttactactttagttttattatatgcctgttgcttcttatttagacagtcttcaaattccccagcataagatttttyttcataaaatgataaagttggattagactatctcttatgtcctttctagtttataaatatttaggatacccatcccaggtaagtttgtgactatcttcccctatagaaagtcaaatgagaacacacagtcagaatggctttctcaagggcttctacagtcagtgaacttcttaagatattttccttaacacaatgtatcatgaacatgaccattttctcttga

SEQ ID NO: 673755 - DNA, 1024 bp, Homo sapiens
gagtggagaagcaagaaactcaaaacactcaggcttttgtttactttcttttcaacttagtattagccaaggttacctgtctgacaactttaaagtaggtgacaaggatcaatgatgtattatttccagtttttaaactaacatttagagaaagattaaataatctaagttatttggatgctagttttataatttttaatatctcatattacatctctatatttgaatttaagacagtcaatataatcgttctattgggataaaactttgctttctaacaaatcccaggcaatgggtgcactccctgcactttgggaggccaaggcaggcagattgcttgaggccaggagtttgaaaccagcctggccaacatggtgaaactctgtctctactaaaaatataaaaattaggcaggtgtggtggtgcatgtctgtaatcccagcttcttgggaggctaagccacgagaattgtttgaacctggaggcggaggttgtagtgggctgagatggtgccactgcactccagcctggacaatcgagcaagactgtctcaaaaataaagaaaaacaaatccaaggcatgaaataawtattcatctaatagcccctatacaactcacagcatgttacaaaaatttatgaagacaaagttgtgaaacattccagaataaaataaataatgatcatatgataagtcttcctataatttagttatgtttgatttaaaaagtagagctttggataaaatccttaggtatatgaaaaataatttaatggaatctcattctgttcttaaagaaactacttaaaggatatattactatttgatacttataagccttataaagtagtttgcacacatgttatccttctatcaccatataatattagcagattaataaatagtgctgtgtgtggcataccttggtctttgaaactgagcaacacttcacaaatggcctaatctccaagtatgagtgtttatatttttgtaattatgtagaacaaatgtataatgatactat

SEQ ID NO: 673756 - DNA, 1649 bp, Homo sapiens
tccacctccaacctgcccagtgcttgcctaattgaaaagctgaagtatggctatccacacagcaacaccctaaaacatggttttcctaatatgggacagcgatgattcataatattttgttcaaaaggtctacctaattacccctctttgtatacaaacctagactttgtattagatggggcttctgcttgtccaaaaacttttcaatttatccttaagtttacgctcttagtctgtatttttaagtttaatacaggctagtactttttagggtcagttggcttttattcttactgtgattttcctgttctgtccacaaatgagcacacgccgtggttagttgttagagagatgttacacaagatgttatttgcataatgagttaactcaccttcattaatttcctgttagtcctctttctttttctaatccttgctcactagggcagttgtgatgtttgcctggctaactccactttccatgtttgatatcccttctatgagtttttaaaaaattcactctccttctaggaaattagtgcttccctgttacttccatcttctatccattataattcagaaaagatgttatgttagtatcttactataaaattccatccattttgtatatttagggttatctggaacataaaccttatctcacattgtgatctaagacagaggtcagtaaatttcttctgtaaaaggccaggtggtaaatattttaggctttataacccacatatggtctctgtggcagattttttcttttattgatttttttacagccgtttagaaatgtaaaaagcattcttagatcacaggccatactaaaaagggttttagaattggcccacagccatatttttctgtcttctgacctaagaggctacactgcgaggatgaaaattttccatttatttcracatttgcccaggagacatcaaagctaaccactgtaatttttctaagcagctaagaatcatgaagtttgaaagactccagtataccggactcttattggacttaatggaaaactgtttttgaccaatggacaatggtctttgttttaaccaattacgggcagacctgaggatttatttcatgctaggttttcagacctacctttcttgaagcccttgagttcctcccacccccaggtgatctacttagtgaagtttgacatttgtgtatgttctcttgtctggcaagttaagaaactgagggtttttttttctttttccttgggtagtctttgttttagtcattgacaattccctatggaagaaattcacacgttagtcagcaggtggaaaagttcttgcggatgttgagtaaggagaacttttcttatagtttctgaaattatgcttatcaaaagaataaagtttggtcagctggggaaaaatgagaatgaacagataaggacatcttgtttttgtacaaagtataggagatactgtttagtctttttaacaaaatagagcaaaattgtttactgtcagaaaaaaatgtgaaagtctttgaaattagcagaagtcattactgagtgtcctgcaaatatagaaaattgatgatgatgcaaattttgtttgttcatacaaatgcaaataacttgtatccaaataagttcaatgaattatcgcccca

SEQ ID NO: 673757 - DNA, 633 bp, Homo sapiens
gagtatgaaattcattttcctatggaagaaatgtttaaaacaacagtttagacattattaaatagacataataattattttccattagrtgtaattgaaataataatgattagatataattgaaaactgttttgcagagaacaaatgtttctgtgggctatctaggaactcaaggcatatataatgtaatttctaggaacaagctttgtgttcaaaccttgagaacctcatcgtttttctaacttggcttgacatctaccttccattttttttccttttttcttaaaaagtaggcttttctactattctagatgttatgagtctgtggaagaaataacagataccaagagtggctttcactcagaataaaatgatatgtatcaaaaggtaccttttttttttttggtgtgtgctgcaggtgggttgggaagggggtgttctggatttatccagttggaaagaaaatacagaggcatattaagcagttaatgagaactagcttgtgtgattaatatagacaagaagtggcatagtgatcaaaagagaaagaaagtttaatgtagtttgccatttttagaaaaagcttcatagtcagtttgggatttcaggtaggtaggttttagggagatgaaa

SEQ ID NO: 673758 - DNA, 633 bp, Homo sapiens
gagtatgaaattcattttcctatggaagaaatgtttaaaacaacagtttagacattattaaatagacataataattattttccattagatgtaattgaaataataatgattagatataattgaaaactgttttgcagagaacaaatgtttctgtgggctatctaggaactcaagkcatatataatgtaatttctaggaacaagctttgtgttcaaaccttgagaacctcatcgtttttctaacttggcttgacatctaccttccattttttttccttttttcttaaaaagtaggcttttctactattctagatgttatgagtctgtggaagaaataacagataccaagagtggctttcactcagaataaaatgatatgtatcaaaaggtaccttttttttttttggtgtgtgctgcaggtgggttgggaagggggtgttctggatttatccagttggaaagaaaatacagaggcatattaagcagttaatgagaactagcttgtgtgattaatatagacaagaagtggcatagtgatcaaaagagaaagaaagtttaatgtagtttgccatttttagaaaaagcttcatagtcagtttgggatttcaggtaggtaggttttagggagatgaaa

SEQ ID NO: 673759 - DNA, 608 bp, Homo sapiens
gaaatggcaccatatgtaacaataatcattagaccacgaagtttgcatggaaaatggaacatgcttcaatgtcatcctacaacccatatatttttcgttattcattaagttgaattaagggcagtaagcaaaaaggaaaactaatactaatattttgaatggcctcatgaacatattaaatcataacacttagttcaacaattgaagattcagtaggcagggcacagagagctgcaaggtagatgttcttaaagttcggacatatggtcaggaaagcaagaccctttgaaatgtcaactaatcacactatttaaaaattgtcatattatttatttaggttagtgctaartctattctcatccttaatcacgaccttgaagattaggtattattatatcttctcacagataggagaaaatgaagacttatgaaagattagggacttacccaaagttagacactattatgtgccagggttatttctaacaaaatctttaaacctgctctgtaaacaatagataaaaagctctggccgggcgcggtggctcacgcctgtaatcccagcactttgggaggcagaggcgggcggatcatgaggtcaggagatc

SEQ ID NO: 673760 - DNA, 608 bp, Homo sapiens
gaaatggcaccatatgtaacaataatcattagaccacgaagtttgcatggaaaatggaacatgcttcaatgtcatcctacaacccatatatttttcgttattcattaagttgaattaagggcagtaagcaaaaaggaaaactaatactaatattttgaatggcctcatgaacatattaaatcataacacttagttcaacaattgaagattcagtaggcagggcacagagagctgcaaggtagatgttcttaaagttcggacatatggtcaggaaagcaagaccctttgaaatgtcaactaatcacactatttaaaaattgtcatattatttatttaggttagtgctaagtctattctcatccttaatcacgaccttgaagattaggtattattatatcttctcacagataggagaaaatgaagacttatgaaagattagggacttacccaaagttagacactattatgtgccagggttatttctaacaawatctttaaacctgctctgtaaacaatagataaaaagctctggccgggcgcggtggctcacgcctgtaatcccagcactttgggaggcagaggcgggcggatcatgaggtcaggagatc

SEQ ID NO: 673761 - DNA, 584 bp, Homo sapiens
tgaactcttcagcaaacatactaaattagtttaactcatcttaatctttgcctatttgtttaaagcttagttttattttagctctacatagtatgacacatacaatagatattcggtactataccatatttaaatattagctaaccagagtatagcccaaagaaatctgaacatattatagtaagataagttctgcttataatgaggttgaaagtagatctcttagtatatattgttttaatacaacaccactggcaacttggtagaggggttatagtcaagtatgcaacatgtttcaagtttacaaataattaaaattaattttaaatgttttaaggagtacaaaataataatacaaatattcttttaattaacagtaagtttacaaaagaatattaaaataaagattaaatgtgactgcttaattgattttaatgtgcaatatctttaccttggtaaaaatccttcaaaatcagcttatttattttctttcragccccataattggcttttatctgcattggggtggatctcatctgaatttttcaaataaacagtttcattagtaagaggcactacaaatg

SEQ ID NO: 673762 - DNA, 626 bp, Homo sapiens
cttttcaatattaccatttttgttatcagcctctctttccagcacacacaacttccctgtcctttgaatttccttatgcctgccaagggattccagctgaagtttctatgactggccttccttagatctcctaaagattttctatttaagaccgtttgcttaaagtctactaacaatgcatttttgagttacaatagctttattattaaaaggcatatatgcttttaggaagaaaaacacattgtcacccatatgtgtcaattaattgatcgtgaattaagtaggatgagattccaggatgtgatgactgtggagaggaggtatgttcagaaagaggaggtggcatcaaagccaaagtttgcaattttgctccactgtttcccaaagaattgtctcatgtccatatccctcactccttcttagcaagatttgcctgtccactgtcacatgcataatagctcactctgttttctaagctagataacttgagcaacttattcttgaaaaggtggaaatggctaacagtttatatccaaacatgrctacctcctaggaacacatttgtggtacccagaaacaaacaaacaaacatagaccttagaatcaaagaacctaagaaaagatgg

SEQ ID NO: 673763 - DNA, 662 bp, Homo sapiens
atacatatttatattgctcactgggccctttctgtcttttgttctgggaaatttcttttacttctccaagtatatgcttcattccatttctgattccactgaattctctctcactagcagggggaatgagtaaggaaagatggctctaaggtttttcatcccatctatccaaataggtcgataaactaaggcccacaaaaatcaaatgacttgtggaaggtatattatttttacyaaaccttaaaggtatttgggaattggaaagcgttataagatgacagtgttaagtcaagggacttggaaacaatcaaatcctgtcttagaccaactaattctttccatcaaagtaccttaggaaaatatatcaacatagaataaccagtggttattcttaggtcttggccccgaatacccaatacagaaatattttggctgagattttggtagccataagtctagaaccaaagttggctaagcttgtagtctcaaaatgtctccccatgagagacttactaactacaaaatggaaaatagtcacttttcagtgttgaaatctagcaagcatgacttcaaccaagtggccaaagttaacatcacaaaaataaaatattaatattatacatctcctgatatgatgtgctgagaaaaatacatagcctctg

SEQ ID NO: 673764 - DNA, 460 bp, Homo sapiens
acctgtaatttctcaccagttacctttaaatgaaatcctattccttgcacatctgtaccaaattatatcctaatatccatagcatgtatgttctgtattttattgttcagattgacaataacaactatatcacccagaaggcaacttttatatacctccaaaagttcttagcttatggattactaaagcaacctgatcaaaatatttatgatatacctaagagatctaaagaaataattcctgaaaaaagcaagaaatacaatgttgtttgctggtcacctaaccaaaacagcttaaagtttccccactttgaagtgaaggcacttagaacaactgccaagttaataactacaatcagtgtcccatcttcattttttaacctaaattgatatgcaaaacacatagctgaattccatcagactggaaatgatcctgatggaagacaacattcrtcatgaaa

SEQ ID NO: 673765 - DNA, 637 bp, Homo sapiens
agccaattcttagctctgagagcagttatctcagagcaattttctcagtgaaaattgtgtttctacaacccagtatctgtatgtcaccgaagccatagaagaaattatgtgatatctgagtgaaggagagaaatggagaaaaccttgatttgaaacttaccagggtgctcatatgtgtacattagctagaatttatgacctatggacttaaactaatttggaagaaatgaagttaattttgatactatgcatttactatatctggcctaaaaatctactttatgtatactgtcttctcttattggagcacgacatttgaaacattatttccttcatgcaatttagaaattttggacggaagcccagtctttcctttttttttttgagatggagtctctgtcaccctggctggagtgcagaggcrcgatctcagctcactggaacctctgcctcccaggttcaagcgattcttgtgcttcagcctcccaagtagctgggattacaggtgtgtgccaccatggcaggctaattttttgtatttttcgtagatatggggtttcaccatattggccaggttggtcttgaactcctgacctcaggtgatccatcgctttggcctcccaaagtggtgggatta

SEQ ID NO: 673766 - DNA, 1913 bp, Homo sapiens
tcgacttccattttcaacttccttcctagtaaatactttcacctcgattttcttgttttgggtcggcaagtaaatcttaaaatattgcaaatcagaattaaaaacttgatcctcttcttgactttttttttttttttttgaggctgagtctcactctgttgcccagactagagtgcaatggtggggtcttggctcactgcaacctctacctcctaggttcaagcgattctcctgcctcagcctcccgagtatctgggattacaagtgcacaccaccacaccgggctactttttgcatttttagtagagtcgaagtttcactgtgttggccaggctggtcttgaactcctgacccttgtgatctgcctgccttggcctcccaaagtgctgggattacaggcgtgagccacagtgcccggccttgactttttatatcgtacatttagcaaaacaattctcccatccactatccttgtagacaccagatccccaagattatccttaattctcccttttccttcacttcttacaactattcttctctcaaaccctgaaaagtttttcagctccagtgctaatgcagtcacctagataggacctaaaaacaaattatgcctaaattgttataatggaattttaatagattttcctgcattcaccattttcttgttctgattggtctgwtacaacttttccaaattatttttatacaggtattttcctgctcaaaaactctctctgtttcccaaaaatcaaaaacaatcaaatttgagagcccaaagacaggattactctgaatctatgaattaagcacccacgtccctcaccggcaaggtaacctttcagcactctatacccaactttatatgtgtaattttgtattctattttatttaaataaaggcttccaaattaaatatgtttcaagaattaagagaaactagatctaccccaggttaagcatcaagattaacattttaagtcacactataaacctatcaaattaactaaaattcaaatatggttgctcaggtagaataatatgtgagagaaaaattaacaactttaaatagtatggaacatctttgtaggttcccagagaaggcatgatagaaaagatataaatctgcaatttcctcagtcttatccctctaggttctcttagcgtgaaactgtttaacccatgattctcagtgaatgctggttaaacctctgggaataatgagggggcaattttgtgatcactaatgaagaagcaaaatgtaatattcatggggtcaagaataaggaaggatttcatctgcatcattaaatactactgaatagtccattggtccattgagttcctgtaggaaaactgaatcacccttataagacaaagatatccagaacatgtcttccaacctaaaaaaagataaataaataaataaattttttaaaaaagcacaaaaacctcctgaatattttaattactgaattctggactatggccaaaacaatttctaagtagaattttgcctaaacccaaattttgtgtgatatgctgactttataatttaatgagtgtttcctgcactataagatctgtttttgtttcagcactataagatctgtttttgcttttttgttttttatttttcatcgagatacggatcctgctcttctcaaacctgaatgaattacatactgctcagattctgtgggaataccactgaaatgttaatgtccaaaatatgatcaagtaattatcatgcttgtttttgaggcttaatttccaaaaaaaagactaacacgctaaagctaagtaactattcaaaacacttaacagtaaattgtttaaacactctctttgaaatcgttgctgtcactagatcttccagctttttcctccaaaccaggagatgtcctggcaaca

SEQ ID NO: 673767 - DNA, 2656 bp, Homo sapiens
  misc_feature 1921, 1939: n = A,T,C or G
atgcatggtattcaactttgagtccttagccaatttagaaacaataggaataattctatttaattctattccacatttatctatggatacattagtaaacacacacacacaaacagacacatacattatttcaacattcattaccttaaatcttgcaactcaaattaaggaacaataagaaaaaaatgtatataccatttataacttgacatggtttgaatgtgtgtcccctccaaatctcatgttgaaataaaagccccagttttgtaggtaaggcatagtaggaggtgtttggattatgggggcagatcccttatgaacgtcttagtgccatccttgtgataatgagtgagcattcactctgtgttcatgtgggatctggttgtttaaaagaatgcggagaacatctccgccttctctcttgctctctctcttgccatgtgacttacccgctcccatttcgccttctgccataattataagcttcctgaggccctcaccagaagctaagcagatgctggcaccacatttcctgtacagccttcaaaagtatgagccaattaaatctcttttcttaataaattacccagtttcaggcatttctttatagcaatgcaaaaatggcctaacacataacttaaataatatatattaatatctaatgtgtatttactacattataaattatcttattctcttataaatattaacacattaattccctacacccttcatgtgatgtagttataatttttatccagactttgaaaataaaaaaattaaggaaaaaggaagttaaataactgcttataatcacaaaacttgtaaatgcaagatggagttttaactcagaaagccaaattctcaaccactttttttactgcctctcatatgactgatttattttctctctctcttgattttacattcatgtgtagtttgtcctgaatttgtaagtaatacattctttaaaacaaagtgtttcacatgaaaattttgttgttaatgatgttgaaatgagagattgtgattctgggacatttttaaagcagtgtataataaattaattcagtagagattatattcgcccaaaaactttagcaatacagaatttccatactgcaaattttggatagctattcaacatgtgaaatgacatcatgagaaagacacctgaaaactctgcatacacaataactgattagagaattactggtattatgcatacatttttttgtgagccagcacagccattatttttctctgaactgcaggaccagaagggtcacaactgaccacccagaagtttgatcaatttaacaactgcctctgaactctccctggagtccgtgactcctctatttaggggaaaacctcaatcttaatttttagtctacaaaaaatgatcatttttatttgatagaacactygaaagcagtaaaaaaaatcactatagtccactggtttttaaagtgggttttagttgtactctaaaactagaaaaagtgtgttgcttattaaaaccatattttccaattaagttcttgcaagggttcagattgcacacagtactattatgcagggctatttaagtaggtgctataactcttaagaaggggtgcgtgctcagttccagacatgggtttctatgacactttcacattttcatttgatcatgtagtaaataataacataaaatcccatacaatggccaaaactagagttatataatcctctgagtactcttaacttgtagaagggtgtgttttgatcatatttaaagaatggatatatgtttttgtgtgtgtttcttattaaaatatttagaataaacttgagatgttgtatacatttttgatgatgtatataagtagttagttgtgtcccataattacattttgtatttcagactataatttanaatcatctattattctanagaggaattttgaatttggaagctctagatttagccaaaccaaataatttatattcttatttccaaatctccacccacactacaacatattctaatattctcccattatctcactgaaacaccatctattaatgtaatcaatgaactctacaaaaataaatacaatagggctatttggtttttaaaaaaataatttaacctttcagtaacataaactagtgtgatcacaatcctctaaacccctcttaaatcttttgtttcttggattagttaacacagtaatctttcagctttcctattaccttatggtttcttttcttgtccttttcttttctataaagtcatatattgacatacttcaagggtcaaccctgggcctttaggaatatcattcttactcaaggctttaaccgccaccaggagacagataatctacatctatttataccttcccacaagcctctcattgaattcttcagtaaactcaccatcagtctcccattcttttacctagttttcttccgatgtttatcattatttagtccattgcaaaaacaaagaataaaaattattcttgacacctttcaagatgcacttccctaatcgaatccatcaaaactcttaatgtccacttagacatttcttctgtatttctactgcatatttcagtctctgttacaatcacatatttcttgcattcttttaccttgggttgac

SEQ ID NO: 673768 - DNA, 2656 bp, Homo sapiens
  misc_feature 1921, 1939: n = A,T,C or G
atgcatggtattcaactttgagtccttagccaatttagaaacaataggaataattctatttaattctattccacatttatctatggatacattagtaaacacacacacacaaacagacacatacattatttcaacattcattaccttaaatcttgcaactcaaattaaggaacaataagaaaaaaatgtatataccatttataacttgacatggtttgaatgtgtgtcccctccaaatctcatgttgaaataaaagccccagttttgtaggtaaggcatagtaggaggtgtttggattatgggggcagatcccttatgaacgtcttagtgccatccttgtgataatgagtgagcattcactctgtgttcatgtgggatctggttgtttaaaagaatgcggagaacatctccgccttctctcttgctctctctcttgccatgtgacttacccgctcccatttcgccttctgccataattataagcttcctgaggccctcaccagaagctaagcagatgctggcaccacatttcctgtacagccttcaaaagtatgagccaattaaatctcttttcttaataaattacccagtttcaggcatttctttatagcaatgcaaaaatggcctaacacataacttaaataatatatattaatatctaatgtgtatttactacattataaattatcttattctcttataaatattaacacattaattccctacacccttcatgtgatgtagttataatttttatccagactttgaaaataaaaaaattaaggaaaaaggaagttaaataactgcttataatcacaaaacttgtaaatgcaagatggagttttaactcagaaagccaaattctcaaccactttttttactgcctctcatatgactgatttattttctctctctcttgattttacattcatgtgtagtttgtcctgaatttgtaagtaatacattctttaaaacaaagtgtttcacatgaaaattttgttgttaatgatgttgaaatgagagattgtgattctgggacatttttaaagcagtgtataataaattaattcagtagagattatattcgcccaaaaactttagcaatacagaatttccatactgcaaattttggatagctattcaacatgtgaaatgacatcatgagaaagacacctgaaaactctgcatacacaataactgattagagaattactggtattatgcatacatttttttgtgagccagcacagccattatttttctctgaactgcaggaccagaagggtcacaactgaccacccagaagtttgatcaatttaacaactgcctctgaactctccctggagtccgtgactcctctatttaggggaaaacctcaatcttaatttttagtctacaaaaaatgatcatttttatttgatagaacacttgaaagcagtaaaaaaaatcactatagtccactggtttttaaagtgggttttagttgtactctaaaactagaaaaagtgtgttgcttattaaaaccatattttccaattaagttcttgcaagggttcagattgcacacagtactattatgcagggctatttaagtaggtgctataactcttaagaaggggtgcgtgctcagttccagacatgggtttctatgacactttcacattttcatttgatcatgtagtaaataataacataaaatcccatacaatggccaaaactagagttatataatcctctgagtactcttaacttgtagaagggtgtgttttgatcatatttaaagaatggatatatgtttttgtgtgtgtttcttattaaaatatttagaataaacttgagatgttgtatacatttttgatgatgtatataagtagttagttgtgtcccataattacattttgtatttcagactataatttanaatcatctattattctanagaggaattttgaatttggaagctctagatttagccaaaccaaataatttatattcttatttccaaatctccacccacactacaacatattctaatattctcccattatctcactgaaacaccatctattaatgtaatcaatgaactctacaaaaataaatacaatagggctatttggtttttaaaaaaataatttaacctttcagtaacataaactagtgtgatcacaatcctctaaacccctcttaaatcttttgtttcttggattagttaacacagtaatctttcagctttcctattaccttatggtttcttttcttgtccttttcttttctataaagtcatatattgacatacttcaagggtcaaccctgggcctttaggaatatcattcttactcaaggctttaaccgccaccaggagacagataatctacatctatttataccttcccacaagcctctcattgaattcttcagtaaactcaccatcagtctcccattcttttacctagttttcttccgatgtttatcattatttagtccattgcaaaaacaaagaataaaaattattcttgacacctttcaagatgcacttccctaatcgaatccatcaaaastcttaatgtccacttagacatttcttctgtatttctactgcatatttcagtctctgttacaatcacatatttcttgcattcttttaccttgggttgac

SEQ ID NO: 673769 - DNA, 1441 bp, Homo sapiens
aaactatctatagagtttttatggccaaaatgcacatgaaaaaagtattcagcctccttaggaatttaaaatgagcagcaaaacaacaatgagatataatttttattaagcagattgatcaaatatctaaattacttaatttgggccagggtttggggaaatataagtactcaaatgatattggttgaaatctaaattaaaacatggctttttaaaaaggtaactgtggagtttctataagaattacaatttcagttctaggaattaatcttgtttgtacagatgtacaaaggtgtctatgtattcattgtagcagtggaatcaagctatacatagatgcactytttaactttatttgaaacattcaagcacaggtttgaaaaatattaaagagttattatattaacagtaagtctttcatccatcttatctatctgattcccacctatctcactctcaggtaaaatcattttccaacatttctaattgtagtttatgtgatggttatgaacataatgtaaatagtaggcttttacatcaatttattgatttatggtctttaaatagtatccattagcttctcactttaaaagttaagatttgagttactcacaaacttcccatctaatcttccatggtctattaaaacatgttttcttctattgattattttaatagctctaaataatatacttaaagctttgcttgctattccatcaatcttagatactactttctaaattcctattatgaatgatgagaaaaattggggcccatgagctactttccacccccccactattacaccctgatctatgaaaatatattttagatggcaaagtctgagtcctgtgctctcgctgtcctccccagacagcatgagcttcaccattcctccaccttctgcaccaactaccggtccctgggctccgtccagccgcccagctaccgcgcccgaccgctaaccagcgcggccagcttctaggcaagcgccgggggctctggttcccggatctccgtgttccgctccaacagcttcctgggtggcttggggtccgggagtctggcggcagggatggccggggtctggcaggaatgggaggcatccagaactaaaaggagaccatgcaaagcctgagcgacagcctggcctcctacctggaaagagtgaggatcctggaggcggagaaccggaagctggagagcaaaatccgggagcacctgtagaagaagggaccccaggtcagagactggggcttttacttcaagaccatcgaggacctgagagctcagatattcgcaaatactgtggaaaatgcccgcatcgttctgtagatcgacaatgcccgtcttgctgctgatgactttagagtcaagtatgagacagagctggccatgcgccagtctgtggagtgcgacatccatggggttcattcaggat

SEQ ID NO: 673770 - DNA, 1441 bp, Homo sapiens
aaactatctatagagtttttatggccaaaatgcacatgaaaaaagtattcagcctccttaggaatttaaaatgagcagcaaaacaacaatgagatataatttttattaagcagattgatcaaatatctaaattacttaatttgggccagggtttggggaaatataagtactcaaatgatattggttgaaatctaaattaaaacatggctttttaaaaaggtaactgtggagtttctataagaattacaatttcagttctaggaattaatcttgtttgtacagatgtacaaaggtgtctatgtattcattgtagcagtggaatcaagctatacatagatgcactttttaactttatttgaaacattcaagcacaggtttgaaaaatattaaagagttattatattaacagtaagtctttcatccatcttatctatctgattcccacctatctcactctcaggtaaaatcattttccaacatttctaattgtagtttatgtgatggttatgaacataatgtaaatagtaggcttttacatcaatttattgatttatggtctttaaatagtatccattagcttctcactttaaaagttaagatttgagttactcacaaacttcccatctaatcttccatggtctattaaaacatgttttcttctattgattattttaatagctctaaataatatacttaaagctttgcttgctattccatcaatcttagatactactttctaaattcctattatgaatgatgagaaaaattggggcccatgagctactttccacccccccactattacaccctgatctatgaaaatatattttagatggcaaagtctgagtcctgtgctctcgctgtcctccccagacagcatgagcttcaccattcctccaccttctgcaccaactaccggtccctgggctccgtccagccgcccagctaccgcgcccgaccgctaaccagcgcggccagcttctaggcaagcgccgggggctctggttcccggatctccgtgttccgctccaacagcttcctgggtggcttggggtccgggrgtctggcggcagggatggccggggtctggcaggaatgggaggcatccagaactaaaaggagaccatgcaaagcctgagcgacagcctggcctcctacctggaaagagtgaggatcctggaggcggagaaccggaagctggagagcaaaatccgggagcacctgtagaagaagggaccccaggtcagagactggggcttttacttcaagaccatcgaggacctgagagctcagatattcgcaaatactgtggaaaatgcccgcatcgttctgtagatcgacaatgcccgtcttgctgctgatgactttagagtcaagtatgagacagagctggccatgcgccagtctgtggagtgcgacatccatggggttcattcaggat

SEQ ID NO: 673771 - DNA, 793 bp, Homo sapiens
ttgctgtgaatctataatcatttcaaaacttttacaaaattaaagtaatcattgaaaataatttaacatgtactgtcaggggaaagatgaggaacgtggaaggagtgatgagttgctgaatcagctgtattcttaatccctcaagtcaaaacgtaacatctaaataaaacataacatctagcgagaagttgagaaatagttgtacattcataaagttttgagcagtggagctgacaatcaaaagaactaagaggaactggctttgaaagctggattcaaggtagggtgtggccaccagtttaggtaacttgtttctcattagaaattgttcagttttatttactttttaaatctgtgtatgtgtaatataaaattttttaaagaaaaagctacataaaataagaaacccttttccatcagcattgtcttggctccaggtttattctcttacatcctgcagatattccataaggaggccgtggaaactttgtcagacagaactaactttctgtcattgcttctgcaaacacatttagtccagttctggtatttggacatttatgaatatttgatttaactgtgtttctgatttcctgtattttttgtatatttttcaaataagaattttkgcaagctttatattcattgttacactgggacaaatttacatcgggtatatcccagtatttaccagttgaagctccatttcaatacactgggaagattcagaacccatgtatgatagactaaattgtccaaacctgtgtgttctcttcattgcttctggtctagg

SEQ ID NO: 673772 - DNA, 1567 bp, Homo sapiens
  misc_feature 640, 641, 642, 643, 644, 645, 646, 647, 648, 649, 650, 651,652, 653, 654, 655, 656, 657, 658, 659, 660, 661, 662, 663,664, 665, 666, 667, 668, 669, 670, 671, 672, 673, 674, 675,676, 677, 678, 679, 680, 681, 682, 683, 684, 685, 686: n = A,T,C or G
  misc_feature 687, 688, 689, 690, 691, 692, 693, 694, 695, 696, 697, 698,699, 700, 701, 702, 703, 704, 705, 706, 707, 708, 709, 710,711, 712, 713, 714, 715, 716, 717, 718, 719, 720, 721, 722,723, 724, 725, 726, 727, 728, 729, 730, 731, 732, 733: n = A,T,C or G
  misc_feature 734, 735, 736, 737, 738, 739: n = A,T,C or G
accctgtaatcacagcttggtctttttggtgacaagcccccatcttgaagctctccaggggctcccaggcaccagtaatctaattagcatccaaagaaaacctctcttttatcactctagagattccaaaattttaagagctgtatatagagaactgagtataaagaacaaatactttaacaaaagaggcttttatcactgaggaaattataagagttttaagagctgtgtaccaggtaccagggaaataactaaatatatattttttattataccacaatatcacaagtataagtccaataaaatgtatgtataatttgtatgctgaaaactaaagaaaataaataaatggaagaatattctgtgttcatggattagaaaattcaaaatagcaaatgtcaattctttccaaattgatacacaaattcaacaaaattcctatcaaaattttaaaaatgtttgtagatgtaaataattttttgaagaaaatktgtatggaaagacagagaaactagagtagctaaagcaattttgaaaagttcagtaagaccagatagatttaaaaattgccatgcaaataaataactgccatgaagacaaagtgttggtcaaagaagctctctggagcaaatccatcacnnnnnnnnnnnnnnnnnnnnnnnnnnnnnnnnnnnnnnnnnnnnnnnnnnnnnnnnnnnnnnnnnnnnnnnnnnnnnnnnnnnnnnnnnnnnnnnnnnnnacccaccattcaaatcaacttccttagccaatgaaattctcttttctggtcaataagtggtattttccgttgttacatgtctttgggaaaggtccttgatttctgagaccaaaacttgtaactgagctttagattataaatgctctcaagagtgttcaagtgagtaacccctttctcaatatatggtgtataatgccatggtttccagacataatttcaatatataatgtataatgccatggtttccaagcataatttcttttccttgtcatataattgctttcaatgagcaaattgttgtccagtaacctttatgcaccatctgtaccactgacaaaatctagtcctgcttcaccatgtcaagtatttaaaaacaaacatatctaaaaattattagaagtactttaaaatgcaaacgatttttaaatgcaccaacacatataacaaccacaaacctgatatcagtcttaaccaaaaatgctatgacatatagaccaattggttttgtttcttcattgaagttcatgaaaaccaatcaattaattcattgttccatagttccagctgccagatacggtaaaaattcagtgtcataaattataacaacttatttacagaagccaatgccataataatcaagatatgagcaatgtgaagcttaatatatgtgtttgatttctgaatgtccaccatgcttgttagtggtcaattaacagactgagtggatgggtataacttactggtgtattcacttgtgattagcatgtgctaaggcagttctggggcactttcacatttttacttctggtctaaatatttgagaggaaa

SEQ ID NO: 673773 - DNA, 1072 bp, Homo sapiens
atttatatgtgtataccatgagtacatagtgtgtatatacacgtatctatacataatacatatataatagtatacatacattacctatatataagtttaaaaaccatgtatatatataaaagttcagtaatgctcaattttaattgagtacacaaatgttatctatgtaagttattaacacccataaagttagagtgagcacacacacctgcctgcttgtattctccaagcacatcaccgggaagcagtaatttcctaggattacagaggcacccaggtaagaccaccagagccgcgaacagtggggaggtcctccatgtgcgcagacatctcatcgctggtgttattctgcatagtagggttcccaaggactggcatttctctctaaactgaatttaaataaactttatctggtgtttacaaacagggctactgtttgtaawcaccaagcttgttcatttgctcctgggtatctgataatcccactggtgcagatgtgcatctttccccaaactcctaccttacccacagtacccacagctttttacctttgtttattgcatctgcctctgtcctggtcagcactatgtgccattgttccagcaggcattccagcgaaatcaggtccttcatttcttggcttgatcgtttcagaccaggccacgcctgttcctgagctgccgctatgaagcatagctgatttcaagtactattaaaattagaaatagcacaagatccgtgcacaattcatttaactcatttattcattccatcttaaatacatctataactaaatacatacccactaagtccctttacctacatctatttcaatttgatgctttagcacccttctttgaattcctgatattttgagaaagcaaggaataattgataaagtttagaagtgattctaggatctgcgagattctcttaggtcatgtaaattctgaatgctcatggatgagtttaagggaaacatcgggtctagaaagctgttctgagcacagaatagacagggttaatcccttcagccctcatctgaaagaagtgacaatgagaaagataatag

SEQ ID NO: 673774 - DNA, 669 bp, Homo sapiens
aaaccatgctgtactctgtgcagacctttctcgtattttaacacttcactacaatcatttatgtatttgcctgggtctcttttctaaatataagtaataaagtggctgggcacagtggctcacacttgtaattccagcactttggaagggtaaggtgggaggatggcttaagctcaggagttygacaccagcctgggcgacaaagtgagaccctgtctccacaaaaaattttaaaaaattacctgggcatggtggcgtgggactatagtcccagctactcatgaggctgaaatgggaggattatatgagcccaggaggtcaaggctgcagtgagccacgatcctgccactgtacttcagcctgggtggggcctggcagtatgctcaaaaattgtttaatgaatgaagggcaagtggcaaagataggagtagagcccaagacttttaactcctagcttgagcttggctctttctatatattttcctgtctctgcaaataattttaagaattcagatcaatggactatcaaaacttagattaaaaaattcaccttcagtttgagttatcaatacaattagaactaataaaaagctacaacaaacagataaagaaaattcctttcctttcttttaagaaatgtttctatcacttttttcctgaatacaaaaa

SEQ ID NO: 673775 - DNA, 673 bp, Homo sapiens
catttcctcctgtttgggctgaggtggtgtagcactgactctggcacacacagtatggtgacaacccacaagccaaggatgcagccagctgagctcagtgtgacttcaatccgcagaaaccctcgggacaacggggtgtggtatgaactcacaccaaacacagaattggaggtttaagaagattttctgagttctaaatgagaaagtaacccttgttgtctattcttctttcaaaaaaaaagtaaaatgtttaaagtattttaatagaggttaggacataatattagaccttaggacgtaatattactaccatattggaccaagaaactaaarcagctgggcgcggtggctcacgcctgtaatcccagcactttgggaggccgaggcaggcggatcacgaggtcaggagatcgacaccatcctggctaacatggtgaaactccgtctctaataaaaatacaaaaaattagcctggcatggtggcggcgggcgcctgtagtcctggctactcaggaggctgaagcaggacaatgacatgaacctgggaggcggagcttgcagtgagcctgggaggcggagcttgcagtgagccgaggtcactccactgcactccagcctgggcgacagagcgagactccatctcaaaaaaaaaaaaaaaagggaactaaagcaa

SEQ ID NO: 673776 - DNA, 613 bp, Homo sapiens
aaaaacataacaattacttattactgagtaaaaatagtagtagcttttaatattcacaaccaaccactctagtgctgacataggaggctacaaacttaaaattttttgatcataactagatgatcaagatggagccctttttgggggtaaaaattccttctactccatatttgacactgttaagaggatataaaggaaagttaaattatttaagatttttcacaaaagatttaagaatgaaagaataaatcctgctggaaaagaatatgacagccataccatctgcaaagtaaatcttctacagaggtgcagcttgactctttttatagtaataaataaacactgcttagttccataaggcactgtcactgcagctagtgcacactagtgccacccactgtccccagtgtgcaamaggaagggtggaggtgcgttccagtgttactgatgctaagcttcatctcttggttaagtggtggcttccagatgcttccgttgtaagattctattttcccctttgcagttaggaagcaatttaagaggtgatacttctcccaaatcctttcatctaatgattttagcatttgtattagtttgctcctataacaatgta

SEQ ID NO: 673777 - DNA, 1716 bp, Homo sapiens
cagacggttcagacagaagtagcttgttgtctgaccaagtctggcaaagcatatggagacctaattaaaaatggcagccaagaaaggatcagcagggtccataacctttaaaagaactcaatagtacctggccacatcttcaatatttaatgctgggggatgataaattattcagatgaaataatcttggcttccactcaccatagcccaagagcattgatccacatcatcactaatgatgatgagcatcactaatccacagaggccttcacgatgagatgccaacatgaaatggaagagtgacagcatttctgctttagattgtttaccccttcctcaccctgagatttcacatgctcttcagtgggcctccaggattgaactgtccttcctgttacgtcaaacagcaacatgaggatcaattatctacctatattccctgttgggctcaggatttggggtagtgaaggattgattcagatccctctgctggtacagaagacratccattatctcacttccagaccagtgcttttaacatctagatcagtgcttttaaaacttagatttgcctaagaattatccatgtatcttgttaaaatgcagattgtggtgcactaggtcttcttggttagatactctgcctttctagcaagctcccaggtgatgccaatgcttctggtctatggatcagtctttggaaggcaaggcactatatggctgtgaaaagtaggcccaccctccatactctctccacccaggtccaacctgtacattacagcaatatcacacctctgctcaaatccactctcttttttttttttttttcagatggggtctcaccctgttgcccagtctggagtgcagtggcgtgatctgggctcactgcagcctctgcctcccgggttcaagcgattctcgtgcgtcagcctctggagtagctgggattacaggtgtgtgccaccacacccggctaatttttgtatattttagtaaagacagagtttcgccatgttggccaggctaaatccactcttttgcctgacattcaaggtcctgtacaaactgatcctacttgctttgtaaccttttttgtcattgctctcttctcatgatctgcatctcaagcagatgaactattgctgcttcccagccatactgccacgctgcctttattttgctctttcttctacctggaatgttcttgtccacctctttcaaggcccagctcaagtgctgcctcctccatgaagcctaatgagtcccttcagccagaggtcgtcttccttcctctgactactgatgtcactttatacctatttctcttggggacgctgtcactatctatcttgaactatgacttggggaccatgtcttttatcttgtttctactataattctttgtaaactttctgagggcaggttctattttgatttgcttgtaacttatagacacttatcacaatgcattatacatagcaagaagtaagtgcgtgcgtgtgtgtgtgtgtgtatcagttaattttattggagtacaatttaaatcaataaaatgcatagatttcaactgtactgttcattgagttttgtacccaagtaaccaccacccaatcaagatagaaaacttttccatcaccccagaacactctctatttcccattccagccaatcccctcccgttctagccaatccttagctagaaaataactgttcaga

SEQ ID NO: 673778 - DNA, 584 bp, Homo sapiens
tgaggtcaggagctcaagacttgcctgaccaatatggtgaaaccccgtctctactaaaaatacaaaaattagccaggcgtggaggcgggcgcctgtaatcccagctactcaggagactgaggcaggagacttgcttgaacccaggaggcggaggttgcaatgagccgagatggcgccattgcactccaacctgggtgacaaagcgagactccatctcaaaaataataataataatgaacaacagtacaattgccatttttaaaatgcctcttgcaacaggccccgaactcacatttcactgaatcctccccatgaaactgcatagtaggtacaatgaggcttaacttgcctgtgaagcagcagtctctagctccaatcatgctcagcctggcaccaaaaccacccagtctctaggagcccctaaaggctcatgaaaccctcacgctatagcagccaaggacggcaagctttacaacacactgtcctctagaaggcaagtggaaatcacttatgatgccagcattagggatcacacaaagcaccttcatcatcmgaggactgtcacttgatagtaacaaagaaac

SEQ ID NO: 673779 - DNA, 1575 bp, Homo sapiens
tttataagaggttccagatatatatcttgatttaatcctgatcatccacattaaaattatgaatgtaaaaattacataataggcttttcggctgggaaagaaaagtgtctagcagcatgcacaaagaccatgcattgtcacatcatcaggcgaacaaatggaaaggtaataaataattgctcctaacgcccactttaaaatagtaaaaccaaatggaacagtgaagtgagccggtcttcactgctctgagcaggaagcgtgctagcggccagatggggccacagtcagatgacatggcaacagctggctgggctggatgcgcacagcagcccctccttagggttccgctggatgttcacagagatggtcttttcgcacagaggtagctgcagcacgttatttttcaggttcttgctctttatccgttccaattcagtggtggtatctgccatgtggtcagagaaaaactttatgccgcccactgcagggacctgccctgcattccctgtggagctaatgcacattttccacgtagatttctcttggactttcacactggaaaatgacaagccattctgtggatcaataatgtacttggtgctcccatgaagctgggagccgaggcagaggctcatgagtttgaggctctcaacgagctccccagcactgcgagaggccagctgcatggagttgctggggccggcacagcggcgtgtggtacccgatgtattggtggggttgccacccgagccgctggagggactgcccccaccagcattgttctcactggggctggccttgtccacccctccactggcattgcttggcttgctctggcccccgccatccccctcactgccagggggcccctcgctgctatcccgtcggtgccaggagtaggtgaacccgctatctttatcgagccgccgccggctttcagaatcatcatcactggtctccgaactactgcagctggagccccggccctgacttttcctccggtggtagcgtttgtgaactgtacctggagaagctatattcatctttaacctgctcaacttgggaggcagattctcatccatgtcaaactcatcrtcagattccccttcctcaaagatctggttgaggacgggcgcactcttcctggatgtcaggcggttggttacagatggcttccggcgcaaaaccacttgtgttgagagggacatgggtttcttgtcctcctcatcttcctcttcatcttcttccaccctgaacagacacttccgcccactggctgtgggttttaagcttgcgggtggcaccgtagagagtgctggtccagccaactcagggaggtcatctttcttagctgagtcacacaggcctttgctcctgtggccattgaggacactgtcagcagcccgagcaggagactgagggacagtcgcgtgggacaaaggagtggccgtgaggtcatcctcaaggtcctggggtacatcaattttggttggccatgactgcctatgtaacagatagattggggggaaaaaagccatataatcattatgcagatgatagtaaagtacatcacaa

SEQ ID NO: 673780 - DNA, 570 bp, Homo sapiens
  misc_feature 532, 554: n = A,T,C or G
cacacagcctcgggactacttccaataacttccaacactctctaattgggaaagtaattctcatggcacaattttatcagggaaacaaaacaaagccaaaatggtaagataaaaatgtgacaataaattctattataactrttactccaaattatagtaatatgcaaattatagggctttcacttgaacaacaaccacaatagccagcaacaagaactacagcctatcctggtatatctctccctgcaaaatacaaatttataactaatgaggcagacataaataaaaatgccaagtcagtccaactcaacaattaaagaaaccatacttatttttgtttttcctttatacctctggtaaatcctcaaaaagaatcattagaatatagttcaagcaaacaactgcttcaatttttctgaaggaaaggtttgactactcttggatacgaatgaaaggagttcctctgaaaaatggaacaatgcaggtccatacgcatatagacttcaattaaaatgatggtatccatttctgncctcatataatgttcccagaanaaaatatattaacgta

SEQ ID NO: 673781 - DNA, 668 bp, Homo sapiens
ggcaggcataagcaattctagaatattctcacaaacatgtgattgacttttatcagcatctgattatagaaactgamgtcatcaaatctttccttagatacctatttttcatatttgtaatcattttggttgtgcttaatccttattagtcaagtgaatcagctagtattatgaagagtttcaaaatggctggcgtcagaatcgtctctgacactaaaacaacacaaggagaatggctcatcataatgagaacaaaatacacagcctcttcctagcataagcagtagctgatgttattgcttactgctagctttccattgcaaaataattatctggagcagataagatcacaagccagttaatatcacaagcctgcccctgctgctaatatgatcttatcagtaacagactgatcactttctagggggaagtatcagcacttgggccttttaaaaaagaaactgatccaaaggtgagaagcagatgctgtacactacaatagtagagtgagcttgtacattttctttgttaaatattatgctcacagagcttgcgtttacctcatgggactattgcaaaaggcagaggttcaattccatggtgctgaaatatatcatcgtgttttggcataattgtatttctaatgggctctcagagaaaggaatgca

SEQ ID NO: 673782 - DNA, 668 bp, Homo sapiens
ggcaggcataagcaattctagaatattctcacaaacatgtgattgacttttatcagcatctgattatagaaactgacgtcatcaaatctttccttagatacctatttttcatatttgtaatcattttggttgtgcttaatcyttattagtcaagtgaatcagctagtattatgaagagtttcaaaatggctggcgtcagaatcgtctctgacactaaaacaacacaaggagaatggctcatcataatgagaacaaaatacacagcctcttcctagcataagcagtagctgatgttattgcttactgctagctttccattgcaaaataattatctggagcagataagatcacaagccagttaatatcacaagcctgcccctgctgctaatatgatcttatcagtaacagactgatcactttctagggggaagtatcagcacttgggccttttaaaaaagaaactgatccaaaggtgagaagcagatgctgtacactacaatagtagagtgagcttgtacattttctttgttaaatattatgctcacagagcttgcgtttacctcatgggactattgcaaaaggcagaggttcaattccatggtgctgaaatatatcatcgtgttttggcataattgtatttctaatgggctctcagagaaaggaatgca

SEQ ID NO: 673783 - DNA, 1163 bp, Homo sapiens
ggtctaaacygtgtcaagttaacgcagtatgttggctatagaacttttgcgtactggtgcggatctaaagcaaccatctggctcagaatccacttgaacttcctaaacatctctgggcagcaagtccattataagcatgttctatagcatccagatattcaaccatggccaaagaaaggcctcttaaatggaatcataaggcccatttactggtggtttggtaagaatgtggttgaaatactagggctatgcttgtatctacagcaaagttcagaaaacttaaaaaaaaaaaaaaagaaaaagaaaagaaaaaaacccttacacttgaatggtcaggtgtagttttgagctttagctgacagaattaagagaaagtttggcccttatgcattcacatccttgctcaataaacaaacaaaacacaaatgagtctcctcctccagaactagtttttgtccctaaaaatggagattcaaatgcatttcttaattctacttgctgagcattccccaatcaccacaatatgcttaggaacacactctcctttctgttctctgcctccttagattcccaccctggtttaaaaaaaaaaaaaaaaaaaatttggtcagacgctgatttaaagaactaaattatacttgcctttaacacaactatagaactgagacataaacagctttgttttcccatagttaaccggacatgataatgccttttcatttgtttcttgtatttgtttcacaaatacgagatccacattttattttcctgcctcttttccggtaaggttgaaatacatgcaaccaagttaggatctccctctctctcatcaataataaagccaggaagttggatttgaagcattgtttgtccttgtggtccttggaagaactcccggtctttaaattgacagtgcagctgttgatcaaaattattcagaaaattaatatattcttaattttctgtcagacaagttgattgtagacttatgaaatacttatgtctaagtaaaaacaatgcctatagtttctgtaagaaactaacaaaaataatttggatgtagaatgaaaagctcaacctcatttcaactctgtactagatgacagaagtgccctgtgatgaccaaatgctcgggcaatgtagggtgactgccgccaatgagc

SEQ ID NO: 673784 - DNA, 661 bp, Homo sapiens
gtatttttaacaaggcacattatcatctcccccacccaaagtggagctattgctaatgaaaaagatacaatgagatgtttatgaaattatctgtagctattaatgtcaggtttttgaaatttactgacctggaagaatactcrtaatgcaatgtcaagtgagaagcaggacaaagaacatttgcaatacagttgtatttataaaattttgtttacacacaaaaaatgtattttgcttaaaaatataatttacatatatatacaaccacacaagggaaataacaaaatgttaatactagctaatttctatagagttggcattttaagtcagaggggtattgatgaatagatgtagtttattaaatttttttctctatttcctaaactttctataaagaacttgtagtatctttataataggaaaaaatgtgattttaatgaacactccatatactttcaaagtagactaaattcaaaatatttacacttactcattttcatcttcgttgtcaaaagaaaggaggctactatttttaatttgtttttgtgagttctttttgaccgagtcctgatttacttcatcttcatttggcttcttcttttttgagcttgctgttaaacctgaatatttttcatctgagggatgcttgactggttttcga

SEQ ID NO: 673785 - DNA, 661 bp, Homo sapiens
gtatttttaacaaggcacattatcatctcccccacccaaagtggagctattgctaatgaaaaagatacaatgagatgtttatgaaattatctgtagctattaatgtcaggtttttgaaatttactgacctggaagaatactcgtaatgcaatgtcaagtgagaagcaggacaaagaacatttgcaatacagttgtatttataaaattttgtttacacacaaaaaatgtattttgcttaaaaatataatttacatatatatacaaccacacaagggaaataacaaaatgttaatactagctaatttctatagagttggcattttaagtcagaggggtattgatgaatagatgtagtttattaaatttttttctctatttcctaaactttctataaagaacttgtagtatctttataataggaaaaaatgtgattttaatgaacactccatatactttcaaagtagactaaattcaaaatatttacacttactcattttcatcttcgttgtcaaaagaaaggaggctactatttttmatttgtttttgtgagttctttttgaccgagtcctgatttacttcatcttcatttggcttcttcttttttgagcttgctgttaaacctgaatatttttcatctgagggatgcttgactggttttcga

SEQ ID NO: 673786 - DNA, 616 bp, Homo sapiens
gatgcaatcttttctcaaagtaatttggcactagcaaaatgtatctacattttgaccctgtgaccccatactgggaattcacttctcaggaatatgcacacatgtgcaagatatatgyccagaagcatatttctaagaatacctcaggcagactcacccatggtcagaggtctgtagtgaggagatgcccaggctttccaaagagaacttgacgtcagtcaaagggatggccagggtattcttgaagatacaattgcagacaagtagctggccaattctgcctgtgttaggcaactgtagtagggtggggaggagagatggggagagaagatatgcatgagccaaccaaggaccctcagggttcttaggggccccgtcacactccatggccaacttccaggcagaaggagccctttatggcctgcaggaagctcacctctatagagaactcagggtactggaaagacgtgaatacttcagaggccatgatttccttagactccacaatttccgcaatgatgaaacctctgataactggctcatcatctaatatagccaggctgttgatgtaggtcttggagtccaaggtcagagtcacttctgatactgccaaaga

SEQ ID NO: 673787 - DNA, 315 bp, Homo sapiens
cagctggatatcagccgactgctgtgtaaatatataaataagacccaaattagtattattagtgtgtgacggctctctctgccaagctgctgtagtcagttgccttgaattcttttcatcatctttgcaagtctcagttcagtggcgtgatcagtcccaggggccatctcacaataggtcactgcagatgtgaggagaacaagttctctctgcctgttaacagaccacacttctggaacacttttcaggttcctaacttgtaarttttctaaaataacaccagaaaagatatttgccagtcattatttttgcaaa

SEQ ID NO: 673788 - DNA, 577 bp, Homo sapiens
gacccacactccactcttcattgacattgtctcagtgccccaagcacaccacctctcaccagaggcaccaaacttctcccaaagcaatgagtgtgcatgtaatgtcccgctcatgctgatgttaygaacattcacagcaggaaaagagagatggggaatatgcacagggccttccaagaaatccttgaacctgaccactttttcctttttaagcacactttaatttttcttcccaagggcaacactgactctcagactaatgaggctttaggtttctctgcatacacttgacccatgagctgcactttgattgcctccatctccttcctagatagaaataaggagaattaattttggccctcaaagaagatcatatttcagtggctacacatcatggcgtatggcattgtaagcttacacaaagtacagtcatacttattcagcatcttgtatttcataaaggcttatttttatttatttcctttttattcttttattcttttttttttctttttttgagatggagtctcactctgtcacccaggctggagtgcagtggcatggtcttggctcactg

SEQ ID NO: 673789 - DNA, 607 bp, Homo sapiens
taagcacttattaagcagcatgttagacatacagctaaaagacaaagtagacaacagtccttctcatctaggatcttacagtctagctcaccacaggagacccttatggaaattactaaaccaccctcctctgtcctcttccaaccctaatctaggaaaattgtatgacaccatcactattccctctcatgggaagactgatcacttatgggggcaaagagaagacggaaaccaacatttgctgaaccttctggtgtctgacagggacacgctaggtgcttttgtatttacaatctcatttaaccctgcaaaacccctaaaaaattaatgttgctatccctattccacaaatgagaatrctgaagctctgcatgccacggagctataggtagaaccagcattcaactctagttctaaacccaggttcaaaatacagcctttgccattatacacacatgcctacaagtaactaagaatggctcttcacccaaaagatatgtgctggcaagctgatagatagaaacaggagagatgcaagatagagttacttgagtttcaaatttacataactctggagccctggcaggtaatcagttaagtagaacag

SEQ ID NO: 673790 - DNA, 852 bp, Homo sapiens
tcctgtttaatttctaatataatattagattagatatgatatcaccacatcgtaatgataattgataggtgtaaccaacacaaacaaaggcctttcgggtccttcagggatctttgagtgaaaagaggatcctgatcacaaaacacttgtgaatggctgccttaatggaaaggacctggcctttggccccagatggacccaggcttgaatcctaacttctcccccttagctctgagggtgttggcaagcagcctgcctttgctgagcttcagcttgcttgtctgtggaacgcagatcatgctaatccccaaggaggttctgcaggtaggattgcaggagcctcagctggagctatagccgcagctgtggacagccctccagcaggtccactagccaccggctggaaaattgagtgattgcatctctccctttgtcctcagccttagctggtgcaaggaagctgctttagtgaacttccaggaactgagycattcacatagactcactttcctttcctctcctgaagattcatgataaccatcatgcctcccactccttgtgtgctctgggataccagatggcaggaaatggaccatttcaatcacaaagggagctgtcctcaggacagccacaacaaatgccagctcagccggcatgtcctctaaggttgcaggtggaacaagtggagcacaaagcatcagaccaatgtctgcagttccaaagtggggagtcagtgtgcaaatgctggcgcctgcgtgtctccacggttactgacccagataccatgctttccctggggcagtcacctggacttgacctagtcaggtacagcatccacaaggaacagcatga

SEQ ID NO: 673791 - DNA, 596 bp, Homo sapiens
tgctatcttaggaaagtcattttttcctatcaaacaccaccttgtgtcttttgaactccattagcactttttttgtttttagttttctcaaatgacccttacgtaatacttattgcttgtactgttctaagtgctttacatgtattaattcaattaatcatcataacaattcatttccattgtgcagctgagggtcaaggtacacagaggttacattacatgtgagctggagccacaattcaagcctgcctgtctaactttggggcccactctctgacccatcttgctataccgcctacgtagttactgaattttgaacttgttatagacctctgccagactgtaagcgtctgagagcctggccactgtgtctttcttacatttgtattttctgtaaagcctagcttagtattttgtgcacaataggtactcagtaaatgcttgcaaatgaattgaaattagaccacgatttgcacaagtctatctagtgtttaggtctctgacttccatgtcatggtttmaatgagaagacgttcatttgaaaaaaatagaatcccaaatagatataaataatctagggaagcagacaaatgtca

SEQ ID NO: 673792 - DNA, 1128 bp, Homo sapiens
cagcacactgtaggtgtgtatacccaactgcactggagaagagatgcatttatttattcgttgtagctaatattttgccattaaaaagcagtatatcactcatttgatgacaaatataataaaactattaataaaactattattagcatggtattaaaattagaaaaccaatgctaayatttgaatgatatccctccaaataatcatgtgaatatattattttatcttgggtaattaatacgtttttagaatctttttaaaaatgcagacaggcaattttctgatgatatttttaatgttgataatcattaaggaaaattctatttaaccattgtcttgtccttaataaccttgatttgacttcgattttctcattctctgtgcacttataaaccaagactaatgtgatttgctgaacagtagacaaatactacaggaacacagatttaaaatgaaatgaattttccacattattttctggaaaggctgtatatttttaagtgcttggaataaataagtaaaagaaaagaaaccttacataggcatgaattcacttcagtaaaggaaatctatctctaatttaaaaagagaaacatttcctatgataattgtaactaaaaatagcattacaagggtttttagataaattcttatgcttcttaaatagtatcatttttcttttgagcagactggtctattcgttgcccctgatctaactctcatgtgctttcctattaatctgtgtttcatggatctctattttctgatagtaaacaagtaaactaataaaaattcttatttgtcacatttaccaattgtcacattaaacatactcatgatagacagttgtaagctactaatgtgacaacactgaatgcagagttggatagtgatgtgcccaatcacctcttgaaagccagtaaaatctagcttcagcacatttctttctaggcctatgttttaaataatgaagaagttcttacaaatgttaggtttttagaaacatcagcattttctaaccattcaaattatgggactgttattgaatttattaagtaaattatatttttcatgttttgtattttgtttcaggtatcatatctgttatttacatagtaattcaatcct

SEQ ID NO: 673793 - DNA, 1128 bp, Homo sapiens
cagcacactgtaggtgtgtatacccaactgcactggagaagagatgcatttatttattcgttgtagctaatattttgccattaaaaagcagtatatcactcatttgatgacaaatataataaaactattaataaaactattattagcatggtattaaaattagaaaaccaatgctaacatttgaatgatatccctccaaataatcatgtgaatatattattttatcttgggtaattaatacgtttttagaatctttttaaaaatgcagacaggcaattttctgatgatatttttaaygttgataatcattaaggaaaattctatttaaccattgtcttgtccttaataaccttgatttgacttcgattttctcattctctgtgcacttataaaccaagactaatgtgatttgctgaacagtagacaaatactacaggaacacagatttaaaatgaaatgaattttccacattattttctggaaaggctgtatatttttaagtgcttggaataaataagtaaaagaaaagaaaccttacataggcatgaattcacttcagtaaaggaaatctatctctaatttaaaaagagaaacatttcctatgataattgtaactaaaaatagcattacaagggtttttagataaattcttatgcttcttaaatagtatcatttttcttttgagcagactggtctattcgttgcccctgatctaactctcatgtgctttcctattaatctgtgtttcatggatctctattttctgatagtaaacaagtaaactaataaaaattcttatttgtcacatttaccaattgtcacattaaacatactcatgatagacagttgtaagctactaatgtgacaacactgaatgcagagttggatagtgatgtgcccaatcacctcttgaaagccagtaaaatctagcttcagcacatttctttctaggcctatgttttaaataatgaagaagttcttacaaatgttaggtttttagaaacatcagcattttctaaccattcaaattatgggactgttattgaatttattaagtaaattatatttttcatgttttgtattttgtttcaggtatcatatctgttatttacatagtaattcaatcct

SEQ ID NO: 673794 - DNA, 1128 bp, Homo sapiens
cagcacactgtaggtgtgtatacccaactgcactggagaagagatgcatttatttattcgttgtagctaatattttgccattaaaaagcagtatatcactcatttgatgacaaatataataaaactattaataaaactattattagcatggtattaaaattagaaaaccaatgctaacatttgaatgatatccctccaaataatcatgtgaatatattattttatcttgggtaattaatacgtttttagaatctttttaaaaatgcagacaggcaattttctgatgatatttttaatgttgataatcattaaggaaaattctatttaaccattgtcttgtccttaataaccttgatttgacttcgattttctcattctctgtgcacttataaaccaagactaatgtgatttgctgaacagtagacaaatactacaggaacacagatttaaaatgaaatgaattttccacattattttctggaaaggctgtatatttttaagtgcttggaataaataagtaaaagaaaagaaaccttacataggcatgaattcacttcagtaaaggaaatctatctctaatttaaaaagagaaacatttcctatgataattgtaactaaaaatagcattacaagggtttttagataaattcttatgcttcttaaatagtatcatttttcttttgagcagactggtctattcgttgcccctgatctaactctcatktgctttcctattaatctgtgtttcatggatctctattttctgatagtaaacaagtaaactaataaaaattcttatttgtcacatttaccaattgtcacattaaacatactcatgatagacagttgtaagctactaatgtgacaacactgaatgcagagttggatagtgatgtgcccaatcacctcttgaaagccagtaaaatctagcttcagcacatttctttctaggcctatgttttaaataatgaagaagttcttacaaatgttaggtttttagaaacatcagcattttctaaccattcaaattatgggactgttattgaatttattaagtaaattatatttttcatgttttgtattttgtttcaggtatcatatctgttatttacatagtaattcaatcct

SEQ ID NO: 673795 - DNA, 1128 bp, Homo sapiens
cagcacactgtaggtgtgtatacccaactgcactggagaagagatgcatttatttattcgttgtagctaatattttgccattaaaaagcagtatatcactcatttgatgacaaatataataaaactattaataaaactattattagcatggtattaaaattagaaaaccaatgctaacatttgaatgatatccctccaaataatcatgtgaatatattattttatcttgggtaattaatacgtttttagaatctttttaaaaatgcagacaggcaattttctgatgatatttttaatgttgataatcattaaggaaaattctatttaaccattgtcttgtccttaataaccttgatttgacttcgattttctcattctctgtgcacttataaaccaagactaatgtgatttgctgaacagtagacaaatactacaggaacacagatttaaaatgaaatgaattttccacattattttctggaaaggctgtatatttttaagtgcttggaataaataagtaaaagaaaagaaaccttacataggcatgaattcacttcagtaaaggaaatctatctctaatttaaaaagagaaacatttcctatgataattgtaactaaaaatagcattacaagggtttttagataaattcttatgcttcttaaatagtatcatttttcttttgagcagactggtctattcgttgcccctgatctaactctcatgtgctttcmtattaatctgtgtttcatggatctctattttctgatagtaaacaagtaaactaataaaaattcttatttgtcacatttaccaattgtcacattaaacatactcatgatagacagttgtaagctactaatgtgacaacactgaatgcagagttggatagtgatgtgcccaatcacctcttgaaagccagtaaaatctagcttcagcacatttctttctaggcctatgttttaaataatgaagaagttcttacaaatgttaggtttttagaaacatcagcattttctaaccattcaaattatgggactgttattgaatttattaagtaaattatatttttcatgttttgtattttgtttcaggtatcatatctgttatttacatagtaattcaatcct

SEQ ID NO: 673796 - DNA, 632 bp, Homo sapiens
tgttttagttatccattgccatttaaaatgtccatatgggtttgtcagtacagcttttgaaatgtaacaaattaatatctttacttcattctaatttgtggacagatggcatgaacaggactgagtgatgcattgggttatccctcagcttgtcaagacttatttacagtgtaggagccattctccaatggctgattatctgcttcatttagtaggaaggaaattaacctctgatttccatgctgatgactcagcaggtaatgtaccactaatgctaaaaaaaaaaaaaagtcccgaaaagggactggttttcaaatctaacaagacacattaaaaagctaaattgctttattggacccaggagataaaagcaattatttcagtccactagttgggataataaaatttagaaaaaggaatgaaaagattttgtttcctggcagaatcaaataaacactygtattttaagtaatattttctccataattcaataaaaatgcatgccttgtaatatacctggtttagaaaagaagattcagtgcaataaagcacttattttaacttcatatgttagatatcacttaatttttaactgagggtaaagccccccaaaaagacactattagctaaaa

SEQ ID NO: 673797 - DNA, 634 bp, Homo sapiens
ataaactttaacagccacagatctaaggaaacaatatagagggaaaaataactttttgtgcatacttcgtattcctttatttcttattgtgtcgcacaccagtaagccaagagatgaaacaatttaataaatcatattatcttgaggaactatatgcctcaagtcttttttgactctcatagttccacactatgttttgagaaatgcgtttcagccaccaaaagttcaacatattttggatctgtgagtcctatgtttgtcatcatctcaaactctgaaaaatgacaataatatgtttattatttagcccagcgttgttttaggtccagaggttattagattactgtatattgttatatattactttaatcttagttcttagtgcaatatacaattttattcttttttttccagarttggcccagaaaactgttcctaccaaccttttatttctgctgtagtacagatactggtttgatggatttttaagcaaatagttccttatagtgttgtaaggaaacatttttaaagacaaaatacttcagactgtgaatagactaagcagtatcctttctagctataaaattctacgatactctgaccagaggtatcatagcattgatgtttgtaaaca

SEQ ID NO: 673798 - DNA, 640 bp, Homo sapiens
aaaccctgtctctacaaaaaatacaagaattagccaggcayggtggcacacgcttgtaatcccggctactcggtaggctgaggcagaagaattgctcgaacccaggaagcggaggtttcagtgagccaagattgtgccactgcactccggcctgggcgacagagtgggactctggctcaaacaaaataaaaataaaaataaaaataattaatttaattatttaaaaaagaaatatttgaatgcgaaatgacatgtacgtgagtattgtttgaaatagcaaaatactagaaacaacttaaatgtccatcagtgggggactggctaaacaaataatgaaatatcaattcaaagagaggctatgcaaccataaaaaagaatgaagcatgtgcatacatggcatactgtacgtatgtgtgtgcatgcacaatattaaatgatttcacttactgttaactgaaagcagcaaagtacagtacagtgtactcagcagccacttatttaattgatattggcctggcgcagaggctcatgcctgtaatcccagcactttgggaggctgaggcgggcggatcatctgaggtcaggagttcgagaccagcctggccaatatggtgaaaccccatactaaatacacaaaaat

SEQ ID NO: 673799 - DNA, 1383 bp, Homo sapiens
aaaaatgcaaattaggtgctttagaaggagtatgtaatatctgggactttttctaagttggtagacctaaaaaatgttttcaaaaatatatctagctgcatttctactgctgtcattccttaaagctcttcctccaaaaactccatatgaatgaatacatttaccaactcagtgattactaaataatagtactttatacttatacacagtaatacctttcatctaaggatctcaaatgccaatatattagtcatcaccctgtaaggtggatgacatattattcccattattccaatgggaaaattgggccatagaaaactgaggagcaaatgactcatctacaggaattaaatggaaaaaacaggctaggatttctcagcacactttaggagtgaatgaaaacttacaggcttcagttctactgctggccaccattggatttgtaagatccaggatgtgtattgaccacatgtgtccagacccaggcttagggcatctggaatgagagtggtgggctggtgtgtgggtctgaggatctggatgggagactgcattttcttctctgtgcaaaatatggaagtgtgaccttgaaggtgggcttagtctatggccttccccactcctgcttgaactgaagctggagagaatgggcatttttaaatgttacggcatatgctaatataatattatggcattaaataaaaacaagaagagaactgactaaaaccaaaaaaccaaaaatgcaagtgactgatttcctttaattttatcttcttctttccctacatgtatagttgtgaaagcaagattttttaaaagaggaaatcttaatttagatcggaaacagcgtcccctggaaaaggttgcttctttaagcaaggccagaactgccgtggttttcatggtagtgttgactcaggagattggcccccccaacatggagacacatggaaggccttaataccaaacccagttttaaccacccagagagagtgagagccgctcctaaggtgaatggctgttcatcaacgagaatatctagacacactgatgtgtgatacggcaaacttgcaactatgttcaagtaaagtatcrggcagttccacacagcactccttccatttagctgagcagagggtctcagtagactcatctctgaagcttttgaaaaccccaagccaggcttctcaacccatggagactcagaagcagagtatgggtgacacctgggcatgtccctgaggcaccacaggtcgttctaaggggtgccccaagttgagcaccactgatccagagcttgctgaagtgaggccaccggtgcctagtctggcacagccctcctcaggatctctcccctccccctagttggtgaggagacgggaa

SEQ ID NO: 673800 - DNA, 1383 bp, Homo sapiens
aaaaatgcaaattaggtgctttagaaggagtatgtaatatctgggactttttctaagttggtagacctaaaaaatgttttcaaaaatatatctagctgcatttctactgctgtcattccttaaagctcttcctccaaaaactccatatgaatgaatacatttaccaactcagtgattactaaataatagtactttatacttatacacagtaatacctttcatctaaggatctcaaatgccaatatattagtcatcaccctgtaaggtggatgacatattattcccattattccaatgggaaaattgggccatagaaaactgaggagcaaatgactcatctacaggaattaaatggaaaaaacaggctaggatttctcagcacactttaggagtgaatgaaaacttacaggcttcagttctactgctggccaccattggatttgtaagatccaggatgtgtattgaccacatgtgtccagacccaggcttagggcatctggaatgagagtggtgggctggtgtgtgggtctgaggatctggatgggagactgcattttcttctctgtgcaaaatatggaagtgtgaccttgaaggtgggcttagtctatggccttccccactcctgcttgaactgaagctggagagaatgggcatttttaaatgttacggcatatgctaatataatattatggcattaaataaaaacaagaagagaactgactaaaaccaaaaaaccaaaaatgcaagtgactgatttcctttaattttatcttcttctttccctacatgtatagttgtgaaagcaagattttttaaaagaggaaatcttaatttagatcggaaacagcgtcccctggaaaaggttgcttctttaagcaaggccagaactgccgtggttttcatggtagtgttgactcaggagattggcccccccaacatggagacacatggaaggccttaataccaaacccagttttaaccacccagagagagtgagagccgctcctaaggtgaatggctgttcatcaacgagaatatctagacacactgatgtgtgatacggcaaacttgcaactatgttcaagtaaagtatcgggcagttccacacagcactccttccatttagctgagcagagggtctcagtagactcatctctgaagcttttgaaaaccccaagccaggcttctcaacccatggagactcagaagcagagtatgggtgacacctgggcatgtccctgaggcaccacaggtcgttctaaggggtgccccaagttgagcaccactgatccagagcttgctgaagtgaggccaccggtgcctagtctggcacagccctcctcaggatctctcccctccccctagttggtgaggagaygggaa

SEQ ID NO: 673801 - DNA, 1024 bp, Homo sapiens
cctgtaatcccagctactcagggagctgaggcaggagaattgcttgaacccgggaggcagaggttgccttgagctgggatcccaccactgcactccagcctgggcaacagagacaccattctcaaaaaaaaaaaaaawatatatatatatatatatatatatttaaagcatcccccaagacaaaaaaaaattataaaacaacaacagaagtccaacactgcaaacccacttcatacttctgcctcataggaaaaccttaaggacaaagcaagtttttaaagggtttcaagtgtcattgtatcttaggaaagtaactcatcaactcatccatcatgtatgtaccttccagaggacactgaagatgcccagtgtccccagggcatttgtataacaatgactaggaatgtttctccctgtattgctaatgtccacctgccagtgtgatgaaccattttggtcatctgctctggctcctcttgcagccagttctcagcccacgatctttggctaggaatgtttttccaatattctgcccaccagagaggacctttgatgtgctgctgcctgccagccttcaagccaaggggacttccatggcttctgaccctctacctcccttgtgccaaactttgagaagagaggggtatgactgcaccctgcagggctctcccatggagaacaccagtagttaagagaaaccatgagccaggtatttaaaataactgtaaagctgcaataaatagttaaaacactgtgttctttgtattatggaatggaaaaagaagcattttatataagttattccctgtatttgtttatatatgcatggaagagttccaaaataatattttaaatttaaaaattttttaattatttagagagatgaggatctcactgtcacccaggctggagcgcagtggtgcaatgataactcaaagcagccaggccctcctggactcaagtgatcctcttgccttggcctcccaaagtactggtattacaggtgtgagccaccatgcccagc

SEQ ID NO: 673802 - DNA, 586 bp, Homo sapiens
gggcgcagtggcaggctcttgtagtcctagccactcgggaggctgaggcaggagaatggcgtgaacccgggaggaggagcttgcagtgagccgagatcgcgccactgcactccagcctgggcgacagagcgagactccgtctcaaaaaaaaaaacaaaaaaacaaaaaaacaaaacaaaaaaaaaacctcctgtgctmaaacaattctccacagtgacttgcacaaaacagatgtttcataaatgttaaattcattaattaggttagcttaatatcctcatttttaactcagaaaactgaggctcagaggtgttgtcacttgaagtgttaccagtggagggtgtctaggttcttggcattttgaacaaagaattggacaaaaacacacaaagcaaggaaagaatgaagcaataaaagcagagatgtattgaaaacgaaagtatactccacagggtcgcagcaggcccaagcataggggctcaagggcccagatacagaatcttctctggtccaaacccgctagaggtttcccattggccgcttggagctcagctcatgtaaattaagagagggccagccaccagtc

SEQ ID NO: 673803 - DNA, 586 bp, Homo sapiens
gggcgcagtggcaggctcttgtagtcctagccactcgggaggctgaggcaggagaatggcgtgaacccgggaggaggagcttgcagtgagccgagatcgcgccactgcactccagcctgggcgacagagcgagactccgtctcaaaaaaaaaaacaaaaaaacaaaaaaacaaaacaaaaaaaaaacctcctgtgctaaaacaattctccacagtgacttgcacaaaacagatgtttcataaatgttaaattcattaattaggttagcttaatatcctcatttttaactcagaaaactgaggctcagaggtgttgtcacttgaagtgttaccagtggagggtgtctaggttcttggcattttgaacaaagaattggacaaaaacacacaaagcaaggaaagaatgaagcaataaaagcagagatgtattgaaaacgaaagtatactccacagggtcgsagcaggcccaagcataggggctcaagggcccagatacagaatcttctctggtccaaacccgctagaggtttcccattggccgcttggagctcagctcatgtaaattaagagagggccagccaccagtc

SEQ ID NO: 673804 - DNA, 667 bp, Homo sapiens
cagcctcatttccagctcctgtttaagatggagttgctctggttcacacgcctctgatactagaatgcctaggacccggttctcaacagagaagcacggtggcctgagagtcaatgaaacaatggccacagcaggctgacagcccttcctcatctgcatgcgggtagaggatagcaggctcccagcagccacctcagggtttctggcccttatcccagccctaattttaactatatttcttaactttttgggtaattatgggaaaaagtggttaagtggcaccttgtgaaagcctgtttctggtttactcaaaataatacaatgagtaacaggcagagactagaacagaaaatgtgacacaataaagatgagtggtacatcatgctgtcaaaaacagaaaaagaggcgagaaaagaaaggtctgctccttggcccatgatagtcaaggactgttccctacaatgttatcacagcttctggttctgactggagctactggaagttatgccaaattaagtccacataaagcctcagcgaggataaaacagtttctgrgcagaggaatgtgacacagaaccaaggaaatatgactagacctcattatcttggtgcctttgataacatactggagagcagagtggggttttgaatgggctgaaatcttcca

SEQ ID NO: 673805 - DNA, 1683 bp, Homo sapiens
  misc_feature 945, 946, 947, 948, 949, 950, 951, 952, 953, 954, 955, 956,957, 958, 959, 960, 961, 962, 963, 964, 965, 966, 967, 968,969, 970, 971, 972, 973, 974, 975, 976, 977, 978, 979, 980,981, 982, 983, 984, 985, 986, 987, 988, 989, 990, 991: n = A,T,C or G
  misc_feature 992, 993, 994, 995, 996, 997, 998, 999, 1000, 1001, 1002,1003, 1004, 1005, 1006, 1007, 1008, 1009, 1010, 1011, 1012,1013, 1014, 1015, 1016, 1017, 1018, 1019, 1020, 1021, 1022,1023, 1024, 1025, 1026, 1027, 1028, 1029, 1030, 1031: n = A,T,C or G
  misc_feature 1032, 1033, 1034, 1035, 1036, 1037, 1038, 1039, 1040, 1041,1042, 1043, 1044: n = A,T,C or G
cttatttgtacttgatgcaccactataatttattaacagaatagcatcatattcagtctggcttcttgaattagctaaatcacctcccagaatcaaagtctcaaaacaaaaaaggcttccatatttaaaaacaattattttatattcttttgaatcactatgctttctacactggaaattcccacctcatgctatatttgtcagctatagtttgtcaatgtcatctaccttgcttgataggtaaaccatcactagaggaagtacccacacaagttccattatctgtgatccctcagggcatcatatttagtcacggcaccacggcctgatcagccatcatgttaatcccagctacatcaggtgagccagggacatggtaccaagtagaagacagragtaaaaaggagcaatggaagaagtggaaataggcttggatgaaggggaaaggactcttcatggctacagccagtctttcatcagttttctgcgaagggtcaaggaaaatggcagtgactatcccagagataggcacacaaggggtaagccacagataccgggcattatctcctttgctttcttcctaacccatgtttccaatccaaaacaaaggtttcagcacaggcctcatccccagagtaaaatatcacagatcaactcttatctgctttctgagatccctgtgcctcagtatttaaatttttatagtggcaataatctccccgcttccatttcatgggggatgcaaaataaaatgagatagtaacacaggcgaagaggactctggaaagaggaaggactatgtcattcgctattacttactactcacaatacttattattactgctcttcaaatttatttcctgaattgctacactgacctaaggtggccagcaattaatacaatatcaagctcggggggggaagtctagggaaaaatggcaggcnnnnnnnnnnnnnnnnnnnnnnnnnnnnnnnnnnnnnnnnnnnnnnnnnnnnnnnnnnnnnnnnnnnnnnnnnnnnnnnnnnnnnnnnnnnnnnnnnnnnaaaaaaaaaaaaaaacaaaaaaaaaaaaacaaattccaagctcattaactatctaatgatctttaagaacactagtgcaggaaagattgaaaatcaatgttaaatccaaatgtccttgaataagagactggcttaataaattagattatattcatgcaatccagggctactctgcaccattcagtcattaaggggctaagtcttatataggcctccccttccttattccatagcttctgaggttgctctaggtataaacactcagctggaagacaggaaaagagagggaagatgcaacatgagagatttttataggccagactgggaagtggcacatactcgtctgaccaggatttagtcacatggctatatataattgcaagagagattgggaaatgttgtctgtgtgccaagaggtgtaagcagttttagacaccagctacaagtacctgctacagaggtgataggagcttggcagaggaagaacaagagcaggactgaggcttttcactgtgtagatttgtgtgtctgtgtataatttgaacaatgtgaatatataacctattcaaaaaacaaaatatattttttcaaataaaagtcattgtttatataacacttagaacctatatcctaaatcat

SEQ ID NO: 673806 - DNA, 644 bp, Homo sapiens
aatatttcagcaccgttaattagaaagaaggttttattaaccataaggctagcactaacagaccacagagctgttttttaaagtactgtatgccatagctgccctgctttttctctgtctaaaacttcattttgttatacgctcatcaatcacttaagtcattaccgtaaatcctactgttgttaattttactagtatcaccctaatgagacattcctgctataattaaaaatgaattctaactttaaggcattctaaattttttttaatgaatttaraatgatcttgccatgtgactataaatactactgatacacatagactactcatcaagtctgtaagaaaagtagtatcataacatgtccaggtgtgaattatttactggctgcctctgtgcacatgtgcttatgtgtatgcatatttttgtacacatatttaggaattatgtcctttttattgtgaagcctagtatgttttactgaagctactgataaattcttattctttgtcttgccaaaatttaggtggatgtaatataaacaatattactctctgtaagtaggtgtcctagagcaccatctgctggatgcatttggggacttaatgttgggaaacatgaaaattggtacttggttaagacaggt

SEQ ID NO: 673807 - DNA, 1308 bp, Homo sapiens
ttctcttcctttattcctgatgtctcagttttcctactggtgtgattcccttctgtctgaagaaattccttaagcaattctcttagaccaggttttctggcaatgaattctctttgtgttatttgagaatgtctttatctcatcttaatttctgagagttatttttactgggtaaagaattcaagattgacagttttttcttccagsactttaagtatgatgagactctggtctcatgtattgaatgtaaccccatttcttcatgtgtagaatccataaagtaagagtaaggtcacagggctagcagacaaagtatttctgttcccacccttatactttaagaaatgtgtccatttggtgactttctgctacacataagagatctggactcaatgtaacttcatataaactcagaagtaaagtaggcttctgaggactgcattttgaaaaatgttcagggctctggttccatttttctattcatctgtagattctaccctcctctggcttagcttcttggtctcaagatggttgctggtggcaactgaagcagcatgtgtcctcacccaagtccagtaggatagaacaaagctccctccaccctcctgattgccttcagcctgattgggtcacatgcacacccctggaccaataatagttgacaagagaatgacatgcactgattggcttgaacttgggtacttgaaccaatcaatggcaaggtggactgtcttagtctaatagaccctctcctagagcttaccctgctattggcttaccccgtctgcatgggacaggtggagtaaatcccttggacaaaagcaagatttgctagtaaggaggaagcaaggaacagtggtggaaatggatagtgggttggtgggtcagagataatgtgtgtttaccgcactattttcttctttctgggtacccaggaagactacatttcccagttaggttgggaccctgtgattaagatctgaccaagagggatggggagaggtgatgtaaacctcttctgggcatcacttttaaaaacatcttgtgttcttttccagcactctttttctgtggagtaagagagttcttactcttccacagttaagttggcataggttcagtatgggggaagattatctgagctgcatggaactgagatgtgagtgagaaataaacttttatgacattaagcctctgagatttggaagtttatttattactgtagcaaagcaccgcttatctggatcaatacagtacagcagtggttttcaaaatgtagtactcaaaccagctgcatcaggccttgcc

SEQ ID NO: 673808 - DNA, 1308 bp, Homo sapiens
ttctcttcctttattcctgatgtctcagttttcctactggtgtgattcccttctgtctgaagaaattccttaagcaattctcttagaccaggttttctggcaatgaattctctttgtgttatttgagaatgtctttatctcatcttaatttctgagagttatttttactgggtaaagaattcaagattgacagttttttcttccaggactttaagtatgatgagactctggtctcatgtattgaatgtaaccccatttcttcatgtgtagaatccataaagtaagagtaaggtcacagggstagcagacaaagtatttctgttcccacccttatactttaagaaatgtgtccatttggtgactttctgctacacataagagatctggactcaatgtaacttcatataaactcagaagtaaagtaggcttctgaggactgcattttgaaaaatgttcagggctctggttccatttttctattcatctgtagattctaccctcctctggcttagcttcttggtctcaagatggttgctggtggcaactgaagcagcatgtgtcctcacccaagtccagtaggatagaacaaagctccctccaccctcctgattgccttcagcctgattgggtcacatgcacacccctggaccaataatagttgacaagagaatgacatgcactgattggcttgaacttgggtacttgaaccaatcaatggcaaggtggactgtcttagtctaatagaccctctcctagagcttaccctgctattggcttaccccgtctgcatgggacaggtggagtaaatcccttggacaaaagcaagatttgctagtaaggaggaagcaaggaacagtggtggaaatggatagtgggttggtgggtcagagataatgtgtgtttaccgcactattttcttctttctgggtacccaggaagactacatttcccagttaggttgggaccctgtgattaagatctgaccaagagggatggggagaggtgatgtaaacctcttctgggcatcacttttaaaaacatcttgtgttcttttccagcactctttttctgtggagtaagagagttcttactcttccacagttaagttggcataggttcagtatgggggaagattatctgagctgcatggaactgagatgtgagtgagaaataaacttttatgacattaagcctctgagatttggaagtttatttattactgtagcaaagcaccgcttatctggatcaatacagtacagcagtggttttcaaaatgtagtactcaaaccagctgcatcaggccttgcc

SEQ ID NO: 673809 - DNA, 761 bp, Homo sapiens
aggaataagacttcatgcctcgtaggattgttatgagggccaaaggggatgacactggaaagacggtttccgacacctgaggaaggagtggatggactgagaaaattttgcatcttgttgactccttttcctggctgtgcaacctgatatttcgttttttgttttttgtttgctttttttttttttccagacagggtctcattctgttgcccaggctggagtgcagtggcatgatcatggctcactacagcctttacccagcacaagtgatccttccacttcagccctcccaagtagctgggactacaagcatgygccaccatgcctggctaatatttagaaattattttttgtagagatggggtctttctacattgcccaggctggccctgaactgctgggctcgagtgatcctctccctttggcctcctaaagtgctaggataacaggcatgaaccactatgcttggcctgatatttttgaattttagtttcttcatggggttgggaagattgaataagaaactttaaataaaagtgtttgccatggtaccagtagacatttaacacagtgagttggtcactgtgaatccctatgtgatcagtagagaatggctgggtggctggctgaatgaaatggcactatgcaaacactacagcttctcccaggacactgtgccttcctttacttacgttatcttttttagcattcacgcatttctgagagatgagtatcattatccccagtctacagataaggaa

SEQ ID NO: 673810 - DNA, 1403 bp, Homo sapiens
agtctgcaaggcttggaggtggcgccaggggcagctgctgtcttcagtgctgacttctccctggggttcctccagccacagaccaggtcctgcactgtgacgccaccgtggacctcatccccggcatccagatcgtctccaccacccgcaagctcaacctggaggactyccccctggagctgaagatccaggccctggactctgagggtgaggacgtccccctgcctgtttgtcctctgcagcccatgctggattgtccctctcctctgaacctggcctctctgtgttccccactcctctggcatccaaccctgcaggtcccctagagggcagcttcagtcagggaggtgaaggtgctgctggcggaggtgctgaagaggcagaacccacctgtgaggtgggccccaagccctgggtagaatcgagcctggcgctcaggggcccctgcagcagggtctgtgtgctcagagctgtggcggaccctggagccagaccctgctggtcacagcgctggtccttggtgcagcacatcttggggaagccaacattctcagccatgatgagaggctaggagaggctggctggggccatgcctcctgctccggctttcggggcaggttttgcttcctggtccagaccttagagccagtgtgccaggcagggaaggtccttttattctggaggagactgaagcatggagtggggtgagatgcagggtgtacagggccctgcctgtcagcatgggattcaccttttttctctaagcagagggaagctgaggaaagggtgggtgcagaaggtgatgggatcctgtctgcagggtttatggggagtataagctgttcttgggagcagaatgagcaaagtttgagtccaccttgcggccaggcattcctacgggcacttcacacaccctagctcatttcccgtatggcgactggacgatgcatagagaatgaacacacccacacgctcacccgagtgtgcacacacagaacccacacgctcgccagagtgtgcacacacacagagaacccacacgctcacccgagtgtgcacacacagagaacccacacgctcgccagagtgtgcacacagagaacccacacgctcgccagagtgtgcacacacacagagaacccacacgctcacccgagtgtgcacacacagaacccacacgctcacccgagtgtgcacacacagagaacccacacgctcacccgagtgtgcacacacagaacccacacgctcacccgagtgtgcacacacagagaacccacacgctcacccgagtgtgcacacacagaacccacacgctcacccgagtgtgcacacacagagaacccacacgctcacccgagtgtgcacacacagaacccacacgctcacccgagtgtgcacac

SEQ ID NO: 673811 - DNA, 614 bp, Homo sapiens
ttactactttttacaatcaaattgattaaggcattggttgaatatggtacaatgcatccatttcaagtttgaygacatgtctactactccagaaggtcctcttgtgccctttgcagtcagtcccctcgactccctgaccccagcaattaatgatgtattttctgccactatacaggttagtttcacctgttccagaaattcaccttgatggcaccacatagaatgcactcttttcatcactcagcatgaggtttttgagattggcccatgctatctcatgtttccataatttgtcccatcttattgagggtagtactccgttggatgaatatatcacaataggtccattcacctcttgatgcatatgaaccttttccagtttggggactattgtaaacaaagctgctaagaacaagttctttttgtgaatatatgttttgtaaattccacttgtcattctttagtattaactgattttgtaaaatgatgtcaccttcacaagtgcaaaattcattcaaatgttacagaggcctgaagcataagtctacacaatttcctttgttatatttcataattaaggggaaaaaactttatctgggatgttgtttcctatc

SEQ ID NO: 673812 - DNA, 614 bp, Homo sapiens
ttactactttttacaatcaaattgattaaggcattggttgaatatggtacaatgcatccatttcaagtttgacgacatgtctactactccagaaggtcctcttgtgccctttgcagtcagtcccctcgactccctgaccccagcaattaatgatgtattttctgccactatacaggttagtttcacctgttcyagaaattcaccttgatggcaccacatagaatgcactcttttcatcactcagcatgaggtttttgagattggcccatgctatctcatgtttccataatttgtcccatcttattgagggtagtactccgttggatgaatatatcacaataggtccattcacctcttgatgcatatgaaccttttccagtttggggactattgtaaacaaagctgctaagaacaagttctttttgtgaatatatgttttgtaaattccacttgtcattctttagtattaactgattttgtaaaatgatgtcaccttcacaagtgcaaaattcattcaaatgttacagaggcctgaagcataagtctacacaatttcctttgttatatttcataattaaggggaaaaaactttatctgggatgttgtttcctatc

SEQ ID NO: 673813 - DNA, 614 bp, Homo sapiens
ttactactttttacaatcaaattgattaaggcattggttgaatatggtacaatgcatccatttcaagtttgacgacatgtctactactccagaaggtcctcttgtgccctttgcagtcagtcccctcgactccctgaccccagcaattaatgatgtattttctgccactatacaggttagtttcacctgttccagaaattcaccttgatggcaccacatagaatgcactcttttcatcactcagcatgaggtttttgagattggcccatgctatctcatgtttccataatttgtcccatcttattgagggtagtactccgttggatgaatatatcacaataggtccattcacctcttgatgcatatgaaccttttccagtttggggactattgtaaacaaagctgctaagaacaagttctttttgtgaatatatgttttgtaaattccacttgtcattctttagtattaactgattttgtaaaatgatgtcaccttcacamgtgcaaaattcattcaaatgttacagaggcctgaagcataagtctacacaatttcctttgttatatttcataattaaggggaaaaaactttatctgggatgttgtttcctatc

SEQ ID NO: 673814 - DNA, 1022 bp, Homo sapiens
gctcatgatagtttcttcataatagcccaaacgyggaatgatagaaatgtccaataataagtgaaagtacaaacatacatggtatagccacacgaaggaatactactcagtatttacaagacattacagatggattttaaaattacattgatgcatgaaagaaggcagacacaaaagaacacaggtatcatttcatttatagaaaatggttaaaaatgcaaacggacctgaagtgacagtggctccttggggctgagggttgaaaggctgatgaactgcaaaggggtacaagaaactttggggcatagggaatttcctctatcttggttgtgacagtagttccgttagtgtatccatttgtaaacgtgcattgaattacacattttaaagtggtgcagtctgttgtaccgaaattatgcctttataaagttgatttcatcatcttaatttctccatactagcaattagcagctagaaaatgaaattcaataaaacataatagagattaatagccagaatcattacatgcttaacaatacatgcaatgaagcaggtacaaggcccctaaaagcaattggtgagaaaaattaaagaaggctaaataaatatatataatgttcattgattggaagactcaattttgttagcatattacatcaacacaattctgcttattatttctagtaggagattttagagaaatttgaaagctagtttcaaaatgtatttgaaaatcaaagaacctagaataagcaagtcgatattgaagaagcaataagttggaggacttactctgctagatttcaaacctgattttaaagctacagtaattttaaaacagtagtaatggtgtaagtattcataaatatatcaaagtgaaagaatacagactcaaacaatatgcccacttatgtacagttattgattttttttagtagaatcttttttattcataaaaaatctatcaaaaaaaagttttccagccacacacaggaggggtatgggtggggaacggtgtctgt

SEQ ID NO: 673815 - DNA, 1022 bp, Homo sapiens
gctcatgatagtttcttcataatagcccaaacgcggaatgatagaaatgtccaataataagtgaaagtacaaacatacatggtatagccacacgaaggaatactactcagtatttacaagacattacagatggattttaaaattacattgatgcatgaaagaaggcagacacaaaagaacacaggtatcatttcatttatagaaaatggttaaaaatgcaaacggacctgaagtgacagtggctccttggggctgagggttgaaaggctgatgaactgcaaaggggtacaagaaactttggggcatagggaatttcctctatcttggttgtgacagtagttccgttagtgyatccatttgtaaacgtgcattgaattacacattttaaagtggtgcagtctgttgtaccgaaattatgcctttataaagttgatttcatcatcttaatttctccatactagcaattagcagctagaaaatgaaattcaataaaacataatagagattaatagccagaatcattacatgcttaacaatacatgcaatgaagcaggtacaaggcccctaaaagcaattggtgagaaaaattaaagaaggctaaataaatatatataatgttcattgattggaagactcaattttgttagcatattacatcaacacaattctgcttattatttctagtaggagattttagagaaatttgaaagctagtttcaaaatgtatttgaaaatcaaagaacctagaataagcaagtcgatattgaagaagcaataagttggaggacttactctgctagatttcaaacctgattttaaagctacagtaattttaaaacagtagtaatggtgtaagtattcataaatatatcaaagtgaaagaatacagactcaaacaatatgcccacttatgtacagttattgattttttttagtagaatcttttttattcataaaaaatctatcaaaaaaaagttttccagccacacacaggaggggtatgggtggggaacggtgtctgt

SEQ ID NO: 673816 - DNA, 2920 bp, Homo sapiens
acctgttttgttcctctgcttaccctatccaattctctacaccataacatctctgcttatcaagacaacttggattctcaatttgttgagctcaacaaatgcatctcttgagcccctgtgggtaaagcattatgctagttacggcgggtgatacagaggaagcacagaagagtccttagtgacaagagcttaagatttctgctctcagctcagcctgagttgcctgcaggtgagaaaatcagtagccgacacccacaggtgcattctggtgaaagggtcgatgataatgaatagtggttctgacagggctgggctcttaacctcccaaagatgctggtcaaacaggatctggaggatctctgcacatagtgtctgactactgactgtcataagtgaatgtcgccaagtcttggcctggatcccctccctttgtttcatttcacagattacatgttgacagcaggaaaatcaacagaaagaccatgaggctagactccaaaagacttagtaatgctgctgggtgggccatgaatttttaaaaacacatgaagggccttctcagaagtgaagttttaggaaatataaaatgcatagctgggatacattatagtgtactgatagaacaaatattggatatagcagcatctaataacttctggaggaaaaaatatttttcacattactccaattatggccttatatgacaaaaaagaaaaaaaaatccctaagagaaccactaacatccactggttttgtagaaacaggatacccttagtgcacttaaagttggaaaaatggctctgcctttagggccatgcaatgaaacagactgtgtggtagttgacacaggaagagcagagcagagtttataacaatggccacaagacagttaagaaaatgctttggggcttttaagcagcagataaggtgactcagaggaatgttagacaatcgcagaaaagcaacttcagcaaagtttttgattcagtgggcactgcatacttagtccatgctctgcatctgttctttcacagtctgtcccttcatcgacttgggcctacaatgacttttctgggaggggacagggatcaacacaacagcatgcacacacctgaaataaagaatgaatttctgattttcagattttagtctctgacataaccaaagaagtgactaccatagatgttaactttttttttttattattatactttaagttttagggtacatgtgcacaacgtgcaggtttgttacatatgtatacctgtgccatgttggtgtgctgcacccattaactcatcatttaacattaggtatatttcctaatgctatccctcccccacccccccagatgttaactattaataacataaatgatgctcacaaatatgcagatcttataataacgaggtaaaatagcttaaaaaataaatggtagaactgtagtccagggacactaatagaagtgacccataacattacatcatctccacttccaacaaaaatcaggcaaaagaaggaaggagactggcaacccaatgcacagaactatatataacaggcatactagttattggttggttataaaccagtgggaagaaatcttttttatatactgactcttggtttatgtcactgaggcacagcatggaacaatagaaaaccggactgtaagataaattcatttgagtaactggacttttgtaaaccattagacagacatttgagaaaccaaatttaaagctgtttgtgagccatgttagcctatcaaggttgaaattcaggagagatacataacgaaaaataaatgcttttttttttgtgacactgtgatctgatgcattgggaatgtgatcttgtgaatcactcaggtgagcaagcctgacatgagtgggcataaaggtcagtaactgaagaggtaccaaaatgtgctacatgtgtcaattgtgacctaaagaactgaaggcattcaccctcccttgaagtaatgaagctgacacagcagggggctgcaaattccactgcagatcagggtcttgaagctgacatactgaagagtggactcccacttgagatacagagtaggaactactgtttcctacggctactgaatatcccacaaactaacctcctcagcatgccattattaattattttaaagctcttaaaggtctcattttataatagatcacatcagaaggaagaytaataaggatcaggtacaaactcatacttgctggacatatcattgcatatcatcccaaagtttttggcactacataatgttggaatagattcttgaatattaaattttaaactaagggagaacattggcttctaaattttacaactatagtattgcagctaaacacaagtgcagatgggcagccttataactgcatgagtaatcttaaggaaaacttattggtgaacatacagaacatttcacatgcatttgtctacaaaggacaaactcttcccaacctcagaacttgatatgcgttaggacattcctctcccttgggctggtgataaagctccaattgaaatgagaaagattcttcatgcctggtaaatacgcaagtttccaaagatattgccactggccaatcaaacctgaatccaaaaagcatttgtttctagcaggatataagatcaatatgcaaaaataaattgtgtttatgcaattgcacggcagaatttaaatgtaaaaggaataccatttacaataatgtcaagtgtataaaatccataaatgtgaatatgactgaaaattagagcatatttcacggagaacatagtgcaggcctaataactggaaagatattgtttgctcatgtgtaagaatattgttgagatgttcatttcccctaatttgatctatgaattcaatgcaatccgactcaaaatttcagcatgc

SEQ ID NO: 673817 - DNA, 586 bp, Homo sapiens
gccctgtctgtcaactgtagcccctgcataaggaagacctgtggaccagaacatccagcaaaatgaacataggcacagcatcagtaatcagaagggctcctcctagattcaggagtagattagaatcaaagccagttgactgaaaccaccttgtacaacaatcgaacccccaagggcatccaacrggataaaagcatgaaataaaacccatccaaagaacagcaacttcaaaggctgaaggatcattagcccacacagatgagaaacacacacacacacacacacacacacacacaaacaatgtaagaattctggcaactcaaaaagctgtgtcttcttacctccaaataaccacactagttccccagcaatggtacttaaccaggctgaaatggctgaaatgtcaataatagaattcagaatatggataggaatgaaaatcaccaacattcaggagaaagttgaaacccaacccaaggaatctaagcaatacaataaaatatacaggagatagcaaacaaaatgaccattttaagaaagaaccaaactctaaactgataaagctgaaaaactcacttcaagaatt

SEQ ID NO: 673818 - DNA, 618 bp, Homo sapiens
tcactcagactggcccaaacgacctttatgctgaacatagaaagcaacgttttccaatatatggtacatgycccactgtgagacatgagatttagttgcttcacatgttcattttttaaatttatttatttatttacttatttatttatttattgagacggagtcttgctctgtcgcctacgctggagtgcaatggcagaatctcagctcattgcaacctctgccccttgggttgaagcgattctcctgcctcagcctcccaagtagccaggattacaggtgcccaccaccatacctggcaaatttttgtatttttagtagagacggggttttgccatgttggtcaggctggtcttgaactcctgacctcaggtgatctacccacatcagcctcctaaaatgctgggattacaggcatgagccaccgcgcccagacattttttttttttttttttgagacgcagtctcgccctgtcacccaggctgcagtacaatgggaaatctcagctcgctgcaacctctacctcccaggttcagacgattctcctgcctcagcctccagagtagcctgggattacaggcacgtgccaccacacccagctaattctttttttgtat

SEQ ID NO: 673819 - DNA, 597 bp, Homo sapiens
cacacacacacacacatacacacagctaaaatctgaatgtgtcccctcaaaactcataggttgtaattgtaacccccaaggtgatggtattagaaagtgggacctatgagaggtgattaggtcatggaggcaaatccttcatgaataagataaaaaagaggccccagagtgaccgccaccctctccctccctgtgaggttagagtgataagacagccatctaagaggaagcaggcctatcccagaaaccaaatcttctagcaccttcatattgaacttaccagcctccagatctgtaagaaatacatttatgttgtttttgagctacccagtttatagtattttgctatagyaccccaaaaggactaagacacataaacacacacacacacacacacacacacacacacaccccaaagtattgcctcacgccaaatgaagttaaaaatcctgagacttcttagtaattgatttctcattggccttaataacccagagtaaaaagtgaatactaaggagtttttatatccacaactatgagtctcacactctgggatactttctattttgtattgttttaaaaagtaacttacttctc

SEQ ID NO: 673820 - DNA, 597 bp, Homo sapiens
cacacacacacacacatacacacagctaaaatctgaatgtgtcccctcaaaactcataggttgtaattgtaacccccaaggtgatggtattagaaagtgggacctatgagaggtgattaggtcatggaggcaaatccttcatgaataagataaaaaagaggccccagagtgaccgccaccctctccctccctgtgaggttagagtgataagacagccatctaagaggaagcaggcctatcccagaaaccaaatcttctagcaccttcatattgaacttaccagcctccagatctgtaagaaatacatttatgttgtttttgagctacccagtttatagtattttgctatagcaccccaaaaggactaagacacataaacacacacacacacacacacacacacacacacaccccaaagtattgcctcacgccaaatgaagktaaaaatcctgagacttcttagtaattgatttctcattggccttaataacccagagtaaaaagtgaatactaaggagtttttatatccacaactatgagtctcacactctgggatactttctattttgtattgttttaaaaagtaacttacttctc

SEQ ID NO: 673821 - DNA, 601 bp, Homo sapiens
atttataaaaagagaacttctggctgggcatggtggctcacgtctgtaatcccagcactttgggaggctgaggcgggcagatcacaaggtcaggagatcgagactatcctggttaacacggcgaaaccccatctctactaaaaatacaaaaaattagccgggcgtggtggcgggtgcctgtagtctcagctactcaggaggctgaggcaggagaatggcgtgaacccgggaggcggaggttgcggtgagccaagatcgcgccactgcactccagcctgggcgacggagtgagactccatctcgaaaaaaaaaaaaaagaaaagaaaacttgtacaatataataaaggawtatctttgtaaaatgtattgttaatgtaatatataatggcaaataattgattttttttcctaagaaagacaagagaacgtggatgttgatttcacttcttccattcaatattagattgatggctgtagctaatgcaataaggttacaatttttttttaattataaagattggaaataaataaaattttataagtagctttaaaataaggtaatatgcctaacttattaatgaatgtaaaacagaacactgca

SEQ ID NO: 673822 - DNA, 629 bp, Homo sapiens
ttctgagtacatattagtttatctctctcgtcatttgtgcaagatattagtgaccttttattgaggacttataatatattaatattagtactatggggacaggttatttgaactaatcctcttgctaaacacaacaaaaaaatgctggacaaaaatatatttaaaatatcgtcttaaaagcatcttacatttaggtaataaattatcaggccaaaatctaagtgaaggcagaaatcctgagggtagctgagaaccaaagctacttttgccctgatgttgtttgctgaaagggggaaaattgtggcacagttttcatagttttggcttatgggacacctgttaataggaaaccctctctgaagaaaactgagactctataaaggcctagaacccagggtagaataattcagaaccaagtcccctccccaaccaaccctcatccccaaagtaaataaggaaaactgccttggttctggcgctaaggaggaaaagaggaccattctatgagaarctgcaaccacaactggtatttgtgctgtttttcaggccaaatctatcttacctggtgatatggtttggctgtgtccccacccaaatctcaacttgaattgtatctcccagaattccca

SEQ ID NO: 673823 - DNA, 618 bp, Homo sapiens
gcaatccagttgatttttacattgaaaggtcacagttccccctctgagagtctgacggattgtacaacccctccccaggaacctgtatacacagtcaccacccatgaagcagtctcaggctaagaactctattatggaccgtagcccaatctgttcattttacagatgaggcaactgagtccacaggagagcagaacrtgacgtgcgtagaacacaaagttagttagaggcagacctaggacccaggtaaccagaccctcagtcacgtgggccttctggtaagaggccacctctagtgccttcagaaggcagaaacaagctgtcccttgacctattgggattctggtaaaagaaagtatttaatttgaaaaaaaacaaaaaaaagatttagctaagtttatgctttctacctgaaaatgaaggaatttgacagatttctttggtacaaagggaaaatagcccagagtttccgctggaatgtttctgtttactcacagaggcagaatccttgccatgcagcctctcttgtgctgtgcctgaggctagtcttcgatcctctctgtaaactgagggcttccattcactagtggctatagagcttggcagctccgttatgtg

SEQ ID NO: 673824 - DNA, 618 bp, Homo sapiens
gcaatccagttgatttttacattgaaaggtcacagttccccctctgagagtctgacggattgtacaacccctccccaggaacctgtatacacagtcaccacccatgaagcagtctcaggctaagaactctattatggaccgtagcccaatctgttcattttacagatgaggcaactgagtccacaggagagcagaacatgacgtgcgtagaacacaaagttagttagaggcagacctaggacccaggtaaccagaccctcagtcacgtgggccttctggtaagaggccacctctagtgccttcagaaggcagaaacaarctgtcccttgacctattgggattctggtaaaagaaagtatttaatttgaaaaaaaacaaaaaaaagatttagctaagtttatgctttctacctgaaaatgaaggaatttgacagatttctttggtacaaagggaaaatagcccagagtttccgctggaatgtttctgtttactcacagaggcagaatccttgccatgcagcctctcttgtgctgtgcctgaggctagtcttcgatcctctctgtaaactgagggcttccattcactagtggctatagagcttggcagctccgttatgtg

SEQ ID NO: 673825 - DNA, 605 bp, Homo sapiens
accacattttaaaatctatttttgactccccattgtacatatccacatagctaatcacttataatagtgactgttgctgaacatttaacatgatggcatattgatgcatcttattaaaataagatggcaaaatttctgatctaraaccattttaatgatacacacacacatacatatccccaatggattatataaattctagtaagtgtaggggccatactagctttgtttatcagtatttgtaaatccttttcatactgtccaggacaaaggaggcactccaacattttttcttgaataaatgactagttgaattaaagatcaattaagtgatgagactaaagtactaggggcatgattgttttcttgagattttcaaattatacaggtctgcttttctctttatgaagctttatcaaaactttggagctaaaatttcatctctgtggttcaaataataataatagtaaaaactgaccatcacttctgaagtctatacaacttgtgaaggaaaagtatgcaaaacatgttctctcctagggaaagagtctcttcatttctcatcctcatcctaatcatcacctataccacgcatccatcctgtt

SEQ ID NO: 673826 - DNA, 523 bp, Homo sapiens
accctctgtgatctggcatctcccatgccccactttcctccccaacttcttccgtgtcttctttcagtgaagactttcccagctacgttgttggacatggcatattctgcttgacatatatttcctcttcttttattcatttccaccatcttggcacacattatattttacttatttacttcattacgagtccactagaatctaagctctccaaaggcagggatttctggtctatttcccagactgaattctaatgcctaaaaacaggggacaaaagagataaatggcaaataaagaattgccatttgtaattgttataaatgtattcttcctatctattctggaatgtatgccatactatggattttacttccactgcttattttaaaagaaactatttcttttcaaatgaaccattatayaaaaaccataataaaatgaaatgaaatggaaatgtgttagaatttattcattatttttaattactgaaatgtaattatagaacaaagcttcggcatcgttt

SEQ ID NO: 673827 - DNA, 637 bp, Homo sapiens
ttgagtagataaatgcagaatcccacgctgatgatagccccctcctactccaaggtttytgtaagcaagtctataaattaaaaatttgggtttagataatttccatcttcactctgctctatttttattaaattatttttctttaaataagatcatcagaatagcattgagacgttatatgataaatgctagctaataattcttgaatatttaaagcaacttagagttaactattttaaacttcacaagaagacttttagaataattatttttgttattaccattttatagaggaagaaacatacagagatgttaaataacttactattaacctctatctgtctcttaaactggaaaaacatctttaatattacaaataagttaataacaattagaaattactaatgattttagaaattaattaaagaaaaatttaaataatggtggtttcctctaagcttttatagtctaatacattatgcttatctggccagccaaaagataataagatccctacacacacaaaaatactaaagtcatttttaaaatggcattaagccagggggcaaattatattttaaattctgaactattgtagcactatttgataataacattaggaacaaagggttaaaat

SEQ ID NO: 673828 - DNA, 637 bp, Homo sapiens
ttgagtagataaatgcagaatcccacgctgatgatagccccctcctactccaaggtttttgtaagcaagtctataaattaaaaatttgggtttagataatttccatcttcactctgctctatttttattaaattatttttctttaaataagatcatcagaatagcattgagackttatatgataaatgctagctaataattcttgaatatttaaagcaacttagagttaactattttaaacttcacaagaagacttttagaataattatttttgttattaccattttatagaggaagaaacatacagagatgttaaataacttactattaacctctatctgtctcttaaactggaaaaacatctttaatattacaaataagttaataacaattagaaattactaatgattttagaaattaattaaagaaaaatttaaataatggtggtttcctctaagcttttatagtctaatacattatgcttatctggccagccaaaagataataagatccctacacacacaaaaatactaaagtcatttttaaaatggcattaagccagggggcaaattatattttaaattctgaactattgtagcactatttgataataacattaggaacaaagggttaaaat

SEQ ID NO: 673829 - DNA, 1221 bp, Homo sapiens
aaaaagcacactgtaacacatgcccatgtgggctttgggagtcacagacacccatccctagatgctgctgaggggccagagcccaaaagtgctctccatgacctctgtacctgcttgtctgcatgctccccctaagggtttgattagctgggcagccgaaggagtgagccacacagccttgtggtttcttcctgagaggtggataaggaaactctcctgtttcagtagcatactcccttagattgatagctgtaggaaaaaatatttgctaatgtctatagtaataataaaatatcccttgaaaagcaaaagtttagaaattatcgattctatgtttatgtgtctaaaataacttaaaagttattttaattcactaaataattcatgtttataatgctaagtgtcacgtaaggaatatcctattttgtacatagtagaatttatgttttattagcattgcaattattaattttataaaaaagcatgtgatcagaaattcagttgcaattaactaaattttaagacatcaaattttagacaacactaagataatactatagactttaacagctacatacatagtccaatatttgtaaatgtactttctacaaaacacaataactgataacagtgtagacagtactcttttagaaacgattaatacagtatatattttatgtttaaaaaattatataaatttaaataaaataaagatctacttgacattatgttaacccttcatttttctaaaatcgaatcatcgaaaaggacacatgtaggtacacattgtcaartttccattgatttaccatggtctccatagggatagctgtctatcttacatatttgtgcctaagtcaggttttgaaatattttatgccaaggaaattagacagtaatatctcctaaaatctttttaatggtatgttttgtgcaattatttttaatctgttttactaagtttttaaactataagctgtaaaatacttagactatctatatagattgggcctaatctgtttcttatttgaaggaaatagaaatgtctggtttagtctgataaatggcagcctttaataaattaattgcttcagaagtcctagctaaattattttgcaagaaaattcagctctgtaaatagctgtcttaaatgcaccatgacctctagtttttatctgataaattatttcccatccaaacccagtgtcagcagttattgtc

SEQ ID NO: 673830 - DNA, 611 bp, Homo sapiens
tgctgggttctatacacttgttaaaacctaagcagctaacataaggtgccattttacagccgtgtcctcaacagagtccacacaatcctagggcccagtggcactggggctgaggctcaagagaagcaagggctgctgcccctggagctgaggcatgagcaaggcacagactgctgcagcttgggctgaagtgcaacttagacatgggctactgccataggagctgaggcgcaagcattacagcactgaggcctaagctgtgtgttaattctacatgttscaggctagagtgccactggtgaatttagctccaccctcctcagtgtcaaggcagcaaaacagctattactatcccctcacctgaacattcttctggtggctggggaatagtcttgaccttcccaacacagctagcacttgcatacacctttgggatgcctgagaacaaccccacctgacttggcttcataccccacacattccaggacatacagtctaggggccagaggattgctcagcccaatcaatcaccattggcacataaccatttctcctggcagatggaggatgggactacccaccctgctgccaccaccacagtttacacctat

SEQ ID NO: 673831 - DNA, 611 bp, Homo sapiens
tgctgggttctatacacttgttaaaacctaagcagctaacataaggtgccattttacagccgtgtcctcaacagagtccacacaatcctagggcccagtggcactggggctgaggctcaagagaagcaagggctgctgcccctggagctgaggcatgagcaaggcacagactgctgcagcttgggctgaagtgcaacttagacatgggctactgccataggagctgaggcgcaagcattacagcactgaggcctaagctgtgtgttaattctacatgttccaggctagagtgccactggtgaatttagctccaccctcctcagtgtcaaggcagcaaaacagctattactatcccctcacctgaacattcttctggtggctggggaatagtcttgaccttcccaacacagctagcacttgcatacacctttgggatgcctgagaacaaccccacctgacttggcttcataccccacacattccaggacatacagtctaggggccagaggattgctcagcccaatcaatcaccaytggcacataaccatttctcctggcagatggaggatgggactacccaccctgctgccaccaccacagtttacacctat

SEQ ID NO: 673832 - DNA, 672 bp, Homo sapiens
tatattatatataaaatatataaaatatcatataaaatatatattatataaaatatataatatataatataaaatatatattatatattatttataatatgtattacacattatatataaaatatatattttatgtatctaaaatttatatgtaatatataaaaaaatttatttatatctataatttatatataaaatataaaaaatatgtattttatttatatggaaaaatawatatttatgtatattatacattatttatataaaagatatgtatttcatttatatattatatattattaatatattatatattatttatgtataaattatatatttaatttatatattaggaatatatattttatttataaaatatatttttaatttatatacaaaaagtgtatattttatttatatgtagaaatatatatattatatatatttatttatatattttatttatatatattaaatatgttttgtttatgtataaatatatatacatacattttcctgattttatttggggcacacccgggcgagagctctgcctctagaagaaggtgttggatctcttggtggtgaagtgtggcttgtgctgatggcgcaggacccagtggggcagtgggaactggatcttggagtcctggaaccgcttgacggcaggcc

SEQ ID NO: 673833 - DNA, 810 bp, Homo sapiens
ataggtaatttacctctctggtttcccaaaatctgtttatgtaaaggtgtattactttcttgtgtctgcgatagcaaattactacaaactgggtaatttaaaacaacagaaattcactctcatagtctggaggcaagatgtccaccatgaaagtgtgggcagagccacactcttttctataggttcggagggagaacactccttgcctcctccagctgctagtggctgcctgagcattcctgagtgttcctgggttgggaacatagcacttcagtctctgcctctgtgttaatatcaccgtcycctcttctgtcagtcaaatctcacctctgtatctcttgtaagaatacttgtcattggatttagggcccattccaaagatccaggaagaccttcttcatctcaagatccttaacttaattatatcagcaaggacccttatgctaaataaggtaacattcacaggtccaggatttaggatttggacaaatcttttaggagtctaccattcaacaccactacaaggtgtttttcctaacataatcctgtctttattcaactgtctccttcagagtagaagaataatctctttctcagtgtgattacaaattaatatttggaggagggggaagaggaagaagaccaaattaaagtagaatgaatcaaaatacaattatttggttctgagtcctcagctactttttagtgtgaacttgtgaaaatgactgaaacaaaaagaaatggctaatcctgcagtgtgctgacttggatttcaaatagaaatcctctttgattgctaaaacgtaaaca

SEQ ID NO: 673834 - DNA, 593 bp, Homo sapiens
aggtgtgcatcaccatgcccatctaatttttgtatttttagtagaggcggggtttcaccatgttggccaggctgttctcaaactcctggcctcaaatgatccacacaacttgacctcccaaagtgccaggattacaggcgtgagccaccatgcccagccagaatattattctgatcattctgacttgcttcatctgctacctcttaggtagttgtgtgaagtcataattagcaaattctgggtgaaaaaagatttcaagtcacaaagatctctcataactaatgtcaatggaaaattctttctttgagattgccctgattccaktatactgtttaatccacttggcccatctgtgtcatacttgttaaattcttttactaaatctgggcagacataactgtagcactcctttactgcagtagctgtttctagggattgctctgaaggaatttctacttctcagcctctgaacagttgctgaatgaaatatgtgatgcttgccctatgattggaatgtgcttatggcagttgccaaccccatatccttcagctggaggtgggatggcagttgccaaccccatatccttcagttg

SEQ ID NO: 673835 - DNA, 527 bp, Homo sapiens
  misc_feature 426, 427, 428, 429, 430, 431, 432, 433, 434, 435, 436, 437,438, 439, 440, 441, 442, 443, 444, 445, 446, 447, 448, 449,450, 451, 452, 453, 454, 455, 456, 457, 458, 459, 460, 461,462, 463, 464, 465, 466, 467, 468, 469, 470, 471, 472: n = A,T,C or G
  misc_feature 473, 474, 475, 476, 477, 478, 479, 480, 481, 482, 483, 484,485, 486, 487, 488, 489, 490, 491, 492, 493, 494, 495, 496,497, 498, 499, 500, 501, 502, 503, 504, 505, 506, 507, 508,509, 510, 511, 512, 513, 514, 515, 516, 517, 518, 519: n = A,T,C or G
  misc_feature 520, 521, 522, 523, 524, 525: n = A,T,C or G
tggtctctatgtgttcaagtgaaaggaagagtcacatgtctctcatttgaaataaaaaactagaaatgattaagcttagtgaggaaggcatgtcaaaagccacaacaggccaaaagctaggccycttgtgctaaagagttggccaacttgcgaatgcaaaggaaaagttcttgaaggaaattaaaagtgctactccatcccgttgtgcacatgtaccctaaaacttaaaatataaaaaaaaaaataagtactcttaaagctagcactgttttgatccccatcactgaagtttgcaacatttaccttatttgttcaatatagtgcattttaacagaacatgttagaaaagacagattactgccacagatgaaaactggatggttttcttttgtttgttgaaaaccttattactttgacagcttgagnnnnnnnnnnnnnnnnnnnnnnnnnnnnnnnnnnnnnnnnnnnnnnnnnnnnnnnnnnnnnnnnnnnnnnnnnnnnnnnnnnnnnnnnnnnnnnnnnnnnat

SEQ ID NO: 673836 - DNA, 527 bp, Homo sapiens
  misc_feature 426, 427, 428, 429, 430, 431, 432, 433, 434, 435, 436, 437,438, 439, 440, 441, 442, 443, 444, 445, 446, 447, 448, 449,450, 451, 452, 453, 454, 455, 456, 457, 458, 459, 460, 461,462, 463, 464, 465, 466, 467, 468, 469, 470, 471, 472: n = A,T,C or G
  misc_feature 473, 474, 475, 476, 477, 478, 479, 480, 481, 482, 483, 484,485, 486, 487, 488, 489, 490, 491, 492, 493, 494, 495, 496,497, 498, 499, 500, 501, 502, 503, 504, 505, 506, 507, 508,509, 510, 511, 512, 513, 514, 515, 516, 517, 518, 519: n = A,T,C or G
  misc_feature 520, 521, 522, 523, 524, 525: n = A,T,C or G
tggtctctatgtgttcaagtgaaaggaagagtcacatgtctctcatttgaaataaaaaactagaaatgattaagcttagtgaggaaggcatgtcaaaagccacaacaggccaaaagctaggcctcttgtgctaaagagttggccaacttgcgaatgcaaaggaaaagttcttgaaggaaattaaaagtgctactccatcccgttgtgcacatgtaccctaaaacttaaaatataaaaaaaaaaataagtmctcttaaagctagcactgttttgatccccatcactgaagtttgcaacatttaccttatttgttcaatatagtgcattttaacagaacatgttagaaaagacagattactgccacagatgaaaactggatggttttcttttgtttgttgaaaaccttattactttgacagcttgagnnnnnnnnnnnnnnnnnnnnnnnnnnnnnnnnnnnnnnnnnnnnnnnnnnnnnnnnnnnnnnnnnnnnnnnnnnnnnnnnnnnnnnnnnnnnnnnnnnnnat

SEQ ID NO: 673837 - DNA, 625 bp, Homo sapiens
attcaagcaattctcctgccttagcctcccaagtagctgggactacaggcatgtgccaccacgcccggctaattattattattgttattatttgtatttttagtagagacagggtttcactgtgttagccaggatggtctccatctcttgaccttgtgatccgcctgcctcggcctcccaaagtgctggattacaggtgtgagccaccatgcccagcccctcgctgcattttcaaaataaaatcaaattgaatttcttttcatttgaaacacacaccataaagcctttttgcgacagtgagggcaaattgggccaggaagccccatagtgacctaaggcttggagggagtcccccgcccccgcctccctgctgggttgaacacaagagcctaaaactgaccccaccctgttcgttgactcttgttctccccactaactccctcccacccaagttcctcagaaacagaggtggtrggatccctccaggcagagacaggccccgctgatgagccatctgtgctcaggaaacggagacagagggcaggatccagccctgtattgagctgaaccctccttcaagcccgttttttctcaggaatgggaaatgggggtagggagtgcagca

SEQ ID NO: 673838 - DNA, 2395 bp, Homo sapiens
tgtgaaggtcaagtgyggtgtttaaccttgatcctagggctttataggctggcccctttcccatgatgcttcccctggggtgggctgcccacatatacactgccctccttgcccttgagaggtgagcacgtacagtgtgtttatgacagtgcatacatgcccatcgaaagctttcttctcttttccagtggtgtgcccccagaaggtcatactctaccattttgtctcttaatgtgcatgcccaggaagttccctctctctggtatcggcattcaattaacacttcagtgcaacaggtatggaccatgagggaatggtcaaaccatcacccaacattcctagtgaatgggggagagccctctcctgccctgcttatgcctgtctaactacctgtaacaaatacagtgctgaaatctagggtagtggtagtgaaattaagatgattaatagatttgagaaatattttggagataatattgttatgtggagattgaacgctgagtttgatggtgggaatatatttaatttggcctccagatttttcctggagcagctggttttattaatgaaataatttaactgagatttagtatcatctgaaatatttcctccacagagatatattttttatccctatctaaggggactctgtccacctctaggctcacttgtaatttacctcatcctgttttactttctatacaacacttatcactgtttgaaatcatcttatttacttagttgtaaacatgtctattgactttcacttcctgcctgaatgtaactttcctgaccagagggcccctgtttgtcttgttaaatactatattacaagcacctgacaaagagaatggcctacaggaagaactcaataaatctttaaatgaaagcaagaaagaaaacaagatgactagtgaggaagaaagaaaaaagggaggcagccagtgaggatggaaggatgaaccaaagaaaggaagaaatgaagaaaggaagaaatgaaggaaggaagagaggcaggagaaagtgagactattacttacagtctaaaaattagagaaagtttcagtgcaaagacacaagagaactataatgagcacagagtaattgcactactctgttggagctcaaaaaccaatacccccaaaatatggcattttggcatgctgatctaaagaagtctcaaggtctctctgacttcccctgcctctaccacacccatcatctctcccaaagaggccgaagttcttttatctgactaagatctagacccacataggaaaacaactgttcttccttcccctttctgatatcaattgcagagaaagaccaagatgcgaccatacctgagtagaccttttacaaatataatgtccgtctggaaggaccatttaaattccaaagaaaaccacttacaagttaatctctgttccctatccaatcattctacctagcaatcatttatttctcctcaatagaattcttcttctcctccctcccataatctgttttgccagaatccaagcaaaatggtgtcaaagtctgggtaactcattgggaagttgggtcttcattctgaaggctgaaaaaaagtctgcatacatgttacattatacatgtatacacattaaataaatttgtatggtttttgttctattggtcaacctgcctcatgccagtgaattttcagtgaacatttagggggccaatggccatgacccccacaattccttaaaggatttaaagtatattccatggtgtgtgtgtttgtgcatgcagacacatgtggatgtagatgtgtgaataaatagtaaaaaactaatgacactttcataacttacttgtatttgaatcaccctaaccaattttttaagttatatttataggtaaaatatgaatctacactggaatcatgatacaagttgaccacaatgatcaaagcaaagtctggcactaaaacaaaaggaggattagttcatcaaatgagattcatgcaaatcagggatcttacccaggctttaccaataattaccaggatacaagtaatcatgaggcataagcaaagcaggtttcctagatatgacattaattgggaaattaagactcacaatattttgtagccacaaaggtaaacatacaacgccttcattgcattacataactgtggtagagataataatgtttgttctaccgcatatcaattaaaattacaataaaactctccatttcttcccaacagaaatggctttttgcaggtatcacatattctgagagactgggtggtaattagggaatgaatcttttgcatatgaaactgtcatgagtggtgcaagattagagacaactgggtccacacatgtttgtatccttccacaatgtcaggcttttactgatgcta

SEQ ID NO: 673839 - DNA, 609 bp, Homo sapiens
tggctgaattggagaagaatttatttcaaataaggattttatagcaagagcatattgaaaaaggcaggtaggttttctaaaaacaagttctgactgctgagtattgcgtttatcaaatcatggaagttttaaagacgcaatgtctaacagtctcattttggcaaaaaaaagaaactaaagagtattctgaaactcaaatataatcactcaatttttagaatgttttatttgtcatcatgtttaaatatcaagtctgtactctcagataaaccattkatataataaatttgcaggtaaaaacaatgctgtataacacagcacgaatgtaaaatgcttatagacaattttaaaggcacttcttacaaagattattcagtaaattatgtccacagaaagtactgtcttcattgcacaatattagtggaaaatgctacattttattcttcgtgagtatcgcattccatgggttattaccaagaccatcaatatctggaaatgcaaagtattacttgtagtactgtgttgaaagttacttgataatgtctgattatgtgtgttcatgtaaaactaaaaaatcttgatggatctatagtcagactgctgggctga

SEQ ID NO: 673840 - DNA, 609 bp, Homo sapiens
tggctgaattggagaagaatttatttcaaataaggattttatagcaagagcatattgaaaaaggcaggtaggttttctaaaaacaagttctgactgctgagtattgcgtttatcaaatcatggaagttttaaagacgcaatgtctaacagtctcattttggcaaaaaaaagaaactaaagagtattctgaaactcaaatataatcactcaatttttagaatgttttatttgtcatcatgtttaaatatcaagtctgtactctcagataaaccatttatataataaatttgcaggtaaaaacaatgctgtataacacagcacgaatgtaaaatgcttatagacaattttaaaggcacttcttacaaagatyattcagtaaattatgtccacagaaagtactgtcttcattgcacaatattagtggaaaatgctacattttattcttcgtgagtatcgcattccatgggttattaccaagaccatcaatatctggaaatgcaaagtattacttgtagtactgtgttgaaagttacttgataatgtctgattatgtgtgttcatgtaaaactaaaaaatcttgatggatctatagtcagactgctgggctga

SEQ ID NO: 673841 - DNA, 1764 bp, Homo sapiens
ttaagataaaaatgacttctttatcgccattaagcttctaaatttgcaatctataggcatctaaatttgtcttccacagtctagacatcctgaaattggagcaaagtcaattatacttctaggttaactgaactttctctcaaataattccttgaatactaccatgtttaacaaaacatgctgttgtatgtttcatggtgtcaggggaagattgttttttattactgttatatccgtagctcctagagtaatgctcaaaatgtagtaagtatataaaaattgtatgatggatggcaaactaggatatgatgcaattatttactatggtccctattttcaacctttcataagcacaatcaagtttagttcttaaacgtttctcaatccagccacttctctctggtctgtacatgtaccttaatccaaaattctacctgtcttaataggactgtgaaataacctcttaaagatctttctgcctcaagactggcccttctccatactattctccacaggacatccaggatacacaaatatgctcactcctaccccgctgccaccctgcctcccattactcttggacatgagtaccaatagagttggtacaaggcatagtatataatctatagcattatttgatggacagaaaaaaaaacactcactgattcttgatggagaaaccctcttagaattctactgacatttgaaattctcatttgatgctgacatcttcacctgtggacccactgttcttggagaaaagaaaaaagctactggaggctcatttctgggaataggcccagattggctgaaaaacattgagtcggtgcttacaggggcctattttttctaccctgaaatatcaaagactatgtccagatcatcaagcttcttggtggattcccatgggttcatctcatcttgctgttggataattaaatttgggaggtggtggaactaggraagaggatgcctcttagccagctggggttataaaccacttaaatctgccttgagcctaggaagtgaagccactcccagaagtccaggattgagggtttgtgagaccatgtatgggtttggggacaaatcttaaggtgtaatagtgaattccttagcctaatagtaattctctctcttctcctccctccctttctttctctcaactagcattgggaaggcaggcattgagaaattcacattataaatcaaaatctgttgaaaaagaatacttctatggactttgggagaaaattttcttatctgaaagaaactatagttaaaattaatcatccttcctggctggcatctgggggaaccctatgagactctgaagaatatgaatctactgctctgtaagaatattcatgatcatgaaaacaactatcattggaatacacaaagttaatctgtgtgctcaaaataggaggtactaagaacctagatttttatagtctccatgtatatttgagtctcactatatcgtttcacttgctccctttatcccattaattgtcttctttctgcttgtgattgttaatactgagtgtcaacttgattggattgaaggatgcaaagtattgatcctgggtgtgtctgtgagggtgctgccaaaggagattaacatttgagtcagtaggctgggaaaggcagacccacccttaatttgggagggtgccacctaattagctgccagcacgaacagaatataaagctggcagaaaaacatgaaaaggccagactggcttagcctcccagcctaca

SEQ ID NO: 673842 - DNA, 1876 bp, Homo sapiens
taaaggttagttagtgaaatggaacagaatagaagaaaaagcctgagaaagaaacagaaaagtgctatttggttagttaaacctcagacatgccctcagtcagtcacaactgctctaggtattttagacattaaaatgtataaataaacttgttgagatgggccgtgctatggttggattttaaaaattaagtatattttatgccgttatatagtcttactgagtttacatagtacttttaaaatgttgtcaataaaagctccaaagccatttgaccttgaaaagatttcagtactcccttactgcaaacaagataagtctctttacacctgatagtttctgatgccaattctttaattcttctggaaatgatcgttgttagaatgaatactgatatgtttgggccctttcatcttgggtttattttgcagagtgtagttatcttataactattgagccactcaggaaggattcttcttgactagagttctgttatacagaaactcctaatcctctaatctcacattgatacaagtgctttgcataaagtgggtgtagtgctcgaaagaatttatttataacctgccagataggtttgtattgatttttttcaaagaccttcttccacattgttaaataatttgagcagccagcagtgcgccctgtagcatgcttcagcgtccgtgccataacttctccctagatggggagcggggctgcagaaacctctgtgggctgacctttgaagaaagacatttcacgttgcttatatgagccaggagagagaatttgttttcctgaagtgcctacatttctttttttttttttttttgagatggagtctcactctgttgcccaggctggagtgcagtggcccaatctcggcttactgcaacctcctcctcccaggttcaagaaattctcctgcctcagcttcctcccaagtagctgggattacaggcacctgccaccacacccggctaattttttgtatgtttttaatagagacagggtttcaccatgttggccaggctggtcttgaactcctgacgtcaggtgatccacctgcctcagcctcccaaagtgctgggattacaggtgtgagccaccgcgcccggtcctaaattccttttttaaaaacaaaactataatgtgtggtaaattgtagtcgtaatagcaaattcttaaagtgtcatcacaaacgtcaccaagatgtaatcagatgttttgtttacctttaagggttttttttcccttataaaaaaawttaaaattcattatggaaaacttggaagaaaggtgaaagaaaggggaaactatcacccattgtcatgctacctcacacttaaaatatttctgagcagctttctttcagatcccaggctgcacagcccccatctccttgtcagctgctccaggcatgcagcattcagaaataccctcatggcccattataattaaagatcgacagtctcctatgatgtttcgcacacatgtaatggctccaaacctccctacatgttgtaatcatgtatgaagtattttaaaaatatatagatccttggctttgcctcagaccttctgaatcagaatctctggatttagggcccatccatttttattggaaaaaagaaaactcccagccttctgatttacggtgagcttgggaatcactgccttcaacagcagattggatttttgagagagggtgacaatccacagccctctgggtagtctagggcagcttaggtgatgggcaggctgcccctggaatataaagaaagcctagctgataccaggtgcatctctttggaactcatcttgccacattcatacagataggagtctccgagctctttttaggaggctccagaaa

SEQ ID NO: 673843 - DNA, 642 bp, Homo sapiens
tccctactttgttctttctctatttctcaactttattgttctcctctagctttgctttactagcatgaatattcaactaaatacatataaataaatacatacaaaataccagttttatttgtagaatatagtcttatgtttcctaattttccctcaatacaaaaaacagcaaattaagttgattttcatttccatgttgtctacattaatttaagtccctatgggcattactgctrtagagaaaaagatctctgccactgatttaaggaatgaacccaaaatcacaaaaggcagcccagctaaaaccagaacaataatggctcttcaatgggctcatgtttctggaggctgccatattactcaggcttcagcaatcaggagctagatttccatgtggacacttaacggtgatttacagagaagaaagcttgaagtcttaagttcccacaaaagaaagtaaaaacccgagaagttgaatggtcatgttaagtgatccctggttttgatccacaggaatttcacaaggcccccatttcagtgtgatccacatgcacatccaggggtatacttacactatatgtgcaaggtcaagtggtttctctggttgctcaggaaaaacaggatgcgggggttctctcgtgg

SEQ ID NO: 673844 - DNA, 642 bp, Homo sapiens
tccctactttgttctttctctatttctcaactttattgttctcctctagctttgctttactagcatgaatattcaactaaatacatataaataaatacatacaaaataccagttttatttgtagaatatagtcttatgtttcctaattttccctcaatacaaaaaacagcaaattaagttgattttcatttccatgttgtctacattaatttaagtccctatgggcattactgctgtagagaaaaagatctctgccactgatttaaggaatgaacccaaaatcacaaaaggcagcccagctaaaaccagaacaataatggctcttcaatgggctcatgtttctggaggctgccatattactcaggcttcagcaatcaggagctagatttccatgtggacacttaacggtgatttacagagaagaaagcttgaagtcttaagttcccacaaaagaaagtaaaaaccygagaagttgaatggtcatgttaagtgatccctggttttgatccacaggaatttcacaaggcccccatttcagtgtgatccacatgcacatccaggggtatacttacactatatgtgcaaggtcaagtggtttctctggttgctcaggaaaaacaggatgcgggggttctctcgtgg

SEQ ID NO: 673845 - DNA, 1289 bp, Homo sapiens
gacatggtcaagagacggttgaggtaattctccaggtatttctgaagtggagatgagagagagagagagacagatgggaccgagccatttgcacctccaatgccttcccggaggacctggcatctggtcccacctgtttgctggctgcatgtctggtggagccctcaggacctgcccggggtagagagggcatctctctgttgcctgcatctcgggctggagaataggcaacggcaaatctgtggaaaggatggatgaaggtcaggtaagagctgggaggctgggtgctctggttcctgaaaacactggagatggggctyggaggaaaagaagaggcctggaggtggccaggcgtggtggctcacgcctggaatcccagcacttggggaggccgcagcaggtggatcacttgagctcaggaatttaagaccagcctgggcaacacagcagcaccccatctctacaaaatatacaaaaattagttgggtgtggtggctgtggtcctagctactctggaggctgagacgggaggactgcttgagcccaggaggttgccatgagccaagatcataccactgcactctagcctgggtgacagagggagaccttgtacaaaacaaaaacaaaaaacaaacaaaaggcctagaggctggcaaaacggaggccccctaccctgggaatggagactagaaaagggtgaggctgccaagagcattttgggcatcccgcccagctgagatgctggcacagaaccatggacagggaaagctgagcagggaaagtttcctggtaactggggtcaggggaggcagcacagtggccagagttgcagggaggaaaggttgtggccccggggtgagacagacagaaaggagggtggggagcacctgccctctacaggaagcagtccggtcgccctcaccgagccagagggagcagactcatcaagactttgtgtctcaggaggtcccgatgcagctcctgaaaatgacggtatttcttcttggttgtccaggaaaagtcgccgtgagtcaagcggacagaatacagagtgcaggttcccacctaggggtatgaggaactgaatggatgtcccctgcgtgggtccccgcctccccactctggccagccctccttttgccccttccctggggccagcccagccaccttggatccattccgggccgccctccctttccccctccctggggccagtctggccaccttggatccgctggtatatctttcggtgcccaccacctgggctgtgacagggaccccaggtgcga

SEQ ID NO: 673846 - DNA, 1289 bp, Homo sapiens
gacatggtcaagagacggttgaggtaattctccaggtatttctgaagtggagatgagagagagagagagacagatgggaccgagccatttgcacctccaatgccttcccggaggacctggcatctggtcccacctgtttgctggctgcatgtctggtggagccctcaggacctgcccggggtagagagggcatctctctgttgcctgcatctcgggctggagaataggcaacggcaaatctgtggaaaggatggatgaaggtcaggtaagagctgggaggctgggtgctctggttcctgaaaacactggagatggggctcggaggaaaagaagaggcctggaggtggccaggcgtggtggctcacgcctggaatcccagcacttggggaggccgcagcaggtggatcacttgagctcaggaatttaagaccagcctgggcaacacagcagcaccccatctctacaaaatatacaaaaattagttgggtgtggtggctgtggtcctagctactctggaggctgagaygggaggactgcttgagcccaggaggttgccatgagccaagatcataccactgcactctagcctgggtgacagagggagaccttgtacaaaacaaaaacaaaaaacaaacaaaaggcctagaggctggcaaaacggaggccccctaccctgggaatggagactagaaaagggtgaggctgccaagagcattttgggcatcccgcccagctgagatgctggcacagaaccatggacagggaaagctgagcagggaaagtttcctggtaactggggtcaggggaggcagcacagtggccagagttgcagggaggaaaggttgtggccccggggtgagacagacagaaaggagggtggggagcacctgccctctacaggaagcagtccggtcgccctcaccgagccagagggagcagactcatcaagactttgtgtctcaggaggtcccgatgcagctcctgaaaatgacggtatttcttcttggttgtccaggaaaagtcgccgtgagtcaagcggacagaatacagagtgcaggttcccacctaggggtatgaggaactgaatggatgtcccctgcgtgggtccccgcctccccactctggccagccctccttttgccccttccctggggccagcccagccaccttggatccattccgggccgccctccctttccccctccctggggccagtctggccaccttggatccgctggtatatctttcggtgcccaccacctgggctgtgacagggaccccaggtgcga

SEQ ID NO: 673847 - DNA, 574 bp, Homo sapiens
taaccaatttaaagtctagaaaccactggaaaattttccatttttcccagtttatatcctaggagaaagcaaatctaattggcctggacactcagcttatggtacagtttacaaatttctggtaacttccactgctttaaacgaagactgaaattaccaatgtctcaaatagagtagaagtttatttcttgctcacaaaatagtaacgaggctgccgggcccggtgcttcrcgcctgtaatcccagcactttttgggaggccgaggggagtgggtcatttgaggtcaggagttcgagaccagcctggccaacatggtgaaaccccgtctctactaaaaatacacaaattagccaggtgtggtggtgcccacctgcaatcccagctagttgggaggctgaggcaggagaattgcttgaacccaggaggcagagattgcagtgagccaaggtcgcaccactgcactccagcctgggcaacagagcgagactccgtctcacaaaataaataaataaataaatagtaaggaggcaggtggcccacagcggcactcctgctcttctaggttgttcggga

SEQ ID NO: 673848 - DNA, 574 bp, Homo sapiens
taaccaatttaaagtctagaaaccactggaaaattttccatttttcccagtttatatcctaggagaaagcaaatctaattggcctggacactcagcttatggtacagtttacaaatttctggtaacttccactgctttaaacgaagactgaaattaccaatgtctcaaatagagtagaagtttatttcttgctcacaaaatagtaacgaggctgccgggcccggtgcttcacgcctgtaatcccagcactttttgggaggccgaggggagtgggtcatttgaggtcaggagttcgagaccagcctggccaacatggtgaaaccccgtctctactaaaaatacacaaattagccaggtgtggtggtgcccacctgcaatcccagctagttgggaggctgaggcaggagaattgcttgaacccaggaggcagagattgcagtgagccaaggtcgcaccactgcactccagcctgggcracagagcgagactccgtctcacaaaataaataaataaataaatagtaaggaggcaggtggcccacagcggcactcctgctcttctaggttgttcggga

SEQ ID NO: 673849 - DNA, 598 bp, Homo sapiens
tgtgatctcagcccaggccatttcccagtgcgggagacccaccagggctcaaagaatttaggttgttccataatgatacggggagcctcggtgtttactgcttcagtggggagcatgggggggccacgccacggggtctggagttgtggtgtggtggtggcttgtgctccatccagagctgcctgaccccgtcccaccccacagtgagacagtacgccgacatctgcctcttcagcaccgcccagtacaagtgtcctgtggctcaactcgaacaagagtgagtatcgggagagacccatgttccaatctaggggagaagagcaggatcaggagaatgtgaggtggaggaagaattcttcctgagccatstccacctttttttttttttttgagatggagtttttgctcttgttgcccagcctggagtgcaatggggcaacctctgctcactgcaacctccacctcccgggttcaagcgattctcctgcctcagcctcccacgtagctgggactacaggcatgcaccaccatacccggcttatttttaatagagacgaggtttcaccatgttggccaagctagttgcgaacccctgacc

SEQ ID NO: 673850 - DNA, 841 bp, Homo sapiens
ttcaagaggagaccctttggggacaaggccgtttctttgtttctgagcataaagaagaaaataaatcttttactaagcatgagtgtgtgttttctctgtagtgtttagagagtgtatggtgtgcttatccatgattctgttagcttgtgggggaggacccagtctctcttctgcacccaaaagccacctgacacggaggctatcagcaaatgtttattggatgactgtgctgtggctgtgttccagggtaaacatcaaaacttgacttagtccaaactcaagggtgaggcttgataaggccacaaagtgaacttagtcatttctagaggtcacagtaactaaactaactcgcctgcacacagatgctcacgggagctagccagggcaggcccttccctgttgcggccgacgcacatgaccacctgtgacctgttgtgaccgagtcrcgttcatttccactgctccttatggctgctcgagccatctgctcctgtggctcagcggtgccacaaccgcaggcctcaccagacaagccacgtgacgtctctggagtctggtacctacattctaacacagaagctgaggcttgggcagcaagaacgtcatgctgccgtgggcccctgtcctagggaccacatcttagtgctgttcatgggatattcatcagggactccctgaggcttgaccgaagccccaggctgggctggagggaggtagcatcactccacgaacatttctcacctccatcatctgcttccactcctgaagcccaatctttctcctaaagctccttcatgcattccacaaacaatctggatttgagtccctacaaagtaccagg

SEQ ID NO: 673851 - DNA, 841 bp, Homo sapiens
ttcaagaggagaccctttggggacaaggccgtttctttgtttctgagcataaagaagaaaataaatcttttactaagcatgagtgtgtgttttctctgtagtgtttagagagtgtatggtgtgcttatccatgattctgttagcttgtgggggaggacccagtctctcttctgcacccaaaagccacctgacacggaggctatcagcaaatgtttattggatgactgtgctgtggctgtgttccagggtaaacatcaaaacttgacttagtccaaactcaagggtgaggcttgataaggccacaaagtgaacttagtcatttctagaggtcacagtaactaaactaactcgcctgcacacagatgctcacgggagctagccagggcaggcccttccctgttgcggccgacgcacatgaccacctgtgacctgttgtgaccgagtcgcgttcatttccactgctccttatggctgctcgagccatctgctcctgtggctcagcggtgccacaaccgcaggcctcaccagacaagccacgtgacgtctctggagtctggtacctacattctaacacagaagctgaggcttgggcagcaagaacgtcatgctgccgtgggcccctgtcctagggaccacatcttagtgctgttcatgggatattcatcagggactccctgaggcttgaccgaagccccaggctgggctggagggaggtagcatcactccacgaacatttctcacctccatcatctgcttccactcctgaagcccaatctttctcctaaagctccttcatgcattccacaaacaatctggatttgagtccctacaargtaccagg

SEQ ID NO: 673852 - DNA, 2046 bp, Homo sapiens
aaatgaggtctcactatgttgcccagactggtgtcaaactcctggcctcaagcaatcctcctgccttagcctcccaaagcactgagattacaagcaagagtcactgtacctggctttcttatgacatttaataagtcaagacctttttctttttttttctttttttttctgagatagggtctggctctgtcacccaggctggagtgcagtggtgtgatctcagctcactacaacctccgcttcctgggttcaagtgatcctcccacctcagcctcccaagtagctgggactacaggtgtgtgcaaccacactcagataatttttgtatttttagtaaggacaggatttcaccatgttggccaggctggtcttcaactcctgacctcaagcgatctgcctaccttgacttcccaaagtgctgggatgacaggtgtaagccaccatatccagcccaagacttttgcttttagttactataaatctattaaacttgtcaatttacctctctaaattaaaagaagtagataatcttataaatgtatttaacaaggaatttgacaaggasaaaatcctccaaaaataaagctatcaagaaaaagaggtcttggctgggcatggtggctcatgcctgtaatcccagcactttgggaggctgaggcaggaagacagattgaccccaggagtttgagaccagcctgggcaacataatgagaccccaactctacagaaaaaaaaaaaaaagaaagaaaaagaggcttattgaaaataaagaaaactattatttatgttcctataatataccagcactgtggtaggtggtttcatattatcccatctaatcagcaaactaaatctgctaaagcctattaaaattttagataaacttataaacacatacataccatgtttgataaagctactctgtctttaggaacaaccaatgagatatcaaaagttgctttgatagcacgctcatcccagcaaggaaaagcccttcgggcatcagtagccttaagaaaagaatatgaaatataaataccttagaattaacctaacaagttatttcataaagcagtcgccatttccctctgtcattcattcattcccttgttcaaatatttactttctcttcagtgccaggcaacaagctaggcattaactagaaagaaaagacaacacttgctaccactgccattccagcaaatatccaggaacagtgtctgctatggattttaacaatatattataattatttacaactaaatttttgtttacattttaacatttcaaatttaatgcaaatgccttcaaatcaataatgttaacacaacacagagcacagaacagtaaagagtatgctataagaattcaaagttgggaaaacatggtaagttgcctctctggcttttatttttgaattaaaaataaaaatattctcaatctttgatgtgctttgttctttatctggaatggcagcaatgggaataaagacagatgctctatcaattcaagacaggtcattcatttaatggcacttccatatgctacacataaaactgtcgccacttgacctacttgagtccttactctttcattaaaaatttaaaaaagagcaaccttatgaaagcaaaataaaacttaggggttctgcagggtatcagttataaaggaaagacacttcagtaaacagaattttccatttatttagtaaataaaatggaaccaatgacaagatactgtatcataaaaagaaacaacagactgggtgcagtggctcatgcttgtaattccagcactttgggaggccgaggtgggcggatcacctgaggtcaggagttcgagaccagcctggtcaacatggtgaaaccccgtctctactaaaaatacaaaaataagccaggcatggtgacacatgcctgtaatcccagctactcgggaggctgaggcaggagaatggctcgaacctgggaagcggaggttgcagtgagccaagattgcaccactgcactccagcctgggcgacagagcaaggctccgactaaaaaa

SEQ ID NO: 673853 - DNA, 2046 bp, Homo sapiens
aaatgaggtctcactatgttgcccagactggtgtcaaactcctggcctcaagcaatcctcctgccttagcctcccaaagcactgagattacaagcaagagtcactgtacctggctttcttatgacatttaataagtcaagacctttttctttttttttctttttttttctgagatagggtctggctctgtcacccaggctggagtgcagtggtgtgatctcagctcactacaacctccgcttcctgggttcaagtgatcctcccacctcagcctcccaagtagctgggactacaggtgtgtgcaaccacactcagataatttttgtatttttagtaaggacaggatttcaccatgttggccaggctggtcttcaactcctgacctcaagcgatctgcctaccttgacttcccaaagtgctgggatgacaggtgtaagccaccatatccagcccaagacttttgcttttagttactataaatctattaaacttgtcaatttacctctctaaattaaaagaagtagataatcttataaatgtatttaacaaggaatttgacaaggagaaaatcctccaaaaataaagctatcaagaaaaagaggtcttggctgggcatggtggctcatgcctstaatcccagcactttgggaggctgaggcaggaagacagattgaccccaggagtttgagaccagcctgggcaacataatgagaccccaactctacagaaaaaaaaaaaaaagaaagaaaaagaggcttattgaaaataaagaaaactattatttatgttcctataatataccagcactgtggtaggtggtttcatattatcccatctaatcagcaaactaaatctgctaaagcctattaaaattttagataaacttataaacacatacataccatgtttgataaagctactctgtctttaggaacaaccaatgagatatcaaaagttgctttgatagcacgctcatcccagcaaggaaaagcccttcgggcatcagtagccttaagaaaagaatatgaaatataaataccttagaattaacctaacaagttatttcataaagcagtcgccatttccctctgtcattcattcattcccttgttcaaatatttactttctcttcagtgccaggcaacaagctaggcattaactagaaagaaaagacaacacttgctaccactgccattccagcaaatatccaggaacagtgtctgctatggattttaacaatatattataattatttacaactaaatttttgtttacattttaacatttcaaatttaatgcaaatgccttcaaatcaataatgttaacacaacacagagcacagaacagtaaagagtatgctataagaattcaaagttgggaaaacatggtaagttgcctctctggcttttatttttgaattaaaaataaaaatattctcaatctttgatgtgctttgttctttatctggaatggcagcaatgggaataaagacagatgctctatcaattcaagacaggtcattcatttaatggcacttccatatgctacacataaaactgtcgccacttgacctacttgagtccttactctttcattaaaaatttaaaaaagagcaaccttatgaaagcaaaataaaacttaggggttctgcagggtatcagttataaaggaaagacacttcagtaaacagaattttccatttatttagtaaataaaatggaaccaatgacaagatactgtatcataaaaagaaacaacagactgggtgcagtggctcatgcttgtaattccagcactttgggaggccgaggtgggcggatcacctgaggtcaggagttcgagaccagcctggtcaacatggtgaaaccccgtctctactaaaaatacaaaaataagccaggcatggtgacacatgcctgtaatcccagctactcgggaggctgaggcaggagaatggctcgaacctgggaagcggaggttgcagtgagccaagattgcaccactgcactccagcctgggcgacagagcaaggctccgactaaaaaa

SEQ ID NO: 673854 - DNA, 775 bp, Homo sapiens
tcttaaactcctggcctcaagtgatccacccaccttggcctcccgaagtgccgggattacaggcatgagccactgtgcccagcccctctgacactcttttgaatgatctcaaagtcaaatcttcatcttataaaattgaatttgcttttggaaaggaccaaaagttatggggagtgcgagtctacagaataagtgaatgacaaactacaaactgtctctagcctgatgcctcaaactggttctgaaagtaatttaagtgaaaatttcagacctttagagcaaagtcaccactaatgaaagtgctatattcttaatcattctgagaaaaaaacaactcaactgaagcttaattgaatagacatttgtgatgtttattttttagaaatcagatatttgtaaatatctaaagaggacaatgaatacttttttctttaaagagaatgacaggttactgggacagtatatatggatatagtaaaataattgataattctaaatgatactaaaaaattaaactataaagcaaaatttaaattaaaaatttttaatttctattttctttagaagttcacttaatttttttaaaaaagcaaatgtattcacattaataaagtttgcaaagaacgtctaacagattataaaaacctactacctttaatggaaactatatgatggaattttatgttacaattccataagtggaattgcccagtctgtttcactaagtcagtcaactgttaagatgtttttwaaatataattcatatttcatggta

SEQ ID NO: 673855 - DNA, 655 bp, Homo sapiens
tttctcctgttagcaactaagacacatgcacagaggtagaagtgggttgcaggctctttacacacaaaagattctgctattaacaatgtatttaactcagtggcagtcactagaaatcaatgttcctcccccgagaaggctgccataatataaagctgaccaattacagtataaattttaggcagctttttgcctagatttagtccaatatactcagtactatggaaatagcgtgtatttgcctgtacgacctgtatccattcaatcagcaggcattsaaggaagagtttgtgaaaaattcagaatacgttctaaaacatttctgcagagaccattccttaagaagaaaaaatgttttctatggttgatatttagggtgtgtaattccagattactttttaaaaagttatctcagtatcaatacaaaatgaacaaaatgcctgatgccaacaacctcaaaatatctcaaatgaagccaacaggattctggcaacaatcctgtccatgtggtggaaactataagctgagctatttgtacgcttactctcaaggcttttttcctccccttttctcataaacgtcttacgcaagtggctgtcacactattgtcgcttcagtcatttgcagggaggctattaaactgcccctgctgcaa

SEQ ID NO: 673856 - DNA, 625 bp, Homo sapiens
tgacatcaacagtatttgatcattttagcctataaatacagcaatttttatgtagtttaatctaatattaataatatctccttttkctcttgagtgtctgagtttgataaaaagttatatgtatatatagttaccttaataaaatagctgtggtattattgtttttcccaggatgtctgtaataattttccttatttctttttaattggtgactttaattaggtatatttagaaatgttttccttgctgaaacatacacatacagaattgtactgagagtaggtaataagaatgagacaaattattctcccataaaatatgagttttaagaccagtaacaagaaaatatttttaattgatacatttaaaagatttgtggtttataaataatttttaattattatctttgcagagggttaaaatggaaatatcttaaatgtaaagataaattttactatgtctatagggcaaatcaatcatatttctttcataaaggaggcactctctctcttactacatgatagagctgcttcaaactagattctggtaggtattggaacctctcctaggaccacaacacaggcaatatataattaactgtcagatggctagcagccgaaaccaa

SEQ ID NO: 673857 - DNA, 613 bp, Homo sapiens
atgctgctgcaccagagagtcctgggccattagcagggccctcccggagccggagaagtgaggggccaagtccactccaggccaggcgcaagcccgggagcagagctcgggcgccctctccttccatctcagtacagcaccctgttcctcctccctctgcaggccgtctctgggttttcttactgagatggtcaagggtgaaacccgaggggctgctctgtccttccgctgctgcgcccctgtggagagaaatgagccccctccccagtcacagcgatgaaactagckcagggaccactcacgtcagccccaggaaggacgccggcctgggtgggaagggtagggttcccagtgctgactcaccgtggggctcacggctggcagagtctcagttaccaggtgacctggatgtgtgagtgtgcttgcctgtgtaggctgtgtggctgtgtgagcgtgaagcaggtgtgagtgtgaactgggtgtgaagcatgtttggttctgtgagtgaatgtgatgtgtgactcatgagcgtgtttgtgagtgtggatcgagtgtgtggatccaatgcatgaatcgtgtgtgtgtggatcctgtgtgagcatcctgtgttttg

SEQ ID NO: 673858 - DNA, 613 bp, Homo sapiens
atgctgctgcaccagagagtcctgggccattagcagggccctcccggagccggagaagtgaggggccaagtccactccaggccaggcgcaagcccgggagcagagctcgggcgccctctccttccatctcagtacagcaccctgttcctcctccctctgcaggccgtctctgggttttcttactgagatggtcaagggtgaaacccgaggggctgctctgtccttccgctgctgcgcccctgtggagagaaatgagccccctccccagtcacagcgatgaaactagctcagggaccactcacgtcagccccaggaaggacgccggcctgggtgggaagggtagggttcccagtgctgactcaccgtggggctcacggctggcagagtctcagttaccaggtgacctggatgtgtgagtgtgcttgcctgtgtaggctgtgtggctgtgtgagcgtgaagcaggtgtgagtgtgaactgggtgtgaagcatgtttggttctgtgagtgaatgtgatgtgtgactcatgagcrtgtttgtgagtgtggatcgagtgtgtggatccaatgcatgaatcgtgtgtgtgtggatcctgtgtgagcatcctgtgttttg

SEQ ID NO: 673859 - DNA, 506 bp, Homo sapiens
gttttattagaggggttcacccctaataaaaaggggtccaatgaggacttcaagtccaggctcttatgggaaggatgctgttttccctgctccttctactaagtaaaactatagaccctgaacataatacaagagacaaccaaaggagaccgctagaagatggaaagaagaaggcaagctggttagaggtcccaggactggagaaacaaaataatagcagggcatcttacaacccaccatccagcagagaaagaaaatccactctgacccacaacctmgccacagaaggtggctcaggtagcttcattcctcccccagatttgtggaatcccaccaccaacaccaggtaagcccagcagcaccaagaagaaggatcactcagaagccccactagtaagtgaccagaggaatcacttccccgaggacctgagcctcccctcccctaaccagggacatgggagacacaggcaagaaggacttactgcaacaagcacctagcctaggaa

SEQ ID NO: 673860 - DNA, 506 bp, Homo sapiens
gttttattagaggggttcacccctaataaaaaggggtccaatgaggacttcaagtccaggctcttatgggaaggatgctgttttccctgctccttctactaagtaaaactatagaccctgaacataatacaagagacaaccaaaggagaccgctagaagatggaaagaagaaggcaagctggttagaggtcccaggactggagaaacaaaataatagcagggcatcttacaacccaccatccagcagagaaagaaaatccactctgacccacaacctagccacagaaggtggctcaggtagcttcattcctcccccagatttgtggaatcccaccaccaacaccaggtaagcccagmagcaccaagaagaaggatcactcagaagccccactagtaagtgaccagaggaatcacttccccgaggacctgagcctcccctcccctaaccagggacatgggagacacaggcaagaaggacttactgcaacaagcacctagcctaggaa

SEQ ID NO: 673861 - DNA, 656 bp, Homo sapiens
ttcccccagtttacgctggcctaagggtatatttgaatttgtagcttttgctaagaaggttgatggaggggcaagagtcatggaattgattttttaccacttcctttaaaagtccctcataggccctgcaccttgcgtggaatgtggttgtagctgacactcattatcctgaggcctgggctgaaactgggagaaaaagaatcccattccccaacccccagcttcattaagatatcattgaaaaataaaaattgtatatatttatagtgtacagtatgatgctgtgacatatgtatgcactgtgaaagggctcaatgaagctaattaactcatataacaccatatatatatacacacacacacacatatatatatcaccatacacacacacagacacacagatgaaaacattgaagatccactctcttagcaatgctccagtacgtaatacattactattatctgtggtcactgtgctgtgcgctatagagctcccaaactgcctaatgaaagtctgtgcccttttaccagcatctccccacccagccagccctcaccattytaccctctgctatgagttccactattttagtttctacacttaagtgagatcctgcagtacttgtctttctgtgcctggcttctttcacttagca

SEQ ID NO: 673862 - DNA, 639 bp, Homo sapiens
  misc_feature 467, 470, 475: n = A,T,C or G
atcctcccatctcagcttcccaaatcattgcattacaggcatgagtcaccacgcttagctggattatttgctttaattttgttgcccatcaatctgaatgatatttatataactaggttgagggaaatttcacctgtttccctaaagttggcaaaaaggacccaaagcttagggcagagagacatcagctaccycaagtcaaaagagatcttcaaacaactggggtctaactgctcagagtctatcaagaagtcaaatctctccagtgtgtataaggaaaaggctgatggctggggagcaggagatgcattggaatctcaaatggtctgcccactcctccaaagctaaagggcctagaattgcccacagatggggtaggtctgcaagaatgaggaatcagcattattccccacggaaatttctactgaaaccccgtaccctgtaggtctgctctgtgcttttcttancanggaanaagagaatggagacgaaggaggagtggtcccactgcttggcaaggtgagcaggtataagctcccctggaactaaaggactggaagctacagtagcttagctcaatttaccttgcctctgtaatgctcatgagctcaggattcctggggcaaggggttctgagca

SEQ ID NO: 673863 - DNA, 647 bp, Homo sapiens
ctgtaatcccagcactttgggaggctaaggtgggcggatcagtttaggtcaggagttcgagaccagcctggccaacatgatgaaaccccatttctatgaaaaaaaaaaaaaaaaaaaatacaaagattagctgggtgtgctggcgggcgcctgtaattccagctactcaggaggctgaggcaggagaatcgcttgaacccagaaggcagaggttgcagtgagsccagagatcgtgccgctgcgctccagcctgggcgacagagcgagactccatttcaaaaaaaaaaaagattaaataatccagtataatcaatactttttgaatgtctaacatgttctacaaactgcattaggcacttgtataaactggaagaagacagacttaatccttgtttttatggagttgatgttatgagaagacagacattaaataagtaattaataatgagtggattacgttccatcatatgagaagaaaaataggtgctcgtgaagtttatagcaatgaaaagaaggatagaaatggaaaaatagttgtaggaatgcgatggggacacatgaaataatttttttcccaattagagacaagtctttgaaggcatattggaaggagtttatggcaaagacaagaacaaataattaatgat

SEQ ID NO: 673864 - DNA, 647 bp, Homo sapiens
ctgtaatcccagcactttgggaggctaaggtgggcggatcagtttaggtcaggagttcgagaccagcctggccaacatgatgaaaccccatttctatgaaaaaaaaaaaaaaaaaaaatacaaagattagctgggtgtgctggcgggcgcctgtaattccagctactcaggaggctgaggcaggagaatcgcttgaacccagaaggcagaggttgcagtgagcccagagatcktgccgctgcgctccagcctgggcgacagagcgagactccatttcaaaaaaaaaaaagattaaataatccagtataatcaatactttttgaatgtctaacatgttctacaaactgcattaggcacttgtataaactggaagaagacagacttaatccttgtttttatggagttgatgttatgagaagacagacattaaataagtaattaataatgagtggattacgttccatcatatgagaagaaaaataggtgctcgtgaagtttatagcaatgaaaagaaggatagaaatggaaaaatagttgtaggaatgcgatggggacacatgaaataatttttttcccaattagagacaagtctttgaaggcatattggaaggagtttatggcaaagacaagaacaaataattaatgat

SEQ ID NO: 673865 - DNA, 656 bp, Homo sapiens
attaatgatcttttattaacatattaaacatggtcattttatagtctgtgtctgaaaatgtattagtcaggtttcaaacaaacaacaaacataaatcccctactgggacacgcacacacacacacacacgcgcgcgcgcrcacacacaaacagatttgttataagcttatgcaacttgcggagctggttaagaattttctgtaaggctggaccaaaacgtgtcgaatcttgttgcctctgctcttagtgccaagggtatcctgcaggagctgggaccctttgtcccagagctctgtatgcaaacctcacccaagagttggaaaagctaaagaagggtagagggggaggtagagcagttgtagccccagatggtacctcacatcaatgaggcgagtcagcaaagcaacaataatacaacttgtgtgcagtttaagatggctgctgtttctctcctgccttccaactaataaggctctcccttgtagcataccatagccaacgaaaaatggcttcagcttagccaagctgacacattacaaagccaccagagataactccactagctgaattgattatgtgactgctttttggaccatattgttccactaattcttactctttgtgccttttttcttatgtattttgctatttctgaa

SEQ ID NO: 673866 - DNA, 844 bp, Homo sapiens
tgtgatgttccccgccttgtgttctcattgttcaattcccacctatgagtgagaatatgcagtgttttttttgtttgtttgtttgtttgtttttgagacaagagtcttgctctatcccccaggctggagtgcagtggcacaatctcggctcactgcaacctctgcctcctgacctcaagtgatccacccgccttggcctcccaaagtgctgggattacaggcacgagccactgtgccttgtctataatgatgactttaattattgctcttttgtttttttcggttgaccattccttggtagtgtttctcactgagggctaaacatatgaccgcactcaatcaatggagcacagctgccattcttttcatgaggtctgggatttaggtgatgtggatgaggaaattgaaagaactcttcagtaaatgtttggagacctgaattctaattctgcctggtgatcttgactcacagtgtgccctgtgagtttatttttctctgtaagaagaggtttggaccaaatgtctgactcatgtacttgttgctatgcatagtttcygaggaacagcccggtgacttgaaagacataaaccacccaacttaattccagtaaaagccttactaaatcagaaatgttcttttacattttctatttgggggaaaattgtctacagcaactaaactcattttaaagaatggtggtttcccgattgttgtaaaaaaattacaaagtgcagtcagtaccccccaaaattcattaaacatgtaaacaagtaatgttatgccagctttgcaatctcttccaaagatcaggcctgggaagagtgaagtgtggttttgatggtt

SEQ ID NO: 673867 - DNA, 632 bp, Homo sapiens
tctcagtgcacttcatttttttcctccacccacaaactttgaccattatacaattgagtgagtttattaactgtattaattttagaaccatcaaagagggtagccaactaaagtgaaccagaaactcgaggattaatctaaactcgattttttctttcttttgagacggagtttcactcttgttgcccagctggagtgcaatggagcgatcttggctcaccgcagcctccacctcccgggttcaagcgattctcctgcctcagcctcccaagtaactgggattacaggcatgcgccaccacgcccggctaattttgtatttttagtagagagggtttctccatgttggtcaggctggtctcgaactcccgacctcagatgatccacccgcctcagcctcccaaagtgctaggattacaggcgtragccaccgcggccggctaagctcaatatttaacatgctctctaaccttggactaattggccaactacacacaatactgggatacttttttcctctggctcaaaaatctctgacctctttgaagattgaaaaatgctacatcagaggtaagtggaggaggtaaggggacgtacctgggaaagcatgtttgcatgtgtgaataactaaaa

SEQ ID NO: 673868 - DNA, 632 bp, Homo sapiens
tctcagtgcacttcatttttttcctccacccacaaactttgaccattatacaattgagtgagtttattaactgtattaattttagaaccatcaaagagggtagccaactaaagtgaaccagaaactcgaggattaatctaaactcgattttttctttcttttgagacggagtttcactcttgttgcccagctggagtgcaatggagcgatcttggctcaccgcagcctccacctcccgggttcaagcgattctcctgcctcagcctcccaagtaactgggattacaggcatgcgccaccacgcccggctaattttgtatttttagtagagagggtttctccatgttggtcaggctggtctcgaactcccgacctcagatgatccacccgcctcagcctcccaaagtgctaggattacaggcgtgagccaccgcggccggctaagctcaatatttaacatgctctctaaccttggactaattggccaactacasacaatactgggatacttttttcctctggctcaaaaatctctgacctctttgaagattgaaaaatgctacatcagaggtaagtggaggaggtaaggggacgtacctgggaaagcatgtttgcatgtgtgaataactaaaa

SEQ ID NO: 673869 - DNA, 616 bp, Homo sapiens
cattagttcagtccatcagcctgcggacttaagccaggcgtcgtgctgacatttaaagatgattcctctttcgtcataagaagaaacacagaacatcatttgataaacataaaaattaaagagctctgctggcagtccctttacaaggcactggagaaaccctgggttgggcaygactggtgcttttaccaacacaagcctaagggacccctctggctgctggattagccctaaatgcaaccatttggtttactggtgtaaatatgagctattagtgtctggtggtgcattagagtggccccaacctactgctttgccttgtaacaaacacacaatgaaaagagcagagttgagtgttgtatttacactgcctgtctaaatctggtttcatagcccaacatccccctcaccccttccacaaggatactcattaatgctgccacaaccaagttagtgccttgttttctacctctaagagtgcaaaacgcaataaaaaggtgtcagtatttgtcctgaaaacaaacaaacaaaaaaagaaatacatacattcaatatatatattctctctatatattcccgtaaaatatatacatattttatatatatattcctagga

SEQ ID NO: 673870 - DNA, 616 bp, Homo sapiens
cattagttcagtccatcagcctgcggacttaagccaggcgtcgtgctgacatttaaagatgattcctctttcgtcataagaagaaacacagaacatcatttgataaacataaaaattaaagagctctgctggcagtccctttacaaggcactggagaaaccctgggttgggcatgastggtgcttttaccaacacaagcctaagggacccctctggctgctggattagccctaaatgcaaccatttggtttactggtgtaaatatgagctattagtgtctggtggtgcattagagtggccccaacctactgctttgccttgtaacaaacacacaatgaaaagagcagagttgagtgttgtatttacactgcctgtctaaatctggtttcatagcccaacatccccctcaccccttccacaaggatactcattaatgctgccacaaccaagttagtgccttgttttctacctctaagagtgcaaaacgcaataaaaaggtgtcagtatttgtcctgaaaacaaacaaacaaaaaaagaaatacatacattcaatatatatattctctctatatattcccgtaaaatatatacatattttatatatatattcctagga

SEQ ID NO: 673871 - DNA, 616 bp, Homo sapiens
cattagttcagtccatcagcctgcggacttaagccaggcgtcgtgctgacatttaaagatgattcctctttcgtcataagaagaaacacagaacatcatttgataaacataaaaattaaagagctctgctggcagtccctttacaaggcactggagaaaccctgggttgggcatgactggtgcttttaccaacacaagcctaagggacccctctggctgctggattagccctaaatgcaaccatttggtttactggtgtaaatatgagctattagtgtctggtggtgcattagagtggccccaacctactgctttgccttgtaacaaacacacaatgaaaagagcagagttgagtgttgtatttacactgcctgtctaaatctggtttcatagcccaacatccccctcaccccttccacaaggatactcattaatgctgccacaaccaagttagtgscttgttttctacctctaagagtgcaaaacgcaataaaaaggtgtcagtatttgtcctgaaaacaaacaaacaaaaaaagaaatacatacattcaatatatatattctctctatatattcccgtaaaatatatacatattttatatatatattcctagga

SEQ ID NO: 673872 - DNA, 584 bp, Homo sapiens
tgggattatcttcacgtttgttacagctacttaacaatccaaaggcaaaacagtgctcattgtcaaagctggcagggcaggctggccaggccctcctcttcagttttctacaggagaaaccaaaattgaatttctcacgttttcttcacatgttggacaccatcagaccttcacaaccaatggactctaattattttgctttcaagctttgtttttgttatttcttcttctaaaaggccatctcctgtcctacccttcaagattccaacataytttggttcttctggaaaaataactacttatcttttaagacaaatcatcttatctttggtacctgagtctaagatgaaattggccattcaacattattcgaatatttcttgagtgtcttctgtgtgccagacactcgtgtctctgttgactcctgcatcctatgcagacttctaaaagagcatctgcaaagctttcttatctttcattgtctaagtcatgcctgaccctgcttccttctgttgggcggcaaagatcatatggcagggtcatgacactcatttctctttatttccacacaggtcctgatggaa

SEQ ID NO: 673873 - DNA, 462 bp, Homo sapiens
tttctttattgtttcagttcaagtacttatactttgtttttgaaaaaaaacaatcttaatttcctactctgacattcccctacttacaccacagattgaggcagtttggaatatgtcaggktccatctctgctgtgagatcactcatatctgacaacctgtttaagaaccttgaagatgctctgaggccaattgtaattccccccaaccaccccagagaaatacatggggccagggtggactgcataagcagcactgccactgccagagggtgctggttgccaaggagcctgctgccccactgcctgtctgccctgccgcttcaccttcaagattcttaggcacttgctcttgtgtcctctattgctagctatttcttgctcttgctttctttctccatcactcctcttctgtctcactctctcttctcctttctctcactttctttctctattcatccttt

SEQ ID NO: 673874 - DNA, 1168 bp, Homo sapiens
agatgtagttcgtgataatgcttgccagctgctgctcagatgggatacacttccaacctccaataatatctttgttttcctgtctcatggcctccatttaccctggggttgacatagcgaaagcatcatgatcttgtattgctttagacatctggtgcaaagagaaattttccctgggctacttgaaaacacacaagatgtagtttggctgaccataagagtttggagctaaagttcagcaataaaagtataagaagttgacagaatggcaggaaataccacagctcagacactgcacatcacacataccttgttctaccagctgtcagcacttgtcctttcttcttccagggccatttcctactcctcacaggaaccataaaagggccagaaaatggactaggaagcttcactgggaatcacatggccttgagacttgttagtgtcttcatcaaggcagtcctcaaatatccacctgggctccatataacctggcctggtcctcactttaatgagcatcctctagttcatctgagctaaattcaaaatcagtgactcctattcccttcctgattttaagcttgccctgttgctgaagatttctcttctctatctgggagaagcaggcctggctatacagcttgyatagtccagggcaaaatgaaaatgcagaaacccccttttccaaaagcaggaaataaagtattgtgaaaagtactagaatataaatatatttatttctgtctctttccgtttatcatggtgtgtttttttttaatatttaatgttattctaagtagagaaaaattaatattttaaattattagcttgaatgttaccattcatctttttattatacaatgctagttttaaattcaaggataagaccatttaactcatttgtggatcatcaaaattacacaatttatatttcatgacatatacatgtgtatcttttttgttctttccagaacagtggaagcactgcacaaagccaaatcaactgttcttcttttacttctttgtatacatacattctacctagcctctttaccctcagcttactaatgagaaagaaagaatgaaataagaaactatagatttccttatctttcccttttcttgaatgtcatcattaaagaatgaaataagaaactatagatttcct

SEQ ID NO: 673875 - DNA, 635 bp, Homo sapiens
cttctagaaaagaatatgcaacatttgaaagataatttcacttagtgaattcagaattactggtgggaatggaaaatggaaaaactactttggaaatcaggtcaagagtttattacaaaatttaattgttgtctcctacagacttgaaaagagggaaatagaatgttctttgtttgctcaggacatcattatctacatagaaaatgctaaagaatctaaaaaattagctactaaaacttaagtacttggcaacatcacaacataaaaaattgatttttagaaatcatctgtattttttaacacttttaaagaacaattagaaattaaaattttggaagttaycacttacagtggcaacaaataatatgaaatatctaggtatatagctgaaaatatgtgtaaaacttgtattttatagctgataactacaaaatacttatgataaacagtttttaaaagtgtaaataagtagaaagacatatgatgttcatgaattcgaagacctaatattgttaagatgtcaatttccccaattgatatgtagatttaatgcaatcctattcaaaattatacaaaaattccaaaaggctttttttgtttttgtttgtccccagagaagctagttctaaaattaa

SEQ ID NO: 673876 - DNA, 635 bp, Homo sapiens
cttctagaaaagaatatgcaacatttgaaagataatttcacttagtgaattcagaattactggtgggaatggaaaatggaaaaactactttggaaatcaggtcaagagtttattacaaaatttaattgttgtctcctacagacttgaaaagagggaaatagaatgttctttgtttgctcaggacatcattatctacatagaaaatgctaaagaatctaaaaaattagctactaaaacttaagtacttggcaacatcacaacataaaaaattgatttttagaaatcatctgtattttttaacacttttaaagaacaattagaaattaaaattttggaagttatcacttacagtggcaacaaataatatgaaatatctaggtatatagctgaaaatatgtgtaaaacttgtattttatagctgataactacaaaatacttatgawaaacagtttttaaaagtgtaaataagtagaaagacatatgatgttcatgaattcgaagacctaatattgttaagatgtcaatttccccaattgatatgtagatttaatgcaatcctattcaaaattatacaaaaattccaaaaggctttttttgtttttgtttgtccccagagaagctagttctaaaattaa

SEQ ID NO: 673877 - DNA, 1046 bp, Homo sapiens
  misc_feature 3, 4, 5, 6, 7, 8, 9, 10, 11, 12, 13, 14, 15, 16, 17, 18,19, 20, 21, 22, 23, 24, 25, 26, 27, 28, 29, 30, 31, 32,33, 34, 35, 36, 37, 38, 39, 40, 41, 42, 43, 44, 45, 46,47, 48, 49, 50, 51, 52, 53, 54, 55, 56, 57, 58, 59, 60,61, 62: n = A,T,C or G
  misc_feature 63, 64, 65, 66, 67, 68, 69, 70, 71, 72, 73, 74, 75, 76, 77,78, 79, 80, 81, 82, 83, 84, 85, 86, 87, 88, 89, 90, 91,92, 93, 94, 95, 96, 97, 98, 99, 100, 101, 102: n = A,T,C or G
atnnnnnnnnnnnnnnnnnnnnnnnnnnnnnnnnnnnnnnnnnnnnnnnnnnnnnnnnnnnnnnnnnnnnnnnnnnnnnnnnnnnnnnnnnnnnnnnnnnnnatctcttttcttggtctcaacgcatgccattgatgacacaaacagccttaaagctgcacagaatattcctcattcctaggtcagtctactttattgttggcagccagattccaagtggcgattcagaaacctaygctccttccatcctgaagattattaactcgttctgctggtttctctgcatgtgcttatgaaatgaatgtgaattacagtatgtcacaggatatttgacgaagcaagatgtggaagtatatgacatttcaatcagcactccaatacattggctatagatagtgacatacactcctatagatggaatatggctgagaaatgtagaaacattcatttgtttttctttcatggccagtttaaatagttatcaacatggtagtaaggtaattgaaaatgacagcaacaaattacagcttggaaaattgcttcaatctgtggctaagtcttctgttagcaagatgaaatgatgcagatccaaataattcagacaccaactggactataaaattgattgtcatttgcatggttccatcttcaagtatatagtcatggccttgaatctttataaatttaatgtctttttataattagttttgaaatgttatcaaagaaaaaacgttttttaaactaagtactggggacactgtcaagatttatctttttatctagactttttgaaattgaaactatatatataatccaaaattaacctgatttgcttttcttttagtgattccaaaaggattaattagtgttttgcttcctttttaactaactgaccattagcttttcatctgtcttcatattttggagatatgttagattactgataacagttattctggtaataagtactcctctcagatttcaaattagtagaaactgttcttcatttattatttagatgaatttgtctctttatatttacagat

SEQ ID NO: 673878 - DNA, 672 bp, Homo sapiens
atgtttgaaattcccattctggtcatttctatgttgtcccctttagtaaagccctcccatctagggagatgcttgccagagtgcggaccaaagtttgattgtctggttccctgttgttttagttttagataatttttttctcactgtaaaagagctcagcaaagcaggtacagtaaagcagcagaaccttttatttttgttagctttyattttaaccttttattttaggttcagagggtacatatgcacatttgttatacaggtaaattgcatgtcccagggattttgtgtatagattattttaccacctaggtaataagcatagtacccaataggtagattttttgatcctcaccttcctcccaccctccagtctcaagtaagcccctttttctattgttcatttccagaatggctattattaaaaagtcaaaaaataacagatgctggtgacattatggagaaaaggtaacacacatacactgctggtgggaatgtaaattagttcagccattgcacaaagcagtctggtgatttctcaaataactcagaacagaattaccattcaacccagcaatcccattattgggtatataatcaaaggattatataccttctaccataaagacacatgcacatatatgttcatggtagtagtatccacaagagcaa

SEQ ID NO: 673879 - DNA, 672 bp, Homo sapiens
atgtttgaaattcccattctggtcatttctatgttgtcccctttagtaaagccctcccatctagggagatgcttgccagagtgcggaccaaagtttgattgtctggttccctgttgttttagttttagataatttttttctcactgtaaaagagctcagcaaagcaggtacagtaaagcagcagaaccttttatttttgttagcttttattttaaccttttattttaggttcagagggtacatatgcacatttgttatacaggtaaattgcatgtcccagggattttgtgtatagattattttaccacctaggtaataagcatagtacccaataggtagattttttgatcctcaccttcctcccaccctccagtctcaagtaagcccctttttctattgttcatttccagaatggctattattaaaaagtcaaaaaataacagatgctggtgacattatggagaaaaggtaacacacatacactgctggtgggaatgtaaattagttcagccattgcacaaagcagtctggtgatttctcaaataactcagaacagaattaccattcaacccagcaatcccattattgggtatataatcaaaggattatataccttctaccataaagacacatgcacatatatgttcatggtagtagtatccacaakagcaa

SEQ ID NO: 673880 - DNA, 622 bp, Homo sapiens
agttagatgtcagtgtcaactgcttttgagatattgctacaagtttgtcccttcacattattttcaaaatggtacaatagaatatatagttggagctacatggggatctcattttgatggaaaaataggaatcaaatatattagctacctaagagggtccctccccaggggtagctggctttatatcactgtttttatttcattgtttgtgtgatgggagtgaaagaagaatgaatgggtatgttttagctcttatttgaccagatcttattcaaaaggcatttgaacatcaagaattacatataacaatcattgatagtatattattttatattattagcacagggttataaagtatgtgatatatttaataaaaatattatttaatataaatatattaaatatacatatttaataaaaatatatcacatactttataacttaaatatcttaatgtccttcatcctttggttcaggagtaggcaagctatagcytatgggctaaatactatttacagcctgttttgtaaatgaggtttttgcggagcacaaccatagcctgtatttgtgtattgtctatcacagcttcataccacaatagcagagttgagtatgatgtgca

SEQ ID NO: 673881 - DNA, 654 bp, Homo sapiens
caaaggaacttgtctataaatgtttgaactgaggagaggggaacactcaaggtcagccatccaaagcaagtgaggagcaattcaggtgggcaagactagaatatgttagtaatcaaaacattgaaacctactcaatgacattgtagtagggctgagaaaagcctgtgaacaggtctatttatgccttctctctagttttagactttatgttgtctaaaacaaacaaacaaaaaatcctgttattgtcactaagcattgactgtccaggagagaaatagagagagaaaaaataaaygtctgataaaaagagaaagccttttgtctctgagttagagaggagccaccaggcttcatcatgaactggaggaagtcttctgaagactatctcaagacttggctcaaggtccataatcattgctcagttttcttactgtaatctggagttcccctgagatttcaatactaagagagtgcactggccagaacatctttgcatcccagtgcccttagtgtttatttttctcactgtgaattcatatgctggcatgtggtttatccttttttctctattgagcctggagagtattggttgagcccccagctccatcaacctctctaattatggtgtcaaaacagaaaacagaaacagagttt

SEQ ID NO: 673882 - DNA, 635 bp, Homo sapiens
atgtgtgcctgatgaacacttgaaacatggctagtctgaattgggatgtgcaaaatgaacaccagattttgaagagttagtacacacatacacacaaaatagaaaatatcttattgattttctatattgacacatatcaaaattataatctttttgatattaggtcaaatgtaatatgtcatgaaaattaatctcacttatttctctctctctcttttttttttttttttgagatggcgtctagctctgggggtcccaggctggagtgcagtggcacaatctcagcttaytgtaacctccaactcctgggttcaagcgattcttgtgtcttagcctcccgagtagccgggattacaggtgtccgccaccacgcccagctgatttttctgtttttagtagagatggggtttcaccatgttggccaggctggtctcaaactcctgacctcaagtgattcacccacgtcggcctccgaaagtgctgggattacgggcacgagtcaccactcccagcctcatctgtttctcttaacgttttgtaatgtggctaccagaaattgtggcttgtataaatttctactagatggcactggtttcagagattctgaactggaagcagttcttgagaatattagg

SEQ ID NO: 673883 - DNA, 635 bp, Homo sapiens
atgtgtgcctgatgaacacttgaaacatggctagtctgaattgggatgtgcaaaatgaacaccagattttgaagagttagtacacacatacacacaaaatagaaaatatcttattgattttctatattgacacatatcaaaattataatctttttgatattaggtcaaatgtaatatgtcatgaaaattaatctcacttatttctctctctctcttttttttttttttttgagatggcgtctagctctgggggtcccaggctggagtgcagtggcacaatctcagcttattgtaacctccaactcctgggttcaagcgattcttgtgtcttagcctcccgagtagccgggattacaggtgtccgccaccacgcccagctgatttttctgtttttagtagagatggggtttcaccatgttggccaggctggtctcaaactcctgacctcaagtgattcacccacgtcggcctccgaaagtgctgggattacrggcacgagtcaccactcccagcctcatctgtttctcttaacgttttgtaatgtggctaccagaaattgtggcttgtataaatttctactagatggcactggtttcagagattctgaactggaagcagttcttgagaatattagg

SEQ ID NO: 673884 - DNA, 1976 bp, Homo sapiens
ggccactggatcatgaagaaccatagatagacctaataaaggtgagtactcataacctcaagttcatggacttcaatggactttcatgaatgagactttgaagtctcccccctgggtatgagatgaatacgttctctatgtggaaggaagtrtacacaaatgattggctgaccaaggcgcatactatggcagataattctggttttcctttaatatcaagtgttttctcctctcatggaataaacatgaagcataatctttagcagtgtgtatggccctccggaataaagactgcattttccaccatctttcaaagctagctgtggccatgcagctaggccaagagaaatgcaaaatgtatgtgtggaattcaatgtcatacaccctatcgggcatagtacatctaataaaatttgagaccaatctaagtgtttcaatcagatgatattttatagaagacatttttacacagtgacagacaatccaagaagccaagcataatgaattccttaatagccacaatttaccaaactcactaaagaagatatatgtgtgtgtgtgtgtgtgtatatatgtgtgtgtatgtatatatatatatacacatatatatatatatataaaatcttctgaagagtatttcatctattaaagattaaaaacaaaatgatgcccctaccacttatagggatagagggatatctcagtccattgtatgttgctgtaacagaaaaccacggataaattataatgaacagaaatttatttcttatacttttggcacctgggaagtctgaagctatggggcctacatctagcaagtcgttcttgccatgtaatcctacagctgaaattcaagagtgcatgcatgagagagcaagcaataaaggggctcagctaattctttataaggacactactcctgcaataacggcattaatccattcatgagggcaaagtcctagtgttctaataatcttttaaaggtcctacctatcaacactctttagggattaaatttcaacatgagtttcagagggcatattcaagtcatagcaacagataatatgatgagtccaaaagctaaagctccctgctgatggatgcatgttgagaattgagtgatgagagtatgggccatttgtctgaggctagaggcacagagaaaaggcagcttctatggaagatgcacccaagacagaccaagaggaaggaaatacctaacctaccaaggtcatccattggatgatacaacagaaaaggaaaaagtgaagactacacctaagagcaaaaatagagtgaccatcaaatttacaggtgagtcatgtttaggccttccccttcctttgaattcgaatttggatgtgatgtctattgatggtggagcaacagaattgagagatttaggactgctaaaaatttaatgaagaattttatgtgaaaaagcccaattcaggcttatacagaaagaaatacatgtcatattaaaatcattgttaattttgaatgtccaatacagtagtcaatctgtatcttaattaaaattaatacagtatgttacaattagatctggtcagctggaagaatatgaaagatggagttacaaaagagagaaggcttaaacaggcaggaatatattgtataatttcatttacgtgaaatgtacagaataggcaaatctagagagacagaaagtagaatagtggtttccaggaactaggggtagttactgctaaagggttcaaggactgagcatggtggttcatgcttgtaatcccgactgtttgggaggccaacttaggaggattacttgaagctggaagcttgagaccagcctgggaaacaaagagagacttcatctctaccaaaaataaaaataaaaaacttagctgggtgtggtgacttgcacctgtagtcccagctacttaggaagatcgcttgaggccaggagtttggggctgcagtgaaccataaatgta

SEQ ID NO: 673885 - DNA, 1976 bp, Homo sapiens
ggccactggatcatgaagaaccatagatagacctaataaaggtgagtactcataacctcaagttcatggacttcaatggactttcatgaatgagactttgaagtctcccccctgggtatgagatgaatacgttctctatgtggaaggaagtatacacaaatgattggctgaccaaggcgcatactatggcagataattctggttttcctttaatatcaagtgttttctcctctcatggaataaacatgaagcataatctttagcagtgtgtatggccctccggaataaagactgcattttccaccatctttcaaagctagctgtggccatgcagctaggccaagagaaatgcaaaatgtatgtgtggaattcaatgtcatacaccctatcgggcatagtacatctaataaaatttgagaccaatctaagtgtttcaatcagatgatattttatagaagacatttttacacagtgacagacaatccaagaagccaagcataatgaattccttaatagccacaatttaccaaactcactaaagaagatatatgtgtgtgtgtgtgtgtgtrtatatgtgtgtgtatgtatatatatatatacacatatatatatatatataaaatcttctgaagagtatttcatctattaaagattaaaaacaaaatgatgcccctaccacttatagggatagagggatatctcagtccattgtatgttgctgtaacagaaaaccacggataaattataatgaacagaaatttatttcttatacttttggcacctgggaagtctgaagctatggggcctacatctagcaagtcgttcttgccatgtaatcctacagctgaaattcaagagtgcatgcatgagagagcaagcaataaaggggctcagctaattctttataaggacactactcctgcaataacggcattaatccattcatgagggcaaagtcctagtgttctaataatcttttaaaggtcctacctatcaacactctttagggattaaatttcaacatgagtttcagagggcatattcaagtcatagcaacagataatatgatgagtccaaaagctaaagctccctgctgatggatgcatgttgagaattgagtgatgagagtatgggccatttgtctgaggctagaggcacagagaaaaggcagcttctatggaagatgcacccaagacagaccaagaggaaggaaatacctaacctaccaaggtcatccattggatgatacaacagaaaaggaaaaagtgaagactacacctaagagcaaaaatagagtgaccatcaaatttacaggtgagtcatgtttaggccttccccttcctttgaattcgaatttggatgtgatgtctattgatggtggagcaacagaattgagagatttaggactgctaaaaatttaatgaagaattttatgtgaaaaagcccaattcaggcttatacagaaagaaatacatgtcatattaaaatcattgttaattttgaatgtccaatacagtagtcaatctgtatcttaattaaaattaatacagtatgttacaattagatctggtcagctggaagaatatgaaagatggagttacaaaagagagaaggcttaaacaggcaggaatatattgtataatttcatttacgtgaaatgtacagaataggcaaatctagagagacagaaagtagaatagtggtttccaggaactaggggtagttactgctaaagggttcaaggactgagcatggtggttcatgcttgtaatcccgactgtttgggaggccaacttaggaggattacttgaagctggaagcttgagaccagcctgggaaacaaagagagacttcatctctaccaaaaataaaaataaaaaacttagctgggtgtggtgacttgcacctgtagtcccagctacttaggaagatcgcttgaggccaggagtttggggctgcagtgaaccataaatgta

SEQ ID NO: 673886 - DNA, 1976 bp, Homo sapiens
ggccactggatcatgaagaaccatagatagacctaataaaggtgagtactcataacctcaagttcatggacttcaatggactttcatgaatgagactttgaagtctcccccctgggtatgagatgaatacgttctctatgtggaaggaagtatacacaaatgattggctgaccaaggcgcatactatggcagataattctggttttcctttaatatcaagtgttttctcctctcatggaataaacatgaagcataatctttagcagtgtgtatggccctccggaataaagactgcattttccaccatctttcaaagctagctgtggccatgcagctaggccaagagaaatgcaaaatgtatgtgtggaattcaatgtcatacaccctatcgggcatagtacatctaataaaatttgagaccaatctaagtgtttcaatcagatgatattttatagaagacatttttacacagtgacagacaatccaagaagccaagcataatgaattccttaatagccacaatttaccaaactcactaaagaagatatatgtgtgtgtgtgtgtgtgtatatatgtgtgtgtatgtatatatatatatacacatatatatatatatataaaatcttctgaagagtatttcatctattaaagattaaaaacaaaatgatgcccctaccacttatagggatagagggatatctcagtccattgtatgttgctgtaacagaaaaccacggataaattataatgaacagaaatttatttcttatacttttggcacctgggaagtctgaagctatggggcctacatctagcaagtcgttcttgccatgtaatcctacagctgaaattcaagagtgcatgcatgagagagcaagcaataaaggggctcagctaattctttataaggacactactcctgcaataacggcattaatccattcatgagggcaaagtcctagtgttctaataatcttttaaaggtcctacctatcaacactctttagggattaaatttcaacatgagtttcagagggcatattcaagtcatagcaacagataatatgatgagtccaaaagctaaagctccctgctgatggatgcatgttgagaattgagtgatgagagtatgggccatttgtctgaggctagaggcacagagaaaaggcagcttctatggaagatgcacccaagacagaccaagaggaaggaaatacctaacctaccaaggtcatccattggatgatacaacagaaaaggaaaaagtgaagactacacctaagagcaaaaatagagtgaccatcaaatttacaggtgagtcatgtttaggccttccccttcctttgaattcgaatttggatgtgatgtctattgatggtggagcaacagaattgagagatttaggactgctaaaaatttaatgaagaattttatgtgaaaaagcccaattcaggcttatacagaaakaaatacatgtcatattaaaatcattgttaattttgaatgtccaatacagtagtcaatctgtatcttaattaaaattaatacagtatgttacaattagatctggtcagctggaagaatatgaaagatggagttacaaaagagagaaggcttaaacaggcaggaatatattgtataatttcatttacgtgaaatgtacagaataggcaaatctagagagacagaaagtagaatagtggtttccaggaactaggggtagttactgctaaagggttcaaggactgagcatggtggttcatgcttgtaatcccgactgtttgggaggccaacttaggaggattacttgaagctggaagcttgagaccagcctgggaaacaaagagagacttcatctctaccaaaaataaaaataaaaaacttagctgggtgtggtgacttgcacctgtagtcccagctacttaggaagatcgcttgaggccaggagtttggggctgcagtgaaccataaatgta

SEQ ID NO: 673887 - DNA, 1976 bp, Homo sapiens
ggccactggatcatgaagaaccatagatagacctaataaaggtgagtactcataacctcaagttcatggacttcaatggactttcatgaatgagactttgaagtctcccccctgggtatgagatgaatacgttctctatgtggaaggaagtatacacaaatgattggctgaccaaggcgcatactatggcagataattctggttttcctttaatatcaagtgttttctcctctcatggaataaacatgaagcataatctttagcagtgtgtatggccctccggaataaagactgcattttccaccatctttcaaagctagctgtggccatgcagctaggccaagagaaatgcaaaatgtatgtgtggaattcaatgtcatacaccctatcgggcatagtacatctaataaaatttgagaccaatctaagtgtttcaatcagatgatattttatagaagacatttttacacagtgacagacaatccaagaagccaagcataatgaattccttaatagccacaatttaccaaactcactaaagaagatatatgtgtgtgtgtgtgtgtgtatatatgtgtgtgtatgtatatatatatatacacatatatatatatatataaaatcttctgaagagtatttcatctattaaagattaaaaacaaaatgatgcccctaccacttatagggatagagggatatctcagtccattgtatgttgctgtaacagaaaaccacggataaattataatgaacagaaatttatttcttatacttttggcacctgggaagtctgaagctatggggcctacatctagcaagtcgttcttgccatgtaatcctacagctgaaattcaagagtgcatgcatgagagagcaagcaataaaggggctcagctaattctttataaggacactactcctgcaataacggcattaatccattcatgagggcaaagtcctagtgttctaataatcttttaaaggtcctacctatcaacactctttagggattaaatttcaacatgagtttcagagggcatattcaagtcatagcaacagataatatgatgagtccaaaagctaaagctccctgctgatggatgcatgttgagaattgagtgatgagagtatgggccatttgtctgaggctagaggcacagagaaaaggcagcttctatggaagatgcacccaagacagaccaagaggaaggaaatacctaacctaccaaggtcatccattggatgatacaacagaaaaggaaaaagtgaagactacacctaagagcaaaaatagagtgaccatcaaatttacaggtgagtcatgtttaggccttccccttcctttgaattcgaatttggatgtgatgtctattgatggtggagcaacagaattgagagatttaggactgctaaaaatttaatgaagaattttatgtgaaaaagcccaattcaggcttatacagaaagaaatacatgtcataytaaaatcattgttaattttgaatgtccaatacagtagtcaatctgtatcttaattaaaattaatacagtatgttacaattagatctggtcagctggaagaatatgaaagatggagttacaaaagagagaaggcttaaacaggcaggaatatattgtataatttcatttacgtgaaatgtacagaataggcaaatctagagagacagaaagtagaatagtggtttccaggaactaggggtagttactgctaaagggttcaaggactgagcatggtggttcatgcttgtaatcccgactgtttgggaggccaacttaggaggattacttgaagctggaagcttgagaccagcctgggaaacaaagagagacttcatctctaccaaaaataaaaataaaaaacttagctgggtgtggtgacttgcacctgtagtcccagctacttaggaagatcgcttgaggccaggagtttggggctgcagtgaaccataaatgta

SEQ ID NO: 673888 - DNA, 1659 bp, Homo sapiens
taaattttaatccttagcccttgccattgaagcctttctacattcacccatccgagcacctgttccacaatgtaccatgcctaccaccaggctttaaggttagaacaattaacagcaagcagcctactttatcatgccaacaatggtaacaaaatcagccaggtgattacaggacagaacacaggggaaatgactagagctgtgctgtctactacagtggctactagccacatgtggtttcttaaattaaaattaattaaaattaaataaattaaaaatgcagtttctctgttgcaccagccacatttcaagtactcaatagccactggtatcaaacagcttagatttatagaccatttctatcactgcagaaagttctattgagcagtgctgggctctcatgttagacctgattatattactaaattgttaaataaacgtttatcctttagtctctctggtcttgtttttctttatacaacatgtgataagaataataacattcactttacttaccttagggagcacacaaatgttaagcaaaaacactttagcattctctctagaagaacactacaaaatgtcaggtatctctgtattatttttggagggctcatgaggtcaatgaaaagcttttgaattcttaactaattttctttaagatatgcagcatttccatcttaggtggaacagttttgatactgttgatgtagaaggcaccacatgactggtattgtgctttcccaactcttccactgggaagaaacagcattttagctaacctatggacttaacattgaataaaactgctaagaaatgaccagaatatgaacctaattttaatgaaaggagaacagcaggttgataaccattctttgaacagtaattttatctacaccatttatgaaccaaaagactgacatgaaatataacgtgttaacataaaacataatatgttctttcagtggtgtttacagaagcttattctccatgcaatggtcagaagacatgcacatttaggtaaaatacttctcttaaaacattgtaagacragttgctacattacaaaagtcatatgaaaatgactgcttgaaatatctttagcatcataaagcactcaattgtgtgattctttcacaatttttctttctccattaaatgacattttgatttttttcaccataaattacatgattcagcagcatggatattagaattaagtatccaacataggcaatgttgatattgtggataccaaggagatgtgcttttctgatagcgactggccacagcgccccatggagcactgtggtagtgcctatggcaaggacagaggaaacaaatgaaggtggaggctcatgtggttttatagtttagaagaggtcagcctatgtgactttaacaggccatcagagtgtatatatttggcttacatttctgcttcgtgtaccatcttttgcttctttgaagatactgacttaagagagaactgttcatgataaagtaggctgtttagttttaaagaaccaaattagtcattctccaggtcttattctgagagcctattacctgcccaattctatggtatgggattttaatctactggcatagatgtgtgtgtatgcatataagtgtgtgtagatgtgtatacactacaat

SEQ ID NO: 673889 - DNA, 1432 bp, Homo sapiens
aaaagagactcaagtcaccacataacatggtgaggtagaagcaygatgaatgcaaaagtatatccagtactacattcagttgtacatcgtgatttaatttcagaaagataacatcctcaatcacattaacttaatgattttatttgaattttattttattttaattgtattcaaaccttatttgaaaatttgctctggtcttataattgaatatacattataaatattagggtctaattcataatgcaatggttttatattttaaatattattataataaaaatgcataagttagtggcaggatttcaggcaaatgtttttcttttaaaaggagttgaaagttaagtctgaaaaacactggactatagaaacaggccgtcaatagacaataaggtttgccaaattctatgatctaaagctttcgtgaagcaacaggaaagggcaaattaatacctgtcaattgcctactgtgggcctattatatctcaagcactgtgctaggtactgttgtgattagcaatttcatttaattctcacatgaacactataaatctgctatcaaactgttaatgtccccataccatgggagaaaaattaggacatataaggatttggtgacttcaccaagctttcaacttcactaacaacaaagctgagatttttagaccctgattttagttttctccacaaccccatgttctcttccaaagcaattgtgttggctgtcaattttcaggttagaaagtgacaaaaataaaaggaatgtataaggtgacaagaatgtttagaatagtgaagaaagatcacatagatgaagacaaaaaaatagtgtgtgtatgtgtgtgtgtgtataatttatatataaataaaaatcatcactcttccaattactgacttcctattttgcatataaggaaatgaggctgagcaagttacattgctaaaaaggggcagagaaggaatgatcaatcttgcttgcttaggcccaaaggtagtgccctagttaatatgagcaactgtgattctaaatagagatttctttaggaaaatccatgagcaaggtgtaaacttcccccattaggaagagtgtgatggtcaaaagtccctcactacaacaaaaggcagcttggcacaggataagactcgtgttccagcctcactccttcaacggatgaatgaaaagggaaatactctttttgaagaccttcaaaggaatacatattttacaggatggatatccttcatttataaaccacacattttaggttgttcatatattatttcccgttaattatattttttgttaaaagatttttaaaaagatacagtcaaacatttctgaaaagagaatattgcctcattagtacagaatttatttggggtaacactaattaaaaattaaactaaatacaatcccaactaatcctagtcc

SEQ ID NO: 673890 - DNA, 1432 bp, Homo sapiens
aaaagagactcaagtcaccacataacatggtgaggtagaagcacgatgaatgcaaaagtatatccagtactacattcagttgtacatcgtgatttaatttcagaaagataacatcctcaatcacattaacttaatgattttatttgaattttattttattttaattgtattcaaaccttatttgaaaatttgctctggtcttataattgaatatacattataaatattagggtctaattcataatgcaatggttttatattttaaatattattataataaaaatgcataagttagtggcaggatttcaggcaaatgtttttcttttaaaaggagttgaaagttaagtctgaaaaacactggactatagaaacaggccgtcaatagacaataaggtttgccaaattctatgatctaaagctttcgtgaagcaacaggaaagggcaaattaatacctgtcarttgcctactgtgggcctattatatctcaagcactgtgctaggtactgttgtgattagcaatttcatttaattctcacatgaacactataaatctgctatcaaactgttaatgtccccataccatgggagaaaaattaggacatataaggatttggtgacttcaccaagctttcaacttcactaacaacaaagctgagatttttagaccctgattttagttttctccacaaccccatgttctcttccaaagcaattgtgttggctgtcaattttcaggttagaaagtgacaaaaataaaaggaatgtataaggtgacaagaatgtttagaatagtgaagaaagatcacatagatgaagacaaaaaaatagtgtgtgtatgtgtgtgtgtgtataatttatatataaataaaaatcatcactcttccaattactgacttcctattttgcatataaggaaatgaggctgagcaagttacattgctaaaaaggggcagagaaggaatgatcaatcttgcttgcttaggcccaaaggtagtgccctagttaatatgagcaactgtgattctaaatagagatttctttaggaaaatccatgagcaaggtgtaaacttcccccattaggaagagtgtgatggtcaaaagtccctcactacaacaaaaggcagcttggcacaggataagactcgtgttccagcctcactccttcaacggatgaatgaaaagggaaatactctttttgaagaccttcaaaggaatacatattttacaggatggatatccttcatttataaaccacacattttaggttgttcatatattatttcccgttaattatattttttgttaaaagatttttaaaaagatacagtcaaacatttctgaaaagagaatattgcctcattagtacagaatttatttggggtaacactaattaaaaattaaactaaatacaatcccaactaatcctagtcc

SEQ ID NO: 673891 - DNA, 660 bp, Homo sapiens
aacaaaatttacagagatcacttcaaatatgggatcgaagttgtagttggcaatactaggaataactgtaaagtgacagagcctgcatttcataaggtggttttgacaacatcattttcscagaaaaccatcccaaacaagactgggctaaatggctcttctctgtactgcgggacagatgcttacctctatcttagtatttattattttatctactggaattatccatttggtggccctttttataatttaaaaatagaaactaagtcctagccatctgtgtaactcctgttcatagcacaatgtctaatatacagtagatgatctctaaaattttatataattgaatatttattacaattaatatgagttccatacagaaggccattataccatgttttaatagcatcagtataattatgactgtgtagatttagatattcaaaatgatcattttaaccaacatgcttttaggtatataatattttcagttttagttaaaaattcacatagattctttgcttttgtatctgttaaaatagtcatccactttatatatctatatgtaagcagtgctgtgtttcagtttgtcacactgactttcaagagttgtgtccatctcttcccaaatctgtgttcagtgatttcacatttgtggct

SEQ ID NO: 673892 - DNA, 1904 bp, Homo sapiens
tactgacagaacaccagtcaatgaaacattatctcctggagccattctctaactgctttattatttttgtgctttaatcaatgagaatgtttacctatggggaaaatctttgcataggtagactcactgaggaatctaacaagtctatcagtagaaagctttttggctttaaaaatggattgaacatattgaattttttaaacaaagaactaggaaacatattagagaccaaatttttaataatgtaagtaaatgagaggttgcaatgagaattgtgaaaaaaaagattcccttttactgtatcacttattaggcctcacatgacttaaataatttccccattttatcctacctcctgcattaatattttgctgttcttgcatgttaatgtttatagaaatttctattttggtatgctcatttttttctgttgaaatatttgctgagttaactctggttactttaaacaacatttccaaaaagcatatttacttgcctgccaatgccttccacatagggataaatgcaaaatcctcactaggacaataaagtcacccacaagcttcacctcctgactcaaatgttgtacttacaaatacacatcatggaggtttaggtacctaaaacgtgttctttttaccattgcgtccttgcattgttagttttttttttttccctattatccctctctaatctttgcctggtgaactcattattcaaacaccatctctggctttaagtattatatttgctaactacccacttatctgttggtatagatttagttgattaataaaataatataatccattatgactggaagaaataatccactttactgggttggggaagaggggtcaccagggcttctctcccctttttgaacaaccttgttcagagctaaaggaaaagcagtaaataaatatctactatgtttaaagttcaagaagtcttatcatctttcctcatactactattaataatataaataatttccacagtgtaaagatgtcccttggaaacaactgtttacttgtaagaacaagctctggagtyagaagtcgcaaattggatagtgtagcggttggctttcaaatgtgatgagcagaaacagagctttcatggaaatgcctgagaggtgattgggagagtggcaggaaaatggaggccaaaaggataggtggaggagaagggaggggagcttgggacaacctaacctaatctcagccagagaagtcccgattttatctgttttacatattggctttctgtatgaccgtccttttcttaaaagaaagaaaacaaaaaagctgcttttctgtatgttaattgaaaactactggtataaacattcttactgcccatattagtgttttaaagcattaagaactttattctgcaattaatgaatcagctattggtattcaaaccagtttgagtcaggtgcaggttcctttaattaagctcccagtgtggttcacaaaagacaggtggctacagtttcactgctttgctcaaggatggcatgctgctttcagtttccactgttatctaatgactagaaataaatttttaccaacgatactgaaaaatgaaatggtcacattatatccttcttttacacctttatgaaattcacctaacagaagaaagcattatgtttcccagttaacttaggtctaacctggcgaaatgcaagggttcaagtttgagaattcataaaattcgtagaagttttatgacggtacatggagatcattcctgttttcctgtattctgtccagctaacatgcacacaccctttttattttcattgttagaaataaactaatttccaaaagaaaatatgaaatcaagaaagctattgctctcctattatgtgcaaatattagtttccaaagaaa

SEQ ID NO: 673893 - DNA, 1254 bp, Homo sapiens
tatatggagggcaaagagcatgggctttgaaatttgacagaatgagggttgaaatttcagctcttctatttacwagctgtcaattatttggcaaattgtttcagcatcaacaccttctttagaaatgtgggaaataatagcaacttcattaggttggttggttttaataataacacatttggagtgaatagtgcaataatttgttcatattattattaaccttttaccaaataattttacaggatctagataaatgttgaggatggtgatgatgatgattataaaaaaatcctgtattcagtgcttactctgttccatgctctgggctaagtactttacctaaaataaccccttcttaatatgtgcaaagaaaacttcttgagtttccagattctcttctaatcaccaccatactcttagctcttgatcagtgccaagtgtctcaaaaaagttgtataaatatattgtcttcactttttttactcccattcacacaagcctactcctatatatcttgtactatgttgccagaattagtggatttttttcactacacatcttactttagttttcaacagagtgttttaaaaaaaagagtgtaaaaacagtttcttttcctgatttccataagaatatattatcttggtttctcttcttcttcattgtctttgtgagctattccttctcagttaatgcacacatatttgaattctttagggtataactcagagctctctttccttcacttcctacacttttatctattattgttgctatccatatactgaggactcccaaatagttccaattcagacttctattctcttagccagaatgttcttatttaatttcctacttggcatttctacttggctatttcacagaaatttaaaaatttctttccaaatttggttttctttcaattatgtttgtatcagttcattcaacccagttatatgaactagagttgctggagggagtagatacatgttgagaatcaactttcgattccagggctcaggaatctaccaaaccaaatatgacactcaaacttgttgtcctcaacatgtatggcagttaaaactgtcacgtattcttctttaaataatctgatttcctgttttctaccatatctaaatttatttggtcaacatgtacctttgctcttaagatcaaacttctttctctaactccatacttgatagccagaagaaaattcaccaactcagcataccactcagcaaaccacttggc

SEQ ID NO: 673894 - DNA, 1254 bp, Homo sapiens
tatatggagggcaaagagcatgggctttgaaatttgacagaatgagggttgaaatttcagctcttctatttactagctgtcaattatttggcaaattstttcagcatcaacaccttctttagaaatgtgggaaataatagcaacttcattaggttggttggttttaataataacacatttggagtgaatagtgcaataatttgttcatattattattaaccttttaccaaataattttacaggatctagataaatgttgaggatggtgatgatgatgattataaaaaaatcctgtattcagtgcttactctgttccatgctctgggctaagtactttacctaaaataaccccttcttaatatgtgcaaagaaaacttcttgagtttccagattctcttctaatcaccaccatactcttagctcttgatcagtgccaagtgtctcaaaaaagttgtataaatatattgtcttcactttttttactcccattcacacaagcctactcctatatatcttgtactatgttgccagaattagtggatttttttcactacacatcttactttagttttcaacagagtgttttaaaaaaaagagtgtaaaaacagtttcttttcctgatttccataagaatatattatcttggtttctcttcttcttcattgtctttgtgagctattccttctcagttaatgcacacatatttgaattctttagggtataactcagagctctctttccttcacttcctacacttttatctattattgttgctatccatatactgaggactcccaaatagttccaattcagacttctattctcttagccagaatgttcttatttaatttcctacttggcatttctacttggctatttcacagaaatttaaaaatttctttccaaatttggttttctttcaattatgtttgtatcagttcattcaacccagttatatgaactagagttgctggagggagtagatacatgttgagaatcaactttcgattccagggctcaggaatctaccaaaccaaatatgacactcaaacttgttgtcctcaacatgtatggcagttaaaactgtcacgtattcttctttaaataatctgatttcctgttttctaccatatctaaatttatttggtcaacatgtacctttgctcttaagatcaaacttctttctctaactccatacttgatagccagaagaaaattcaccaactcagcataccactcagcaaaccacttggc

SEQ ID NO: 673895 - DNA, 1254 bp, Homo sapiens
tatatggagggcaaagagcatgggctttgaaatttgacagaatgagggttgaaatttcagctcttctatttactagctgtcaattatttggcaaattgtttcagcatcaacaccttctttagaaatgtgggaaataatagcaacttcattaggttggttggttttaataataacacatttggagtgaatagtgcaataatttgttcatattattattaaccttttaccaaataattttacaggatctagataaatgttgaggatggtgatgatgatgattataaaaaaatcctgtattcagtgcttactctgttccatgctctgggctaagtactttacctaaaataaccccttcttaatatgtgcaaagaaaacttcttgartttccagattctcttctaatcaccaccatactcttagctcttgatcagtgccaagtgtctcaaaaaagttgtataaatatattgtcttcactttttttactcccattcacacaagcctactcctatatatcttgtactatgttgccagaattagtggatttttttcactacacatcttactttagttttcaacagagtgttttaaaaaaaagagtgtaaaaacagtttcttttcctgatttccataagaatatattatcttggtttctcttcttcttcattgtctttgtgagctattccttctcagttaatgcacacatatttgaattctttagggtataactcagagctctctttccttcacttcctacacttttatctattattgttgctatccatatactgaggactcccaaatagttccaattcagacttctattctcttagccagaatgttcttatttaatttcctacttggcatttctacttggctatttcacagaaatttaaaaatttctttccaaatttggttttctttcaattatgtttgtatcagttcattcaacccagttatatgaactagagttgctggagggagtagatacatgttgagaatcaactttcgattccagggctcaggaatctaccaaaccaaatatgacactcaaacttgttgtcctcaacatgtatggcagttaaaactgtcacgtattcttctttaaataatctgatttcctgttttctaccatatctaaatttatttggtcaacatgtacctttgctcttaagatcaaacttctttctctaactccatacttgatagccagaagaaaattcaccaactcagcataccactcagcaaaccacttggc

SEQ ID NO: 673896 - DNA, 1254 bp, Homo sapiens
tatatggagggcaaagagcatgggctttgaaatttgacagaatgagggttgaaatttcagctcttctatttactagctgtcaattatttggcaaattgtttcagcatcaacaccttctttagaaatgtgggaaataatagcaacttcattaggttggttggttttaataataacacatttggagtgaatagtgcaataatttgttcatattattattaaccttttaccaaataattttacaggatctagataaatgttgaggatggtgatgatgatgattataaaaaaatcctgtattcagtgcttactctgttccatgctctgggctaagtactttacctaaaataaccccttcttaatatgtgcaaagaaaacttcttgagtttccagattctcttctaatcaccaccatactcttagctcttgatcastgccaagtgtctcaaaaaagttgtataaatatattgtcttcactttttttactcccattcacacaagcctactcctatatatcttgtactatgttgccagaattagtggatttttttcactacacatcttactttagttttcaacagagtgttttaaaaaaaagagtgtaaaaacagtttcttttcctgatttccataagaatatattatcttggtttctcttcttcttcattgtctttgtgagctattccttctcagttaatgcacacatatttgaattctttagggtataactcagagctctctttccttcacttcctacacttttatctattattgttgctatccatatactgaggactcccaaatagttccaattcagacttctattctcttagccagaatgttcttatttaatttcctacttggcatttctacttggctatttcacagaaatttaaaaatttctttccaaatttggttttctttcaattatgtttgtatcagttcattcaacccagttatatgaactagagttgctggagggagtagatacatgttgagaatcaactttcgattccagggctcaggaatctaccaaaccaaatatgacactcaaacttgttgtcctcaacatgtatggcagttaaaactgtcacgtattcttctttaaataatctgatttcctgttttctaccatatctaaatttatttggtcaacatgtacctttgctcttaagatcaaacttctttctctaactccatacttgatagccagaagaaaattcaccaactcagcataccactcagcaaaccacttggc

SEQ ID NO: 673897 - DNA, 587 bp, Homo sapiens
atgagctatttagtttataatgccaccgtccccattcttttagtggtgacggtgctattatatttccttgaacagataacaggctgtagcacagaatggttaagaacacaggcaggcacggacggctgtgatggcttactcatgtaatcccagcactttgggaagccaaggcaggaggatcacttgaggtcaggagtttgagactagcctggccaacatggtgaaaccctgtctctactaaaaatmcaaaaaaaaaaaaaaaaaaaattaggagtggtggcatgcccctgtaatctcagctactcgggaggctgaggcaggagaatcgcttgaacatgggaagtggaggttgcagtgagctgagatagcaccactggactccagcctgggcaacagagcaagactcagtctcagaggaaaaaaaaagtgggggggagaagaacacagggaggcaggtaggtatttgataccagctcagccacatactcacagcatgaactggagcacaaattacttacgactatgaactaaaagttatgaactgaaacttgccaagtctcagttttttcacctgtaaaacagggtta

SEQ ID NO: 673898 - DNA, 670 bp, Homo sapiens
tgattacgatatttgaaatctgccctccatgtctgasagcactacagagactttatactgaaatacagatgtcaatattcagtgagtttcaatgtgttatttaatactgatagaaatctgagatgaaatctgtttcatcgatattttggtaaaattaccaatatttttggagaaagataaaggggatgctatcttaaagatgccattttatcacagcactgctctagcaagcggtctattacctgtagacttgttataatagactttttgaaaccctagtggaaataaaaatttatgaggcactgctttattttttcaaactgaagtaattctgactttgtgaacttttaaagaaatcagttctgcataatttattcaacccaatgtagaactttaacattttatttttacggtatacaaatgtgcaaatatctttaattgtctaaatagcaaatctagcatttgaggtctttgcttcaccgagagcactttccaccctgcccctcggctgggcttcctggtttcttccattcttcctctttgaaaagtgcctgggtgtcttctgggaagcctgtcctcccattccagaccatataaggccttctcacccacttccccactcctttgcccaacatcttgttcaagcttctaatgtatgagctaaacggca

SEQ ID NO: 673899 - DNA, 670 bp, Homo sapiens
tgattacgatatttgaaatctgccctccatgtctgagagcactacagagactttatactgaaatacagatgtcaatattcagtgagtttcaatgtgttatttaatactgatagaaatctgagatgaaatctgtttcatcgatattttggtaaaattaccaatatttttggagaaagataaaggggatgctatcttaaagatgccattttatcacagyactgctctagcaagcggtctattacctgtagacttgttataatagactttttgaaaccctagtggaaataaaaatttatgaggcactgctttattttttcaaactgaagtaattctgactttgtgaacttttaaagaaatcagttctgcataatttattcaacccaatgtagaactttaacattttatttttacggtatacaaatgtgcaaatatctttaattgtctaaatagcaaatctagcatttgaggtctttgcttcaccgagagcactttccaccctgcccctcggctgggcttcctggtttcttccattcttcctctttgaaaagtgcctgggtgtcttctgggaagcctgtcctcccattccagaccatataaggccttctcacccacttccccactcctttgcccaacatcttgttcaagcttctaatgtatgagctaaacggca

SEQ ID NO: 673900 - DNA, 833 bp, Homo sapiens
gtgttatacatctattagaaacaacgatatgtctgccatgcagccaatactatcccgtcatcgttactggatatggcatgcatgccaattgtctagcctgttctcgcctttaaaactgttgttaaaaattagtatgttgtcacacattttgatacaatcttgactacctactaatgtttttaaaaggttgrtaactacatttgtaagatataaaatatggtagcctaaaattggacgaatatttttgtttttacattttttcagtctcctcttattacatttgatggtgaatttttcagggaacaaatctcagggttttttttttttttctgatttcagtggcattgtgctttagactatgctagagtttcagagaaaatttaatatggattattttatgaaagatgggaacttctttggcagatgaacctcctttttgtactctctcttttaggaatattaatattaattcataattaacccatgaagccttattctttctacttcttccttcctctttttgatgggatagccacataataagcatggccctctggccatggaaccatatagatagtttcttcaactcatcagcactggcaaatactgtcgtggttcaacaccccattctgtggccacagaaaatgctgacagaccacgtttaaaaagacacagactaattgtgaaaattagcttgcatttctcctaagccaagttcaatttttgccagtgagttgactttggaaaatacagagtaaatagttgcatttcttattcatcaagcaacttgacattatactaccaagcactgcttttatttttaatatgctttg

SEQ ID NO: 673901 - DNA, 833 bp, Homo sapiens
gtgttatacatctattagaaacaacgatatgtctgccatgcagccaatactatcccgtcatcgttactggatatggcatgcatgccaattgtctagcctgttctcgcctttaaaactgttgttaaaaattagtatgttgtcacacattttgatacaatcttgactacctactaatgtttttaaaaggttggtaactacatttgtaagatataaaatatggtagcctaaaattggacgaatrtttttgtttttacattttttcagtctcctcttattacatttgatggtgaatttttcagggaacaaatctcagggttttttttttttttctgatttcagtggcattgtgctttagactatgctagagtttcagagaaaatttaatatggattattttatgaaagatgggaacttctttggcagatgaacctcctttttgtactctctcttttaggaatattaatattaattcataattaacccatgaagccttattctttctacttcttccttcctctttttgatgggatagccacataataagcatggccctctggccatggaaccatatagatagtttcttcaactcatcagcactggcaaatactgtcgtggttcaacaccccattctgtggccacagaaaatgctgacagaccacgtttaaaaagacacagactaattgtgaaaattagcttgcatttctcctaagccaagttcaatttttgccagtgagttgactttggaaaatacagagtaaatagttgcatttcttattcatcaagcaacttgacattatactaccaagcactgcttttatttttaatatgctttg

SEQ ID NO: 673902 - DNA, 1534 bp, Homo sapiens
aactgatatctatatatatgaatcattcaagcctaaagtctagtaataaactgtacttgtgaatagagaaaccctaaatattcatgcagaaaaaattatgcggtctgttaagaaaaatgagtaatttgtgttttggacttgaaataaacagtgttctgtagataattcctcaacttcagttgaatgtttctcattctcaggtagtttttcaggcagtatttgaatgaggggaccagacagtgctggtattgttcctttgttcctgttccccgctcccccctccacacagacagacacatgcacacacacacacacacactcctgcttagccctattttcgaaacttgcctgataattagaattgcttaaggtacagattcttagccttcaatccagacgtaccacccgctaagccagaatctttaagagaatgggcctcagaatttatttgtaaggaatacctcaggtaattctgatcaggaacacttaggaaacactggtttttcaagttaatattgaccatctttgttaggcacttgaaatggccttactcaggtaattttggtctgattcccttcatctggttttgtgtcattcagaagacttcacaaaattctaatgtatgattttagaaaacagcaaattttgatagtctttagatttttatctttgggtagcatttccaagttgtcatatttcccacattaaatctacactgtgtgtactagccagtttctctgcattaggaaatgaacccataacagttacagatcaggtttttaaaaccttgaccatggtgctaaggctgcttaggtttcctaacagtaattctacgtgcctttctgtaggtagatctgtttctgcaggtagatcttcagaatccaacattacacctacctttacccacattcttgaacctaatttgctgaattaccactgggagatattttgttctatagaaaacagatattttctacagaatcaggctgtccttatccaagtatttcacataacctctattgataacagaagtgcagcaagttgctagtaagatgtgccattaacatgttaacagtgtgtaactacagagcttttatgtgtcagaataagcgggtaatactgtagtaaagaatttataaaactttcaagttgctttgagtatattgaaaataagagtcatggaatattgtaacagtgatactgaatgaattgttctaattaaagtagsaaatgcttaaaagatagcttttgagtatgttccattaaggtcagccatcaatttgttagatgatactcatcactgattattttctatttgactatggcaagaaagctccaataaagacgacccaactttcctgtttttaggcaaaaaccatcattcctaggcactgttagaaaagcacgtacagaaaaattgccatactcctgagtcactttgagtaccagctttgcatttgttctaccaccactagtggctgagagcacatttgggctgcctgtaattactccattcaagagagcatttgacatg

SEQ ID NO: 673903 - DNA, 1534 bp, Homo sapiens
aactgatatctatatatatgaatcattcaagcctaaagtctagtaataaactgtacttgtgaatagagaaaccctaaatattcatgcagaaaaaattatgcggtctgttaagaaaaatgagtaatttgtgttttggacttgaaataaacagtgttctgtagataattcctcaacttcagttgaatgtttctcattctcaggtagtttttcaggcagtatttgaatgaggggaccagacagtgctggtattgttcctttgttcctgttccccgctcccccctccacacagacagacacatgcacacacacacacacacactcctgcttagccctattttcgaaacttgcctgataattagaattgcttaaggtacagattcttagccttcaatccagacgtaccacccgctaagccagaatctttaagagaatgggcctcagaatttatttgtaaggaatacctcaggtaattctgatcaggaacacttaggaaacactggtttttcaagttaatattgaccatctttgttaggcacttgaaatggccttactcaggtaattttggtctgattcccttcatctggttttgtgtcattcagaagacttcacaaaattctaatgtatgattttagaaaacagcaaattttgatagtctttagatttttatctttgggtagcatttccaagttgtcatatttcccacattaaatctacactgtgtgtactagccagtttctctgcattaggaaatgaacccataacagttacagatcaggtttttaaaaccttgaccatggtgctaaggctgcttaggtttcctaacagtaattctacgtgcctttctgtaggtagatctgtttctgcaggtagatcttcagaatccaacattacacctacctttacccacattcttgaacctaatttgctgaattaccactgggagatattttgttctatagaaaacagatattttctacagaatcaggctgtccttatccaagtatttcacataacctctattgataacagaagtgcagcaagttgctagtaagatgtgccattaacatgttaacagtgtgtaactacagagcttttatgtgtcagaataagcgggtaatactgtagtaaagaatttataaaactttcaagttgctttgagtatattgaaaataagagtcatggaatattgtaacagtgatactgaatgaattgttctaattaaagtagcaaatgcttaaaagatagcttttgagtatgttccattaaggtcagccatcaatttgttagatgatactcatcactgattattttctatttgactatggcaagaaagctccaataaagacsacccaactttcctgtttttaggcaaaaaccatcattcctaggcactgttagaaaagcacgtacagaaaaattgccatactcctgagtcactttgagtaccagctttgcatttgttctaccaccactagtggctgagagcacatttgggctgcctgtaattactccattcaagagagcatttgacatg

SEQ ID NO: 673904 - DNA, 517 bp, Homo sapiens
gggctacaggcgcccgccaccacgcccagctgattttttgtatttttagtagagacgagatttcacagtgttagccagaatggtcttgatctcctgacttcatgatccacctgcctcggtctcccaaagtactgggattacaggcatgagccatcgcrcccggccagaacaattttttaaaaatgtaaagtacttgggaagaaacgcacccagaaatttgcgtcaatgatgaaaacatttggaatcatgttaagtttgagtaaatggagaaatgtgcagtaggcctggggagaaaggctggagattgtagaggtgtcagttgtctccagattaatacgatttcagtcaaattacaactgtggtcacctgtaaaactgataaaataattctgaccgggtgcagtgactcatgcctgttatcccagcactttgggaggccgaggcaggggcatcacctgaggttaagagttcaagaccagcctggccaacatggtgaaaccccatctctactaaaaata

SEQ ID NO: 673905 - DNA, 629 bp, Homo sapiens
gatcagtcaacctccccagccttctgtttgccttgcagagccagccgactcccaggagagctgtagaggctggtcagcagcctcactgtccctgccctgcctggtgagggaagggaggccacggaggaaattccctcccgctccatgtctgcctcgtgtccttctctctcctgctgtgctcctgggcagcagctccctcctccagccttccaggtctcccaatcctggccccagccacttccttgggaaccctaagcctgcctggagtccaccctcctccatttttttgggttttttttgagacggagtctcgctctgtcactcaggctggagtgcagtggcacgatcttgactcactgygagctccacctcctgggttcacaccattttcctgcctcagcctcctgagtagctgagactacaggtgtccaccactacgcgtggctaatttttttttttttttttgtatttttagtagagacgaggtttcaccattttagccaggatggtctcaatctcctgaccttgtgatccgtccacctcagcctcccaaagtgctgggattacaggcatgagccactgttcctggcccacccttctccttctgatagcacagcccctgtgtcact

SEQ ID NO: 673906 - DNA, 629 bp, Homo sapiens
gatcagtcaacctccccagccttctgtttgccttgcagagccagccgactcccaggagagctgtagaggctggtcagcagcctcactgtccctgccctgcctggtgagggaagggaggccacggaggaaattccctcccgctccatgtctgcctcgtgtccttctctctcctgctgtgctcctgggcagcagctccctcctccagccttccaggtctcccaatcctggccccagccacttccttgggaaccctaagcctgcctggagtccaccctcctccatttttttgggttttttttgagacggagtctcgctctgtcactcaggctggagtgcagtggcacgatcttgactcactgcgagctccacctcctgggttcacaccattttcctgcctcagcctcctgagtagctgagactacaggtgtccaccactacgcstggctaatttttttttttttttttgtatttttagtagagacgaggtttcaccattttagccaggatggtctcaatctcctgaccttgtgatccgtccacctcagcctcccaaagtgctgggattacaggcatgagccactgttcctggcccacccttctccttctgatagcacagcccctgtgtcact

SEQ ID NO: 673907 - DNA, 592 bp, Homo sapiens
cgacaggttttgggactgggagttaagcacacagttctggtttctgccttttcacagtggtgatgaatgggcactgagaccctctcaagctaaagttgtcatcattgctcttcatagtctgaaggtgcatgaaatggtcaactttcttccaaagggcttttatgcctaagtctgtggatagtgtatawacagatatttactgaattcctgctgggtgcagacactgtggccagccctgaggctacagtcgagatgaagccagtctctgtcctcatggagacctatctattgataagaaaagagaaagctcactgagcattgaccctgtgcccactgcttttgatgcatctctcatttaatccttctatcaaatcggtgaaataaacacatcaccatcatccctatttcacatttagggaaacatatgcttagagagggtaagtaacttggtcaaggtcgcacagcttcgaactctcatcccacaggtgcaggaatgagaggcagcagccggggaagccagggtctccggaagtccttgtctctgggcggtgatccagagagagagagagaacacgattgtctcagcaatggg

SEQ ID NO: 673908 - DNA, 592 bp, Homo sapiens
cgacaggttttgggactgggagttaagcacacagttctggtttctgccttttcacagtggtgatgaatgggcactgagaccctctcaagctaaagttgtcatcattgctcttcatagtctgaaggtgcatgaaatggtcaactttcttccaaagggcttttatgcctaagtctgtggatagtgtataaacagatatttactgaattcctgctgggtgcagacactgtggccagccctgaggctacagtcgagatgaagccagtctctgtcctcwtggagacctatctattgataagaaaagagaaagctcactgagcattgaccctgtgcccactgcttttgatgcatctctcatttaatccttctatcaaatcggtgaaataaacacatcaccatcatccctatttcacatttagggaaacatatgcttagagagggtaagtaacttggtcaaggtcgcacagcttcgaactctcatcccacaggtgcaggaatgagaggcagcagccggggaagccagggtctccggaagtccttgtctctgggcggtgatccagagagagagagagaacacgattgtctcagcaatggg

SEQ ID NO: 673909 - DNA, 586 bp, Homo sapiens
cctcctaaagtgctgggattgcgggctttagccactcacctggcccacacagctgtttttagattggtatacgagagagtgaattttattgtgcataaaaggtggaaaaatgaacaggtaaaaaaatttactcaaaaaaattttgggggtgagtttggccttctatatggagataataaataagtagtgaaaaacatgaacccaattattctttctaccttctctgcccaaatcatttttttctcaagtgaccaaaaccacacactttgaggtctttttgttgttgttgatacagggtctcactcagtcatccaggctggagtgcagtggtgcaatcacacctcactgcagccttgacctcccgggttgaaagtgatcccctcaccgcagcctcctatggagctgggactacaggcgcctgccacaatgcctggctaatttttgtgttttctgtagagacagagtttcaccgtgtttcccaggctggtytcaaactcctgagctcaagtgatccacctgccttggcctcccaaagagctgagattacaggcgtgacccactggcgcctggcccactttgaagtcct

SEQ ID NO: 673910 - DNA, 1541 bp, Homo sapiens
  misc_feature 820: n = A,T,C or G
ggctcctattgggggtaggtaccagtaaagctggtgggaaggggtcagattctggatatgtcttgaaggtagtagagatttgaaggttttcattcatttttatgtaggaaaatagaaaacattcagtctacttgctttggacatttcaactatatttaatagataaaacaaattgaaaaaggcctttggatcttttctttttttttttgaaatggagtctttctctgttgcccaggctggagtgcaatggcatgatctcagctcactgcaacctccacctcttgggtttaagcacttcttctgcctcagcctcccgagtagctgggattgcaggtgtgcaccaccatgcttggctaatttttttttttttttttttttagtagagacagggtttcaccatgttggccaggctggtcttgaactcctgacctcaagtgatctgcccacctcggcctcccaaagtgctgggattacaggaatgagccaccatgcccagctggccttttggttctacaacagacacttgaatgggaagcagagtggtggtaaggacagggtagggagataccagtagtagatcctggagggcagggggttgtccatgccgtctttggtttccctgggctcagcacacaccaggcttgataaacaccagttgctgcctgtgttacagttagagcttgagcagacctcagggatcatctcctccaacaagcccattttacagatgggaaaatgggccaacagagggagaggggtctgcccaagctcaaggtcagtcagggtcagggcagaaaaccctttcttgggctcttctggnccaggcctcccctgatgcagggaggcagaatatggaggtcattttcatggaagaagggtaaggcccacgaggggtggctgagcaccacctccctcagcgttgggccgtggtgaaggcctctgcctttctacacctcccacctacagttagtcatgggggcacctgctgtttctgcctgcccagtatccatccctctttttctggctactatgctccagttttccttgggagatctcgctttccgccagctagtggatcgacctcactccaactctagatactagggtggccaatcagatgactgcagattttttggctaggggcgccctcttctgctctaagccaggttgagctgggtttctgatactagcaaccaacaatgtcctgactgatagaatcaccgcacattcagacacttactctaggttggtcatgtgccatgcatttcatcatttaatcctcgtagtgtctctgtgaggtaaggactactgttagccatccccagcatgcatgacgaaatggagtttcagagagttcagtcacttgcccaaagtcacacagctggtttagttaagggcagagatgaaaccagggattgaagccaggtgtgtgtgatcccagctctgtttttttttgktggtggtggtggtggttgttgtttgttttttaccattttaccatagtctctctgccttttaaaaaccaacacaagatggataga

SEQ ID NO: 673911 - DNA, 627 bp, Homo sapiens
gagagcttcttaagatcagcgtttaagagtcaaagcacctgtaagggagagttaacgaccctttcaaatcaagtgagggcagaagggtgagggcatagttcaaaggaacgaggcagctccaccggaaggtggcgagtaaaagctgcacaccrtggcaaatcagtagcaatgggaaagggcaggaaggtacagccaagaatagctacaaacaactggtcaccttcaaaggaaacgctgcatatggatgtctgtgtatatgtactatacatatcaaccaagcacacacataaatatttaatatataaaaaataaagtgctttctaacaggtccctgggcagggacattataaaacatttcacagaactgcaaaacaaaattgatacaatcaaagaacactacatccaacatatgtgaaaacagccaaacacagtatgtacaatctggtgggtgtcccaggacaaacatcctgtcatatacatggtatatacatatatactcttttactcaatatattatgacaatatatattttaaaattttgttatagacaaaaaataaaaaaccaaaacaaaagacaacccctacaaaaacacgataaggatcaagcaggtgagtcctagactgaca

SEQ ID NO: 673912 - DNA, 689 bp, Homo sapiens
tgtcgcaaaaaaaaaagtaactgtgctattttccattattacaaaacaaaaagccccaaaagacactcacccaaaaatcagtccctctttgaatacaatctaaatgacaattcatttataggtatattaaaacttttagataatgaacatttaaatgtcatataaagacataatttaataaatgctatttttaaatacacatactctggaatttcaaattacaattatgactgagatggcaggcctaccacattctttaatatattcgcctgctgttttgccaagtgtatgatttgaattctacaaattaaaaatatgtgcctgtgcctctagtataaacaaacccacttagttccattagacgatagtcacaagcctttctcgcagcctcaattcagttaaggcacttytactctcacttcaaacccaaaatctgctgcctcccaatgtcatcacatttgtttgtttctctttctagtcaggtttccttcacatattggccagttaaaagtttacggatagaagtcctggctactcggaaggctgaggtaggaggataggctgagcccaggagtttgaggctatagcgtgctatcattgcacctgtgaatagccactgcactccagcctgggcaacacagaaaaacaccatctcttaaaaaaaaaaaaaaaaaaaaaaaaaaaaaaaa

SEQ ID NO: 673913 - DNA, 763 bp, Homo sapiens
ttactcctgctgagttagcaggttggtgagcgaaactcccctgagcacatctgtctctctaactgccttggagtaggtggcattatcctgtccacacagaaccagaaaagggacagaactctggccttgcagttgtggcaggtttcactgtggtaaactagggtcattcctcatcaaggaatgtgtagcagattgttgactgtggaggagttaattatagagtgggttattcttatttacaaagttacagatttcakccagtctctgcttttgtacttttgtgaaattttatttctctctatagcatctttttcatttttggttataaaaagtgactttcgctttttaaaagagttgagaacatctctcatgtcacatactgcaggtgtgtcagttacttttgcatagattcgagggggatatttttctaaataggaagacaggacaaagttaacagtttaagggctcttaattctgtgagttgaggacttaaaagtattgtagtacttgtttggatccagaaaattttactcagtgagctttaaaatttccatttgtagcatttggtctccattgggctgtgcatgaactatttttcttacatcttttctccttagatatctatgttgttggtattaaagtatgagttaacatctgtagcttttccaggtttgtttgtttggttttttggtatgaaattgcctttctccattgcagaaataagctgggggaaacactgacccaaaaactttctgtagagctg

SEQ ID NO: 673914 - DNA, 2504 bp, Homo sapiens
gttgttattgagtgaagagatccctgaaagacacagagtgaaggaaatattgggcctggggcatatcttcttgggggttcagcatcctcaaatgttgaattgccaaattgctaattggggtgatttccataatgcctgatagtgagattttttttttacatatctgaaaaaatcattacagtatgtttcaccttctctttcattatttgttgtttcatttatcacatataaagttaaagaatgtaacactagactttgtaccttggagtaaccagtgttgggtgtgacttacatcttttccaraattgatgtttgtatcttacaaagtctacaggtgctggccaggctagtctcagtctctttgaaaactgaatttttatgtcttttattactggccaaaagtatgttatttgtttgaaatagtgtgtgcataaaaacatgctaacttaatcccaggacaccaataacttaagcaacaacctttaaaaccgtagtcagttgttgtttctaaaacaactgaattatttttcctagccatagtgttggtgaggattgattttattttctcatgtcttttgaagctctcatgagggagagaaatgttttgaaatgttatctggtgattgtttattcctggtaattcttgctgccccaaagtccttcacctactgtgtgaggcatccttagcttcagaggagggcagaggccagtcaacagcagaggtgataaagttcagattttgacttctaaagctatcacttaatactttcttcagagacgacaattgtaagaataagcttgtaattcagtctttttagaaaaggaaaaaatcttataaataaaaaaatgaaagttttttaaacagcaacaagcaaagattgcaaccaaggagcacagggtttttaccctaagccacagagtaggaaggatgcaatagatgacccagggacagttcccacttaacagaaaggagaataccctctaagctggaccaaaaaaatccctaaaggaggtgacgtgaacacacagcctgctccttgtgcatatgcacgcacacgagcgcacgcgcacatgcgcgcacacacacacacacaccacttcactcagggcctgaaatccctagaataaaggggagcccttttcagaagccacaggattgacagaacagagcaaggtcagctggagaatatagctgagtcttagaagatcaagcaacaccagcagtgatccagaagggttcacaaccagctgggtgatattaccaagctttcccagggtgatccctgtgaactatattaatccaggaaaaaataatacaagttatatgagacaaagactcttcaaaagtggacaccctaaaactatggtgatgccccaagagcagattacaccagatctttgggagctagtatgggataaatatcctttcccagccggaaaattatgtcagcccagtccacactgagatcaggccttgaaagaagggcaggtgaaggagaaaaggaaaaatgttgaagttgactcaatatttagccacaagagactaactttattagtcaaaagtgactgagatgccttgaaatggcaagattagatcctccctccatcatctgcagaaggctgaattcacttattaaaaataattgaacttctgtgtatatgagttgcagcggatacacttaagcctatcatgcttaaggcagtcattgcattttgctgtacctcagttcaagcatgaatattataaggaacaatgaaaggtctacttataaggtgcattcattaacttattctcaaaactgtatgttccaccaagataggggtttcagtctatattgtttatggatacatccctattatctagacagtgccccacatatactggatgctcaatacttttaacaaacaaaatacaattgattgttcattagttatctgacaaaaagtccttgaagaatttaaagagctgattttcaagctttttaaatactggtaccctttacttactctttagtttaatattaataacaagtttgatcaaaaatgataaattaggaaatggctgtttttcattactataaatcattgtgacctgtccaaaataaaacattaaagagcaaattttctgggtacatttaaagtatgatctcttttcatgcaaatctccaagatcatgcctactattatccataacctgcaccaggagaacttcacctgaggctctactactactcagtaccccaactaaaaaaaatgtttaaggccttatcataaaaaacctggtagctaacatccttgaaattaacattttggagctcaaatagacatttaatggtcaaacacatgtaacactataagtaaataagtctaattttcaaaggtataaaatttctaattaaaaaagccttgaccttgcctcttctttgccttatggttgtgtaaagtttcattttcatcatcatgccaatttcctaccttctcttcctactcccactgagattttc

SEQ ID NO: 673915 - DNA, 2504 bp, Homo sapiens
gttgttattgagtgaagagatccctgaaagacacagagtgaaggaaatattgggcctggggcatatcttcttgggggttcagcatcctcaaatgttgaattgccaaattgctaattggggtgatttccataatgcctgatagtgagattttttttttacatatctgaaaaaatcattacagtatgtttcaccttctctttcattatttgttgtttcatttatcacatataaagttaaagaatgtaacactagactttgtaccttggagtaaccagtgttgggtgtgacttacatcttttccagaattgatgtttgtatcttacaaagtctacaggtgctggccaggctagtctcagtctctttgaaaactgaatttttatgtcttttattactggccaaaagtatgttatttgtttgaaatagtgtgtgcataaaaacatgctaacttaatcccaggacaccaataacttaagcaacaacctttaaaaccgtagtcagttgttgtttctaaaacaactgaattatttttcctagccatagtgttggtgaggattgattttattttctcatgtcttttgaagctctcatgagggagagaaatgttttgaaatgttatctggtgattgtttattcctggtaattcttgctgccccaaagtccttcacctactgtgtgaggcatccttagcttcagaggagggcagaggccagtcaacagcagaggtgataaagttcagattttgacttctaaagctatcacttaatactttcttcagagacgacaattgtaagaataagcttgtaattcagtctttttagaaaaggaaaaaatcttataaataaaaaaatgaaagttttttaaacagcaacaagcaaagattgcaaccaaggagcacagggtttttaccctaagccacagagtaggaaggatgcaatagatgacccagggacagttcccacttaacagaaaggagaataccctctaagctggaccaaaaaaatccctaaaggaggtgacgtgaacacacagcctgctccttgtgcatatgcacgcacacgagcgcacgcgcacatgcgcgcacacacacacacacaccacttcactcagggcctgaaatccctagaataaaggggagcccttttcagaagccacaggattgacagaacagagcaaggtcagctggagaatatagctgagtcttagaagatcaagcaacaccagcagtgatccagaagggttcacaaccagctgggtgatattaccaagctttcccagggtgatccctgtgaactatattaatccaggaaaaaataatacaagttatatgagacaaagactcttcaaaagtggacaccctaaaactatggtgatgccccaagagcagattacaccagatctttgggagctagtatgggataaatatcctttcccagccggaaaattatgtcagcccagtccacactgagatcaggccttgaaagaagggcaggtgaaggagaaaaggaaaaatgttgaagttgactcaatatttagccacaagagactaactttattagtcaaaagtgactgagatgccttgaaatggcaagattagatcctccctccatcatctgcagaaggctgaattcacttattaaaaataattgaacttctgtgtatatgagttgcagcggatacacttaagcctatcaygcttaaggcagtcattgcattttgctgtacctcagttcaagcatgaatattataaggaacaatgaaaggtctacttataaggtgcattcattaacttattctcaaaactgtatgttccaccaagataggggtttcagtctatattgtttatggatacatccctattatctagacagtgccccacatatactggatgctcaatacttttaacaaacaaaatacaattgattgttcattagttatctgacaaaaagtccttgaagaatttaaagagctgattttcaagctttttaaatactggtaccctttacttactctttagtttaatattaataacaagtttgatcaaaaatgataaattaggaaatggctgtttttcattactataaatcattgtgacctgtccaaaataaaacattaaagagcaaattttctgggtacatttaaagtatgatctcttttcatgcaaatctccaagatcatgcctactattatccataacctgcaccaggagaacttcacctgaggctctactactactcagtaccccaactaaaaaaaatgtttaaggccttatcataaaaaacctggtagctaacatccttgaaattaacattttggagctcaaatagacatttaatggtcaaacacatgtaacactataagtaaataagtctaattttcaaaggtataaaatttctaattaaaaaagccttgaccttgcctcttctttgccttatggttgtgtaaagtttcattttcatcatcatgccaatttcctaccttctcttcctactcccactgagattttc

SEQ ID NO: 673916 - DNA, 2504 bp, Homo sapiens
gttgttattgagtgaagagatccctgaaagacacagagtgaaggaaatattgggcctggggcatatcttcttgggggttcagcatcctcaaatgttgaattgccaaattgctaattggggtgatttccataatgcctgatagtgagattttttttttacatatctgaaaaaatcattacagtatgtttcaccttctctttcattatttgttgtttcatttatcacatataaagttaaagaatgtaacactagactttgtaccttggagtaaccagtgttgggtgtgacttacatcttttccagaattgatgtttgtatcttacaaagtctacaggtgctggccaggctagtctcagtctctttgaaaactgaatttttatgtcttttattactggccaaaagtatgttatttgtttgaaatagtgtgtgcataaaaacatgctaacttaatcccaggacaccaataacttaagcaacaacctttaaaaccgtagtcagttgttgtttctaaaacaactgaattatttttcctagccatagtgttggtgaggattgattttattttctcatgtcttttgaagctctcatgagggagagaaatgttttgaaatgttatctggtgattgtttattcctggtaattcttgctgccccaaagtccttcacctactgtgtgaggcatccttagcttcagaggagggcagaggccagtcaacagcagaggtgataaagttcagattttgacttctaaagctatcacttaatactttcttcagagacgacaattgtaagaataagcttgtaattcagtctttttagaaaaggaaaaaatcttataaataaaaaaatgaaagttttttaaacagcaacaagcaaagattgcaaccaaggagcacagggtttttaccctaagccacagagtaggaaggatgcaatagatgacccagggacagttcccacttaacagaaaggagaataccctctaagctggaccaaaaaaatccctaaaggaggtgacgtgaacacacagcctgctccttgtgcatatgcacgcacacgagcgcacgcgcacatgcgcgcacacacacacacacaccacttcactcagggcctgaaatccctagaataaaggggagcccttttcagaagccacaggattgacagaacagagcaaggtcagctggagaatatagctgagtcttagaagatcaagcaacaccagcagtgatccagaagggttcacaaccagctgggtgatattaccaagctttcccagggtgatccctgtgaactatattaatccaggaaaaaataatacaagttatatgagacaaagactcttcaaaagtggacaccctaaaactatggtgatgccccaagagcagattacaccagatctttgggagctagtatgggataaatatcctttcccagccggaaaattatgtcagcccagtccacactgagatcaggccttgaaagaagggcaggtgaaggagaaaaggaaaaatgttgaagttgactcaatatttagccacaagagactaactttattagtcaaaagtgactgagatgccttgaaatggcaagattagatcctccctccatcatctgcagaaggctgaattcacttattaaaaataattgaacttctgtgtatatgagttgcagcggatacacttaagcctatcatgcttaaggcagtcattgcattttgctgtacctcagttcaagcatgaatattatwaggaacaatgaaaggtctacttataaggtgcattcattaacttattctcaaaactgtatgttccaccaagataggggtttcagtctatattgtttatggatacatccctattatctagacagtgccccacatatactggatgctcaatacttttaacaaacaaaatacaattgattgttcattagttatctgacaaaaagtccttgaagaatttaaagagctgattttcaagctttttaaatactggtaccctttacttactctttagtttaatattaataacaagtttgatcaaaaatgataaattaggaaatggctgtttttcattactataaatcattgtgacctgtccaaaataaaacattaaagagcaaattttctgggtacatttaaagtatgatctcttttcatgcaaatctccaagatcatgcctactattatccataacctgcaccaggagaacttcacctgaggctctactactactcagtaccccaactaaaaaaaatgtttaaggccttatcataaaaaacctggtagctaacatccttgaaattaacattttggagctcaaatagacatttaatggtcaaacacatgtaacactataagtaaataagtctaattttcaaaggtataaaatttctaattaaaaaagccttgaccttgcctcttctttgccttatggttgtgtaaagtttcattttcatcatcatgccaatttcctaccttctcttcctactcccactgagattttc

SEQ ID NO: 673917 - DNA, 1703 bp, Homo sapiens
tgaatctaattggtttccctttttatcctctattttatatcatgtattaaacccattattctgaaagggtccattattaggcttcatcagaatgccaataagttaaatacacctactggccaatggatatgcaagtctgaaaatcaggggatatgataaatctaattaaaaaaacataaatgtagttaagttttacaggtgtttaacttgtgctggaagctgtgggtgtagataaaagttttcaaggagaaatatagagtttacggtaagaagaggcaagggtggaagcacagagaacaaaaacacaagaggtgaaaacagaatgaggctctagggtggaaaaattaacaagaagacagggaattaggagaaccaacagagtggtgttactgagacaaaatgaaaaaagcactggataggtagaatttgaggaaagattaaaaagtatgcatgaaattttggtaactaggaattttttggtgaccttagaaagttcagaagattagtatggatagaaataacaattctgtgatgaacaaggaatgaaactaattcacaagtattgattaggttttctagaaatctggttgtgaaaaaaagtgcagtaaaggtggagataggtccaaggggtcaaactttttaaaatatgagagagatttggtgatgtttatacctgttaccttgccttagaggcagccttttctctgaatgaaaactcatgaatatttaaagagaagctaggaagggacaaggcaatagcgcaatttgtgtatcctcatctgttcttccctgcacacccagcttttgctgctccttccattccagggctttgcctttcattgaaagcctggtcactccctaaaataacattttattatctctgacaaagaggaaagtacctggagcttccatgaccttaaatactaatagagttatsgagtgtttaccatgtgccaggcactgttttagtcactttatacatattaactcatttttcttgaaaaaaaatgccagttgcatcaatgaagaaatcgactactaaactcaaactttctctttcaattaactacattgaaaactgtggtacactgaaacattgtagacttcagtatcatagacagtacagttcaaattttgcttcagctatctgatcttttaggacctttataattactttatctatgtagtaataaaaatatctacctagaattgcttaagtaaggatcaaatgagatctcaaccacaatgctgagggcacagtccggactcaataatgccacaactctatgtcaataaacaaaacaacagccatgatagtaacagaaaaaaatatatatatttcaaaggtaactagttttgttttactcaaactatttacaacaaggggcagagtagagacatgaatagctgcacaagttattttaattataaattaataaaagcctacattaaattcatcttattaactacttatgagagtgtataaaaactgatgaagccaacattatttggtacttctgatacttccattcgcttcaacttttctttctaaatagaaaattaaaagatggcaagccatttacaaaaagacatgtaattttgttaatcaggttgacattttgaacatcttcctcttcagttcagctgtcttctcatctatcttagcataggagtcctctgctgccttttcaataccgtcgtgg

SEQ ID NO: 673918 - DNA, 2486 bp, Homo sapiens
cagtttgactaaactgttctgttattttaaattattaaactcctgtagttggcatttacaaataatgttggcctttttctctctcatgctaaatccaaagaatttacttcaaataatatttcttattataaccaccaagtttaggattgtgttataaataaaatactttagactggttgatctcatataatatcaaatgtatcctctatttagtgaagatatgaaagaggaatcaagagaagcacgttttctgatatttgaaatctgatcttttttcttctaactatggaagccctaaagtgtgagatctttgaaatattcatttttttttttttttttggkatgagctgcacatgtcttctggacaagatccctaaatatgggctggttgccatgagagagaaaatgtgatattaatgtggggtttattataagagaataaataaacccctgctggcaacaaataaaggcataattagattactctaaagaaacttctctataaacacactgagatggcttagtaaacaatgaagaaatattatgcaatagttttggcaagaattatacagaaagcaacaatggtcagatattgtttgtaagattaaatattgaagaggcgtcatttgtgtggggtaatacccaaggtttgttgcctcacaccaaggaaatcgaggacgtggacacaaacaaggagtgactttaagagcagaggtttaataggcgaaagaaaagagaaaagctctctctcctgcagtgagagaagtgctcccaggtgtgtcttctgctttgtggtgaaatgcgtggggttttatagaggagcctgaggaggtggtgtctgatttacacagggcatgagagattggtcagtccaggtgtgctgtttgcatagcgtacaaagaagctggctatcccaccctaatcttttattataaagataggggtctcatgttgcctgcttttttactgtacatgtggcaacaaagaaaatggaagagggaacctccatgttgaatattcctggcttccaagtatcccttttctattggcatagctgccagcatttacctatgcaggcttttagcttgcttacctatgcttgcagcttgatttttcaggctgctttttgttagaaaagaaattatttgggggctgctttttataaaatggaagccttaccgagggctctcttaccctcactatctgcctaaataatttctagctcctgtatcaatatgagatggcgtatagttgcactgagctagaagataatgaaattatataatcagaattttatatcaggaagggacctaaaagataaattaacccaaacatagcattttaaactataaaatataagattcagaaagattgactttttcaaagtcagattagtttgggtcatagtcaatatcacaattcagtttaatggaacagaaatatattgagcacttactatgtgacaggttcttagaaattcagggaacaaagatatttaaaaaggtgaatcctacctttgatcttactgtctcattagacagccattcatttcatgcgttctctagatttgaaaacttagtatggtattatagtacaatgatagagtatacaaagtatctgatttgctatttctgaaaatcctttctggaggaggtggcacatgagttggacacaccaagaaaggtaggaagggcatttcagagaaagataactgcaggagcaaaggtgtaggggtattgtgtatatatgaacaaacaagcagaaaagggtggaggcaggaagtggcaagagctttgctaggtaggaactaagtcttacagggcaacattgacaggcacttgggttttattctgtagaaaagtaatatatgacattcaaaggatttcaaaactgagaatataaatgtgaatttatttgatattctggttgcaatatggagaaaaggtgactgcttaggaagtaactagggtagcccaggaaagaggtgatgaggccatgatctagaacagtggtcatactggaatataccaacatataccaagaaggggaagattcgagaaagatgagaattgtcagaggagtctattattacttttaggtttctaattgagtacagatggtgttgcctaagtattggagcaaaatagattgcatttgtaataaaacaataaattccatttgaacacagtgagtttgagatacctgtgtgtcatccaagttgatatgtgcagaaggacatgtgaggctaaagttcctgatagagtaagactagggtgatatatatgggagtcagcaacttagttgaaatgatgagagtgaatgagatcactaaaaggttataataatgaagactattggccctgctaaaagcctgtaaaacatacacaaacacatacttattgagaaatgatcagagaggaaaaaaagagtcaatagagcatttgtatttatgctgaaggagagaattgaatttcaagaagtgagta

SEQ ID NO: 673919 - DNA, 2486 bp, Homo sapiens
cagtttgactaaactgttctgttattttaaattattaaactcctgtagttggcatttacaaataatgttggcctttttctctctcatgctaaatccaaagaatttacttcaaataatatttcttattataaccaccaagtttaggattgtgttataaataaaatactttagactggttgatctcatataatatcaaatgtatcctctatttagtgaagatatgaaagaggaatcaagagaagcacgttttctgatatttgaaatctgatcttttttcttctaactatggaagccctaaagtgtgagatctttgaaatattcatttttttttttttttttggtatgagctgcacrtgtcttctggacaagatccctaaatatgggctggttgccatgagagagaaaatgtgatattaatgtggggtttattataagagaataaataaacccctgctggcaacaaataaaggcataattagattactctaaagaaacttctctataaacacactgagatggcttagtaaacaatgaagaaatattatgcaatagttttggcaagaattatacagaaagcaacaatggtcagatattgtttgtaagattaaatattgaagaggcgtcatttgtgtggggtaatacccaaggtttgttgcctcacaccaaggaaatcgaggacgtggacacaaacaaggagtgactttaagagcagaggtttaataggcgaaagaaaagagaaaagctctctctcctgcagtgagagaagtgctcccaggtgtgtcttctgctttgtggtgaaatgcgtggggttttatagaggagcctgaggaggtggtgtctgatttacacagggcatgagagattggtcagtccaggtgtgctgtttgcatagcgtacaaagaagctggctatcccaccctaatcttttattataaagataggggtctcatgttgcctgcttttttactgtacatgtggcaacaaagaaaatggaagagggaacctccatgttgaatattcctggcttccaagtatcccttttctattggcatagctgccagcatttacctatgcaggcttttagcttgcttacctatgcttgcagcttgatttttcaggctgctttttgttagaaaagaaattatttgggggctgctttttataaaatggaagccttaccgagggctctcttaccctcactatctgcctaaataatttctagctcctgtatcaatatgagatggcgtatagttgcactgagctagaagataatgaaattatataatcagaattttatatcaggaagggacctaaaagataaattaacccaaacatagcattttaaactataaaatataagattcagaaagattgactttttcaaagtcagattagtttgggtcatagtcaatatcacaattcagtttaatggaacagaaatatattgagcacttactatgtgacaggttcttagaaattcagggaacaaagatatttaaaaaggtgaatcctacctttgatcttactgtctcattagacagccattcatttcatgcgttctctagatttgaaaacttagtatggtattatagtacaatgatagagtatacaaagtatctgatttgctatttctgaaaatcctttctggaggaggtggcacatgagttggacacaccaagaaaggtaggaagggcatttcagagaaagataactgcaggagcaaaggtgtaggggtattgtgtatatatgaacaaacaagcagaaaagggtggaggcaggaagtggcaagagctttgctaggtaggaactaagtcttacagggcaacattgacaggcacttgggttttattctgtagaaaagtaatatatgacattcaaaggatttcaaaactgagaatataaatgtgaatttatttgatattctggttgcaatatggagaaaaggtgactgcttaggaagtaactagggtagcccaggaaagaggtgatgaggccatgatctagaacagtggtcatactggaatataccaacatataccaagaaggggaagattcgagaaagatgagaattgtcagaggagtctattattacttttaggtttctaattgagtacagatggtgttgcctaagtattggagcaaaatagattgcatttgtaataaaacaataaattccatttgaacacagtgagtttgagatacctgtgtgtcatccaagttgatatgtgcagaaggacatgtgaggctaaagttcctgatagagtaagactagggtgatatatatgggagtcagcaacttagttgaaatgatgagagtgaatgagatcactaaaaggttataataatgaagactattggccctgctaaaagcctgtaaaacatacacaaacacatacttattgagaaatgatcagagaggaaaaaaagagtcaatagagcatttgtatttatgctgaaggagagaattgaatttcaagaagtgagta

SEQ ID NO: 673920 - DNA, 3777 bp, Homo sapiens
ctttaaagaactttggccataatggggaggagagagataaaggagctgtggttggtggtaggggtgagattaaggctaggttcttgaagagagactgaagcatggttgtgtgatcatggagaatgagcccgaaggaagggagaaactgatgatgaaggagatagagggagattatatagaaaggagcaaggccctgtatctgtgagcaagggtatatatatgtagtaatagaaatgtgaaggtgttcgtttctgaaggattcaccctgaagtgaagtatggatgtggtgcaacgccttgaggagaaggtatgagatagtcatttcagcaagtgggaaactgaacttagtagagcaacctagtagaatttctggggagagccaagtacccatttgaagttactgatcacagatttaacatgaaatctgtctctcctgtgtgagaacctatgtgattttcttcaagaacatttagtttcttggtgaaattagacttaggttttgctataagaatacattggagaaatcaggagtcaagggagtgtttgcaacagtaatcatactttagtcccatggagcccaaccatgggactaaagtagggaaataaatagaagagggatttgaagactggtgagaaagtagagttcaatcgattaattatctgatgaggtcaaaagattattttaatggggttacttgatcagttaatctcaaagaataggagatggtgtcagaaaacggaaggtttggatttgagatcttgcaggtggagaagtttctggtaatgacgaaattctgggtgaatcattggtggagtgatgcaaagctaattagaaatgagtgtttttaaatccatggtggaaatgtcaactgaagggagattcaggggggctttcccctgaatacagatgacacagtgaatggaagattgtgatcctgcagttgaagttcttggagcgtaggaggaaaaaccaggagggagaagttagttttgttttatttagcttcaaacatggattaaataaacaaagagttttgttttccttgcatatccagaagcctggatgtaggctctccaggctgtaaacagtagccacataatgccaatagcctccttttatccttcctctaaaccatctttagcttgtggcttttgcctccatgcttgctgcctcatggttatgaagatccatcatcaagttagcattacactcagaaagaatggagaggagggggacaaaatgagagagccagctgactcttcycccatttccagtgacttcttgcgaattctgtccagtattttgtgtttacaccacattaactaaaaccatgtgacatggctaatcttagcttcaagggaaacttaagttttaatttttcctttaaacctgggcatatttttgctccattcaaaatcagttttctttttttttggaaaaaagcaagtaatgcatagcaactaatagcatctgccatgtgttatatccaggacatgagttttaatggataaattaattttgtgaaaccaaggaggcttgttaatctgaaaataactatgtacagcaaaagggaagactaaattaccttttgatcctgcgatccacaggatacaagtaaagaaaattaaaattatatttattttttcttgtgtgagctacagttcaatttcattgaagtctaggaagtggtagaagtgaaaagagaagaagaaaaagatagggagcataagctaattcataaagacacagatataggagggccagtgatatggatataagagaaaaaggaattggaacaaaatagtgtgagattaatagttgatgaatagtgaggctttacctctgcaggtgcctgaggtaaacagagacataatataggatggtgttgatccctaatagtatattggaggagagtgtatatcattttgtggctgtggtctagatacttaggttagtggtgtattggctcccaggacagctgtccccttgacttacatgcagaacagtgagggagctataaggaagcctgctcctcaggcttcactggagctaagatgctgtgtgtcagtggcaggcatgcccagcacagttatggaggttgtgttctgcacaatagcacacagccaaaagaggttggttatctgatgagccagtgcctgtgccttggtgctttgagaatcaagccatgtacttaggtgttttgtccaccttgaagagcctttcttttctagttctcattaagacaatatttccaggcaatgctatgatatttgtgggtattcctatttatttaattaacttatgtatttttttcagtaacagagatttacttatacaggttctccagcctacatgttttgggggacccaaagacaaataaaacatgttccctatttatcctcaagaagcttagtgtataccaaggaaataagacacaatagctgtaatcacccagactcaaagagccccagcatgttagaaatggaagggaacttagaggccatctattcaaatcactcattcagacatgggaaccaaaactaaataaagacatttgtgaagaaggagagtaggaattgcaagactaatcctcaatccaaaagatgtttcttattttgtggaaaaggaattaagtcgaagacattttggctcagaaagatcaaaaaggactttgtttttaaaatgtccttcagtactacattggataatatttgtagtgagaacatggacttacagaatgttcttccaacagaaattatttgtcgggggaggatgctgttctccagggaaagggacagctttttttaatggccactactgaccttgaggataaatacagcattagagtaattataccagaaaagcagctctcataaaactatgttgactgttcttttcagagacagagtaggactccttgtttataaatattatccagaggcaaaaagcatggagcctgaacccaactccatcctacttctcatatatcatatgtggtgagaaattcctggaatttccattagaatcatcttattctatagttgagtggagtttagatacagtgaggccatcccccagagaaaattctatcaaaacatttaataatgtaacagaatatagttttccagtcacgattctttcatgaaccaagcgaaaagagctagtgagaatctttctaaacttctatgccttcaccacctcctcaactaagaaggacttaccaaaaaagcccccagactcctcacattttgttcccttaatacgttttcttagaatcatcattttattcattttcttttcactttgtctcagaatggacctacacatttccaaacctcagccttcccactccattcactctgctcacatttcattctcctattaaacataattaaccttatggctccttaagttaacgtaccatttctctccttccaatcacccttaacctcctgaaaaaagaaatctttgctcattgctttaactacctcaactcccattcactagcaaatttcttacaaatggagttctgcacccacaacttctctgacatcatgatcttcagggtattttttcagtcaattaacttagataaacctgaatcaaaccttacccatttcactcctgtttactcttggcttaattcaggattcctaaatgctcttagcttgagtcttccatatgcataatccagatttaaactattcattcccccactccattctccagattccaaccaagacaccaacatatgaccaggttcaaaagccagtgta

SEQ ID NO: 673921 - DNA, 3777 bp, Homo sapiens
ctttaaagaactttggccataatggggaggagagagataaaggagctgtggttggtggtaggggtgagattaaggctaggttcttgaagagagactgaagcatggttgtgtgatcatggagaatgagcccgaaggaagggagaaactgatgatgaaggagatagagggagattatatagaaaggagcaaggccctgtatctgtgagcaagggtatatatatgtagtaatagaaatgtgaaggtgttcgtttctgaaggattcaccctgaagtgaagtatggatgtggtgcaacgccttgaggagaaggtatgagatagtcatttcagcaagtgggaaactgaacttagtagagcaacctagtagaatttctggggagagccaagtacccatttgaagttactgatcacagatttaacatgaaatctgtctctcctgtgtgagaacctatgtgattttcttcaagaacatttagtttcttggtgaaattagacttaggttttgctataagaatacattggagaaatcaggagtcaagggagtgtttgcaacagtaatcatactttagtcccatggagcccaaccatgggactaaagtagggaaataaatagaagagggatttgaagactggtgagaaagtagagttcaatcgattaattatctgatgaggtcaaaagattattttaatggggttacttgatcagttaatctcaaagaataggagatggtgtcagaaaacggaaggtttggatttgagatcttgcaggtggagaagtttctggtaatgacgaaattctgggtgaatcattggtggagtgatgcaaagctaattagaaatgagtgtttttaaatccatggtggaaatgtcaactgaagggagattcaggggggctttcccctgaatacagatgacacagtgaatggaagattgtgatcctgcagttgaagttcttggagcgtaggaggaaaaaccaggagggagaagttagttttgttttatttagcttcaaacatggattaaataaacaaagagttttgttttccttgcatatccagaagcctggatgtaggctctccaggctgtaaacagtagccacataatgccaatagcctccttttatccttcctctaaaccatctttagcttgtggcttttgcctccatgcttgctgcctcatggttatgaagatccatcatcaagttagcattacactcagaaagaatggagaggagggggacaaaatgagagagccagctgactcttcccccatttccagtgacttcttgcgaattctgtccagtattttgtgtttacaccacattaactaaaaccatgtgacatggctaatcttagcttcaagggaaacttaagttttaatttttcctttaaacctgggcatatttttgctccattcaaaatcagttttctttttttttggaaaaaagcaagtaatgcrtagcaactaatagcatctgccatgtgttatatccaggacatgagttttaatggataaattaattttgtgaaaccaaggaggcttgttaatctgaaaataactatgtacagcaaaagggaagactaaattaccttttgatcctgcgatccacaggatacaagtaaagaaaattaaaattatatttattttttcttgtgtgagctacagttcaatttcattgaagtctaggaagtggtagaagtgaaaagagaagaagaaaaagatagggagcataagctaattcataaagacacagatataggagggccagtgatatggatataagagaaaaaggaattggaacaaaatagtgtgagattaatagttgatgaatagtgaggctttacctctgcaggtgcctgaggtaaacagagacataatataggatggtgttgatccctaatagtatattggaggagagtgtatatcattttgtggctgtggtctagatacttaggttagtggtgtattggctcccaggacagctgtccccttgacttacatgcagaacagtgagggagctataaggaagcctgctcctcaggcttcactggagctaagatgctgtgtgtcagtggcaggcatgcccagcacagttatggaggttgtgttctgcacaatagcacacagccaaaagaggttggttatctgatgagccagtgcctgtgccttggtgctttgagaatcaagccatgtacttaggtgttttgtccaccttgaagagcctttcttttctagttctcattaagacaatatttccaggcaatgctatgatatttgtgggtattcctatttatttaattaacttatgtatttttttcagtaacagagatttacttatacaggttctccagcctacatgttttgggggacccaaagacaaataaaacatgttccctatttatcctcaagaagcttagtgtataccaaggaaataagacacaatagctgtaatcacccagactcaaagagccccagcatgttagaaatggaagggaacttagaggccatctattcaaatcactcattcagacatgggaaccaaaactaaataaagacatttgtgaagaaggagagtaggaattgcaagactaatcctcaatccaaaagatgtttcttattttgtggaaaaggaattaagtcgaagacattttggctcagaaagatcaaaaaggactttgtttttaaaatgtccttcagtactacattggataatatttgtagtgagaacatggacttacagaatgttcttccaacagaaattatttgtcgggggaggatgctgttctccagggaaagggacagctttttttaatggccactactgaccttgaggataaatacagcattagagtaattataccagaaaagcagctctcataaaactatgttgactgttcttttcagagacagagtaggactccttgtttataaatattatccagaggcaaaaagcatggagcctgaacccaactccatcctacttctcatatatcatatgtggtgagaaattcctggaatttccattagaatcatcttattctatagttgagtggagtttagatacagtgaggccatcccccagagaaaattctatcaaaacatttaataatgtaacagaatatagttttccagtcacgattctttcatgaaccaagcgaaaagagctagtgagaatctttctaaacttctatgccttcaccacctcctcaactaagaaggacttaccaaaaaagcccccagactcctcacattttgttcccttaatacgttttcttagaatcatcattttattcattttcttttcactttgtctcagaatggacctacacatttccaaacctcagccttcccactccattcactctgctcacatttcattctcctattaaacataattaaccttatggctccttaagttaacgtaccatttctctccttccaatcacccttaacctcctgaaaaaagaaatctttgctcattgctttaactacctcaactcccattcactagcaaatttcttacaaatggagttctgcacccacaacttctctgacatcatgatcttcagggtattttttcagtcaattaacttagataaacctgaatcaaaccttacccatttcactcctgtttactcttggcttaattcaggattcctaaatgctcttagcttgagtcttccatatgcataatccagatttaaactattcattcccccactccattctccagattccaaccaagacaccaacatatgaccaggttcaaaagccagtgta

SEQ ID NO: 673922 - DNA, 3777 bp, Homo sapiens
ctttaaagaactttggccataatggggaggagagagataaaggagctgtggttggtggtaggggtgagattaaggctaggttcttgaagagagactgaagcatggttgtgtgatcatggagaatgagcccgaaggaagggagaaactgatgatgaaggagatagagggagattatatagaaaggagcaaggccctgtatctgtgagcaagggtatatatatgtagtaatagaaatgtgaaggtgttcgtttctgaaggattcaccctgaagtgaagtatggatgtggtgcaacgccttgaggagaaggtatgagatagtcatttcagcaagtgggaaactgaacttagtagagcaacctagtagaatttctggggagagccaagtacccatttgaagttactgatcacagatttaacatgaaatctgtctctcctgtgtgagaacctatgtgattttcttcaagaacatttagtttcttggtgaaattagacttaggttttgctataagaatacattggagaaatcaggagtcaagggagtgtttgcaacagtaatcatactttagtcccatggagcccaaccatgggactaaagtagggaaataaatagaagagggatttgaagactggtgagaaagtagagttcaatcgattaattatctgatgaggtcaaaagattattttaatggggttacttgatcagttaatctcaaagaataggagatggtgtcagaaaacggaaggtttggatttgagatcttgcaggtggagaagtttctggtaatgacgaaattctgggtgaatcattggtggagtgatgcaaagctaattagaaatgagtgtttttaaatccatggtggaaatgtcaactgaagggagattcaggggggctttcccctgaatacagatgacacagtgaatggaagattgtgatcctgcagttgaagttcttggagcgtaggaggaaaaaccaggagggagaagttagttttgttttatttagcttcaaacatggattaaataaacaaagagttttgttttccttgcatatccagaagcctggatgtaggctctccaggctgtaaacagtagccacataatgccaatagcctccttttatccttcctctaaaccatctttagcttgtggcttttgcctccatgcttgctgcctcatggttatgaagatccatcatcaagttagcattacactcagaaagaatggagaggagggggacaaaatgagagagccagctgactcttcccccatttccagtgacttcttgcgaattctgtccagtattttgtgtttacaccacattaactaaaaccatgtgacatggctaatcttagcttcaagggaaacttaagttttaatttttcctttaaacctgggcatatttttgctccattcaaaatcagttttctttttttttggaaaaaagcaagtaatgcatagcaactaatagcatctgccatgtgttatatccaggacatgagttttaatggataaattaattttgtgaaaccaaggaggcttgttaatctgaaaataactatgtacagcaaaagggaagactaaattaccttttgatcctgcgatccacaggatacaagtaaagaaaattaaaattatatttattttttcttgtgtgagctacagttcaatttcattgaagtctaggaagtggtagaagtgaaaagagaagaagaaaaagatagggagcataagctaattcataaagacacagatataggagggccagtgatatggatataagagaaaaaggaattggaacaaaatagtgtgagattaatagttgatgaatagtgaggctttacctctgcaggtgcctgaggtaaacagagacataatataggatggtgttgatccctaatagtatattggaggagagtgtatatcattttgtggctgtggtctagatacttaggttagtggtgtattggctcccaggacagctgtccccttgacttacatgcagaacagtgagggagctataaggaagcctgctcctcaggcttcactggagctaagatgctgtgtgtcagtggcaggcatgcccagcacagttatggaggttgtgttctgcacaatagcacacagccaaaagaggttggttatctgatgagccagtgcctgtgccttggtgctttgagaatcaagccatgtacttaggtgttttgtccaccttgaagagcctttcttttctagttctcattaagacaatatttccaggcaatgctatgatatttgtgggtattcctatttatttaattaacttatgtatttttttcagtaacagagatttacttatacaggttctccagcctacatgttttgggggacccaaagacaaataaaacatgttccctatttatcctcaagaagcttagtgtataccaaggaaataagacacaatagctgtaatcacccagactcaaagagccccagcatgttagaaatggaagggaacttagaggccatctattcaaatcactcattcakacatgggaaccaaaactaaataaagacatttgtgaagaaggagagtaggaattgcaagactaatcctcaatccaaaagatgtttcttattttgtggaaaaggaattaagtcgaagacattttggctcagaaagatcaaaaaggactttgtttttaaaatgtccttcagtactacattggataatatttgtagtgagaacatggacttacagaatgttcttccaacagaaattatttgtcgggggaggatgctgttctccagggaaagggacagctttttttaatggccactactgaccttgaggataaatacagcattagagtaattataccagaaaagcagctctcataaaactatgttgactgttcttttcagagacagagtaggactccttgtttataaatattatccagaggcaaaaagcatggagcctgaacccaactccatcctacttctcatatatcatatgtggtgagaaattcctggaatttccattagaatcatcttattctatagttgagtggagtttagatacagtgaggccatcccccagagaaaattctatcaaaacatttaataatgtaacagaatatagttttccagtcacgattctttcatgaaccaagcgaaaagagctagtgagaatctttctaaacttctatgccttcaccacctcctcaactaagaaggacttaccaaaaaagcccccagactcctcacattttgttcccttaatacgttttcttagaatcatcattttattcattttcttttcactttgtctcagaatggacctacacatttccaaacctcagccttcccactccattcactctgctcacatttcattctcctattaaacataattaaccttatggctccttaagttaacgtaccatttctctccttccaatcacccttaacctcctgaaaaaagaaatctttgctcattgctttaactacctcaactcccattcactagcaaatttcttacaaatggagttctgcacccacaacttctctgacatcatgatcttcagggtattttttcagtcaattaacttagataaacctgaatcaaaccttacccatttcactcctgtttactcttggcttaattcaggattcctaaatgctcttagcttgagtcttccatatgcataatccagatttaaactattcattcccccactccattctccagattccaaccaagacaccaacatatgaccaggttcaaaagccagtgta

SEQ ID NO: 673923 - DNA, 1179 bp, Homo sapiens
agagaatagatgcacagactggaggaaacaatcatggaaacaatgatgagggttgctcaggaaatagtgagatgctgcagctttcagagacacagtatatgggagagactgaaggaaggcaagagggggaagctgagttggaactgatggtgaagatcatgaaatgccacgccagtaggtccaatcttattccatatgcattgggggaaccttgagctgggtgtgacatgatctgagctctgtcttagaaaggattttgtggcagagaggagagtaatttaaagggagacacagatggcccagaaagaatgattaggagatgatattagtttcttatcactgctatacaaatgaccacaaccacagtggcttaaaacacatttattgctctatcatgctggaggtcagaattctcaaaatgaaggtgtcagcaagacagcatccccaccagggctctaggagagaaatccttttcctgcctcttccgacttctagaggctgcctgcactccttggctcggagtagagtcctccatcttcaaggccaaaagagtcaaatgtctccctctcttcctctttctccctatcccttcctttcacctctgcacccactgtcacatatttgtcttgttctcatactcccgtctccttcttttgattatatttagtacttgcttggataatccataataatttccccatctcgaaatccttacctccagcacacctgcaaagtctcttgtgccaggagacaggtcccatggattaggacgtagatactgttggggaccaaagattctgtctaccagagacaaaagccacagaccagaaggaggcagtgctatctgcagtaaggcaaaaagagtacacacagggatggggctcagccccactgcctcctttccctctgttctgtacctaggggtacacagaggagatgagggctcacagttgtgtgtactgaatccaaaaggattcttsttaaaaatagcaggaacgccactcgaatgccttcagcaaaaagtggtaattaatcaactattaatcagctcacagttgattaatgaattaatcagaatgaatcagttgtcactgggaagaccagggttagtgcaccccttggttcctcgattagattatcagtgagcttgtctcctctctcagtgtgtctttccttgta

SEQ ID NO: 673924 - DNA, 1176 bp, Homo sapiens
tgaaagatgctgtttatgtttgaagtttcatattactaatgcaaagggtttctaccaatccctgaaaaaaatgggtgttttttgaagctggttgcgttaaaaagtagtcattagaaytgacaaatatttataagatttttttttttgttttgactacaaagaaaaaaatggatcagcttgacaatgacggaatgcaaaggagtcgaggcgaatgtacttgcaaggcagaaaaataaatcctagggatttaaataaacgacatagaaaaaggaaacagcttgaaagttcctggttaggttttggtcacagtattaaaaaaggaaaatcagaattctttttactcttttcttctttagagaacaagtttaaaagataaagtctgaactaccaagatgactcttggttaagggtccaaaagggtccaaaattcccccttcttaaattttgctctaaatcatgagcttctttaatctttttttttccctctcttacctgcgttagaacacattatgctttcttgctatggttctgcacctcttttcagggtagaaaccacggtcctgatgatgatgatttggggctttaaaataaatttctatgagtagatatttgaaataatttataatcaaaattatttccaccaccgaatggtgttaaaagtcataactgaaagcacacactatgtgaacttcatctgatagaataatattgccacagctaaaattgaagatagatttagtatcttgccagctacaccctcaaagacccccatcccttttcactgaggttaaaaattattacatttgactatattgtgtgtgtacacacattagtatgtatataataaattatatcctatattcaatatattaaatatgaacctgaggtagttagaaaccatttttttcacatcctttctctccatctaattctgttttctaagaacttttatatgcaaatttaaaaaagtgtgtgtgtgcatgtgtgtgtacctatatataaaagcaagtttgcattttaataaaattaatataagcatcaaaaaaatttatcttccatagaaagaaatatattatgtacatagaagtgcacatttttattatgtacatagaaatatattttctatggtgaattatttttctttcctttaatatttgatattaaataggagaacat

SEQ ID NO: 673925 - DNA, 598 bp, Homo sapiens
taggtgcctctttccagattcaggaatgctgatgttccttgtagagcgagattgttactgtactcctcatacaagcctgagcttggagggcactcatgttgtggggatgcagtcacctctaagtgctccggaaaggctacgtatgggcggacccatgccgagttcctgtgggagaaaccgcagctgtgtacgcagtggtggtaaggaggagataaagtctcctccaaatttcttcatgagtatttgggctgcccaactactgcgtagaactgcagtccttcctcaccgagaccagcactacacttgtgactctgctgaaagaaacttcccacaagcagaaagttctgggactcaagtcctgtactctggtttcttttgtgccacagggtgctcccttgatgtgrtgcactcccacttctcctaggaatggtggtccctgagggccagactactgtgaatgctgctgctcttctgagtctaggtgcctggtagggcttccacattccaggtggtgctggggaatatctacaagggatccaatgttattaaggtacaagggttgaatgtccttaaatagaacaaggtccctcagtgagag

SEQ ID NO: 673926 - DNA, 1479 bp, Homo sapiens
ttaaacattgggcccatttggacaattcagaataatctctctgttttaaagtcaattagtagctttaattttatccacagcatcaatttccctttccatgtaatgtaacacacacagagattttagggcctgtgacaggaacccctctagggggctatttttctgcagaccagtggtgacctacttatccagggatgtatctcactcactgcccagcagtgctggagccaggttgcaggtgccagtttgcctggaaggtgaagaaggtgtttgcatctggacctggcctcggcacttgctggtgtgtgcccttgggaaagtcactgtgttagtttggattcccagggtttggggcacaaggcatttattttggaagtaattccaggaagcactgtgagggtgtggggacattcgtcagggcaggaagctaaaaaggaataagctatgagtaggtggccactgtgggcagtggggctcaggccttctagggacccttagaattgtcctgctgcagggcacaaatgccctgtattcctcaaccccccgccccccagtcccgctcaatgactgagagctgctcctggaaccctgtcctgccctggtgtgggttgagtctgctcccagggccggaggacatcctgaggcaaaaagtgacacaggaaactgtccccagtcagcaggcggctctgggcaagccaagtagatgtggatggggcacggctagcaactgccacattctctgagcctcggtttcctcagctgtaaacataggaggataatgatactatgtacctacactgaggtcattgtgaggatcaactgggacaatacaagctcattaattagcacagtacctggcacacactcggcacccaaggcatgccatggttattattctatcgactccctggctgtgtggcccacgatgagtgacctcgtcctctcctgctctgtttcctcacttgtgacctgacaaaactcattcattcatgcctcccatccctggggagtcaggcacagtgtgagaagctaggacactgagtgacacagcagacaccatcctcgctcacgtggcccttccaagcctgctctgagagacagatggcagccaaacaatcctacaagtaacaataagaggaagctgggaaggcgctgagagagaggggtacacgatgtcgggggacatgccagggtgggaatggtggggagggttggggggcttctgttagcaagttgaggctgcttgagagcctgagagagggatccctgaggacaamagaggaaggagagctctttgggcagcagcaacacgtgcagaggacctggggctggaaggagccaggtgaattcaataaactgcaccaaggaaggggtggtgtggcttgagcaagaagggcagggaggggcgggcacagggtgggtcgaggagcagtcaagggcctggcatctcaggtcaagttcagtcttatccaaggaacc

SEQ ID NO: 673927 - DNA, 593 bp, Homo sapiens
gtctacaggttgctggcaagcacaaaaatctgggagggggtgccctccaataacacctgactggaataascccttgagagtctcagaaataccagcaggccctctcctccagaagagagcctcatcccagggaagactagagactcagagttcaaagtcagcagagaaaaaacactgacagcaagagtgagagaaggctcaaggggcccaaaaaagagaagcagatccaaagaagtgtggggaagaaatgaggtgcctgaagctgcaaacctgcagaccaggagaagcagatccaagaagtctgaggaagcaatagggtgcttgagcctgggaggccacagacactgcaatgcccatgagcctggggcttgggctggggcagaaggaaaataatgatctggagcatatcagttggggttctccacagaaacagaaccaacaggctgcatagagatcaataagagaagatttcttatgaaaatttgctcacacaatcttggagacctggaagtcccacagtatgtcatctgcaagcagacaaatcaggaaagctggtgatggaactcagtctgagtccaagacctgagaattgc

SEQ ID NO: 673928 - DNA, 607 bp, Homo sapiens
gctttttgtagttgagccactgacttgtttttttttttttttctttcaaagagaagaacactgtgaggaaattcagaataggtagagagtcatattaaattctatctatctatctatctatctatctatatctatatmtatacacacacacacacacacacacacacacacacacacacacaaatctcccacagcaacaaacatgatttttattttaactatattccaatgcagtatctcttttcagagaagatatatttctgcttggagaagcaaataaaacaataatggcttaacaatttgttcaccttctcaaaacctacaaaaaacagatgtggatttgtattttcacttgataactaatacctcaatctatacaaataaaaacatggtttcagatcagcttggggggacagtaccaatttcaccattttggttatacatgaatcattacctggacaaggacatttctctttaagctattagattatgtgcactgttttattttttctgacccaaagttcaataaaacctgtatccattgtctatcttagaagagctccaaaaatagcctatcatgaacatgccccctcttctctgcatttca

SEQ ID NO: 673929 - DNA, 607 bp, Homo sapiens
gctttttgtagttgagccactgacttgtttttttttttttttctttcaaagagaagaacactgtgaggaaattcagaataggtagagagtcatattaaattctatctatctatctatctatctatctatatctatatctatmcacacacacacacacacacacacacacacacacacacacaaatctcccacagcaacaaacatgatttttattttaactatattccaatgcagtatctcttttcagagaagatatatttctgcttggagaagcaaataaaacaataatggcttaacaatttgttcaccttctcaaaacctacaaaaaacagatgtggatttgtattttcacttgataactaatacctcaatctatacaaataaaaacatggtttcagatcagcttggggggacagtaccaatttcaccattttggttatacatgaatcattacctggacaaggacatttctctttaagctattagattatgtgcactgttttattttttctgacccaaagttcaataaaacctgtatccattgtctatcttagaagagctccaaaaatagcctatcatgaacatgccccctcttctctgcatttca

SEQ ID NO: 673930 - DNA, 607 bp, Homo sapiens
gctttttgtagttgagccactgacttgtttttttttttttttctttcaaagagaagaacactgtgaggaaattcagaataggtagagagtcatattaaattctatctatctatctatctatctatctatatctatatctatayacacacacacacacacacacacacacacacacacacacaaatctcccacagcaacaaacatgatttttattttaactatattccaatgcagtatctcttttcagagaagatatatttctgcttggagaagcaaataaaacaataatggcttaacaatttgttcaccttctcaaaacctacaaaaaacagatgtggatttgtattttcacttgataactaatacctcaatctatacaaataaaaacatggtttcagatcagcttggggggacagtaccaatttcaccattttggttatacatgaatcattacctggacaaggacatttctctttaagctattagattatgtgcactgttttattttttctgacccaaagttcaataaaacctgtatccattgtctatcttagaagagctccaaaaatagcctatcatgaacatgccccctcttctctgcatttca

SEQ ID NO: 673931 - DNA, 607 bp, Homo sapiens
gctttttgtagttgagccactgacttgtttttttttttttttctttcaaagagaagaacactgtgaggaaattcagaataggtagagagtcatattaaattctatctatctatctatctatctatctatatctatatctatacayacacacacacacacacacacacacacacacacacacaaatctcccacagcaacaaacatgatttttattttaactatattccaatgcagtatctcttttcagagaagatatatttctgcttggagaagcaaataaaacaataatggcttaacaatttgttcaccttctcaaaacctacaaaaaacagatgtggatttgtattttcacttgataactaatacctcaatctatacaaataaaaacatggtttcagatcagcttggggggacagtaccaatttcaccattttggttatacatgaatcattacctggacaaggacatttctctttaagctattagattatgtgcactgttttattttttctgacccaaagttcaataaaacctgtatccattgtctatcttagaagagctccaaaaatagcctatcatgaacatgccccctcttctctgcatttca

SEQ ID NO: 673932 - DNA, 1871 bp, Homo sapiens
ataagattggcaattattcataacttaaagaaataatatattaaaatatagcagcattgtataataatttgcagagatggaatgtagtcatggcaacatcttgggccctgcagagtttcgctggtttggcttaggtcaaagtacaaataaactatttttcttaaaaaaagaaaaaaaaagacatgttctaaaattactgagtagtgctgtgattcaatagaaaaaagagtaaaaaatctggaaccaagcttgaaatgtaaacatactcaacggcacttctgagaaaggtgattatataatgatgaggtagaaatgacagtaactgatttcagggaagacatttaagctttggaaagagtattttgtaacaagatgtttgcgcgtatttgcagcccctgggattttgttgttgaaaacaatgtatgccacctctcatctctgcccagacagagaactttctaacatatttcaaaatattccagagtttagcttcggtttaaattcatttgataataatgcaaaaattcaacattcttttagtttgtaaagacagttaattttaaggaagatgggaattcaaaaatcgcatttcaattgtttgaggaaaaaaatttttcataatttgtggacatcattaaaataaagtctaatgatttcatgaagtccatattgtccttccatttagaactacacattttgtgattatcttttaaactattatatctggtactgaaaccaaaactrtgacatgaactgaacctacaagtaaattttccaagcactttatcctaaatattaaactaagattttagaaataatgatggatattcaatcctattattctaccttcaagctgataattaacatgttatcattaatataatatttattatatttaatccattctatttaagtaaaaaagatattatatatcattcataggcaaaaatgttttaaaatattgcttacttcagctttatctcatcttatgtaaatattttgtatatatactgaatgtgcataaatatatacatgcacattagtgctaatgtatttatatatacataatatagcaataaaatattcatatttggggtatataatgaagatttgctaaccccagttggatcccacaagcacctcaaatctaatatgtacaaaactgaactccacaccatcacccttcaaaaacttgtttgtctgcctctcccgtcttacgaaatgataccacctgctgctcacttgcctacattggaagggtcagggtccttcgcaactcctcgttcttcctttcattaacatccatagagtcctgtccattgtggcagccagaagcctttgtcctcttccttcaacccttacaggccccatctggtgtggcttctgctctcctctgtctcgctaattacaagaatctcctaagtgaccttccttcctacagtgctgctgtctcctgacccccagttcaagccgcagaagactgatctttcaaaaacaacaaatcataggctgcatcttcttaagagcgctcagtagtttcccaatgcccttggatacactccaatctcttcttcttcagcagcacagcgcctgctggcatctgtagcctcccctccctcacactctaccatggagctagtcagcactttttccattcttcctgtggcccctggcctctctggtgctccacgcacatgccccatctcctagctaatggtacccgccctgcagttttctgtgcagagggccctcgctaagtgaagccctctcagatggtccctgcgcctcctttagcataccactttgaacatacgaagacacgtctgatgaataatttgaactgcttccggaacaagaacaaggtctacatt

SEQ ID NO: 673933 - DNA, 1871 bp, Homo sapiens
ataagattggcaattattcataacttaaagaaataatatattaaaatatagcagcattgtataataatttgcagagatggaatgtagtcatggcaacatcttgggccctgcagagtttcgctggtttggcttaggtcaaagtacaaataaactatttttcttaaaaaaagaaaaaaaaagacatgttctaaaattactgagtagtgctgtgattcaatagaaaaaagagtaaaaaatctggaaccaagcttgaaatgtaaacatactcaacggcacttctgagaaaggtgattatataatgatgaggtagaaatgacagtaactgatttcagggaagacatttaagctttggaaagagtattttgtaacaagatgtttgcgcgtatttgcagcccctgggattttgttgttgaaaacaatgtatgccacctctcatctctgcccagacagagaactttctaacatatttcaaaatattccagagtttagcttcggtttaaattcatttgataataatgcaaaaattcaacattcttttagtttgtaaagacagttaattttaaggaagatgggaattcaaaaatcgcatttcaattgtttgaggaaaaaaatttttcataatttgtggacatcattaaaataaagtctaatgatttcatgaagtccatattgtccttccatttagaactacacattttgtgattatcttttaaactattatatctggtactgaaaccaaaactgtgacatgaactgaacctacaagtaaattttccaagcactttatcctaaatattaaactaagattttagaaataatgatggatattcaatcctattattctaccttcaagctgataattaacatgttatcattaatataatatttattatatttaatccattctatttaagtaaaaaagatattatatatcattcataggcaaaaatgttttaaaatattgcttacttcagctttatctcatcttatgtaaatattttgtatatatactgaatgtgcataaatatatacatgcacattagtgctaatgtatttatatatacataatatagcaataaaatattcatatttggggtatataatgaagatttgctaaccccagttggatcccacaagcacctcaaatctaatatgtacaaaactgaactccacaccatcacccttcaaaaacttgtttgtctgcctctcccgtcttacgaaatgataccacctgctgctcacttgcctacattggaagggtcagggtccttcgcaactcctcgttcttcctttcattaacatccatagagtcctgtccattgtggcagccagaagcctttgtcctcttccttcaacccttacaggccccatctggtgtggcttctgctctcctctgtctcgctaattacaagaatctcctaagtgaccttccttcctacagtgctgctgtctcctgacccccagttcaagccgcagaagactgatctttcaaaaacaacaaatcataggctgcatcttcttaagagcrctcagtagtttcccaatgcccttggatacactccaatctcttcttcttcagcagcacagcgcctgctggcatctgtagcctcccctccctcacactctaccatggagctagtcagcactttttccattcttcctgtggcccctggcctctctggtgctccacgcacatgccccatctcctagctaatggtacccgccctgcagttttctgtgcagagggccctcgctaagtgaagccctctcagatggtccctgcgcctcctttagcataccactttgaacatacgaagacacgtctgatgaataatttgaactgcttccggaacaagaacaaggtctacatt

SEQ ID NO: 673934 - DNA, 594 bp, Homo sapiens
ctcagaggaggtagtattgatccttggaatactgtttccaaatcagaggtaagatgtgaaatatgaggttggcgtcccagtttttgagaggatgtactgttcaagagcagttattttagacagagggcctgatatgaactcactagagtgatgaaattgagttggaaagggagtaaagaaaaagaagaaaggatggagttaaggaaagaaagaaggaacctggaaagaagtgtaacatcacgtcctttacaagtgaagaaatgagagtaattagagagtaaggaacctactcatgctctcacaaatagtgtgtggtgaactaggattggaatctagaactcgtgcgcttaaccactaagctctttagcctgcccagaaaatatttgtagaaaagatggcaaaaaataaaactgtggaattgttgaacatcacagccttggctgacctgcatatgtgtagcgagatggaaccagagaactacagtggatgcagatatgactcaactgcctgatrtggtagcttccagtgactcttgtattataactgtgtttcccacagtgaatatttgttgctcaaaaaagtacaaaagagaaa

SEQ ID NO: 673935 - DNA, 564 bp, Homo sapiens
taatctggtttcctgccatttagacaaagactaagagaaggaggggcattcttggcaacatgtctggagccagaagtctgtgcacaggacaaaatgctctctatagtcataactgttgagtgatagcaatgactacagcaatggcaaacacacacagtgtatgctacagcattgaagtcttttggtcatcaaaataatgctgtcagattgttgccactaataagtggtagaatttggattcaaatccaccaggcaagatgtagagtctgaaagggagaaagtgtgtgtgtgtgcatgtgtgtgtgtgtgtatgtgtggtgtgtgtgtgttttatatctatctatattcattcaacaatattctaatatatatggaaaggaaacataaaattaggcaaatatggttgtcaattttctctaacttaccatgtaaaattcattgcattcttaaaaaattagttatggccgggtgcggtggctcacgcctgtaatcccagcactttgggaggccgaggygggcggatcacgaggtcaggagatcgagaccatcccggctaaaacggtg

SEQ ID NO: 673936 - DNA, 1283 bp, Homo sapiens
cttttatttttaaaatatatttcttattttctgtcgagaagcagtatgagttttcaaaaaagactaaattaagagtaaagaccgctgaattccagcccactctgccccttactagctgtgtctaagtttctccatttgttaacatattatatcatatagtttttataatttcaacagaggaaacatattttaaaatattgaaataagagtaaagattctatgtcatatcattatgactagtgccagaatgggattggactcaagttaaaataacttacctataaattccagtggtctcatatggattgatttatccctcttacctatcatctgtggctagggatagagaattaaagcgacctgtggtatccatgcttttatcagtcaaatgtgtgcaagattggagtgaggcaaggaacttggtaacaccagttgaaatcacttgtttagtgactgaaagcacattttccaaacataggcaatagaaggtctcaacagactcaataaaggttgtatattacatccatctccgatttcccacaggctaacagagaactgattgaaacagtaaaactttacagagtttttcatttattgaagyagaataacaaaatactgtcacatagttctggccacattctcaccagatcagttccctgactcaccttgttctcctttcaccctgtcccccaacaatcttgatcagccttttaaatttttcagggctttctatttcttagtttcacaaattgagaaaattatttcctctcttgactaagtatcatttctttaagcccacgtttccaggactggtagatcccctttccactagcatgaaggaaaatctaacctgccaaggcattggtttgacagtatattgcctagatttaagatgtttgattttaaagcacaatcttgtgaaatgtttcacccatgctgcactgcaccaattctatcaatttgtcactcatggccttttaatttttccagcatgataggaaatgcattatcctctcaatccacattccatatcttctgcgaaagcattcacaagacagtacgtatgcatttccaaggcagtctaaatcaagatttaatgatgaaaatgtcttaaaaaatttgctgaagatatttttgccaaaaattatgctgaatagagtttgttagataatacactaacattctcttctgaagcagaagtgagaggtcacatctttgctacacgctttacatttgagcattgaaaaatccatgacatacatttccaaaacttcgggctatag

SEQ ID NO: 673937 - DNA, 1283 bp, Homo sapiens
cttttatttttaaaatatatttcttattttctgtcgagaagcagtatgagttttcaaaaaagactaaattaagagtaaagaccgctgaattccagcccactctgccccttactagctgtgtctaagtttctccatttgttaacatattatatcatatagtttttataatttcaacagaggaaacatattttaaaatattgaaataagagtaaagattctatgtcatatcattatgactagtgccagaatgggattggactcaagttaaaataacttacctataaattccagtggtctcatatggattgatttatccctcttacctatcatctgtggctagggatagagaattaaagcgacctgtggtatccatgcttttatcagtcaaatgtgtgcaagattggagtgaggcaaggaacttggtaacaccagttgaaatcacttgtttagtgactgaaagcacattttccaaacataggcaatagaaggtctcaacagactcaataaaggttgtatattacatccatctccgatttcccacaggctaacagagaactgattgaaacagtaaaactttacagagtttttcatttattgaagcagaatracaaaatactgtcacatagttctggccacattctcaccagatcagttccctgactcaccttgttctcctttcaccctgtcccccaacaatcttgatcagccttttaaatttttcagggctttctatttcttagtttcacaaattgagaaaattatttcctctcttgactaagtatcatttctttaagcccacgtttccaggactggtagatcccctttccactagcatgaaggaaaatctaacctgccaaggcattggtttgacagtatattgcctagatttaagatgtttgattttaaagcacaatcttgtgaaatgtttcacccatgctgcactgcaccaattctatcaatttgtcactcatggccttttaatttttccagcatgataggaaatgcattatcctctcaatccacattccatatcttctgcgaaagcattcacaagacagtacgtatgcatttccaaggcagtctaaatcaagatttaatgatgaaaatgtcttaaaaaatttgctgaagatatttttgccaaaaattatgctgaatagagtttgttagataatacactaacattctcttctgaagcagaagtgagaggtcacatctttgctacacgctttacatttgagcattgaaaaatccatgacatacatttccaaaacttcgggctatag

SEQ ID NO: 673938 - DNA, 610 bp, Homo sapiens
tggagatgtactcataatttgtatgttgtatataaatctgttatacataagtttttaactacaaaataaaaaagaaaaaggatggctggagaactctagttggtatatacagtatatgaagaaggaatttaactatattacaatagatgacataagctcactgaaggggaaggaaaggaaaggaactcatctaaataccttggtaaaacagtgccttgactaaatactgataggctagaaaaattgtacacaaaacatttagtcttatgtctagatttatttttcacaggggtacagtttagcagttttgactacatttatgcaagacttgaacaagtaaatatactatagataatgagaaccagttttgcccttgtaagagaagttaacaaaaaataagcaaatagaaaaagcracgaagagctctgaggtggtttgtcagagtgggagatatcagaataaactcatgattattttaaaagatagattatagatagatagattagatatatagataataggtagataaagtaaacgtagattgtgtgtatacataggttagtataaatatatacactccctaccatgttggctgagaggctttaaatta

SEQ ID NO: 673939 - DNA, 1617 bp, Homo sapiens
  misc_feature 89: n = A,T,C or G
tgccccatgccattcatgtcaaaaagggacacttgtagtgtagcaattccagtacatatacatccaattttataagagctactatgctntaagctatctttaaacaatgtatgtttttctctctaccatcacttggataatgaattcaataataagttgagaactaatttgttaaaatggtaccttcatttatttacactgtaagtcactcaattaaacttcaagtcttcataagagagaaataggccttctttctctttacttctgtgtaattcctgtaattctgtttcttctcttgaactacagtcctatttttgcatactaagttctcttaccctctatttatctctgcctccttcacaaatagggtctcattatgtgttctctgaaacttccttacatttgtcattccattgatgtaaacgtactattagtcaattcaacattcaaggtgagttcataacactgacttacagaagagcattacagtgttttttgtatcattctcaatcatatcctcatttttttgccaacattgtacattgaaatactcacaatgatgcatagatccttttcctgagaggttacaatgcagggtgaaataagaatactttctggtaatatattacatgtcacacagtgatttcaaagcactttgttaacaaagaaagattattatcatcaatttaacggagactgaaacacacaagttmaattactttttcaaagttgaacagaaaggaagttactacattatgaagataattcatattcttgtcattatggtgtttaattctatctactggaatacacttcctttcaggctgtcttctatatgacaatttactgcccacttggcagagcagaggctcaaattcatgaatatgagaatccacatgtatgtaggcagcatctgggtttatctaatcgtatggtgacatggtttgtctggttggagccaaagtggaactggttcactgcatctgaagctgctcacattttcatatgtacatagttttaaaatttggataaaataatatagtaaaaaactaaacaagataaaaaataaaagaacaagcacacatttcattaactgaaaatcaaccctgaactaattttggtattactcttttttttaatcatgtgtatatgcacataggtgtgcattttaagaattaggattataatttatatatctgtatctttaaaatttttcacataatattatttctgagtatttaaacattaatgagcacttttcacagtattttaatgagtcacttttaatgggctcttaatttcttatatatgtataagtatacatgcatatttatacataatttatttaaatagtccactattattgaccatttctgttgggatttactatttattttaaaaaccttaaaatttgttatgtgtttgtcaaattatcaatttcttccttctggacttgccattttttatattgtttagaaatatcatatgctaccttgaggtaactgagataccctatattttttctaaaaaatgtgtttgcatttatttttaataatatatttttaaattttgaattatacataaattgtaagatatatacaataaattattattagc

SEQ ID NO: 673940 - DNA, 1116 bp, Homo sapiens
gttcaagcgattctgctgcctcagcttctcaagtaactgggatttcaggtgcctgccaccacgttcacctaattttttgtatttttagtagagacggggtttcaccatgttggccaggctggtgttgaactcctgaccttgtcatccacccgcctcggtctcccgaagtgctgggattacaggcatgagccactgcgcccagcctatttttttttgaaacttacttcagccgcctaatatagtactattggcattcagtaaataatcactgaatacttttctgctatttcttcataaatgtataaagatggtgctaccatccactactaggatgtggacttgtatttttctatatgtagaagtgatttacattgatttcttcatacatatttccctagtccacttgagaactggcaggatgcaagatggagatattttttgaaaaaccccctgtgatctcggtgtcctggaatcatttaaaagtgtcctggaatcattaaggctaatcagggatgatgttatttcttttcttcatttcgttgtcgtttataatcttccctgcaaagtgagaaatgtttaatcctgcatatacctaataattgtgtcttctggtaggttttacacaaaaatggagagctttctgacttggtgatgggcatgtgaatgtgtagaggcatgcatatatgcaattttacaccttttagtaacgtattagcatgaaataggatggaatttgacacttcctgttaatytcctttgtgagatggccacagaatgcttgaaaacttgtttctcctcctatgccttcagcactggcagcatgctatcatttcatagctgctccttaggctgccagttttttgtttgtttgtttgtttgttttgagagggagtctcgctctgtcccccaggctggagtgcagtggcgcgatctcactgcaagctccgcctcccgggttcacaccattctcctgcctcaggctgccagttttgaccaaattacttccattggctgactgcagtggccttgagaaaatcatattattgatgagttgccagacaagttacttttatcactcaaggaacaaccaaatgttggagtaataaatcacaagga

SEQ ID NO: 673941 - DNA, 1116 bp, Homo sapiens
gttcaagcgattctgctgcctcagcttctcaagtaactgggatttcaggtgcctgccaccacgttcacctaattttttgtatttttagtagagacggggtttcaccatgttggccaggctggtgttgaactcctgaccttgtcatccacccgcctcggtctcccgaagtgctgggattacaggcatgagccactgcgcccagcctatttttttttgaaacttacttcagccgcctaatatagtactattggcattcagtaaataatcactgaatacttttctgctatttcttcataaatgtataaagatggtgctaccatccactactaggatgtggacttgtatttttctatatgtagaagtgatttacattgatttcttcatacatatttccctagtccacttgagaactggcaggatgcaagatggagatattttttgaaaaaccccctgtgatctcggtgtcctggaatcatttaaaagtgtcctggaatcattaaggctaatcagggatgatgttatttcttttcttcatttcgttgtcgtttataatcttccctgcaaagtgagaaatgtttaatcctgcatatacctaataattgtgtcttctggtaggttttacacaaaaatggagagctttctgacttggtgatgggcatgtgaatgtgtagaggcatgcatatatgcaattttacaccttttagtaacgtattagcatgaaataggatggaatttgacacttcctgttaatctcctttgtgagatggccacagaatgcttgaaaacttgtttctcctcctatgccttcagcactggcagcatgctatcatttcatagctgctccttaggctgccagttttttgtttgtttgtttgtttgttttgagagggagtctcgctctgtcccccaggctggagtgcagtggcgygatctcactgcaagctccgcctcccgggttcacaccattctcctgcctcaggctgccagttttgaccaaattacttccattggctgactgcagtggccttgagaaaatcatattattgatgagttgccagacaagttacttttatcactcaaggaacaaccaaatgttggagtaataaatcacaagga

SEQ ID NO: 673942 - DNA, 2161 bp, Homo sapiens
gggaaaggatagtctttttaatggatagtactggaaaaactggatatctttttgtaaaaaaaataaagaagaacctagaccgttacttcacataccacatgtataaattaactcaaatccaatgagaaacctaaaatgaagacctacaaatataaaacttatagagaaaataaggacggacccagtggctcgcacctgtactcccagcactttgggggactaaggcaagaggatggcttcagcctagcagttcaagaccagtatggccaacatagtgagaccccatctctatgaaaactttacaaattatctacatgtggtggcacatgcctgtagtcctgcctactaggaggctgagatgggaaaatcactcgagcctaggaggttgaggctgcagtgagccatgactgcaccactgcactcctgcctgatagagcaagaccctgtctcaaaaaaaaacacgattaagaaaatgaaaagacaagccaccaaccaggaaaaagtaaatacaaaatatatatctaagatttgatccagaatatattttttaaatcttttataacccaataaaaagaagacatattctaagacagcacttgagttaatatcctcaaggatctctcagtataaaartgggtgttttttataacagagcaactgcagcaaacagaccaggtcctctgctatctcaaaatactttgaataaagttatccataaagcactgatatgtcctacctccccatcaggaggaacgttggcaggtaacagaaacatgggatcctgctaaccacagctaataggcacagaagccagcctgttctagtcacaggctaacagtttcaaaagggatccatctttttggtggattgtcattttacagaagacttcttcaaattgaacagaatcaaagtgctcatcaaaacggggatatcatgctgaaccaattactacttaaacatgcaattggcaatgggaaataggttgtgatctctgaagagataaggctctaccagaaaagattaaacagtcatcagagaagatcctgcctaacagagctttaatagctaaactgataatttggatttagaacttgaattccttcctacgcaactttgggaacttgccttcaaaggcacatcctggcactggtgtctttagaccaatggacagactcttcctaggcctggttaaagaggaagacattctccaaagcagttatacaaatttaccgggatctctcactctgaagtaaatgtacaaatcaaacagactctctgagaggagctggcaataacgcataaattagcttttaggaaacattttaaagtaaccactttctcaatcactctccctctagaaataaatataaaatctttcctgaaatgaatgtaaacgttgactttcacttatagaatggaacacacttcaagttctataaacgttaaatgaaacctacagcaggccatggatttggactgagctcctgcattatacccaacagaccaaaccgaaatgaagtcactcatgctaaagttccaggccaccaaaccaaaactaagttgtttatctgagcttctgataaatcaggagagagagataacagccaaatctccaaacaggccagttttagcctgcatgatgagaaagtcccctctattttacccttacaagggaagtaacctgaagtaacctaatgttaaccaactgcattttgtattatgctgtttctttgctcctgctcaagataccttataaaaactgactgttcttccatgcccagtgtagatttttagataagatgctgcccaattcataaattgtgaataaacgccaattagatcatttaacatttcaaatttattgatatttttttcacagatataaatatcaagggttacttctctctagaaagacccacagctcatcagctcaagcaagttagtgaacaaggaactggctacagctaggaaacctgatccagctacctaaatccaggggaagagagttatacagatttattccagctatgatagggttggtctaaagaacacatcctcccttgagtaaagtcatagcactattaaaagttaagggaagaaagtaggccagggagtgctcaaagtgaaaaaatcaaaggaaacaattctattccatctgaat

SEQ ID NO: 673943 - DNA, 1763 bp, Homo sapiens
  misc_feature 2, 3, 4, 5, 6, 7, 8, 9, 10, 11, 12, 13, 14, 15, 16, 17, 18,19, 20, 21, 22, 23, 24, 25, 26, 27, 28, 29, 30, 31, 32,33, 34, 35, 36, 37, 38, 39, 40, 41, 42, 43, 44, 45, 46,47, 48, 49, 50, 51, 52, 53, 54, 55, 56, 57, 58, 59, 60,61: n = A,T,C or G
  misc_feature 62, 63, 64, 65, 66, 67, 68, 69, 70, 71, 72, 73, 74, 75, 76,77, 78, 79, 80, 81, 82, 83, 84, 85, 86, 87, 88, 89, 90,91, 92, 93, 94, 95, 96, 97, 98, 99, 100, 101: n = A,T,C or G
tnnnnnnnnnnnnnnnnnnnnnnnnnnnnnnnnnnnnnnnnnnnnnnnnnnnnnnnnnnnnnnnnnnnnnnnnnnnnnnnnnnnnnnnnnnnnnnnnnnnntggatatcagatatctttaagagctttttaatctttaatcaagttagtacttcttaaggatgattaaggcctggcagtggctcacacctgtaatcccatcattttgggaggccaagatgggtggatcccttaatgtcaagagttcaaggccatcctgtccaacatggggaaaccccatctctactaaaaatacaaaaattatctggggtgtggtggaaggcgcctgtaaccccagctactcaagaggctgagacaagagaatcgcttgaagccaggagttggagattgcagtgagccaagatcatgccacttcactccagcctggacagcatagtgggacttcttcttaaaaaaaaaaaaaaaaaaaaaaaaggattaattcaaaacttattaacaattttcttttgaataaacaaagctcattttgagtattttcttttcccctcttcccctgtgttataggcaaagctattaaggtatcttcacataaacttagtatacccttgaaaccaaaaaattctgcttagtttttgtttatgtcaaaaattcagcattgcatctttcataaaaataattattggtcagtcttaatcctggaaaaatacatagagatgaggcaaaattgttttttattcattaaggacattgtcttataataagatttaaaataaagatggctatggaaacattttaaacttccttagaagatctctaatacaaatacagaaaaagaactgaaatttatataaattattgaccctcattaaaaatctgtttcaaattaaggattaaatttcttttgttaacaaatagatcaggtgaagccctttgcacacatgctcaacatttctaaggccatgaagtccagttagagtagagaagtcttctgagaagggaagcaggaaaggtgagaaattggacataccttttcaataagaaccctaaatcttggtggcaaatgaatttaatagaagaaactgaattttattgaaagaaatttggttttaacttagctgtaatatatgtttagttagagcttygtgcactgaaaaatcatggctttattttgtgtgcttgtgttccccttaagaagttcccattagccctcttttgtgacagtaaatgtactgttctttgaacattcttttgtgcctcagattgtgaatgccaacttgttgctttgatcttaaacctctatatggtgaagagtatcattctgtaatatgagacttgttgcttttctgtccttccagatggaagaagataagggttcagtcagctcagcatatgaatttgctgaaagccagcacagaggggaggacagtaggcacctgctagctgaggcttgcagccagcaggacagttgttgcgtgcactaggtagtactgcgctggaccttcccgggcactcatccgctaagttctcatgcttggggggcatgtcatgggacacctgacctgacatttccatttctttactaattccttcactgttcctcatatgttgttttagtttcgttgttttccttttttgtggtctttacatttttcatatgtccatccctgaaaattttgtcaatctctctttagagttccaaagataaatcagacttcacctcacattctaagctgtgaagatattctcacaacctattgtcttaca

SEQ ID NO: 673944 - DNA, 1516 bp, Homo sapiens
tgcacgaaacttaaaaaggtattaaataagaaagaagtgttgggaatgaggttcttaataagtatgccattcaatgagttaagaaacacattacgaaaaagagacttgggaaactatgttcagacattggatttgtgggctttctgggtcaatcaaatagcggtatcaaatagccagtttacatacaagtttgaaattcaagagaaagagctacaggtagaggcaataaaaaacaggtaaaatgtattaagcactttttaacatgtcactgattctcttaaataatgtacacacgcttacttaattagagtataaaagaaattattttcaacaattttttacaataaactgatctgaagcttagactagttaaatcatttctctatcagatatccagaaagtagcaaagtaagaattcaaaccttgagcataggtctccttgtctttaaaaatttatgtttttaaacaccatcccactcttcctcatctgagctggagacttatagattgggacctatcaggttatagatggaaactgcggccttgaaagcagaaaattgtagccagggaaattatttaaaatatgaaagtaaaagagtttacagcagcattctgaaaattgctaatcattaaagggtaggccaaggagaaagaggagctcacaaaagacacaaaaatgaaagggtcagagaagtacaaggtaagtaaggagagtgcagtaacagaaaagtcatagggagagggcgtttcaagaaaggagaagcagtcaatagtgtcaaactctgccaagtgttcaggtagataaagcctggaaattatttattggatttaactacaaggccatcatcactgacattgacaagagcagtttcggcagagttggaaaagcagaatccagattttggaaggttgtggagtgaaaaggagaaacagaagcagagatcaaattcagacttctctgataagtttgattgcgaatgggaagagaaaaatatgtgagctaccgaaggaaaacatggagtgagtgtgtaaatgcaggttagaagtgaatataatagtaggtttgaaatatacaggagtgcagcaatgatttgtcaaacacttttattgtgcttactcttctaaggtcttttataaatattattgttttcaattctcacaactctgtgaaacagacatatttcatatccccattttatatttaaaatataagcctgaataggataagtcacctgctcattgtcacacagtcatttagtgagaagccatggttcaaacccaggctgtgactgacaacattaaaccaattacctacagataaacaagaaagcaaagcctttgaggagaaggagccatagggaktcagtaaacaagttgagaggtgagctttgaacgggaggggaggacattaattactttgcaattaaatgaaagacacaatattgtgcagaagcaaatacgctcgatgctgtggtagctgaaagttcagggagttttcattaaaaggattctgttc

SEQ ID NO: 673945 - DNA, 642 bp, Homo sapiens
caaccaaactgattttaagcagattttgaaaaaatgaccaaaaataattctacaaagaagaataaaataaatggaaatgtaagtctcatgtattagtcaaggttcttctgagaaacagaaccaatagcatatatatgtatcgaaacatggagatttattggaagaaattgactcctgtgattatggaggctgtcaaatcaaagatccatacagtgagtcagcaggctggagtccagggaagatgaccaagacttttttctaattcagatctttaattgattggatgaaactcatcttcattgtggtaggcaatgtgctttactcaaaattcactgacttaaatgttactatcattgaaaaacascctcacagaatatgcaaaataatgcgtgaccaaatatctgggcaccatatttgcccagccaaattgatacttcaaatatcatcacaactctgtatgaatatggtagattgaattgacagtcaccttctccagtcttcctcggatcaacatcatttgtaataagacaaggccggttcaacatacgcaaatcaataaacataatccagtatataaacagaaccaaagacaaaaaccatatgattatctcaatagatgcagaaaaagtctttgacaaaatt

SEQ ID NO: 673946 - DNA, 1845 bp, Homo sapiens
ctagaatagtgatgtataaaggcctggaattgtcctgagctgattcccagacaaggaagaaaacatactgattaatagtggtgttttataattatgagtttgaagagtttgggcttatttgtatcagcttgtcactatttgtttattaacaacaagagcattgattattttcatttggttttgatgagaccctccaagaaagatgtgcctttgagactggttatgtagaaaaaaaaatgtgcttatgtaatcaagacggtaaaacactgggataaaactctgtattgcactttctgtttctgaggtgtgctgtgcacatgttagttgaccttaagaaaaaaaggatgtattcagtgtggcctttacaagagaagacaactggaactcatgcttatcatttctcacctcttgccatgaggcagtctttgtcattgatacatatccttactttgttattattttgttattactattctacaataaaacataaatttgtaagcattgtgactttggatyttgtgagtcttcttttgccatcaaactctgtctaattgttgctgctagtgaaagcaagataaaaattaaaaaaaaaacaggaataataagtattgataatacttggaacaacaggaattttcatacagagctatttggagtatggattgatatggctaattttaaaagtgatttgaaatggcctggtaaagttgaagatgagtatatcctaagatccaacattatttctttatactttttaaaagttcacacacatggccactaagataggtatataaaattttaatagaagtagctggttctaacacaaatatctcacaacataagaaataacatatatattttggtgtatatataagagaataataatgaacacaaacgagtcactgaagaatatattttatgagactgaatatgaaccatacataaaaactaagaatatctatgtttaaggctacaaacactttaaaattctaaagatgaacaagagaatgatatacagtaattcaggataggttatgtttacctgtgctaccattctgttgggggagaaaggatttttaatattaaagagtttgctactggttttgttaatgttctattttagaagagtttgttatattgtttgatatgcctgaaaaaaagcttgaaggctatttgtcttgacccatgccatctattgatagctaaatatattgaagacctgagagatagatagcctatattatcacataatttactactaggagaggtgtgtctaggccacctgacttgtttgtgccactttctatctagccaagaaattcaaatttgtggcatgtagtaaaactatggcctgacatcctgaatccatcaaaatatatccataagatagggtgtagtggtaagaagccatgaaataacaactgggcaagacttagcaccctcattctaggccatacaataaagcacaccactaaatagtctttcttaggcaagatcccagccaccaggagccgtgcagtgaactctgctagaatgttgatccaaacactggaactttattggaattctctgtaatgctttaagtaacatgaggaagtgcttttaatgagccacttgggaaatgtggaatagtgcagtttgcttttttcataatgctcaatggctaagatttttttttttacgtctttttttttttgtcagactatgaggctcaatagtaaaaatatgtttccagctttcgagaaataaattcaagctgggagaaatgtgatgccagtaaaggctagccagccttcagaatcattttacgtcgtgcagcatttatgttggaacttaatggacata

SEQ ID NO: 673947 - DNA, 635 bp, Homo sapiens
tggtgtgtaggaaggaaacgtacagagagagagaaggagaaaaagagaaaaatagggagggagagagagagagaggargagagagagacagagagaaagaaaagcaagggaaagactaaagttgagaaagcattagaaagcccaagataacatgtgcacacgtgctcagatactagggctgaaattctcagggccagcttcttgctttatggtgaaagccaaatcagctagagtatttttcaaacaaacagcagaaggaaaataaacagagctgtctcctgttaccatgagttcaaagggagccaagctagtgccccatacacataaaccacattctgactaattaggtgaaaacaacagcaaaaaatatagtagaacaattatctgagaaatatagaaaattgaaatatgccaaatctccattaaaaaaaaagagacatgaagaaatagcatcaaccataacagaaacaaacctctctgctctgagccatctgtgccccctatcagctggtaataatgtgactctgagtagcaatagaaatcatcaaaggaagagctttaagaaggcatggcagcactaatagatttttttctgggtttctggtctttgtttatggataattataatttggcaa

SEQ ID NO: 673948 - DNA, 655 bp, Homo sapiens
ttgggcatgtctttattagcagggtgagaatggactaatatagttactatccaactctttagtagtgggaaaatacaaactcccattacttataagcttagtagccaaaatgcagcaaaattcaaatataaataaaacccatataaataattatgtatttgcttgggggggtgttgaacaatatattacagtaattcaaagctacataataaacatccccaacgtcacagactttggggaaaatgtttcctcartttgggacttaccatatttacctaatatctgggctagtgagactgtttgattcctaatttgcaaggtagaactgccctcagttggtataaagttcattcacagctctggttattaagcttttccatgtggaactgtgcctgtcttaggacatgaatctgttaccagccatgaagccgtactcaggaaagatcattataagtgatatcatagttctcagcttttctaaaatcatgagaatggagtttaaccgctagtgacatctgacaagtccctgctattcaacacataataggtgtgatatgtttattgatagtgcttaggagaagagaagggcatcatggattatcagaaagtcacatccctggttgaattctttttcttatacattcctagaaaaaat

SEQ ID NO: 673949 - DNA, 655 bp, Homo sapiens
ttgggcatgtctttattagcagggtgagaatggactaatatagttactatccaactctttagtagtgggaaaatacaaactcccattacttataagcttagtagccaaaatgcagcaaaattcaaatataaataaaacccatataaataattatgtatttgcttgggggggtgttgaacaatatattacagtaattcaaagctacataataaacatccccaacgtcacagactttggggaaaatgtttcctcaatttgggacttaccatatttacctaatatctgggctagtgagactgtttgattcctaatttgcaaggtagaactgccctcagttggtataaagttcattcacagctctggttattaagcttttccatgtggaactgtgcctgtcttaggacatgaatctgttaccagccatgaagccgtactcaggaaagatcattataagtgatatcatagttctcagcttttctaaaatcatgagaatggagtttaaccgctagtgacatctgacaagtccctgctattcaacacrtaataggtgtgatatgtttattgatagtgcttaggagaagagaagggcatcatggattatcagaaagtcacatccctggttgaattctttttcttatacattcctagaaaaaat

SEQ ID NO: 673950 - DNA, 612 bp, Homo sapiens
agggtacgcttgagcaattgtttgtgtgataggaactaatcacacactgacttgtattttaagctwtgagaaataatcactcaggaagatttaatagcttttcttattctaaaatctatggaacactttgttaattgccagaattttccttgtaagagtaagagtgaaagactagaacttcaaagatttcaaaagcacatctcaggatattctctgtgaaatgatagtgtcgtttgctttaattttaaatttttatgggtacatagtaggtgtatatatttatgaggtatattagatattttgatacaggcgcataatgtgtaacaatcacatcagggtaaatatggtacccatcacgtaaagcatttatcatttctttgtgttacaaacattcaaattatactttagtttattttttattttttgtagagatggggtttcaccatgttacccaggctggtctcgaactcctgggcttaagtgatccacttgcctcagcctcccaaagtgctgggattacaggcttgagctcctttagttatttttaaatgtataataaattattgttgatgtagtcaccctgttgcactatcaaatactagatcttattca

SEQ ID NO: 673951 - DNA, 1341 bp, Homo sapiens
ggaataagtctagtctaacagccctctccttcagcaaaacctgctgcctttccccaccttccttgatacatagaatctacatccctttgttactaattatttattgtgttacattaaaagcaggtaatctgtgatagaaagaagtctccaaattctctgctctcatgtttttttaatycactccaattagagttgtacccagagcactacaccaaaatttttcttatcagagtcacagctgattacttccttctccttgattcacttttcctcatttgcactgcaggacatcctcctaagtcatggaccactgcttttcagtctgaggcattttataatgtcgtgcctcagggctaaagagaggaattgccttcttctctttcccatgcccactcagtcccatggtcaccttgttctgtctcaagacttccaacaagttgagaaaactcagaaaaaaatattaattatgtggttcttgggtgcaatattctatccatatccattagattgtttgttaactatgctattacaatcttatgtatcattactgattttctgttagcttcatatattgatgactaaaaaaggtatgttcaagctgcatttatgattgcagttttaattctccttatagagttatgtagctattcttgctttatgttgtaaggcaattatatatgtacacacacacgtataattgccttacaatgtgaaggaagaagagctatatataagtatgtacatatatatgtgtgtgtgtatatatatgtatatatgtaaagtcattccttacattatacattataatgtataattataattacattataattgtaatgtatggttttaattacattataattatatgattataattacattatacattgtaaggcaattacatatattgtaagtcatatatatatacacacagtcatatatatgtgtgcgtgtgtatatatatatctttctgaatttcctttagaatggcaggtgttgttaggaacattttattgtacccttgctctcaaaatatttttttcctttaagaatacagttctaaattcaaaataattttagacttatttagacagaatttttttgccatgtgccattcttgtgcacatacataaaaaggaaatataaaggaaatagcttagttgggtatttttaatactacacatagttcaattcatatgaattttttggctcaaatcattactatccatatttattagcacagtttttttttacatggaaatttggctttaactgtgaatataattcttcttttagaagaaatctgacatttgccaggacatctcatgtcttccatgtatc

SEQ ID NO: 673952 - DNA, 651 bp, Homo sapiens
aagatagtaaatattttgggttttgagagccaggcaatccctgtcacaatagtgattcgtgctcttgtactataacagcagctttagatactaccagaaataatgggttgggtatggtagtgttccaataaaacattatttataaaaacaagaagcaaggccagtttgtcccacaggttatcataggctgactctgttttagagcataggaaataagccttgtatggaaaacctaccaggaacttctgttaatcactcccatttgtatccttgaattttaaactgggaggtaaagcatgattagaaggagacaatctccctaaattgcaatatacagccttggggattttaggactaggatactcagtgcctaagggcagctggccagtttgcacctatttaatgagggcactggtgtctttgttgctgctgctgaaatctgcagaaaggcaagcaatgtttgcttcaaggcaacacagtgtagtgagaaaagctttttttttycctaaatattcatcctttctagcctttgacacaaactatctggatttcattatttcgtacttagctttcttccttcattatccattactcattatatatacataattttcataattcatatatacataattttttctgactagtatt

SEQ ID NO: 673953 - DNA, 2362 bp, Homo sapiens
ggaacacataggcagagcacagagaatatttggggtagtaaaactattctgtatgatgctacagtggggaagacatgccattatacatttttcaaaacccatagactctacaacactgtacaatacagagaatgaaccctcatgtgaactatagactctaggtgaccctgttgtgtcaatttaggctcactgattgtagcaagtgtagtactgtggggcacaatgtttatgcagggaggttgtgagtgtgtaggggcagtgagtgtatggaaactttctgtaatttctgtttaatatttctgcaaacctgaaactcttctattaaatataatttaattatagagaccattgagaagctatcaactgagatatcattctaatttcaaatatactgttacaaagattgttctctatttgttcttttcacctcattttctattccaacaaatcaaaattatttctaagcctctggtatagtcttttagtatattgatagtaacattataggtagaaccattcaattctcttcaaattttcccataattttttcacaactcatctatgtggtatatagctcagtaatttaagcagagtaaatatttattaaacaactactgattgattttataagacactatatacataacatattcactgaatttattgcttgaaacttaattacaagttaatacccaagagtattccatgtcttgtggtgatcttgccttacaaagtacactttcaaatattaaatttaaaaataaatatttatctttataatcatttatctaaagagttccttattgctttaaaacagcctctaaggagggtatttgttcacattttctaggtctcgtttgtaaaatttagtatcaccgactccaaatttgcgttacatgatttttaaagatactgcttattataaaatgatataatgatacaataatggagcatataatattcatttaattttaattaaacaattgtgaaataatgatgtagtttaaggacactgtaccaaaattcagaatttgtaaattccaaagtcagttcttccacttattagatgaaaggttttgaggtaccactttccttttctctgttaaaggtgcttcctgtgtgggttaaattaggttatttctcagatgtctcccaagtttaatacttaattattacagtttaagagtatcaacatttctaaatagtcacctgcaaactgtcaaaatatcaactgcccaacacaacaatgtgtattcactaagtttgtacagtcccaaagttttatacaaggctttttttctttttgtcttttacacctttccagaatttacaaagtcagcctgcaacaatgtaaaaacaataccacaaatgtttaaagtgccttatagtttgcttgcttactttatttgccttgctaygggtctcatttttcaattacagatgaaacctaagccttctattcctggtttactatcattatttgctaaatgttacctttgaaaattttgctgattcatttggaaaccctgaggaaataagaattagggaaataaaaatatggtttatatgaagatgttttcttttgtttttaagaacgtttcatctttaaacatctataataattttaaatctataaacaaagagaaataactccttgacagtgagataaaatgtttatagaaagttttctatgtctaacatgaaatacttatataactgaatggacgtaaacaggtctcttattcatgtatttcttatcgaaactctatagtgggcatccttattggacataatgttactagacaatagactaaaaaataaaagaatgtggactcttgtcataaataagacatcatctaaatggtttatggagggatttaaaaagtttaataacaatactatgagatcaaagaaaaaaatgaatattaagtgctgaatgagtattgtccatattgtataattttaggcattatgtggaaaaagaaacttttcagatgtctaggcctaggtcctttagaaaggaaaccaggaggtttagattaaatgacgaccttttatttgggaggcactgtcccagaaaattaaggatgatgaaaaaagttaaaaaaaagaacaaggcatagaaagatgaaatgctatatactgtgatatgaagcattactgtactggccctttcttcaaggcaacccctgaagggacacagcaggtagctcacaggcagatttatgcagcacaagtaacattgctaaaagggtcgtgaggtgtatcctcctcagaggagtatacaagcaagagaaaagatgtgggatgtatctcctatttcccagtggtcaaggtacatcagaaaacaacttcctataat

SEQ ID NO: 673954 - DNA, 1220 bp, Homo sapiens
tgaaatatattccctttcagttggatgataaatgcccttaattagaaatgctaataactgaactgttccctgaagacctactatttatgctgacacacaaatactttataactaaacttttgtgccaaatctagagacagaatctctatatccctttagtacaacagactgagaattatctataaaggataaaggataacatatttaatttgtgcgcagattaatctcctacccccaaattcaatgcaaacatacagcccaactaactgcattgtctatgcaggtatgagcatatcatatgtattgtacgttcatagtataatatctaagattcgctttgtactttatacttaataaaacccttggatacatattttttatttattgaggggaataatgctgtgatttctaattcatgaatattatgactttaccagctattttacttagagagaaccacaagattttttgcttcctaaaccaatgttctctttaatataaaaataaaatttaatccaaagggaagaaattcgtataaacatagtctatataaaacagaatatggtagacaggctgacatttgggaattggtaaataattgttaagaaatcatcacctgttaagtgggttggcctcaaatcctgtagtcactgacaaacagctgaatgggcagtacaagttgtttagtttttataacayaaatttttgttggttgttttataaatcaataaaattgagatactagtccctaactttcagggctattgtgagattaaatgagataatataatacatattctggaacttacaagcactaagtgtgcatataatgaatatcatctaatgtttatgactttctaagatgtatctctacttgaatgtcttccctgagaactaaacttttatatttaactttctacgtgacatctcaattagttataatatttcaaacgtaatatgtccaaaaactaagtcttggtaatttgccctaaaatcttttttctccccatctccaaattgttcatccaaatattctaggactcatgcctgattcgtgcctttttgcagcttcctatccttccgattctaccatcaagtccaaagattcaactttcaaaatgggtaaaatacgtaagtacttaacactctctcgccagttaatttaaccgcatcatgtttcataacactcccaatctatatactatattgtttatttttta

SEQ ID NO: 673955 - DNA, 1220 bp, Homo sapiens
tgaaatatattccctttcagttggatgataaatgcccttaattagaaatgctaataactgaactgttccctgaagacctactatttatgctgacacacaaatactttataactaaacttttgtgccaaatctagagacagaatctctatatccctttagtacaacagactgagaattatctataaaggataaaggataacatatttaatttgtgcgcagattaatctcctacccccaaattcaatgcaaacatacagcccaactaactgcattgtctatgcaggtatgagcatatcatatgtattgtacgttcatagtataatatctaagattcgctttgtactttatacttaataaaacccttggatacatattttttatttattgaggggaataatgctgtgatttctaattcatgaatattatgactttaccagctattttacttagagagaaccacaagattttttgcttcctaaaccaatgttctctttaatataaaaataaaatttaatccaaagggaagaaattcgtataaacatagtctatataaaacagaatatggtagacaggctgacatttgggaattggtaaataattgttaagaaatcatcacctgttaagtgggttggcctcaaatcctgtagtcactgacaaacagctgaatgggcagtacaagttgtttagtttttataacacaaatttttgttggttgttttataaatcaataaaattgagatactagtscctaactttcagggctattgtgagattaaatgagataatataatacatattctggaacttacaagcactaagtgtgcatataatgaatatcatctaatgtttatgactttctaagatgtatctctacttgaatgtcttccctgagaactaaacttttatatttaactttctacgtgacatctcaattagttataatatttcaaacgtaatatgtccaaaaactaagtcttggtaatttgccctaaaatcttttttctccccatctccaaattgttcatccaaatattctaggactcatgcctgattcgtgcctttttgcagcttcctatccttccgattctaccatcaagtccaaagattcaactttcaaaatgggtaaaatacgtaagtacttaacactctctcgccagttaatttaaccgcatcatgtttcataacactcccaatctatatactatattgtttatttttta

SEQ ID NO: 673956 - DNA, 1472 bp, Homo sapiens
tgcaagattcgctgaataacagcataaacatctgtctactcatgcgattaaaacacaatttttwattgtataataattttaaataaggatgatagattattgaaaatttctgggacctttgggttgattctataattatggctttgcaaattctcaaacttcacaattcaaccaaaacatattttacttagtcttcatttggaatttttcagtcactaaatattttactctaacgattaaaatgtaacaaatgttcacttttaataaagtatgtatgcatataagtcatattatagaaaccacagatctcccttacaacaataccagcactgatagtttctacttaagataaatatataatacatatatgtatgtatagtttatcaatgtaaccgtgagctctgctacagcactgttttactctaatgacaagtattaatttctgtttttaaagataatatcaagctctaagccaactaaaagattgacaaagaatactaaacatattatgaaaaggacttactttaaaacatattcatctcatttctgagccaataccaatttggggcacagtacaattttaaactaaagagaaaataataaaaaattatttatatcatattctaaaacaatataaaaatggacaagccaatagtggacagatgttgagatgatgcctaacaggcaatgaatagtttctttgtttgtgatgaagtaatgttttggtgaaacttctgtaaactatcatcagtaaatgctggctggttttcattttcaaattattataaaactgattgaatgaagaagtcattctgactgaaggccaaactttctatagaactgagtatttcttgaaaaataagatccgattttggtcacataaaatctttattagtattaacaatgtttcctttggatctttctaaaatttacaatgtgctaaaatttcacaaagatttgacaatatcttcaaattagagtgaaataatatttttaagatttccatacagaagagggctaaccaggaattaaaaacacattcatcaaggtcctattatgtccaaggcattctgctgaggaaacagcaatatggaaataaatcatttttttaatacatcactgcatccagtagaattcagtgtagtcttatggcttatacagttgactctggcattttttcttttaaagccaaggctgcaatatgctgaagaagcagaagaaagccctagtttcatttcagaaaagggcaatgtatgcgtgctagccctacaaagaagactggcagctctcagagaggaaagtattgcacatatggggaagcaatctgaagaacttgtctctgaaattagggaagcccattttttaaatgtcctcattgtgatgtacacaaatgaagtgcagaaaacactgatcaataggcttaaaaagtaacaatggaaaaagaagtttttacttaaaagaggaacagtcaa

SEQ ID NO: 673957 - DNA, 1336 bp, Homo sapiens
ggcttatagacagttcttaattatgacccttcaatatatgactctagcgattaagtgatttaatactgtgatgcctgttttacaaatacttatcaaatacttggagactctgaccctctgaggcatcttttttggtaataaaaatcctttgagaccttctgtttaagggctcaaaagatagtattaacaagtgtgccccccttccctgcccaggtaaagaataagtgttatatttaaatattaacatgcatataataaaatattaacagctattaaaatgtaacaaaataaaatacacttatcattaaaataagcatcgtagaattaatcagtctatgatgattcagtcccttggaatcacctttttgtagatggattattactatatttattacttatgaaaacatctattaaagggaattatcaggtgataaaatctggaaaaataatcattttctatttatacaagttattgatacgtttggggtaaactttgtgcaactaatgaggaaactaacatacaacacactcctgaggaaatcattaactagtatgtactcatgataattcatctcatttttcttgatgtctattttggtggactaaatttcatatctcagtttttcttcttgactaattgttttaagttcaaatcctctaagctgaatatatttggggataacagaatgtagtagaaactgttttgtttactcaatctttcagcacattcattgtacacatatgttttcataacttttgtgaaacttttggaagaggcccatggaaaccatagaaccaaatgtgacgtggagaacatctgggtatgtttggttagttctgctgctgaattggagtcttcagctcattcctggtttataataaagtaacatgtatcaaagggttggataggagacattcttctctatattgccctcttgaaagactgaaaacccccttttcttaagtgtactagatgatctaattgggcttaatatgatttagtgagatataaattacaccaaaaaagaggtagagtaacacctactatttactaaaataaaaatctcttggcagtacattgctgtaggaaaggacatggcagtcagcttataaatgacaaaatatgtgataactttgtgttacatacagaactgttgtttggctaggcgtagtggctcacgcctgtaatcccagcactttgggaggccaaggtgggcggatcacttgaggtcaagagtccgagatcagcctggccaacatggtgaaaccccatctctaccaaaaatacaaaaagtagctggkcatggtggtgtgtgcttgtggtcccagctactca

SEQ ID NO: 673958 - DNA, 595 bp, Homo sapiens
tggagctgtgcagtctcaaagtttattgttccagtaaacaattagaaattttggcttacaggttggaaaatagatgaaagctaaaggcatagttgaaatctgcataaaattaaagctatgggagtgtatctccaagggagagtaatttttccacaattagaaggtcatagctctgggatccccaacacatatgggatgtgcaaagaacatgaaagagcaggaatggccagaggattgctagacgatgtcgagagtggaatatatagatatcagaattagcgtttctagaaagagggagatacgatgaacastgccaagtgctgcaggaaagttatgtaggactgaatatagatgaatacagatggttgaatttagcaattggaaggttattgttggttttaatgagaataatttttgttgtctgatagtaaaggtagccacatttgagaggctgagaatgaaaggtcatgcaaagagggattgatattttttgtttgaagaaagtagtttccagaacaaaggaagtaacagtctgttaatgccagattatcaaacagaatttggaaatagtatggaggaggaaggaaacagagag

SEQ ID NO: 673959 - DNA, 595 bp, Homo sapiens
tggagctgtgcagtctcaaagtttattgttccagtaaacaattagaaattttggcttacaggttggaaaatagatgaaagctaaaggcatagttgaaatctgcataaaattaaagctatgggagtgtatctccaagggagagtaatttttccacaattagaaggtcatagctctgggatccccaacacatatgggatgtgcaaagaacatgaaagagcaggaatggccagaggattgctagacgatgtcgagagtggaatatatagatatcagaattagcgtttctagaaagagggagatacgatgaacagtgccaagtgctgcaggaaagttatgtaggactgaatatagatgaatacagatggttgaatttagcaattggaaggttattgttggttttaatgagaataatttttgttgtctgatagtaaaggtagccacatttgagaggctgagaatgaaaggtcatgcaaaragggattgatattttttgtttgaagaaagtagtttccagaacaaaggaagtaacagtctgttaatgccagattatcaaacagaatttggaaatagtatggaggaggaaggaaacagagag

SEQ ID NO: 673960 - DNA, 1443 bp, Homo sapiens
taattcttgtcctaatatctacatagcactttatattatctcacagcattacaaccattctcagaagtagattttcttttttactatgaggaaattcaacttaaagagatttcctggcccaaatgtgttgggtatggaaggctaggacatgaatccaagtrttcttattctaaggttagtgttcatttcagcaggctgcatctgtctccaatgggaagctactatggaatcaagtgcaaggccaaagctgtcttttgcccctctgctcccaggaattatggcacagtggtgtgggataggagccatcaacactgaagtatctacccataatttcttgggaacctacccttctatccatgggttcaagagtcacacctcacagataaaactgggcacctctgattgttgccatgtgcttcagagcccatggagatcagggtcatgagagagtggtgcaatataagcacagcttaagtcctggggaaacctgtcttcagtcattgttaattcacacagttgtatcagtccaaagtctggagcactgaactgtaaatgccttgagggttacaggcatattctcatctacttaagatcctacggtctaacatagtgcctgagacacaatagtggtatttgctgaaaaaaaacaaatgaactattttggcagaaaatataattatattcaatctttactttaaacttctagaatgtcatgtaaattatatggaccttaaaaagacaccagaaaatcttttcctaaatattttgatattaggattccaaaagatctcttataaattcacaaaattcagaggtactgccctttaactcagaaaggtctacgtcaattcatatcagattagatctaagtgctacttgttatgtaagatggtgaaaagaatattctcaggtttacacaagggttattaagagacttaaaaatgttggtgtgctgcacccattaactcatcatttaacattaggtaaagtataagaataaaaaaaagagacttaaaaatgaaaatcaaaggtaataataatgtatatttcaaaattgctaaaagaatacatttttaacattctcaccacattaacaaatggtaatttggtgaggtgatagatatgtttttatttattagttaagaataaatacatttttaaagtacaaaataccccaaaatttttaactttgtggtttttagcaggaattaaaaccctgggtcagtatatagccataagttttaacaacagtattatgtcaagcagtcacttgcaaaccatatgaaactcaaattttttgaagtgtcgcaatagcctcattgaaattatttcccaaatattgacactaaggaagcaaataaaatatcaaccctgccgctcagacttaaaccttctaggctgcctgattcaggcagtagcagacaaggtgtttttatgtcgtcc

SEQ ID NO: 673961 - DNA, 1443 bp, Homo sapiens
taattcttgtcctaatatctacatagcactttatattatctcacagcattacaaccattctcagaagtagattttcttttttactatgaggaaattcaacttaaagagatttcctggcccaaatgtgttgggtatggaaggctaggacatgaatccaagtattcttattctaaggttagtgttcatttcagcaggctgcatctgtctccaatgggaagctactatggaatcaagtgcaaggccaaagctgtcttttgcccctctgctcccaggaattatggcacagtggtgtgggataggagccatcaacactgaagtatctacccataatttcttgggaacctacccttctatccatgggttcaagagtcacacctcacagataaaactgggcacctctgattgttgccatgtgcttcagagcccatggagatcagggtcatgagagagtggtgcaatataagcacagcttaagtcctggggaaacctgtcttcagtcattgttaattcacacagttgtatcagtccaaagtctggagcactgaactgtaaatgccttgagggttacaggcatattctcatctacttaagatcctacggtctaacatagtgcctgagacacaatagtggtatttgctgaaaaaaaacaaatgaactattttggcagaaaatataattatattcaatctttactttaaacttctagaatgtcatgtaaattatatggaccttaaaaagacaccagaaaatcttttcctaaatattttgatattaggattccaaaagatctcttataaattcacaaaattcagaggtactgccctttaactcagaaaggtctacgtcaattcatatcagattagatctaagtgctacttgttatgtaagatggtgaaaagaatattctcaggtttacacaagggttattaagagacttaaaaatgttggtgtgctgcacccattaactcatcatttaacattaggtaaagtataagaataaaaaaaagagacttaaaaatgaaaatcaaaggtaataataatgtatatttcaaaattgctaaaagaatacatttttaacattctcaccacattaacaaatggtaatttggtgaggtgatagatatgtttttatttattagttaagaataaatacatttttaaagtacaaaataccccaaaatttttaactttgtggtttttagcaggaattaaaaccctgggtcagtatatagccataagttttaacaacagtattatgtcaagcagtcacttgcaaaccatatgaaactcaaattttttgaagtgtcgcaatagcctcattgaaattatttcccaaatattgacactaaggaagcaaatamaatatcaaccctgccgctcagacttaaaccttctaggctgcctgattcaggcagtagcagacaaggtgtttttatgtcgtcc

SEQ ID NO: 673962 - DNA, 603 bp, Homo sapiens
agcaagttaacacaggaacagaaaaccaaacaccacatgttctcactcacacaagtgggagttgaacactaagaacacaaggacacagaaaggagaacaacacacaccagggcctgttgaaaggtggggattgaggggagggaacttagaggatggatcaataggtgcagcaaaccaccatggcccaggtagatctatgtaacaaacctgtgtgttctacacatgtatcccttttttttttttttaaaagaaaatactttctgaacttgcaacatgttcttttaaatagccccagttgagaggtgggttcggtctttaaaaatagctaaaagaatttggagtcacacttagaaaacccagaaaaaaaaaaaaaaaaaaaaccctaaacatgttcttacaaggataggggagtgaatgtcctccaggtttmaaagcactgtttacaagtcagtacctgtcacaattgatcccatgtttgaatttatacacttatttctccaaattgacagtgaaactcttcaagcacaggaaccttattccccagcaactagcaaattttgggacatttgctaggctcccaaagtttcttgatgttactggaat

SEQ ID NO: 673963 - DNA, 1613 bp, Homo sapiens
tttccccactgatacgttagtattagaattaaaaatatgtggaaactggaaaactgtttccctccttaggagcttactatctcataagcaaggctagaagccctttgaagggttgcactaaacttcttttggtaataatgcaaaatatacttgattagctgccgatatcatgaaatacacagcctttttttaaaaaaatttaattttaagttccagggtacacgtgcaggatgtgcaggtgtgttacataggtaaatggaaatgcacagtcttaattcagagaaatcagacttatctcactaaagtttgaaattaactsagctttttctccttttaggtatctgatttcatattagaggttaataaatgcaatccctcaaagaaatagcacttaagtgaactaactttagtttttcctattggtttgacaaagtccaactttgtttaccttaagagcatggtaaaagaatgcctattttctcaggctttttgactgaagtttagaatgaaatgaaaggaagagaaaacgtgagtataatgtagtgtgaaaagatttgggtatggtgaatattggttagtccttttaatatttatttcattgccacagtagttcagaggagtaagaaagtaaatgtgtgcaggtacattcatagtgattcaaaaattcattccaggaagatgaaaacactggtcaggatggactggcattaaaatgaagacatatgctactacttcttgtcattagtgtcttgcccagcatttcctatactgggcccactgacccatcaccaggaggcagacatcattccagacatcatccaccagaagtgaaatatgtatccagggataaggcattggaaataatttgtaaagcgatatttgtcatgaaaagcatttatttttgtattaattatgctaaataatctagatcacagaatatttatcctcatctgggagttaaaaaggcagggaagacagagtaaaacaacattaagaaaagtaaattatgggaccatgaatatattttttctaaaaaaccctgaatcaggaaaagtttaaaagaatcagaagccaacaacacatgtgcctttaatgtgttcatgttttaaatacagtcatattgcttcttttttcagaagaaatcttatggaccaagaaccactagaattgtcctaagaaagccttaccaaaaaaggattaaatacacataggagaggatcattttgcttccaaattctagcaatggtagaaagcatctagctgaactggtataatatttggaatccgtggccacaggccaaatgacatagctagaggcagaggtaagacccttgctgagaatgagacaaatataaatggggtgacagctgagttctccaactcttcctttctactgattcactctcgttttgctatggtttaactgaaaacttttcataagctcctcaaactagcaattaaagacaaagttgaaataaaatcagattagagaaacccagctacatttttcttacaagtgatgatgagttcagtgtagattggaaagttaaaactggtaacaccaccagctaccaagaactgtgagcagaatctaaaagaagtgttgaaaacca

SEQ ID NO: 673964 - DNA, 944 bp, Homo sapiens
tgaggtcaggagctcgagaccagtctggccaacatggtgaaattccgtctctactaaaaatacaaaaattagcttgatgtggtggtggacgcctgtaatcccagctactcgggaggctgaggcaggagaattgaggaggcggaggttccagtgagctgagatcacgccactgcactccaacctggactacagagcaagactctgtctcaaaaaaaaaaaaaaaagaaaaataattataataaagcaaagtctgattaaaaatggcaaataaataaccaggaataaagtgattaagaaatatgaaggacttattaaaactctattgagcaacataaaaaggatttaaatttaaaaaacaatatarttttttcctggaaaagactcaatatgaaacgatatatattttttccaaatctataaatttaatgtgatcccaaacacaatagcaacaggtttttctgcccaaacttgtcaaaatgtttagaaagttcatctggaaaaataaacataaaactacccaagtgacatcctttaaaattaagagtaataggtaggaaaactagacctcccgatattaaaacattttaaagttatggtaacttaaagagaatggtagcattatagaaatagatgctgagatgagtgaagcagaacacaatcaagaagcatataaatgtttaatattttaatggttatttaatttatataacagtttacatatttattttttcaacaagcatctaatgtagaccctgctatctgctaggtactatactatggcttgtcaagggcaattaagacagtctgtatctgcagtctaatttggagatgaagaacatggacttttgagtcagacagacctaggattgagaatgatgttacctatttgtgaaatgttctagaggcatagaatgtagcaaatactcagtaaatgttatttatta

SEQ ID NO: 673965 - DNA, 1062 bp, Homo sapiens
catacatacgcatatgtgcacatatttgtatcccccaaaatatttccagaaagattgcaaattttatatatataaatctgtcataagaaaggcagtatgcttatactaatagaaaaataatatttagcatatcaaattagaatgtatttaaatatacatattttaacttttattttaggtttaggggtacatgtgcaggtttgttttatgagtaaattatgtttcatgggggtttgttgtacagattatttcatgacccaaatgataagcatagtacccaataggtagttttctgatcctcaacctcctccctccatccactctcaagtaggccgcagtgttttttgttctcttcttgtgctcatatgtagtcgatgtttagctcccacttataagtgagaacatgcagtatttggttttctgttcctgtgttagctcacttaggataataatggcctggtccagcttcatccacgttgctgcaaaggacatgatcttgttcttttttatggctgtgtattattctttggtgtacatgtaacacattttctttgtccagtccactgttgatgggcatttaggctgattccacatctttgctattatgaatagttctgtgaggaatatatgcatgcatgtgtctttatggcagaatgatttatatttctctgggtatgtaaccaataacgagattgctggaaccaatggtaattctgctttgagttctttgagaaattgtaaacygctttccatagcgactaaactaatttacattcccaccaacagtgtataagcattcccttttctctgcagccttgccaacatctgtttgtttttttttttactttttaatagtagccattctgactggtgtgagatagtatctcattgtggttttgatttgcatttctgtaatgattagtgatgttgaggatttttttatatgcttgttggccatattatttaaatatcttaaggtaaacaaaaaaccatagaaattttctctaaactagggaaagttatatataatcatataaattacataattttaacgtcctttga

SEQ ID NO: 673966 - DNA, 673 bp, Homo sapiens
tgaaagaagatggatctgaaaacctataggattcttccaagaaacctctttactggtctatgggccatctcattagtttatttgtttgtttttaatttctcaccactgtaaagaaaaatatgtcttaatattttccaccaaaaaataggttagtaataagacagtttctgtaattcttatacctgtgtttgtaatatgtcattaaatatttatacactcatatcttctgctagttagtgagttattttagaatatatacttctaccttttatctttygtgactggcataatgtttcaatctgttgctacataacaaaatacccccaaatttagcagcttaaaacaacaatactttcttgtttctcgtgattctgcgagttgataagcagtcctgcactgagctgggagctgagccggggctgggaagtccaagatggtctccttcatatatctgtcagacagtgtcggctgttggctgcacatcagttctccacatggtctacctcttcttccattagcttagataggcttccctagtgtatggaggctgggttccaagagagcgaagctcaagctgccaagccttttacaagttgggcccaggactggcatggtgtcatgttcgctgcattccgtttgtcaaagccagcctagatttaagtggaagtgaaat

SEQ ID NO: 673967 - DNA, 653 bp, Homo sapiens
tgtagcatagataacccttcrcagagatgtgtatctaacttccctagcagccatgagtctaaagtgtgaccagctgcccatactttaccctaaaagcttactatagaaaggatactttctggagggtggatcgccgtcttgcagcagcagccccagacatggctgctattcccaagttccctattaaatgcttccttctgagaaactgaatttgtcaggctctttcttccccctctcagcatccttggcctttggagataggtctgcaggttggcatagacctgctcaacatggcaagtcatatagggagtgggtgctgtgtgaacctattgaagtgagagtggcatcagccacatccactttctcaggcagcgtggatgaggttcctgtagtagcattcagtgctccaggcctgggtgttgatggggtgagccctcgtgagcccaggagtggcaagaacgctgactccccaggaccacttttgtggagtgatttggggcgttattccagctgcccagcctctaggcttgtttctttgaccttcccagaaattctgtgaactacctaccactctcaaaaaaacatattttctacttaaattagacagttgggattctgttgtccaactaagaaccgtggctgacagtctggcc

SEQ ID NO: 673968 - DNA, 653 bp, Homo sapiens
tgtagcatagataacccttcgcagagatgtgtatctaacttccctagcagccatgagtctaaagtgtgaccagctgcccatactttaccctaaaagcttactatagaaaggayactttctggagggtggatcgccgtcttgcagcagcagccccagacatggctgctattcccaagttccctattaaatgcttccttctgagaaactgaatttgtcaggctctttcttccccctctcagcatccttggcctttggagataggtctgcaggttggcatagacctgctcaacatggcaagtcatatagggagtgggtgctgtgtgaacctattgaagtgagagtggcatcagccacatccactttctcaggcagcgtggatgaggttcctgtagtagcattcagtgctccaggcctgggtgttgatggggtgagccctcgtgagcccaggagtggcaagaacgctgactccccaggaccacttttgtggagtgatttggggcgttattccagctgcccagcctctaggcttgtttctttgaccttcccagaaattctgtgaactacctaccactctcaaaaaaacatattttctacttaaattagacagttgggattctgttgtccaactaagaaccgtggctgacagtctggcc

SEQ ID NO: 673969 - DNA, 621 bp, Homo sapiens
tgcatagtctgcaccaagaatagtttccaccttttctttttggtcccacccgggaacgaaattagcatctcttaatggtgggtaaaattagagtagactcagtgtttagttttcgttcatttcccaggccacttctttatgaagtaacctccatcacaatgtatagtttctagaaagtctgaaggarcactgatgttttccctcgaatgcagtttctatgtcaccgtggtaaagaagaattttcaggcttgcagtcaaggacagcctttcaaattctctttggatgaaactaatccccaaggctgcccaacctccctgtaactaagaagtttacaaggccaaatatttgatgcactggcctgaaaacaatgatttggatgtcagtcactgacgacacatcataatgcttaccaccacccttccaaacccactccggaccagtaaacagtgattatgctgacagagctgaaacaaacctttacatccgtaagtatccatttaactcctgaaaccttaaagcttggcttggtgatcatctcattagatttttctgcagggtgccgataccaaaatgatacagtattatttaaaagtggcttatgtaccattctatcaaatgaa

SEQ ID NO: 673970 - DNA, 1385 bp, Homo sapiens
aatttgagctgaattcttttcagtgtccccgtgcactcagatagaccatacggtttgtgcatctaccaggtaaaaggtgttgggaaacctgcagacttttgaggtcctacaatcctagtgacctctttgagctacaagtctctgtgactgaccgattttgccaattcaaatttcttgcaaggagaatcaaagggagactaaccctgaagagtcagaagagctccataatttcctgtggggtcaactgaggcctctatcgcaaataaattgtaactggacttctctgtctgcccaatcctgcttcctcttccttcttacaaatggtgttctccaacaacctccaacgtaaaaatctcagcctcaggatgtggcttcagcagaggagggtgggaggggttgcgaggttgtaggagtggtgagatgagagatcagaggaaactggacctttagcatcaggtgcataactgcagtgtctaagctcctacccatcgttctttactgcttccattctccaaatactggccttagtttcaataactggggaacaataccttcagattacaaacttgaaggaatctctgcccaggattatattttaagacacaaaaggcctggcattattagtcattggctcattgcctgataaatcactatcttctacatggcagaatggggaggagaactgagctaaattttcaactttgttgagtaaagagttggttgtggatagagaggaacagagaggaagtcatactgaagtttcatgaaattgaaatcaatgttttagaagcattttggatgcaactttaatgagggagatgccaacgagggcaaaataaccatgyggctgctctccttcacagcgggtggctgatcttcccttgagagccatctagcgatcatgtagctatgccagcaggggtagcccttcacagcagactccaaataacaacacactcctctgaatctcatgcatttcatttttaacatagtgttttgttttgttttttgagacagaatctcgctttgttgcccaggctggaatgcagtggcgcaatctcggctcactgaaacctccgcctctcagattcaagtgattatcctgccttggcctcctgagtagctgggattacaggcacgtgccaccgagtctggctacctttttttgtatttttagtagagatggccaaccatgttggccaggctggtctcgaactcctgacttcaagtgttctgcctgcctcggtctcccacagtgctaggattacaggtgtgagccactatgcccggccttaacatagtgttttgaaataagcttttgaagtaaaatattcagggctggtagccttaaagccctttcttgtatcctttctacatatgtaaaa

SEQ ID NO: 673971 - DNA, 1385 bp, Homo sapiens
aatttgagctgaattcttttcagtgtccccgtgcactcagatagaccatacggtttgtgcatctaccaggtaaaaggtgttgggaaacctgcagacttttgaggtcctacaatcctagtgacctctttgagctacaagtctctgtgactgaccgattttgccaattcaaatttcttgcaaggagaatcaaagggagactaaccctgaagagtcagaagagctccataatttcctgtggggtcaactgaggcctctatcgcaaataaattgtaactggacttctctgtctgcccaatcctgcttcctcttccttcttacaaatggtgttctccaacaacctccaacgtaaaaatctcagcctcaggatgtggcttcagcagaggagggtgggaggggttgcgaggttgtaggagtggtgagatgagagatcagaggaaactggacctttagcatcaggtgcataactgcagtgtctaagctcctacccatcgttctttactgcttccattctccaaatactggccttagtttcaataactggggaacaataccttcagattacaaacttgaaggaatctctgcccaggattatattttaagacacaaaaggcctggcattattagtcattggctcattgcctgataaatcactatcttctacatggcagaatggggaggagaactgagctaaattttcaactttgttgagtaaagagttggttgtggatagagaggaacagagaggaagtcatactgaagtttcatgaaattgaaatcaatgttttagaagcattttggatgcaactttaatgagggagatgccaacgagggcaaaataaccatgcggctgctctccttcacagcgggtggctgatcttcccttgagagccatctagcgatcatgtagctatgccagcagkggtagcccttcacagcagactccaaataacaacacactcctctgaatctcatgcatttcatttttaacatagtgttttgttttgttttttgagacagaatctcgctttgttgcccaggctggaatgcagtggcgcaatctcggctcactgaaacctccgcctctcagattcaagtgattatcctgccttggcctcctgagtagctgggattacaggcacgtgccaccgagtctggctacctttttttgtatttttagtagagatggccaaccatgttggccaggctggtctcgaactcctgacttcaagtgttctgcctgcctcggtctcccacagtgctaggattacaggtgtgagccactatgcccggccttaacatagtgttttgaaataagcttttgaagtaaaatattcagggctggtagccttaaagccctttcttgtatcctttctacatatgtaaaa

SEQ ID NO: 673972 - DNA, 639 bp, Homo sapiens
tatttattgtatgtgcacaaatgtatccagaccactctagaaaccatctcttctttgatctcttctttcccccagcctttcctcyttttgcagcctgcaggactgcctagcttcaagggagctgagaggaaggttgtgttcaggtgatcaggaatggtaacagatggttggatgccctcattttgcagatgcctctatatttgtgctgcttaaaagcattttaactagtatagagcaaaacatgtattatcttttagttgcagccctagtttctagaatcccggattagtgactagccccctaaacctcacagccactaatccactgggatggctcctctgcctctgttgacgttgggtgctttcagcccccagtgaattctgcctctttaatcttgtttggtgctgatttttttttttctaccattagcgctttggattggaatgtggttgcctcatatttttttgtcagactctttacagacaagcaaataaacttggagagggtaagtaaggtaacacaggagatctgagatagagctaggacttttgccatctatccttgtcatcaaaagcactcattaatcttatcgtcattctgtggcagggtggtggaacagcacaggtcaatttagagatt

SEQ ID NO: 673973 - DNA, 605 bp, Homo sapiens
gggtgccagttagtatgtgcgttcacttggcaaaagttccttcagctgtatacttaagacctgttcagtttttgtgtgttgtacttcaatttgaaatatttttaatggcgggcgcagtggctcacacctgtaatcccaccactttgggaggctgagacagaggatcccctgagctcagaggagtttgaggccagcctgggcaacatggcgaaaccccatctctactaaaaatacaaaaattagacaggtgtggtggcatctgcctgtaatcccagctacttgggaggctgaggtaggagaattgcctgagcctgggaggcagagattgcagtgagccaagatcgtgccactgcactccagcctgggctacagagtgagatcctgtctcaaataaataaagtaaaataaaatgtttataaaataaaatctctagcagagtcacatggagacaaggcagttagtgccaagttatcccaagggtggcccctaagattgtctgtgagttcccccttctgaggcccygagagcttttccagtttctctccttcctgagaactggttcttttttttttattctcttgatccttacaataaaaatctccccc

SEQ ID NO: 673974 - DNA, 1045 bp, Homo sapiens
acacacacacacacacacacacacacacacacacacaaatattttctacatttgtattctaagagggcctgggaacaatgacaccccaaaagcaatgakcatatcttgcatccatattttaactttttactaaaagaaaccagggctccttggaaaaatggctgattccaggactaggacaaggcaaataaaagttgagcctgaaacatcttgttatcccagaaaataatgaaagtaatgatggagacagaataaaaggacacaggaaccaacctgaaaaaagctcccactggccaaagatggcctaacttgagcactaaaataaattatgatagcaacagattataatccaatgaataattctggtaccatgtgttcattacagatataaattataataaatgagtacattcaaagttcaatgaaaaatgagatttttacagggttcaacatatatttccagaaagtacttagttacatagattaaaaggctgaaatataccaccttaatcaaatgatcaaagtgaacatttgataaaccaaaatcttgcaacccattgcttttcctccataacttggatctaatcatgagaaaacaaatccaatttaaggaacgtactacaaaatatctgccctgtaatcttcaaaagtgtcaaggacatagaagtcaagaaagttggaggaactgttccagactgacagattaaagaccctgtattatggttccctagagaaacagaaccaataggatgcagatatataaagagatttgttatggctgggcacggtggcttacgcctataatcccaggtttggagtgcagtggtgctatcttggctcactgtaacctctgcctcctgggttcaggtgattctcttgcctcagtctcctgagtagctgggattactggtatgtgccaccatgcctggctaatttttctatttttagtagagatagcgtttcaccatgttggctaggctggttttgaacacctggcctcaagtgatctgcctgccttggcctcctaaagtgctgggattacagg

SEQ ID NO: 673975 - DNA, 1045 bp, Homo sapiens
acacacacacacacacacacacacacacacacacacaaatattttctacatttgtattctaagagggcctgggaacaatgacaccccaaaagcaatgagcatatcttgcatccatattttaactttttactaaaagaaaccagggctccttggaaaaatggctgattccaggactaggacaaggcaaataaaagttgagcctgaaacatcttgttatcccagaaaataatgaaagtaatgatggagacagaataaaaggacacaggaaccaacctgaaaaaagctcccactggccaaagatggcctaacttgagcactaaaataaattatgatagcaacagattataatccaatgaataattctggtaccatgwgttcattacagatataaattataataaatgagtacattcaaagttcaatgaaaaatgagatttttacagggttcaacatatatttccagaaagtacttagttacatagattaaaaggctgaaatataccaccttaatcaaatgatcaaagtgaacatttgataaaccaaaatcttgcaacccattgcttttcctccataacttggatctaatcatgagaaaacaaatccaatttaaggaacgtactacaaaatatctgccctgtaatcttcaaaagtgtcaaggacatagaagtcaagaaagttggaggaactgttccagactgacagattaaagaccctgtattatggttccctagagaaacagaaccaataggatgcagatatataaagagatttgttatggctgggcacggtggcttacgcctataatcccaggtttggagtgcagtggtgctatcttggctcactgtaacctctgcctcctgggttcaggtgattctcttgcctcagtctcctgagtagctgggattactggtatgtgccaccatgcctggctaatttttctatttttagtagagatagcgtttcaccatgttggctaggctggttttgaacacctggcctcaagtgatctgcctgccttggcctcctaaagtgctgggattacagg

SEQ ID NO: 673976 - DNA, 1045 bp, Homo sapiens
acacacacacacacacacacacacacacacacacacaaatattttctacatttgtattctaagagggcctgggaacaatgacaccccaaaagcaatgagcatatcttgcatccatattttaactttttactaaaagaaaccagggctccttggaaaaatggctgattccaggactaggacaaggcaaataaaagttgagcctgaaacatcttgttatcccagaaaataatgaaagtaatgatggagacagaataaaaggacacaggaaccaacctgaaaaaagctcccactggccaaagatggcctaacttgagcactaaaataaattatgatagcaacagattataatccaatgaataattctggtaccatgtgttcattacagatataaattataataaatgagtacattcaaagttcaatgaaaaatgagatttttacagggttcaacrtatatttccagaaagtacttagttacatagattaaaaggctgaaatataccaccttaatcaaatgatcaaagtgaacatttgataaaccaaaatcttgcaacccattgcttttcctccataacttggatctaatcatgagaaaacaaatccaatttaaggaacgtactacaaaatatctgccctgtaatcttcaaaagtgtcaaggacatagaagtcaagaaagttggaggaactgttccagactgacagattaaagaccctgtattatggttccctagagaaacagaaccaataggatgcagatatataaagagatttgttatggctgggcacggtggcttacgcctataatcccaggtttggagtgcagtggtgctatcttggctcactgtaacctctgcctcctgggttcaggtgattctcttgcctcagtctcctgagtagctgggattactggtatgtgccaccatgcctggctaatttttctatttttagtagagatagcgtttcaccatgttggctaggctggttttgaacacctggcctcaagtgatctgcctgccttggcctcctaaagtgctgggattacagg

SEQ ID NO: 673977 - DNA, 2717 bp, Homo sapiens
caggcttctcttgtattttgcttggctcagctatctacaatcagccattttccctagaagcactggtcctatttagtataaaatggtttttacatgctacaatttgggtacttggtgtgctcattgttactgggatatactcttggaccatctctgaacagttaagcgtgtgtgtgtgtgtgtgtgtgtgtgtgtatgtgtactctacacacatatataagtatacacaaagatctatagctatttctatatcaatctgtaaatacataaatttaaaaatcatgaattcatactgattttttccaattcaaacctaatacctgagttcctttatagccataagtaccttttctaacagtgaaaaaatttgacttttattatccttaatatatttgttcattgacttatgtgttcagtgtaactaacttcctgaccacgcagacatctcctctgccacttcagctcttcacatccttggatgccagtgggaatattgctattctctatgcagcatccctgtgcaacgccgtcctcccctcctcagtacccttgccagtgggcacccttctgatgcatctctgtatggtatctccctcctcccctcagtgccccgtgctggcgagcatgccaaccatgcacctctgtgaaattcaccctcactccacagacattttctgtagtggcctgtgattgactgctctgcgccaggaacagaaaaggagaaggaactataatttcttttataggtaattrggaattcatatatcacataggagtagaatctttgagctggaagagaccttgtaaataaatcatttagggtgagcaggggtatagaaaatgggattcttttgtgttggaattctggccctgtcacttacttggtgaatcttgcataattaaacatcagtcagagcaggatatttaagtctgctgattctcccatccccttgctgtctcagaaatattctatagcatttggagacatgcaggaaccagttgaacacaattgcttctcaatctatcatggttatctactccagagctgaatctttaagtcagatagctgatttgaattgctgaacccattgttctgctgaattctgtggcaattgatgttacttcttctttaggacttctatttcttctggcctccttgccaatagtatcaaagtttaagaggataaatgaatggggaggggataggagaagtctggagataaatgcagggagaaaggcacagcacaaacaaaaagcattttgataaggcttttctgaaagttgagtaaatatgtctgtagcccattattataactcatggctggactcaaatgtctggcttcaactgatgcgagacatgttggggcaatgaagagagtaatatgaacaaacaatcatggccgtcaataaagatgctttagtgaaagtattctcctttgggaaaaagagtcaacctaaataaatagcaactgcctttaactgaatacccactctgtgccaggcaccaggttagattttttcatactttagctgtaatcatcacaacattattgcagaagtaggaagtattacccccattttagagataaggaatatgagattctgatttgttcaagaaccttctcccagtagggagaagtgttatattcataacaaacacttggtccttccactttcctgctactaatacgcaaataaaataatttaacagaagagactttttctcaggaatatgatgaatgtgaatggaatgtgtgcaaaattaacttgtaattgttatgctctcatttccacatcttctgtcttttcttgataaagcttttaggtggacctctgaagtacttgatttctgtatttgcttaacaaatatttgatgaacactatgtatcaggcacgtgggtcagggcatgaggtataatgatatagaatatactttaccgattttatagccaagagggagagagaaacattaaataaattatcacacatcaatattttataagtgttattaaggaaaacagtgtaagatgaaagtatttataacaggctgggcgcagtggctcacacctgtaatcccagcactttcggaggctgagatgggtggatcacttgaggtcaggagttcgagaccagcctggccaacatggtgaaaccctgtctctaccaaaaatacaaaaattagccaggcatggtagcatatacctgtagtctcaggtacttgagaggctgaggcaggaaaattgtttgaatcgggaggtgggggttgcagtgaaccgagactgcgccactgcactccagtctgggcaacagaagaacactctgtctcaaaaaaaaaaaaaaaagtatatctaaaaattaattaattttatatggtgtggagaagggagaaaatatcaaggaaattgaaactaaggatgaataggagttagcaggtgaagagtggggcaatagaaccccattgagtaaatagaaccacatgtgcaaaagatgggatggagacgaacaggaaggttggagtgctaaaacaagaggcacaacgtcagcagatgaggctggagaggatagcctgatcaggcaagcctggcatgccgtgttaaggatttggaattgtataccaagtagcatggaaatcaaatgcacgcacgcgcgcgcacgcacacacacacacaccattgtcgtcatcatcaacattatttttcatagttaatatttgttcc

SEQ ID NO: 673978 - DNA, 2717 bp, Homo sapiens
caggcttctcttgtattttgcttggctcagctatctacaatcagccattttccctagaagcactggtcctatttagtataaaatggtttttacatgctacaatttgggtacttggtgtgctcattgttactgggatatactcttggaccatctctgaacagttaagcgtgtgtgtgtgtgtgtgtgtgtgtgtgtatgtgtactctacacacatatataagtatacacaaagatctatagctatttctatatcaatctgtaaatacataaatttaaaaatcatgaattcatactgattttttccaattcaaacctaatacctgagttcctttatagccataagtaccttttctaacagtgaaaaaatttgacttttattatccttaatatatttgttcattgacttatgtgttcagtgtaactaacttcctgaccacgcagacatctcctctgccacttcagctcttcacatccttggatgccagtgggaatattgctattctctatgcagcatccctgtgcaacgccgtcctcccctcctcagtacccttgccagtgggcacccttctgatgcatctctgtatggtatctccctcctcccctcagtgccccgtgctggcgagcatgccaaccatgcacctctgtgaaattcaccctcactccacagacattttctgtagtggcctgtgattgactgctctgcgccaggaacagaaaaggagaaggaactataatttcttttataggtaattaggaattcatatatcacataggagtagaatctttgagctggaagagaccttgtaaataaatcatttagggtgagcaggggtatagaaaatgggattcttttgtgttggaattctggccctgtcacttacttggtgaatcttgcataattaaacatcagtcagagcaggatatttaagtctgctgattctcccatccccttgctgtctcagaaatattctatagcatttggagacatgcaggaaccagttgaacacaattgcttctcaatctatcatggttatctactccagagctgaatctttaagtcagatagctgatttgaattgctgaacccattgttctgctgaattctgtggcaattgatgttacttcttctttaggacttctatttcttctggcctccttgccaatagtatcaaagtttaagaggataaatgaatggggaggggataggagaagtctggagataaatgcagggagaaaggcacagcacaaacaaaaagcattttgataaggcttttctgaaagttgagtaaatatgtctgtagcccattattataactcatggctggactcaaatgtctggcttcaactgatgcgagacatgttggggcaatgaagagagtaatatgaacaaacaatcatggccgtcaataaagatgctttagtgaaagtattctcctttgggaaaaagagtcaacctaaataaatagcaactgcctttaactgaatacccactctgtgccaggcaccaggttagattttttcatactttagctgtaatcatcacaacattattgcagaagtaggaagtattacccccattttagagataaggaatatgagattctgatttgttcaagaaccttctcccagtagggagaagtgttatattcataacaaacacttggtccttccactttcctgctactaatacrcaaataaaataatttaacagaagagactttttctcaggaatatgatgaatgtgaatggaatgtgtgcaaaattaacttgtaattgttatgctctcatttccacatcttctgtcttttcttgataaagcttttaggtggacctctgaagtacttgatttctgtatttgcttaacaaatatttgatgaacactatgtatcaggcacgtgggtcagggcatgaggtataatgatatagaatatactttaccgattttatagccaagagggagagagaaacattaaataaattatcacacatcaatattttataagtgttattaaggaaaacagtgtaagatgaaagtatttataacaggctgggcgcagtggctcacacctgtaatcccagcactttcggaggctgagatgggtggatcacttgaggtcaggagttcgagaccagcctggccaacatggtgaaaccctgtctctaccaaaaatacaaaaattagccaggcatggtagcatatacctgtagtctcaggtacttgagaggctgaggcaggaaaattgtttgaatcgggaggtgggggttgcagtgaaccgagactgcgccactgcactccagtctgggcaacagaagaacactctgtctcaaaaaaaaaaaaaaaagtatatctaaaaattaattaattttatatggtgtggagaagggagaaaatatcaaggaaattgaaactaaggatgaataggagttagcaggtgaagagtggggcaatagaaccccattgagtaaatagaaccacatgtgcaaaagatgggatggagacgaacaggaaggttggagtgctaaaacaagaggcacaacgtcagcagatgaggctggagaggatagcctgatcaggcaagcctggcatgccgtgttaaggatttggaattgtataccaagtagcatggaaatcaaatgcacgcacgcgcgcgcacgcacacacacacacaccattgtcgtcatcatcaacattatttttcatagttaatatttgttcc

SEQ ID NO: 673979 - DNA, 1164 bp, Homo sapiens
ttttagagacagggtttcaccacgttggccaggctgatcttgaactcctgacctcaggtgatctaccgacctcggcctccaaaactgctgggattacaggtgagtctccacgcctggtgaagtaaatattttaaataaactacaatgacaaaattatgakgataaagtcttaccatccattggtattaagagtctctgcttctagaactggttatttgcagcaaaatacatgttattcaattagatgaagtgccttatataaactcttcatggacaactcataaaccacacaaaaattcctttgcaatacacattttgagaacataaatttaaatttctatatttccacaatttatatttttaaatcagatacgatgttgcccaggctgttctcaaactcctgggttcaagcaatcttcctgcctcaaattcccaagtagcagggactacaggtgtacaccaccacactcagttatttttctacaatttttattttttttgtctcactacagaaccaataatataagtagaaaaacaatctctcgtaaaaacaatatgataccaaaataataagtttccaagaacaaaagctatatgctatgtgctgaatattcttgccactaaaaatcaccaggaggatcccatgattactgcaaataatttgatccactgaagatttatacaggcataaatattaagaaagtcacactcgtatgatttaaaagtcaaagtattagtatttatccaaataaaccttaagcaaatttcatatttcctctattggagaaagcatttcctaatgtgattttcctgtcactactaattttccagttcattttttttcagctcccaccctgtcacagtacttatcaatctttgttagttaccaaagttaaacacattttttgaatcaactagccatatgtatgtttttctctgaccaactttccattaccaccataaaacaatgataggtaaaccactgctaaatttgaaaagtaaatactacgcaaaagtacattcagagtgagaaaattaattttacaagagaccactttaccttagtagcaacattcaagtctttgtcatccgatgcaggcaatgaatccacacgcagttcatggaaaatgcttgagagcaaaaacacacaacgaaaatgagcaa

SEQ ID NO: 673980 - DNA, 1164 bp, Homo sapiens
ttttagagacagggtttcaccacgttggccaggctgatcttgaactcctgacctcaggtgatctaccgacctcggcctccaaaactgctgggattacaggtgagtctccacgcctggtgaagtaaatattttaaataaactacaatgacaaaattatgatgataaagtcttaccatccattggtattaagagtctctgcttctagaactggttatttgcagcaaaatacatgttattcaattagatgaagtgccttatataaactcttcatggacaactcataaaccacacaaaaattcctttgcaatacacattttgagaacataaatttaaatttctatatttccacaatttatatttttaaatcagatacgatgttgcccaggctgttctcaaactcctgggttcaagcaatcttcctgcctcaaattcccaagtagcagggactacaggtgtacaccaccacactcagttatttttctacaatttttattttttttgtctcactacagaaccaataatataagtagaaaaacaatctctcgtaaaaacaatatgataccaaaataataagtttccaagaacaaaagctatatgctatgtgctgaatattcttgccactaaaaatcaccaggaggatcccatgattactgcaaataatttgatccactgaagatttatacaggcataaatattaagaaagtcacactcgtatgatttaaaagtcaaagtattagtatttatccaaataaaccttaagcaaatttcatatttcctctattggagaaagcatttcctaatgtgattttcctgtcactactaattttccagttcattttttttcagctcccaccctgtcacagtacttatcaatctttgttagttaccaaagttaaacacattttttgaatcaactagccatatgtatgtttttctctgaccaactttccattaccaccataaaacaatgataggtaaaccactgctaaatttgaaaagtaaatactaygcaaaagtacattcagagtgagaaaattaattttacaagagaccactttaccttagtagcaacattcaagtctttgtcatccgatgcaggcaatgaatccacacgcagttcatggaaaatgcttgagagcaaaaacacacaacgaaaatgagcaa

SEQ ID NO: 673981 - DNA, 1859 bp, Homo sapiens
aaagtcaaaagaattgcatccaaacagtaggatgcgttatccaccgctctctgtgaacagttggatttggtcattaagaatcagcaggacttttaactttgtgtctgtgtgcacaggtgtgtgcacatgtgcacgtgtgtatgtgtatgtatgtaaactatgacagataaaatcattttgcttgtgtacgaatatgtaatataacttgtgcttctcacaaaggaattgcttttccgtctcctgtgctcagtagctgtcttcaaaaaataatctcctatttgtatgggtgcacactggttcagttctacagttcttattgccatttatttatggtaccagaaagggattgctgagttcctggttctaaagatagttactttcttagtgacacaaatcaatatgtaatacagttcacccttgaacagcaagggtttcaactgcagggattcacttatatgcagattttcttctgcctctgcaacagagagacagcaagatccacctctcctcttcctcctcagcctaatcaacctgaagatcatgaagacctttgtcaggactacttatgctttatgaaaagtcaatatgtttctcctgatgatttcctttctaacagcttcatttctctagcttattttattgtacgaacagtatataataatgcagcacaaacaaaataggtgttcatcaactgtttatgttatcaggaaggcttccagtcaattgtgggctattagtagctaaggtgaaggaatcaaaagttatactcagattttcaactgcacagggatcagagtccctcacccccacattattcatgggtcaactgtagttatttgtttactaaatataaacaatttattataaaaatgaaattgaagatccatttgtataacaagtccaatttgttataatgtgactatagaggaaacatacaacatactaacttaaaaatcttttttcttatttatgcaaaaatattatataggattttagggatcataattaaataaatgaatgttttcagacaataatgtttgagattgtaaattagctacaactaccttcttaaataaatctgaatttcaaactaaagaagttaaattttaaaaattaatttacatatgtatatacatatatacacattcaatttacacatatttttaaactggtcttttttgactgaaactaccttaatcttacatcttactttgtattttcttatcaagagtaggaccaccaagacaagtaagaaattcacaatcagaagtcttacctgatttctcctttttaagtatcttctttttatgttccaaaatttgttgttgaattctatgtatacaaaagtaataaataaaattgccatttttataatgaaataaaaaatattcaccaaacatattaaattccaaaacactttcaagcaatatcagacctaatmtcagaattttaatgtcccatacacttcaaatttgtaaaccttacaagcttattaagcttataattaaagaagaaaagaaagtgaagtactcataaatggaggaagcacagctcagtaaatgaactctagttagctggatatcatgcaaagtgtcctgcactcagagtaagtccttgctctgtaaccaaaatacctcgctctgtaggtattttgtcttcagacaagttgcttctcttaggctccatggtttcttctaaaaaacaaggattctgctaccttacttcactaggttgtttggaagatgtaatgagattacatgtttatatgttcagagaaatagtaaagcaatggaataatttattcttgaactttattgctgaaaccattttggaatcccaaataatgctcggtgtgtgtt

SEQ ID NO: 673982 - DNA, 3624 bp, Homo sapiens
tgggactacaggcacatatcaccatacctgtccaattttttgtagagtcaaggttatctatggttcccaggctggtcttaaactcctggccttgaacaattcccccattttggccttccaaagtgctgggattacagatgtgagctattatgcccagcctactttctgagtcttaaaagatgaaaataaatttttcagaatagtaggggaaaacatttgcgatgtaaaaaatggggtgcacactaattaaggtataaacaacaataattttgcaaattattagtaactgccaactcaattagtgtcttgttaaaaagatactgttatgaagtaaagtgttacattgtatattttgactgtatttcaaaattttgttttgtttctaacagttttgttgatttatgttgggtggaacaatttgtgagtgaccctgagatttcatatggcttgaacctggtgatttctaatgtctccccaagtggtttgttgaagttttggatgattagaagtatttcttaaagaactaaatatttcagtaaacattaagcttcattgaaactctcaaaatataaaatacaaagaaatgttattctctatttatttttatatagattatagtctttatctaactgttcttagttcatttgaactaaaccaatgaatttgtcaacagaacaagccttaccagtggcttcagaggaagagcaacaaaggcatgaaagaagtgaaaagaagcaaccacaggtatatgaaaatttaagtttcttgtttaatattgggttttgtttttttgcttcagtaacaaagcatagtccaaatgacatgaccttttagactatacctttagaatccaatagctcataattttatatttaatttttaaaacattttaaccagttatgaaacttaagatattcttactatctctagtaactattagttattctggtaattcttactatctctagtaactcatagctgtctttacccttggaattgaggcaagacattttcagaattatcttgctcttttattgttataaccttactcataatacagaaggtaacatgaaatattgggtcatattattaaggaatagaaattgtgaacaatttaacaatgatggccactgagttaaactagtgttaaaggagtcatcattgccagtggttcaaatgttgcagttttacattgctggtcatcagtgccgaggttaaagatttattctgttttgtggtcacgatttgacttctgtgtctgtgttcagggagtgaatggggtcataaaagtcaacccagttgcctattaagagaatcctaccttgtggaatgggacctttggtgtcagggtacaaacaataactttattttgacataaatacatagtaaatgttactaaaatttaaaaaatccatccactatcactagtggaacttaaaatatattagaagtggatataagcagataatccatctagatacataacactatcatagtatattatttgaattagaatttaaaattttgcttccctttcttattggtgttcagtttggctcttaataattcagtgtttgcctagtctgtagttaatcttcagaaatatacacgtactgtaggggctcactttttctggtatgmtgaggtaaaatctttgtaagagaggaagattttataatactacctatcagctttgaattcatttctggtagattttacacataatgcattaagtttaatccaaacaaatgctaagagttcagcttgccagttcatatttctgtcctatgttaagccaaggcaaattatttttcactttttagttacaatcccataatttaagagtggcaacacatagattaagtttcacagttaaattttaattattttctagtatttttgtttatacttgattaaagctaattttaaaacatgcactctgacagaaaaggcatttgagaaacaaaacaagcaaatttgttttccattttgcacctgcccaaaaaaaaaaaaaagtctcaagaaccagaactgggtaagaattgtgataaagggaataatctgtctgtatattcacgactttctttaaaattcattacaaacaagttcaagctgaatattggtgaaagttttgaaaactccagaattactgcttgccctgaggaagagctcctacatagtaactctaaagagggatgaacaaaaaaggagtgccctctaatctgatgaatcaggtccctgattgtgaggaggaagatgcatctggagggtctaactctgtggcattccaggcagcgcctgaacagaggaagcccatgtcaaatgtctttttattccattcatactccaggtccctgaaatacagttaccagtcatcttctaagcttcatttaaatgaaaataaatcagactataaaaatgatagcaaaccagacacatagcttgtttctaacacagatgatgaaaatttttgtaatgatactgaaaccaaaaaattaaggaacccagtaattatgattgaaatgaaagatgattaagagtttgacatgcaaatggcaaaaaatgtaaacccagataccactaattggaaattggacattaggcattggcctcagtctagagatccagaaagtctttttgatttgttgtttacccaccccaaagaaatgaagcatatgattcagatagaaagccacagtatttctgctgctacagatacttataaaaacagaaaaccaatacagcgtttattccagcagccactatatggcaatcccagtgctaacaactacagaagcatgaatcttgaattataaaatgtgagttattctttgccacatagtgagagaacatcaaaaatatagctagaagacttatgggaagatattccaaggtcaccaacatggcacatgaatagatatgtaacaaacctgcatgttgtgcacatgtaccagaacttaaagtataataataattaaaaaaaagaatgaggtaggcatgttacaagttgagttcctggctttggagaaaagcaagtccaacttcaaaaagacagaggttcacttgctgcttctttttcctctttatcaattatttgatttagtcaaattttctattcaagaaaatctcatgtgtacagttacagtggggttatctaaatgtgtaattatgtgtcaaagtagattagttctgctatctaaataatggttctggagaatgttctcataatgtttgttcattaatcaacctatgtctcactatcagtcttccaagtggcgtatgagctgggaaactaattaagccacataccatgtgaccttctgaaccagatcaacataaagaaattgctaaagaaacaagctctagattctagattcttttttcttgtattcatttagagatgatttacatttatttaatgatagaatgggaatacaatgggagggaagcaatgactgagacaagccacaaaaacacgtctagccttgagagttgcaacgaatattcccagccaaatgagtctgtttaatgtgttttcatgcatgcaagtttatctgcttagctcgaactgtttgaacttacagtcccatcatggttatttccaatatttttgaaaacaaacat

SEQ ID NO: 673983 - DNA, 3624 bp, Homo sapiens
tgggactacaggcacatatcaccatacctgtccaattttttgtagagtcaaggttatctatggttcccaggctggtcttaaactcctggccttgaacaattcccccattttggccttccaaagtgctgggattacagatgtgagctattatgcccagcctactttctgagtcttaaaagatgaaaataaatttttcagaatagtaggggaaaacatttgcgatgtaaaaaatggggtgcacactaattaaggtataaacaacaataattttgcaaattattagtaactgccaactcaattagtgtcttgttaaaaagatactgttatgaagtaaagtgttacattgtatattttgactgtatttcaaaattttgttttgtttctaacagttttgttgatttatgttgggtggaacaatttgtgagtgaccctgagatttcatatggcttgaacctggtgatttctaatgtctccccaagtggtttgttgaagttttggatgattagaagtatttcttaaagaactaaatatttcagtaaacattaagcttcattgaaactctcaaaatataaaatacaaagaaatgttattctctatttatttttatatagattatagtctttatctaactgttcttagttcatttgaactaaaccaatgaatttgtcaacagaacaagccttaccagtggcttcagaggaagagcaacaaaggcatgaaagaagtgaaaagaagcaaccacaggtatatgaaaatttaagtttcttgtttaatattgggttttgtttttttgcttcagtaacaaagcatagtccaaatgacatgaccttttagactatacctttagaatccaatagctcataattttatatttaatttttaaaacattttaaccagttatgaaacttaagatattcttactatctctagtaactattagttattctggtaattcttactatctctagtaactcatagctgtctttacccttggaattgaggcaagacattttcagaattatcttgctcttttattgttataaccttactcataatacagaaggtaacatgaaatattgggtcatattattaaggaatagaaattgtgaacaatttaacaatgatggccactgagttaaactagtgttaaaggagtcatcattgccagtggttcaaatgttgcagttttacattgctggtcatcagtgccgaggttaaagatttattctgttttgtggtcacgatttgacttctgtgtctgtgttcagggagtgaatggggtcataaaagtcaacccagttgcctattaagagaatcctaccttgtggaatgggacctttggtgtcagggtacaaacaataactttattttgacataaatacatagtaaatgttactaaaatttaaaaaatccatccactatcactagtggaacttaaaatatattagaagtggatataagcagataatccatctagatacataacactatcatagtatattatttgaattagaatttaaaattttgcttccctttcttattggtgttcagtttggctcttaataattcagtgtttgcctagtctgtagttaatcttcagaaatatacacgtactgtaggggctcactttttctggtatgatgaggtaaaatctttgtaagagaggaagattttataatactacctatcagctttgaattcatttctggtagattttacacataatgcattaagtttaatcsaaacaaatgctaagagttcagcttgccagttcatatttctgtcctatgttaagccaaggcaaattatttttcactttttagttacaatcccataatttaagagtggcaacacatagattaagtttcacagttaaattttaattattttctagtatttttgtttatacttgattaaagctaattttaaaacatgcactctgacagaaaaggcatttgagaaacaaaacaagcaaatttgttttccattttgcacctgcccaaaaaaaaaaaaaagtctcaagaaccagaactgggtaagaattgtgataaagggaataatctgtctgtatattcacgactttctttaaaattcattacaaacaagttcaagctgaatattggtgaaagttttgaaaactccagaattactgcttgccctgaggaagagctcctacatagtaactctaaagagggatgaacaaaaaaggagtgccctctaatctgatgaatcaggtccctgattgtgaggaggaagatgcatctggagggtctaactctgtggcattccaggcagcgcctgaacagaggaagcccatgtcaaatgtctttttattccattcatactccaggtccctgaaatacagttaccagtcatcttctaagcttcatttaaatgaaaataaatcagactataaaaatgatagcaaaccagacacatagcttgtttctaacacagatgatgaaaatttttgtaatgatactgaaaccaaaaaattaaggaacccagtaattatgattgaaatgaaagatgattaagagtttgacatgcaaatggcaaaaaatgtaaacccagataccactaattggaaattggacattaggcattggcctcagtctagagatccagaaagtctttttgatttgttgtttacccaccccaaagaaatgaagcatatgattcagatagaaagccacagtatttctgctgctacagatacttataaaaacagaaaaccaatacagcgtttattccagcagccactatatggcaatcccagtgctaacaactacagaagcatgaatcttgaattataaaatgtgagttattctttgccacatagtgagagaacatcaaaaatatagctagaagacttatgggaagatattccaaggtcaccaacatggcacatgaatagatatgtaacaaacctgcatgttgtgcacatgtaccagaacttaaagtataataataattaaaaaaaagaatgaggtaggcatgttacaagttgagttcctggctttggagaaaagcaagtccaacttcaaaaagacagaggttcacttgctgcttctttttcctctttatcaattatttgatttagtcaaattttctattcaagaaaatctcatgtgtacagttacagtggggttatctaaatgtgtaattatgtgtcaaagtagattagttctgctatctaaataatggttctggagaatgttctcataatgtttgttcattaatcaacctatgtctcactatcagtcttccaagtggcgtatgagctgggaaactaattaagccacataccatgtgaccttctgaaccagatcaacataaagaaattgctaaagaaacaagctctagattctagattcttttttcttgtattcatttagagatgatttacatttatttaatgatagaatgggaatacaatgggagggaagcaatgactgagacaagccacaaaaacacgtctagccttgagagttgcaacgaatattcccagccaaatgagtctgtttaatgtgttttcatgcatgcaagtttatctgcttagctcgaactgtttgaacttacagtcccatcatggttatttccaatatttttgaaaacaaacat

SEQ ID NO: 673984 - DNA, 3624 bp, Homo sapiens
tgggactacaggcacatatcaccatacctgtccaattttttgtagagtcaaggttatctatggttcccaggctggtcttaaactcctggccttgaacaattcccccattttggccttccaaagtgctgggattacagatgtgagctattatgcccagcctactttctgagtcttaaaagatgaaaataaatttttcagaatagtaggggaaaacatttgcgatgtaaaaaatggggtgcacactaattaaggtataaacaacaataattttgcaaattattagtaactgccaactcaattagtgtcttgttaaaaagatactgttatgaagtaaagtgttacattgtatattttgactgtatttcaaaattttgttttgtttctaacagttttgttgatttatgttgggtggaacaatttgtgagtgaccctgagatttcatatggcttgaacctggtgatttctaatgtctccccaagtggtttgttgaagttttggatgattagaagtatttcttaaagaactaaatatttcagtaaacattaagcttcattgaaactctcaaaatataaaatacaaagaaatgttattctctatttatttttatatagattatagtctttatctaactgttcttagttcatttgaactaaaccaatgaatttgtcaacagaacaagccttaccagtggcttcagaggaagagcaacaaaggcatgaaagaagtgaaaagaagcaaccacaggtatatgaaaatttaagtttcttgtttaatattgggttttgtttttttgcttcagtaacaaagcatagtccaaatgacatgaccttttagactatacctttagaatccaatagctcataattttatatttaatttttaaaacattttaaccagttatgaaacttaagatattcttactatctctagtaactattagttattctggtaattcttactatctctagtaactcatagctgtctttacccttggaattgaggcaagacattttcagaattatcttgctcttttattgttataaccttactcataatacagaaggtaacatgaaatattgggtcatattattaaggaatagaaattgtgaacaatttaacaatgatggccactgagttaaactagtgttaaaggagtcatcattgccagtggttcaaatgttgcagttttacattgctggtcatcagtgccgaggttaaagatttattctgttttgtggtcacgatttgacttctgtgtctgtgttcagggagtgaatggggtcataaaagtcaacccagttgcctattaagagaatcctaccttgtggaatgggacctttggtgtcagggtacaaacaataactttattttgacataaatacatagtaaatgttactaaaatttaaaaaatccatccactatcactagtggaacttaaaatatattagaagtggatataagcagataatccatctagatacataacactatcatagtatattatttgaattagaatttaaaattttgcttccctttcttattggtgttcagtttggctcttaataattcagtgtttgcctagtctgtagttaatcttcagaaatatacacgtactgtaggggctcactttttctggtatgatgaggtaaaatctttgtaagagaggaagattttataatactacctatcagctttgaattcatttctggtagattttacacataatgcattaagtttaatccaaacaaatgctaagmgttcagcttgccagttcatatttctgtcctatgttaagccaaggcaaattatttttcactttttagttacaatcccataatttaagagtggcaacacatagattaagtttcacagttaaattttaattattttctagtatttttgtttatacttgattaaagctaattttaaaacatgcactctgacagaaaaggcatttgagaaacaaaacaagcaaatttgttttccattttgcacctgcccaaaaaaaaaaaaaagtctcaagaaccagaactgggtaagaattgtgataaagggaataatctgtctgtatattcacgactttctttaaaattcattacaaacaagttcaagctgaatattggtgaaagttttgaaaactccagaattactgcttgccctgaggaagagctcctacatagtaactctaaagagggatgaacaaaaaaggagtgccctctaatctgatgaatcaggtccctgattgtgaggaggaagatgcatctggagggtctaactctgtggcattccaggcagcgcctgaacagaggaagcccatgtcaaatgtctttttattccattcatactccaggtccctgaaatacagttaccagtcatcttctaagcttcatttaaatgaaaataaatcagactataaaaatgatagcaaaccagacacatagcttgtttctaacacagatgatgaaaatttttgtaatgatactgaaaccaaaaaattaaggaacccagtaattatgattgaaatgaaagatgattaagagtttgacatgcaaatggcaaaaaatgtaaacccagataccactaattggaaattggacattaggcattggcctcagtctagagatccagaaagtctttttgatttgttgtttacccaccccaaagaaatgaagcatatgattcagatagaaagccacagtatttctgctgctacagatacttataaaaacagaaaaccaatacagcgtttattccagcagccactatatggcaatcccagtgctaacaactacagaagcatgaatcttgaattataaaatgtgagttattctttgccacatagtgagagaacatcaaaaatatagctagaagacttatgggaagatattccaaggtcaccaacatggcacatgaatagatatgtaacaaacctgcatgttgtgcacatgtaccagaacttaaagtataataataattaaaaaaaagaatgaggtaggcatgttacaagttgagttcctggctttggagaaaagcaagtccaacttcaaaaagacagaggttcacttgctgcttctttttcctctttatcaattatttgatttagtcaaattttctattcaagaaaatctcatgtgtacagttacagtggggttatctaaatgtgtaattatgtgtcaaagtagattagttctgctatctaaataatggttctggagaatgttctcataatgtttgttcattaatcaacctatgtctcactatcagtcttccaagtggcgtatgagctgggaaactaattaagccacataccatgtgaccttctgaaccagatcaacataaagaaattgctaaagaaacaagctctagattctagattcttttttcttgtattcatttagagatgatttacatttatttaatgatagaatgggaatacaatgggagggaagcaatgactgagacaagccacaaaaacacgtctagccttgagagttgcaacgaatattcccagccaaatgagtctgtttaatgtgttttcatgcatgcaagtttatctgcttagctcgaactgtttgaacttacagtcccatcatggttatttccaatatttttgaaaacaaacat

SEQ ID NO: 673985 - DNA, 1156 bp, Homo sapiens
actaaaatgtacaccttttttgaggtaggttctcactctgtcctgcaggctggaatgaagtcatataatcatagctcactgcagcctcaacctcccatgcacaagtgattctcctgccacggcctcacaaggagctaggaccacaggtggacaacccaacacctggctaattttaaatttttgtggggaagggctctctatatgctgcccaggctggtctcaagttcctcggcttaagcaatacttctgcgtcagtttcccaaagtacgggcattataggcatgagcctccaccacactcagcactgaaatatagacttaaaaaactttaagatggtaaattttatgtcatgtgttttcacatttttttttgaaaacaactaaaagtgatataggtctttctataaatcataaaatacataaatatataaacataaatcaccttcaaatcactaaagtgtttctctcacacaaagaaaatatatatatttatcattaaacacctagtgaatataccactgtttctatgactactcaccttcacataataagacaactgttgaaaatcagccaagaaggctgggcatggtggctcactcctgtaatsccagaactttgggaggccgaggcaggcggatcacctgaggtcaggaggtagagatcagcctggccaatatggtgaaaccccatctctactaaaaacacaaaaaaattagctgggcatggtggcaggcacctataatcccagctactcgggaggccgaggcaggagaattgcttgaacctgagaggcggaggttgcagtgagcaaagattgtgccactgcactccagctgggcctctactgtggcctgcagaccttggcctctactgtggccgctgaaggagttcagtgactcagtttcagctgtctttgccacagttcacaacaattcctgccaacacaggaacccacacagtgatgtggaaaaaaacttccaaatactcagtggtagccacacttaccacatcccgacataaggtccaccatatgcacacccaattgcagaaatctgtcctagtttctgcactataaataaaagtcctgaaggaaatccagcccgcccagacattagatgggaatcacaacaaccaaagcccctggtaaaaagccactt

SEQ ID NO: 673986 - DNA, 1156 bp, Homo sapiens
actaaaatgtacaccttttttgaggtaggttctcactctgtcctgcaggctggaatgaagtcatataatcatagctcactgcagcctcaacctcccatgcacaagtgattctcctgccacggcctcacaaggagctaggaccacaggtggacaacccaacacctggctaattttaaatttttgtggggaagggctctctatatgctgcccaggctggtctcaagttcctcggcttaagcaatacttctgcgtcagtttcccaaagtacgggcattataggcatgagcctccaccacactcagcactgaaatatagacttaaaaaactttaagatggtaaattttatgtcatgtgttttcacatttttttttgaaaacaactaaaagtgatataggtctttctataaatcataaaatacataaatatataaacataaatcaccttcaaatcactaaagtgtttctctcacacaaagaaaatatatatatttatcattaaacacctagtgaatataccactgtttctatgactactcaccttcacataataagacaactgttgaaaatcagccaagaaggctgggcatggtggctcactcctgtaatgccagaactttgggaggccgaggcaggcggatcacctgaggtcaggaggtagagatcagcctggccaatatggtgaaaycccatctctactaaaaacacaaaaaaattagctgggcatggtggcaggcacctataatcccagctactcgggaggccgaggcaggagaattgcttgaacctgagaggcggaggttgcagtgagcaaagattgtgccactgcactccagctgggcctctactgtggcctgcagaccttggcctctactgtggccgctgaaggagttcagtgactcagtttcagctgtctttgccacagttcacaacaattcctgccaacacaggaacccacacagtgatgtggaaaaaaacttccaaatactcagtggtagccacacttaccacatcccgacataaggtccaccatatgcacacccaattgcagaaatctgtcctagtttctgcactataaataaaagtcctgaaggaaatccagcccgcccagacattagatgggaatcacaacaaccaaagcccctggtaaaaagccactt

SEQ ID NO: 673987 - DNA, 1156 bp, Homo sapiens
actaaaatgtacaccttttttgaggtaggttctcactctgtcctgcaggctggaatgaagtcatataatcatagctcactgcagcctcaacctcccatgcacaagtgattctcctgccacggcctcacaaggagctaggaccacaggtggacaacccaacacctggctaattttaaatttttgtggggaagggctctctatatgctgcccaggctggtctcaagttcctcggcttaagcaatacttctgcgtcagtttcccaaagtacgggcattataggcatgagcctccaccacactcagcactgaaatatagacttaaaaaactttaagatggtaaattttatgtcatgtgttttcacatttttttttgaaaacaactaaaagtgatataggtctttctataaatcataaaatacataaatatataaacataaatcaccttcaaatcactaaagtgtttctctcacacaaagaaaatatatatatttatcattaaacacctagtgaatataccactgtttctatgactactcaccttcacataataagacaactgttgaaaatcagccaagaaggctgggcatggtggctcactcctgtaatgccagaactttgggaggccgaggcaggcggatcacctgaggtcaggaggtagagatcagcctggccaatatggtgaaaccccatctctactaaaaacacaaaaaaattagctgggcatggtggcaggcacctataatcccagctactcgggaggccgaggcaggagaattgcttgaacctgagaggcggaggttgcagtgagcaaagattgtgccactgcactccagctgggcctctactgtggcctgcagaccttggcctctactgtggccgctgaaggagttcagtgactcagtttcagctgtctttgccacagttcacaacaattcctgccaacacaggaacccacacagtgatgtggaaaaaaacttccaaatactcagtggtagccacacttaccacatcccgayataaggtccaccatatgcacacccaattgcagaaatctgtcctagtttctgcactataaataaaagtcctgaaggaaatccagcccgcccagacattagatgggaatcacaacaaccaaagcccctggtaaaaagccactt

SEQ ID NO: 673988 - DNA, 1156 bp, Homo sapiens
actaaaatgtacaccttttttgaggtaggttctcactctgtcctgcaggctggaatgaagtcatataatcatagctcactgcagcctcaacctcccatgcacaagtgattctcctgccacggcctcacaaggagctaggaccacaggtggacaacccaacacctggctaattttaaatttttgtggggaagggctctctatatgctgcccaggctggtctcaagttcctcggcttaagcaatacttctgcgtcagtttcccaaagtacgggcattataggcatgagcctccaccacactcagcactgaaatatagacttaaaaaactttaagatggtaaattttatgtcatgtgttttcacatttttttttgaaaacaactaaaagtgatataggtctttctataaatcataaaatacataaatatataaacataaatcaccttcaaatcactaaagtgtttctctcacacaaagaaaatatatatatttatcattaaacacctagtgaatataccactgtttctatgactactcaccttcacataataagacaactgttgaaaatcagccaagaaggctgggcatggtggctcactcctgtaatgccagaactttgggaggccgaggcaggcggatcacctgaggtcaggaggtagagatcagcctggccaatatggtgaaaccccatctctactaaaaacacaaaaaaattagctgggcatggtggcaggcacctataatcccagctactcgggaggccgaggcaggagaattgcttgaacctgagaggcggaggttgcagtgagcaaagattgtgccactgcactccagctgggcctctactgtggcctgcagaccttggcctctactgtggccgctgaaggagttcagtgactcagtttcagctgtctttgccacagttcacaacaattcctgccaacacaggaacccacacagtgatgtggaaaaaaacttccaaatactcagtggtagccacacttaccacatcccgacataaggtccaccatatgcacamccaattgcagaaatctgtcctagtttctgcactataaataaaagtcctgaaggaaatccagcccgcccagacattagatgggaatcacaacaaccaaagcccctggtaaaaagccactt

SEQ ID NO: 673989 - DNA, 805 bp, Homo sapiens
gtcagagctggtactagatgctcagtcttctgacttctaatttagtttgctttcattatctacttactacctgctgctgactcagagctcctcagctatctgcaagtggatgtgtttattgaacatttacgatgtacatgaactgctctcaatgcgaagctcccatggtgaatgggagcttactttctgactcaaaaattagttttctctctttgtgttctaaatgaaagtgtccttttgctttatctgaagcagaaagttgtaagtttgtttattttacttttgaaattttggagaattggcagtggggtcatgccatcagaaacacatacatgcaatgcatggatgcacggtgtgaatgagctctctggaagatggtagattatgggaaagaaggaagctcagaaagagagtggaccaagtcaagaggaaagagagaagaaacaggcaagtgtggagcagaggaaaagtaggagggtcatgaatccattctgcaggtgtgtgctgagtgactggaagaaggaaaagaaccaaggaagtctctgccatgttatcttagttttgttaagggtataaagagattgaagagagtttaactaggccatctttaaccctaggacatccctagagtccctggcagaactaataatctaaattatgaatggctgtgtgtgcacacacacaggatgcacttactaatgtctatcrttatgagtatcttctgacttctccactacaaagaaaggaagggaatgtgaccctctttccaggttagaagtaactagggcatagtaacacaaatgga

SEQ ID NO: 673990 - DNA, 3573 bp, Homo sapiens
  misc_feature 3355, 3356, 3357, 3358, 3359, 3360, 3361, 3362, 3363, 3364,3365, 3366, 3367, 3368, 3369, 3370, 3371, 3372, 3373, 3374,3375, 3376, 3377, 3378, 3379, 3380, 3381, 3382, 3383, 3384,3385, 3386, 3387, 3388, 3389, 3390, 3391, 3392, 3393: n = A,T,C or G
  misc_feature 3394, 3395, 3396, 3397, 3398, 3399, 3400, 3401, 3402, 3403,3404, 3405, 3406, 3407, 3408, 3409, 3410, 3411, 3412, 3413,3414, 3415, 3416, 3417, 3418, 3419, 3420, 3421, 3422, 3423,3424, 3425, 3426, 3427, 3428, 3429, 3430, 3431, 3432: n = A,T,C or G
  misc_feature 3433, 3434, 3435, 3436, 3437, 3438, 3439, 3440, 3441, 3442,3443, 3444, 3445, 3446, 3447, 3448, 3449, 3450, 3451, 3452,3453, 3454: n = A,T,C or G
caaactgttctgaaaataagttttacctatctatattctcaattgacattgaataaaaatgtctttgtctccacaccctgactgatcatgtgcactattgacacatttttccccaacttgataggttaaaaaaagttccttgctgtgatttacatttctttaacagtgaattaatttgaatatcttttcatatgtttataataatttatttttgtttttctatcaattttctgttcttaactatttttgaaatatttattttcctattgagctgtttctaaatcagtttttaagatctcttatatgttaactaaatttttcttgttttacctgttgcaaataattgttcattctatattctttggtgtttgatttttttaccatggtgatatattatatttaatataaagtaaaattctagactatgtagacaaacatatatgacaaacctatatctgcatataattactttcttctagtgcaaagtatacattacccatgataaatccaggtaggaagaataaaacactaaattccttatcattgggtaaaacatgttaatgttgttttgaggtgatcagcgccgcattttgtaattatatagatatatagattttgacaagaccattctgcaaaacaagcctcagccaaaagaatgaattttataattgcttttaagatgctcagaaggatacatttagggtagagcagcatgaggtgagagtggggaattttaccaggaaaattttgaagaccctgattctcgccacaaaatattgagctgctgattctaccagtcttattatagccacattcaattatttaattgtactaatgctatttatttctgtaaatttattttcagagagtgatctaaagggtaaaaatcaggctctaagttatgttttgatagctttcagttcggaatcaacattcatcatgcataaggcatgaaagtatggttaaaatggtttattaactcttgtgaatcataagcataaaagaatcaattgatatatttctagtaaatgtaataaaccccaagataatgcagtacttaggtcaatcttttacatcaagtaatcccaggaaaactggagattgtaaataaatctcagatatcttgctcattttagtttttgtttatctggatgcatttcgctcaatccctgaaactcatagtttcacagactcattgagattttcatgaactataaaagcaattaaatatttaaatacaaaattctcaaattcaagatattactaaactgaaaattgtaaaaaataacttttgaaccaaaactttctgtggtaatcatgaagtaagcaatttatgtttcttaaaattaaatttcaccaatgtctttgaaataagaagaagttaaagatgagtatgagattgcccctactttctagtagcattttttccattcaggaatctccatgaaaattttagagggagagagggcctctgggtcttatcttatataacaccattgccactacattatccagcccactacctctggcccctattaagatgatcttgagaaacaatttctatggattagtttcagaaggatatgcacttctaaaaataactgcttggctttcactttatattaacatacatgttgtaaaggattatgatattttatttgttatagccacaaagaaactcagagccaagctaagagcccacttctagcaaaagaacaggatgttatgatacmcattacaagagctaactatccctgctggttatctcagttttatatcctatttttcttacattctcatttcctcacctgttttatttatttatctttttggcttatatgtatttctagaagccacctcaaatcctcttttagaagaaagaggtagagaaacattaaatatatgagtgaataaggtaaataaataacaacacagatgataaggatatacacagattaagaactctgacatattggtttggaagattatctaagtctgcataaataaagtgattgttatgcatcaaccagtttgttttatccaggctttctatcatgttgaaattactaataaattggttcatacctcatctcatactatataataaatgtttatttaatgttgcttgtgaatcaagtcattgtaaagtgaatcatatatttaatctactagagaaacttaccattcaagcacttcgtaaagcacagaattttaatattctattaagattcaacttcttatatagatgaggtttccattatgcagattcagaatttatgttccctgatttaaaagaaaactagagtgcaaaagcaaggtagaagtccttgttctctcatatacccaacccccttacactttccaaaattttcactacctacattttcctagaaaaaatgtttcatgtaattttttccaaattaaaaaataaatattcataaataatgtgtgtagctatatgtgtgcaaaatatataaagttagataaaataagaaagaactaaacagacatttttgaaagaaaagatccaaaaaatcagtaaacatgaaaaggcattcaagttcctaagaaatcaggggaatgccagtttaaaccatgatgtagtatgctccacaggcaccagaatggctaaaacaaaaaaagatgaaaaataccaagtgttggtaagaatgtaagaaatgaaatctttcatacactgctggcagaagcacaaattcatacaaccacttttgaacatcgtttggatatatatatatactcaagaaaaatgtggacagtctctaaaagacatacaacagaatgtccataggaaaactatttgtagtaaccaaaaattgaaatctacccaaatatccatagatagtagtattttgctatcaagttgttgctgtcttctgcatatatgtttcctacatatttcacattgtattacttttcttttagctttattttcaataatgagcatcagatagcccgaaaaatgaaattcaactttttaaacaaggatttgataagttcttaatacactgaattctatactgggctcctcaattgaaaaccaaccctgaacctcttttccaagctgctcttagacgaatatctgcccccttccagccctgttcccactaaagaaatgtacagaggtctccaggagatcatactgtaaatactgctcactggcccatgctagagagttcccgagctgtctttcctccagcaatgtccccattcaccagacaaggaaactttggatgaatgagatatgcctggccatgagctgtggttcctcttcagaccattctttgtgatatctcagactttggagttcctagctgaagtgtcctggagttccaannnnnnnnnnnnnnnnnnnnnnnnnnnnnnnnnnnnnnnnnnnnnnnnnnnnnnnnnnnnnnnnnnnnnnnnnnnnnnnnnnnnnnnnnnnnnnnnnnnnagtaattcaaatatacccacttaaatccaatgccaggcagttgccaaaaaaccacacactcagcctttttcacccaggtacttgctctcagagagacacagcaagaaaccatgaagatg

SEQ ID NO: 673991 - DNA, 1765 bp, Homo sapiens
gctccttcagtagcttagtccaatgcgctgccctgcgagggtcctcttgagcaggagtacacgatgcggcggggtcctactgtgccttagtccaggaagcgggggactgggtcctctggtgccatagtccagggcgcaaggggctggatcctctggtgccatagtccagggcgcaaggggctggatcctctggtgccatagtccaggctgccgggagctgggtcctccggtgccrtagtccaggcccccaggagctgggtcttctggtgccatagcccagggtgcagtggaacaggagtcctgcggagcagtagtccagggcgcgctggggcgtggatcctgaagtgccacagtccagagcgcgacagggcgggattcctgccttgctatatccaggttgcagcggggcgggggttctcttctgcaggagtccaggacgtggcagaacgggagtcctccatgtaggagtcctccggtgctggagtccagagcgcagtaaggctggatcctcccgtgccataatgtagggcatggtgggacagggatcctgccttgtgatagtctagtgcctgagtccgcagtaaggcaatggtcctccaatgctggagttcacggcgtgttgggggtcacggtccttcagtgacttaggccaggggtaccagggcggggatccacagttgccatagtgaggacctctgaggagtctggttcctgccttgctgcagtccggggagcagcgggcaggggtcctctcttgtcagagtctctggcgcgaggtgggggtggggtgggggttttcctatgcgatagcccacggggcggtgaggccaggtcctcgcgtgcctttgtccagggcgcaggggggcgagggtcttcggtggtggagtccgcggagcggcaggacaggggtcctccagtgccatattccagagcacggcggagtgggggacctgtcctgcagtggtccagggcatgcgggagtggtgggcctcctgtgccatagtccaacgcgcggcggggcgggggtcacctcgtcctgcagtcaccatgcacgagaccccggtcctgctgtgcctcagtccagtgcgcggtgggacggctgttctgctatgctgtagtgcaggacgcggtggggcagcagtaacccagagagcgccgtggcagggggtcctccagtgctggaatccagtgcatggcgggtcaggggtcttaccgtgccgaagtcagtggcaagggtcctcccatgccatagtctagggggcgaccgggcagggttctctagtgcaggtgtccagggtgcggcggggcaggagtcctctggtgcagaagtccaggacgtaatggagtgcgagtcctccagtggcggagtccagggctctgcggggcagggttctcccatgccagagtgtagggcgcgttcaggcgagggtcttggcgtgcagtagtccagggtgcggtggggcaaggacagtccagacctccatggcaggggctcctctgtgcaggagcccagtgcccggcagatcggggtccctccgtgctgtagtccagggcacggcaaggtgtggatcctctgtgccctaaccagggggcggtgggtcacaggttctcccgtgtcttggtctagggcccagcgggactggggtcctggagtccacgcggtagcccaagttgcctcaggaccaggtcctgtggaaccacagtccagagcacagaggggcaggagtagttcagggcgagccacggccgaggtcctcgggagcca

SEQ ID NO: 673992 - DNA, 1765 bp, Homo sapiens
gctccttcagtagcttagtccaatgcgctgccctgcgagggtcctcttgagcaggagtacacgatgcggcggggtcctactgtgccttagtccaggaagcgggggactgggtcctctggtgccatagtccagggcgcaaggggctggatcctctggtgccatagtccagggcgcaaggggctggatcctctggtgccatagtccaggctgccgggagctgggtcctccggtgccgtagtccaggcccccaggagctgggtcttctggtgccatagcccagggtgcagtggaacaggagtcctgcggagcagtagtccagggcgcgctggggcgtggatcctgaagtgccacagtccagagcgcgacagggcgggattcctgccttgctatatccaggttgcagcggggcgggggttctcttctgcaggagtccaggacgtggcagaacgggagtcctccrtgtaggagtcctccggtgctggagtccagagcgcagtaaggctggatcctcccgtgccataatgtagggcatggtgggacagggatcctgccttgtgatagtctagtgcctgagtccgcagtaaggcaatggtcctccaatgctggagttcacggcgtgttgggggtcacggtccttcagtgacttaggccaggggtaccagggcggggatccacagttgccatagtgaggacctctgaggagtctggttcctgccttgctgcagtccggggagcagcgggcaggggtcctctcttgtcagagtctctggcgcgaggtgggggtggggtgggggttttcctatgcgatagcccacggggcggtgaggccaggtcctcgcgtgcctttgtccagggcgcaggggggcgagggtcttcggtggtggagtccgcggagcggcaggacaggggtcctccagtgccatattccagagcacggcggagtgggggacctgtcctgcagtggtccagggcatgcgggagtggtgggcctcctgtgccatagtccaacgcgcggcggggcgggggtcacctcgtcctgcagtcaccatgcacgagaccccggtcctgctgtgcctcagtccagtgcgcggtgggacggctgttctgctatgctgtagtgcaggacgcggtggggcagcagtaacccagagagcgccgtggcagggggtcctccagtgctggaatccagtgcatggcgggtcaggggtcttaccgtgccgaagtcagtggcaagggtcctcccatgccatagtctagggggcgaccgggcagggttctctagtgcaggtgtccagggtgcggcggggcaggagtcctctggtgcagaagtccaggacgtaatggagtgcgagtcctccagtggcggagtccagggctctgcggggcagggttctcccatgccagagtgtagggcgcgttcaggcgagggtcttggcgtgcagtagtccagggtgcggtggggcaaggacagtccagacctccatggcaggggctcctctgtgcaggagcccagtgcccggcagatcggggtccctccgtgctgtagtccagggcacggcaaggtgtggatcctctgtgccctaaccagggggcggtgggtcacaggttctcccgtgtcttggtctagggcccagcgggactggggtcctggagtccacgcggtagcccaagttgcctcaggaccaggtcctgtggaaccacagtccagagcacagaggggcaggagtagttcagggcgagccacggccgaggtcctcgggagcca

SEQ ID NO: 673993 - DNA, 880 bp, Homo sapiens
ccttataatacattgatactagtccaaggatgtgtgacatggaaactatagctgactactgcaaaagcttcctttgtctcctggtttctttacatggttatcttccatcaatcccaggaaactataggccacaggccaaatccaatctgccttatggctttgtaaataaagttttataggaactcagtcatgcctgtttgcttacatataatcatggtggctttcacactacaacagcagacaacagcagggttaagcagacatgacagagaccacatagtctaaaatatttcccacctggtcctttacagaaaaagcttgctaacccattttacaccataaccagaatgccttaatactcaaatttaatcttgtgactcccctgcacaaatttctccaatgagcccctgcagcacacattgttggctccctatcaakagccattcctcattctttcttgcagaagaaacacaagtctattgggatatttattatcccaatccccctcctcagcctcagaaacagaaatgtttattctaagctaatcaggtatttgccttcccagtgcctggtttaggaatgagcatgtggtatgacccagccaacgaaatgttacaggaagccccttgcatgcttctaagttttctccctgtttaaaagacacacgtgaagaaaagcagcccttgtgatgttgtgttgtgagaacatgatgtttggagctgctggggactagccaaccatgaaaggagatgtgaataaaacactgtcaacaccacagctgaaagagggacaggtgggatcctaggatatcaatgaacaaaaaaacaattctggttcctactgttttagccgctgctcatctagtatttgcagtccaaag

SEQ ID NO: 673994 - DNA, 880 bp, Homo sapiens
ccttataatacattgatactagtccaaggatgtgtgacatggaaactatagctgactactgcaaaagcttcctttgtctcctggtttctttacatggttatcttccatcaatcccaggaaactataggccacaggccaaatccaatctgccttatggctttgtaaataaagttttataggaactcagtcatgcctgtttgcttacatataatcatggtggctttcacactacaacagcagacaacagcagggttaagcagacatgacagagaccacatagtctaaaatatttcccacctggtcctttacagaaaaagcttgctaacccattttacaccataaccagaatgccttaatactcaaatttaatcttgtgactcccctgcacaaatttctccaatgagcccctgcagcacacattgttggctccctatcaatagccattcctcattctttcttgcagaagaaacacaagtctattgggatatttattatcccaatccccctcctcagcctcagaaacagaaatgtttattctaagctaatcaggtatttgccttcccagtgcctggtttaggaatgagcatgtggtatgacccagccaacgaaatgttacaggaagccccttgcatgcttctaagttttctccctgtttaaaagacacacgtgaagaaaagcagcccttgtgatgttgtgttgtgagaacatgatgtttggagctgctggggactagccaaccatgaaaggagatgtgaataaaacactgycaacaccacagctgaaagagggacaggtgggatcctaggatatcaatgaacaaaaaaacaattctggttcctactgttttagccgctgctcatctagtatttgcagtccaaag

SEQ ID NO: 673995 - DNA, 1405 bp, Homo sapiens
ctaggctagaaaaagacttgttagtacatatcaacaggagaaaacccaccaccctcttctgaaatggaattctaaaaatatgtcctgagtgactattcttagaaatattcctacaattatgtgaaatctttacatggcttgggatttgagaacatttatgaatctgttttactgttgtgtacagtaacatgtcaatctcactataatgactcaaatgtgctagctcttctgatactaattgctataaatgtcagtgtgttagaaatattttaaaatagaacctaccacatttatgtattaaaaacataaaactaaggcataatttaaagaataattttgaagtttaattttgtcttttaacattgtatcatggtttaatgtaagaaatcaattacacacattatttcaagtttgactaatacaattataaaagaaagacttattctgttagctgggttggttgttagaactgcttaacaaaatattatattctacaactggaagagtaattaaatatcttagagttcaaatttctacctgttttttgaagtatttgaatgtaaaccagatggccaggcagcccaatcacttatagaggcaggaaatatattccattattgaaacttccagatattagcaacttgaatctttctaatgggttaaaacaggtcaccactgtagatgtccttcctcaatggatctatttttgtcttttggaacaggaatgaatgtaccttattctccatgtaacactctttttcttgttgtctaaatgtttgcaattgaaaggaacattgaccttccaaatggtttaactctccaccaaaaatgcataatacttgtccaggaacagtggcttatacctgtaatcccagcattttgggaggccgaggtgggagaatcacttgagcccaagagttcaaggctgcagtgagctatgatagatggggccactgcactccatcctgggcaagagagcaagatcctgtctcaaaaacaaacaaacacacacacaaaatgtatgttttttatactttaattayagaataacaggtatgcttgtatctaaatttggaggtcaataaaatttatacatttagaagaggggaaaaatatcttcatgtacactaaaatattacatatgagtatacatttattcctaagaaaatagttttttaagcctatgtttggaaactataacatatgttaaataacttttagataaaataaaagtcataaaaatgtgaaattttaaaactaagtgaccaaatgtaatatatacgtactacaaaatattatttgttaatttaaagaataaagtactgatctatgttacaacatggatgaaccttgaacacattatgctaagtgaaagaagccagtaatagaagacaatatattgtat

SEQ ID NO: 673996 - DNA, 678 bp, Homo sapiens
acattggtaatggttctcattttgtcaggtagtacatttagattgactatttagctctaaatcaagatcctggtaacagtaatcaaaggtaaatgagccataggagataacaatcttattttaattgaggtcttacctaatctctctggataggtaaagactcaatgatcttggcttttattacaagcccgcatcattatgttgtaatatattaattttgatcccaacaaaatacctttaatcttaggccttagaggcagtggggcaatgaaaccttagataaaaatgaaatgttatttttatatttaagtaaagaaaaaataaggatttcttattatattctttctgtgtccagcctctttgaaaaacctgaggtcaggtgaggcctaagggcagtgaaaagttgaattgatcttcccattcatttatctcctgaatgagtctgaatttaatttatcttaaacaaagatgttgaatggatgcttgatatggaataagagtctagtcctcaaattaatttttatggatactggaagtgtttcagaaattgagctggccagttttatcattttctattagatgacaaagatgttaaatgttatatttcattacagaaaataaygtattaaaatatttttttaataaaacagtttttattgcctacacattgtaattcaa

SEQ ID NO: 673997 - DNA, 1939 bp, Homo sapiens
aattttctgagatttgagggggaaagtgcttttcttaaaagtcatcttttatatgcaaaaataaattttttgatgagcctgatatttgcaccagtcatggctcaggcaattgaacatgtagtgtttactgtattattaaggcattaaccatttatcataggtttatttatttatttcctgtaacaaaagtagcaaaatagcctttatggtaaaatagcttgtacatcttgatttcaattttgaagttgactgattttttaaattgggaaatttattgaagactaatcctccatttcaacacactggggcatgtccagaagagagtgagcagaattagtcatcttcagcaacggctttaataaatagatatttcactttaagaaatggtacagaaacttacagatggaagaatatgcagcatccacatattcttatgatttgcagtctcttttctatggagctttaacttccatagatgttatgtgtctaagaaagctaatggggaagccaagaggtggagttctaaattttccacctacttttcatatataaaacattctatgaataaatrcttttaaagttttcttttcataaattagaaaacttaaggccagagaggaaatgatttatctgaaatcatacagctagcagagaaatgaagggtaatatggaaagcaaatacctatgttcaaatattgaaaaagttaacgtgaaagtaatagaagttattcaatgaaatatcctaagacagcaatactatgtggatggaagatgaatgttatagaaaaatagactactattccacaaaaataatcttgcaacttaagctgcctgaagatcagatgggttgccacaagaagcagcgatttctccagctacagggatattgagaacaaatccagaaaggcagtgttgctggtgatgcagaggagatgaaagcacttgatcaaaggaaaaattgaatgtctcttaagaacgttccagctctaagaggctgtcatttttgctttcctggctgtggaagatgttgctaaaagcaaattagaatgtgtccttgtgctccttgtccagacagctctttcaggttttcctctggtgaatacattttaccctcccacaatgtcctaggaaaaggatgtacatataaatattagtatatttatattttccctgcctaaatcttgtgtttctcatagcaactaaatttaactcaaatgccatttccaaattaaagttagtggatgccttgaaggttgtattattaacaattctcatatgtcatttgtgttcaaaaagaagagtaaaatcccttaatccagttattaagtgtcactgatgtaaatcaataaagaaattaataggtaatttggtgtatggaaaaagcaacatggtcaaatgacttaatcgcttaagaatatctaaaattgccttagaaatgtatttgttttaactctgtgatttttgaagtttaaaattctctttttaatttcttgagaagtaacgactgctaaatctatttgtatctgctgatttttaccaggtttaggttggctttatccacctatttacttatatagggaaattatagcttgtgattactataatattacataaccccaaactttcctagtaagataatgtacttctacatcctctatttgtgttactctttccatatttctctgtgaaattgtgcaagattgtcttataattttatgctaataagcaagaaaaattatgtacattttcactctggattcttaagatttatgtgtatgtggagcataaaataatcattggatgaaataaaaaactacaaccaagagcagatatatgggacggaagcccaataaatagtgaagtgatgatgtcaggccatcatgcttactctgcttagaataagcatatagtaagatttattgtcaaattccaactattt

SEQ ID NO: 673998 - DNA, 1039 bp, Homo sapiens
ttattattaatttatttttgtttcattatatcttgaagctctcaactcaggagtagaaagaatgactctgcattgcttaaccttgtattattagcacatatcacaacttggatcatattatatcttcaagaaatatctgttgaatgaataaatttatccatcacatagtaatgtgcttgcaggattatatgcagtgggcaatgaaggataaaaatrtgaatcaaataatttatgctttctactcacattttagtaaaaaagcagactacactgttaagatatggcagaaaatacaaaataacacagaatatagtatgctgggggtggtcagagtgatagttctaattttatttgatcctaaaggagggaaagctaaactaacattcaattattgcattgtaaattacacagaattttgcaaatacagatctaaatttatgcccacaattgaatgtgctgtagataatatcttttgaatcttaccctaaaatttttaaaactcaggcctgaagaggttatataatatagtaatgtggataatatcacaataataaaaataaatgacaataacaggatatgactttttttaggtgattataaaccctgtattcctgtatctttttcttttactgcctcacaagaaggttttatacaaatcatgtaagctggacaagaacataaattctttactttgttaattgaagcaatacttatccacatgttctgctaataaattattttgtaaattagatcacaccttcattttattaggctaatgtagtgtagacacagaacaacaatgcatatttacatacaggattgtatacttatatttatatgtatctagatatttgaatttttcccttttatatctgtaccattttataaaatatttttttggaaaagtatggttatgagaaaaatggtgttctatattttcagaaacataaaatttctcctgaatttactgttgtcatttctgtgtcaaatttctggttctcacttggatgatattcaaatatttcaaaagaacattaac

SEQ ID NO: 673999 - DNA, 610 bp, Homo sapiens
atcttaacgatgtgattatacaaccaagtcggatgaaagaaatatggtggttaaagtgaaacaaagttaatagatagggaaaacaaatgaagtcagcaccaaaataaggataattgaggtctctgaagcaaagaccccacaaaacgaacagaagatatattcaaatatagtatattacaagaaaatgtctctaaaataaaggaaaaatctataattgcaggatacaggctattcttcagtaaaatttaaaatggaaatcttaacactcatcctagcagttactgaactgcaggttacagacatacacacacacacacacacacacacgcacacacacacatgcacacgtatatatattctactcagaaagaaaaatcagtttagacttttaatctaatttacagcaaagttcagtgctagtagtcaatgaagcaacatttaccaggctctgaggaaaagcatgacccataattattatagtcaggaaagatattcaaatatgaawgcaacaggtagaattctcaaagataaagaaagcacttagaaatacagccccctgggaccttctgaaaaaaacattacttaaatctagcctttaagagttgaagca

SEQ ID NO: 674000 - DNA, 1599 bp, Homo sapiens
tgaaaagaaagaggatagaaagaaagaaagagagagaaaggaagaaagaaaagagaaagagagaagaaagaacaaagaaagagaaaaagaaagaagaaagaaagaaagaagaaagaaagagaaaagaaaagaagaaaggaagaaagaaaggaagggaaagaaagaaaaagaaagacactacctgagaaagcaaaattccattttgtcctctataatctgtatccagagactatgtgggacataggcccttgtactgagtaggtgtgtgaatgcagatcagcctctggctggaggctctgacacttcccttaaggaggttacagcttttagaaacaacagggtgattgaactgtgatttcacccctgactagaaaacaacaattccccctgtggcttaagggtaaccagggttttgttttaaattaaaagtaaattacttatgttaaagatgccctagggacccttaggtattctatcatttaaagcaaaccaagcagaactcagaaaattattagcattcctctagagagcactttgggctatctcctattgtccattcaatggccagtttattaggaacttttgtgaggattgtttatcaaactcaaacttttccatgtaattatcaggcagagagagagtctaaataaacagaaaacataygaataactaacttatcttgccaacagatattgatgaaaaagctcagcttcaaactccactatggcaactaataccacaaataggctttatttttttcccatcacaaaacaagtttatttaataaagaaagtaatatacatgtatggatacaaaaacccattcactcactcatttactcattcaatcaacttctagcaaaggtcccagctggatcccaaactgaaactccaacataacaggcatgcctagtaaacagacacgttaggtcacttaaagttgagcaaaagctcttcatgggcacatgaagttagggtcaggagaaggcagacagcaaactacttttctcgactcttgattccactgcacatttgatggggtcttatgtatagagggactgtatccagatggtcaagttgctgtctggggagggacaggacacaaacaatactacttctgtgctcaggtgtccaagggagtcaggggggagagggagagggtactttccccatttctacacacacacacacagcatcagtatatagtggcctccacagagtatcatgccattttttgatacccagggcatgtgtatttgtgtgtgcaagcatagccaccttgtggcacaattctagggagtgccattctgttggagtgtaaggaaatggtagccctggggttgtacagggcataatctctattgtcctacacagctctcctggcagccctgttcaaatcagaagactgcatcctgagcagagatattagtattgccatgttggtctcttcatgcagtctctaatcagtaaaaatcaaaagggggctggagtaatcaccatggtggacctactttttagcacaaagaagccattcctttcaaattcccagaaatagctgggtgagacattaagagggctggaaggtcctgcaggtggaaaa

SEQ ID NO: 674001 - DNA, 1805 bp, Homo sapiens
caaaaatatctctgatcctataattaaaaagatgatattgagaattgatattttcattacaattaaaatagtattgcttgatctaatgatcaaatgaaattatgtgagaatgaattctaacccattagtgggccttgtgttttaaacattagaatttgctcactctcatgaaaattatttaacttgtgtatctgtttagaggtaatccttttttttttttttttggtaaaraagaaggttctgtgatttggggatagtgaaattcatttttaattatttgatataaataatgcattttgataagtgttagtgactctgacactttttaaaactcaatgtttgtttgacacctggaaaagtgatctctcaattttaaatattatgatggaaaagcaattacattttaagtaatgttttgattatacctcccctgagctttatggaagtaaatctgagctcttgttgctgtttaacacctatcatgaagcatagatttaatgaagaactgaatatgataatatcatacccaaatattggaggtggaaatagcaactatgattcttgcttcaactatgctaacaacataaacagttttgctttttatgattaaactgaatggtcagtttaatacaaaaaaatgacgactgtggtgagatcaatcaaaatagtcaaactttttaacagtatcgttcacatttacattagtcaaggttcccaaaactttaattataaaacctttttttatcagttcatgacaaaatttttcaaacttaaaagaacacaaaatgagcgataattgaaaacatcaagaaataccaagaaattgaggctgaatatacaagagagggttatgttaaaatagatgttaagtagagcttggtttaggcagcataaaaatcataatttaaatattttttctaatagaaaaacatgtgaataggctcttgtgttcttatgtaaactggcataaatatgcttgtatattttataaaacgtaagtgccaggatccaaatggcaagttttagcaggtgtaggattcacggccagttttgtggtttatcacatctccccttacaggaaatgaaagtggaaaaaagaaaaaaaaagcagaagctgtgaatctggtcaagggcaattgatgcttataagtacacacttaactttcctggctggcattctacaaccttgcctgtatcataacaaactgaaaaatcacttctacagacaattttgtcataaggcaatgacacagccctatccttatacaggaggtggctagagacaaggcaagcaaggataaaaaacggagctcaatttaataaaatgtgtatacgatattttgttaaggaagtaaatttttattattattatctatgataataaatttaaactggaaaattagggccattttttaatcattagaatgggaagaaaaatcaaatttgctttaataagtagaaaaggacaaatgtgaactttagcattgttcagaaaaaaagaaaaacacatgactttcagtaaggccactgagtatagctgtgtgggttgaggcctgcaagagggcgcccagcccagcagacttgggggagctagaacccagctggcagtccttttgcaaagccatataccctagtgggtgcatctgcctgcccagaggaagaggcacttttttctaattctcaaagaagcagaggccgtgtttaaaaacaatacacagtgtttcctagggctgtgggaagtagaaaactacatatactgctagaagagtataaatgaatacaaattgtctgaagggcaattcaga

SEQ ID NO: 674002 - DNA, 2029 bp, Homo sapiens
ttttttttttttttgtgatgaagtttcactccatcgcccaggctggagtgcagtggcacgatctcagctcccggcaacctctgcctcccgtgattctcccccctcagcctcctgagtagctggaactacaggcgtgcgccaccatgcccggctaatttttatatttttagcagagacggggtttcaccatgttggccagaatggtctccatctcctgaccccgtgatccgcccgccttggcctaccaaagtgccaggattacaggcgtgagccaccacgtccggcctgaacttcatttttcattcttcccttttctctctattttttttctttatgtttcttgaacagaaaataattgtaaactccttctcagtgggtttctgtgtgggggactgcagctctctatgcaaacctgtgtgtctgcactgagattgtgcctgagaacaagtgtcaggtcttgctgccacccaccccgcccgatttcccaccctgttctttgttgggatgattgatatgagagaaaccagtggcctggaaaatagaaagtgcagtcaatttttggttttgaggctttttgatttcatgtagcattaacatttccaaaaaaacaaattcagagtttgacaattttaaaactttccacagattgacaattatctactgtggaaagtattaattacataaagaacactttaacatcaaagcagttgaaagggcacactcagaataactggcaacttttcctgaataaggattgttggaaatgtaaccctgacatacatacatacatttgcttttccatgtaggaatgttgcaaatttgtctgaccttgctctgaatgaatgaacattttaacatcgtctggcatttgggaaacatttgttctaaacagcacccccactactaactgaaatatttctattgccactgtgagtgaattttgattattgctttgttttcatgtcaaaccatctgctgagttttttcaaatctgaaacagcctacaaaatctattctcacagcatatttctatacttgcagaaatcaacgtatagatatttatagtctaatctctgtgccacttctgagtatattcccaagtstttgcaggaaaggagctgtctgccctgtgttcttgtcttcccagttctctctgtggttgtagttcgttttaacgtaagctgtgcagtggaggtgatttttgcttgctggtggtcatgggtaaggcagttatgaagtctgacattattcttggaatgattttaagcaaaatatcgtagttcatcaaaacctgtctgcaaaacgccaacaagttaatagtcatttatgttcagaaggaaaaaattatggctgccagaccaccttcatttgggagatttggccataaattttaaatatccattgtgagaattatactatgtgtaaggaaatcagcatcctgcagttttacaagtgggccttagaagggcataatgcacaaaggcacagtaagaacagaaagacttaagaaatgcaagcagaacaggcaagtaaaaaggcatctctaaaacttctggcgtctcctacaaggcttttaggtacgggcacagttcctaaggcttttttttttcttttaaagacaaaatggtggtgtggcgtcctgaatgttttaaacacttagaattgccaccagttttgagccctttctatgcgatgtcttacgtgggtcatctaatgtcagctttggaaaagccctgtgggatgtaaagactgatgaggaaactgaggtttagtgagaggttggtacctggcccagggtctcaatctggcagggcttggctatcctttatctggtccttgtaccaaacaaaaactattccctactgggcactggagttagaaaaaggtgtgtgcctaccacagctactatatgatgattataccaatttgtttaagaaaaaaattgtgtgggctttggggtcaaatcagacctacttccagtttcatcctcactgcttactagcaatgcaactttaggaaaacttatatc

SEQ ID NO: 674003 - DNA, 1822 bp, Homo sapiens
caggccactcaaacctcctatccaaatgcttctgggtattagaaacatactaactccagtgaatcttgtgatcatgagttccagtataaaataggtccctkggtcaaaggaaatactgtgtgggttacattgatattgcaagaaagaaaaaatatcttttctttctacccatctaagttctcgcctagagcccctgtaacaaaagattatcaaaagaaaagcatacagatttatttaatataagttttacataacatgggagccattcttaaagcaaatgaagaaccaaagacgtggttaaaccttcatttttgtggtcaaacctgagcgtttttgtgtttcatttgatgaagagctatggaaatatatgaaaggacaaagaggctgagctaagtgtaataaactggggaaacttagcaaggcctgttcacttcgactcctctcactgtccttccaatcttcagagataagaatacttctttcctctggatacagggagggtacctgtcacatgagggccttacaacctgcttcaggggagaaccagagatgccatttcttaaattcctttagcttaaaatatttaataagccaaggtgccatgtttcagtagcttgtcctgaaccccatcaacatattaggccctgagtcaatggactgaacattcacatggtgatactggcaggatctctgcctgcaggggaataaaaaacctctacgtggagtatatgtcaattctggtaaggatgctttagtacgtcttttaaggtccaagacctccaagatgacccatctgccatcagactaggcggcaactggtctcctacatatcaagggcttggtattgatcccaggttgggcattcagccatagggtcaataattcattccttgtcgccctggtaaaacaaaaaatgtcctggggaataaaagtggttacgtttacggccagatgcagtggctcacacctgtaatcccagcacttaggcacactgaggcaggaggatcacttgaggccaggagttcaaaaccagcctaggcaacacagcataaccctacctctacaaaaaaaattaaaaattagctaagtgggctgggcacgatggctcacgcctgtaatcccagcactttgggaggcaaaggcgggtggatcacgaggtcaggagatcaagactatcctggctaacacggtgaagccccatctctactaaaaaaaaaaatacaaaaaattaaccaggcatggtggtgggtgcctgtagtcccagctactttggaggctgaggcaggagaatggtgtgaatccgggaggcggagcttgcagtgagctgagatcgcaccactgcattccagcctgggcaacagagcgagactccgtctcaaaaaaataaataaataaataaataaaaattagctaagtgtggtggcacatgcccataatcctagctatttgggaggtggaaaggtcacttgagcccaagggtttgaagctgcagtaagccaaggtcatgccaccacactctagcttgggtgacagaatgagactctcttcaaaaaaaaaaaaaaaaggtggtgaattctcaagtcttacaaagtatatttctaatatttctgcccactatgaattttgacccctttctcaataacatgccaaagaagctctgacatttccatatgcccttgctagaacatgtaattccaaatcacacaggggtaagtacccgcatgataatacatcttcatccagcagaaccttatattccatgccctctcatcttcccatgtcctcaagatctattctacaaatgtttccataatacccgaat

SEQ ID NO: 674004 - DNA, 1158 bp, Homo sapiens
tacactgacttcttttcctgttagtagatatattcttatgcctgttttacagatggaaatacagaggcttagattaatttgcccaaagtcacaaaggtggttaaatagtagagccagggctggaacccatctgcttgattctgaaatacattcattcattcattaaatatttattgagggtcctataatgaaccaggcactgttttatcccactgtttttaggaatataatagtaagcaatacatatagccagtgtgctttagaaaaaagaccaaaagagaactataccccaaaattaagagttataatgtccagataatagattggatgtgatgtttattttcttctctctccgacttcagtctttctaatttattgcacaagagtttgtgtgtttgtgatgaatgaatatacacacaatgatatctattactgtattacatcagaaaaacaccctcagtaaacctgccataactgaagactatggcagtgtacttttattcgtagtgtttgaatgagaaagaagataatagataataaacaagttgaacagttaaatattctcatctcccctctaaaattattttgtacagcatatatgtattcttaaactcatgtagattacttggggctcacttttctagtttctcatctaatgcaggagtataagcaacattcgttgagtattttgtgtgccgctgtccttagatatcactggcacagaaatcaaagacatgctcttttttcttaagaaggttactgttgtgaaccgaattgtgtcttcccaaaattcatttgctgaaatcccaaattccagtacctcagaatgggactatatttgaagagggcatttggtctttaaagaggtaaaawgaggtcagtagggtgggccttaattaaatttaactggtgtcattataagaggaaattgagacactgacacatattgagggaagaccatgtgaagacacatggagaagatggccatctatacactaaggggagaagccctcttgacatcttggtcttgaactttagcttccagaactgtgagaaaataaattcttgttgttgaagccacccagtctgtggtactttgctaaggcagtcctggcaaactaattcagtttatagtctaataaaaaatacagacaagca

SEQ ID NO: 674005 - DNA, 662 bp, Homo sapiens
attgcctatggatgcatctcttagaacgtatccctatcattcagtgatgtgtgactgtactaaaatgctcaatstaagtttcaatgccctccataaaattgttgtactgtgaaatacaaatctctcacccatggcctgaatatgtttgcaaactaagcagatcatgggaaggagaatgtgctggcatcgctgggatgattttctcacactacatgaataatatctccagacttcgcgaatatgagccacttgcatagagttaaagtaggcatctctttgctgggaaatttatcaaatggcagtatgaagtgtttttaaaagatacttgtttgtttgtagctggtaggcctacagtggctcatggcaatggatgaggttgctaagatttggtggaaggaggtaaaatgaaatggccacttatatggtatatgggtcacttgtttctgttgagttacagattcagctgactctttctcccaatgttagttattcggagaaaaaaaacatgatggtaattttggggtgacaaatacaatatttgatgaaagcaaatttattgagggttagacaaactacaagatactttaggctgcaaagtcaacacgagacttctggcccaaattgtgcagagtttgggtccagctgcaaagttcaaaggaaga

SEQ ID NO: 674006 - DNA, 662 bp, Homo sapiens
attgcctatggatgcatctcttagaacgtatccctatcattcagtgatgtgtgactgtactaaaatgctcaatgtaagtttcaatgccctccataaaattgttgtactgtgaaatacaaatctctcacccatggcctgaatatgtttgcaaactaagcagatcatgggaaggagaatgtgctggcatcgctgggatgattttctcacactacatgaataatatctccagacttcgcgaatatgagccacttgcatagagttaaagtaggcatctctttgctgggaaatttatcaaatggcagtatgaagtgttttwaaaagatacttgtttgtttgtagctggtaggcctacagtggctcatggcaatggatgaggttgctaagatttggtggaaggaggtaaaatgaaatggccacttatatggtatatgggtcacttgtttctgttgagttacagattcagctgactctttctcccaatgttagttattcggagaaaaaaaacatgatggtaattttggggtgacaaatacaatatttgatgaaagcaaatttattgagggttagacaaactacaagatactttaggctgcaaagtcaacacgagacttctggcccaaattgtgcagagtttgggtccagctgcaaagttcaaaggaaga

SEQ ID NO: 674007 - DNA, 662 bp, Homo sapiens
attgcctatggatgcatctcttagaacgtatccctatcattcagtgatgtgtgactgtactaaaatgctcaatgtaagtttcaatgccctccataaaattgttgtactgtgaaatacaaatctctcacccatggcctgaatatgtttgcaaactaagcagatcatgggaaggagaatgtgctggcatcgctgggatgattttctcacactacatgaataatatctccagacttcgcgaatatgagccacttgcatagagttaaagtaggcatctctttgctgggaaatttatcaaatggcagtatgaagtgtttttaaaagatacttgtttgtttgtagctggtaggcctayagtggctcatggcaatggatgaggttgctaagatttggtggaaggaggtaaaatgaaatggccacttatatggtatatgggtcacttgtttctgttgagttacagattcagctgactctttctcccaatgttagttattcggagaaaaaaaacatgatggtaattttggggtgacaaatacaatatttgatgaaagcaaatttattgagggttagacaaactacaagatactttaggctgcaaagtcaacacgagacttctggcccaaattgtgcagagtttgggtccagctgcaaagttcaaaggaaga

SEQ ID NO: 674008 - DNA, 662 bp, Homo sapiens
attgcctatggatgcatctcttagaacgtatccctatcattcagtgatgtgtgactgtactaaaatgctcaatgtaagtttcaatgccctccataaaattgttgtactgtgaaatacaaatctctcacccatggcctgaatatgtttgcaaactaagcagatcatgggaaggagaatgtgctggcatcgctgggatgattttctcacactacatgaataatatctccagacttcgcgaatatgagccacttgcatagagttaaagtaggcatctctttgctgggaaatttatcaaatggcagtatgaagtgtttttaaaagatacttgtttgtttgtagctggtaggcctacagtggctcatggcaatggwtgaggttgctaagatttggtggaaggaggtaaaatgaaatggccacttatatggtatatgggtcacttgtttctgttgagttacagattcagctgactctttctcccaatgttagttattcggagaaaaaaaacatgatggtaattttggggtgacaaatacaatatttgatgaaagcaaatttattgagggttagacaaactacaagatactttaggctgcaaagtcaacacgagacttctggcccaaattgtgcagagtttgggtccagctgcaaagttcaaaggaaga

SEQ ID NO: 674009 - DNA, 662 bp, Homo sapiens
attgcctatggatgcatctcttagaacgtatccctatcattcagtgatgtgtgactgtactaaaatgctcaatgtaagtttcaatgccctccataaaattgttgtactgtgaaatacaaatctctcacccatggcctgaatatgtttgcaaactaagcagatcatgggaaggagaatgtgctggcatcgctgggatgattttctcacactacatgaataatatctccagacttcgcgaatatgagccacttgcatagagttaaagtaggcatctctttgctgggaaatttatcaaatggcagtatgaagtgtttttaaaagatacttgtttgtttgtagctggtaggcctacagtggctcatggcaatggatgaggttgctaagatttggtggaaggaggtaaaatgaaatggccacttatatggtatatggrtcacttgtttctgttgagttacagattcagctgactctttctcccaatgttagttattcggagaaaaaaaacatgatggtaattttggggtgacaaatacaatatttgatgaaagcaaatttattgagggttagacaaactacaagatactttaggctgcaaagtcaacacgagacttctggcccaaattgtgcagagtttgggtccagctgcaaagttcaaaggaaga

SEQ ID NO: 674010 - DNA, 1236 bp, Homo sapiens
gtttcagaaggaacggtaccagcttctctttgtacctctggtaaaatttggttgtgaatccgtctggtcctgggtttttttggttggtaggctattaattactgcctcaatttcagagcttgttatcatatttttaactccttaacaacacatgccaaagattatgtttagctattttcaaaatattgctgcttctgaaataccaagaaggtattaaacataatctgaaaaccataaaaatatatgcataacactttaaaaaggataattaatgaattgatgaaatgaaaatataaattcatgtataaatatagatataaaatcccttacagaggatatttattacattatcatataaaacttcctgtacatctgtaactttttataattaaaaaaaactaactgcaaaaactttctgagtttaaaaaatacagaaatcagattgttataaatatacaaatcattttctgtagatcataaataaccaattagaaaatggataaaaatccaataacagccccaaattggacctagacctatatgaacaaaactataaaactgaaacacaatgtcaaagaagatttgaagatttggagagacaggtcatattcccaaagacaaaacgtgaatattataaaaattctatttgtttccaagataatacatagaatccaaaaaacttcaagtgaattttaaggattttgatggtggacagtaaggaaggagcagagatggcatagtgaactattaatccattcagtctgctctagcaaaatactgtaaactgggtggtttgtaaaccagagacattttatttctcacacttctagagtctggatcaagatgctgtcagatttgatgtctgtctagggcctacctcctagttcatagatggcaccttctcatcatttcctagcatggtagaagaacaactgagctcccctgggcctcttttatgaggccactaatyccactcatgaagccttcagatccaatcacctcccaaaggccacacctactaatcccatcatctttggcaccaggatttcaatgtatgaattttgggaagacagaaacattcatatgatagcaacagctattctcaagttttatttatataatatttatattacataaaatgttaggctattgttataacattgaaaaagaagaataaagggtggggccttcttaccaggtatttttaaactgcaataattaaaatagtcttactat

SEQ ID NO: 674011 - DNA, 774 bp, Homo sapiens
ctccctttcagaatttgtcattctaatggagataaagataatattgaataacatacatctattatttaatgtccagtagtgataagtgatgtaaaggaaaaaaaagacagataaagtgttcagagagataggagaggtggcagaatggctctttctttggaaagccaaataaagcctgcctgagaaagttacaattgaccaagacttggatgaaataagaaagctgtgtgaaaatactcagagaagagcatttcaggcagaggaaaaagcaagtgcaaactagttctatgtctcttaggaatatgacaaaggctaggatgcctaaaaatgagggagtgaggaggaagagaatgggagacaatcttgaagaaggagacagggattgaaagatcaggcattgaaaacacaaggtaagaggctggatcgtaatgagagcagtagaaaggtgtggtctgatttatttctgtgtggtaaygctaagggaacaagagggaaaactgcaaaccagttaggaggctactgcaattaacagacagggttaactccctaaatatggagtttcagtgcattttagtgtgatgtaatcagtaggaataaccaggtcaaagaaaattaggaaaccagaatcttgcctacaattactgcgataatcttatgtttattatcctacacttaccatcaaatttgtagactgtttgtgtttattctttcttagtaaagaccctaaatctataccttctttttatgcaagaaggtaccttggatctcccagcc

SEQ ID NO: 674012 - DNA, 1354 bp, Homo sapiens
gggactacaggcacgctccaccatgcctggctaatttttgttttttttttttttgtacagacagggtttcaccatgttgcccagactggtcttgaactcctggactcaagcaatctgcctgcttggcctcccaaagtgctgagattacagatgtgagccattgcattcagcctgaacttcctttttgtactaaaacagcaatgccttctgaatgcataggctgtctgcaatactcagtgtccaaagacttctatctctctcttgaccatctctgttctctgataatggctgtctccaaacagactgcaaaggctaacactgaagagttatcctgcattgaaaatggaatcttaggattcagacggacacctagttgggcatggattccatgcaagttgataaggctaggaaaaccccttgcaactgatcttgagcagtcagccacatggtagaagtttatttatgcccaaggaaatggctttgctgagcaatgctaagagtctgtacactaaatatttcctataattctttttctcacttggaaagattcacattgcttccaaattatcttctgaaagtgtcccatctactaccttgcagaaggtatggactagtggcaaagagtaacatggccagtgacacccaacaacagaaatgggaaaacagcaccatctggtggaagtccccagtggaggcatccaaggcctgggacccaggggtccaggtaccagccttagaaacaactgggcagcaaaaggaaggtctttggtggaagagctggtgatccttctagtcccaattccttaatctcaccaaaagtacaagacctaatgcctacctacaaggagcttacaatctagtccaaaatattagctctttgtatataatgagatgacaatctaatatgataaatactactgtaacaacagacaataggcatataactcaaktatgtaatagaagaacatatcacaagaaggtcccgggttcttttgggggatgtaatatttctgtggtcttgagtctatatttacaagcccatctaggtagataatacaatgttcacctacctactaaatacaatgatcacaatcaaacttatattaaataataaacaacattatctgagattgacagtataactcatcacctgctcccccaccacaatttttaagtccattcctggacagcaaaaaagaaattaaattttgaaaagaaattaaagtactatttaacactagagtctcctataacacttttgctacatggaatcattgctatggtcaatgaaacacccaccatgagtataaacattaagaaacctaagaactctttttgatcagtgagtgattaa

SEQ ID NO: 674013 - DNA, 584 bp, Homo sapiens
agtaaaataagccaggcacaaaagacaaaaactgtgtgattccacttatataaggcacctagaataatcaaattcacagagacagaaagtagcatggtggtttacagggaccagggggaccggtgaatgggcagttgttgtgtaatgggtatagagctccagtttttcaggatgaaaagaactctggagattggttgcacaataatgtcaatatacttgacaccactgaactgtacattaaaaatgattaagatggtaaattttatgttttgtgtatttaatcacaattttaaaaaacattcggagaacattagagaaatttgatatggactgggttttattgytaattttttaggtatgacaatggcactgtggttatattgagcaatgcccttattcttaggagatgtgtgctgaaagtcaaggttgaggtacaagttattttgaaatgcttggatggaagaatgagtgcttgcataataacatacagccaaactggcaaaatggcaacaatggatttcaggcagtggatgtatagcattcattgtactattctttcaatattgagaaaataaaaccaagcc

SEQ ID NO: 674014 - DNA, 1309 bp, Homo sapiens
ttgatgaataatatattggcttgccacctgcaattctatgtatgtcctaccacaatctgcagataactttattttgtataatgcttccaatctcttatgggggaaaaataaaggaaatggtatggtaactgacatacactgaatcctaactaccttaatttattacaaattacagttaagtgaagcaaggttctggtaatagacaatctgtacaattaaaataataataggatatggattacttgttcgttatattttctgttttaggtaaaagcagtttataatttttatcaataatggagacaaactatatgttaatatctcatttgaatatttcactggttttctcttgttataataagtaggatgtctacattctgactttctggctgaaatggcaacattcagaatttggtaacattggcactgggttatcagatttctagtcctctccttgaatatgtatttatatttatacatacttttacatttcttccagtttgtctgaaagaaaatggtgtgcttttatatgtgtaaatgaaatacagattcgtgttgctggagaatagaagacaagcaggattgttcagtggctaaaaagaaggaagggctttggagcagagtctcaaacctggctcctcatgtgggaactttttaacctgggtcaagataacaaacctcccctaagcttagcttcatctttataaaataagaattatgacaataatattaacaacaacaaaataccctacccatagggtcattacaagaagtgagataatgcataaaaattaataatacatcaatgttaagggtagcgattattattacatgaggatgatgggcttaaaagagattcgcaaaaggtatgtgtatttrcacctttgtatatttaactttattattaagaaacaatatgcatactacattacattagtataattgaacacaagtttattttgcaaatatagtaattagaaaagtaaaaaattctaaagtatactcaaattattcttttccttaaaagaaaaacacattccttagaaattgtcaatttatacaccacaagtgatgcacattaaaaaacactataatatagtattgcataacatatgtaacagatctaatacatttttataaaattcaccagtttttttctccttttttaaatggaattggattagaatttttctaagatttcttcctgtattaagatactactactatgctataaattccttaatagcaatgagaataataaaaaatattacattattgggagctggttctgttctccaaattgttacag

SEQ ID NO: 674015 - DNA, 615 bp, Homo sapiens
tgagcttctcacagacacagaaaatagagggggaaaaattaccaatgagatagatatatatatatatgtgtgtgtatatgtatatatatacacacacatatatatacacacacrcatatatacgtatatatatacatatatacacacacatatatacgtgtgtgtatatatgtgtgtatatatatatatatatatttttttttttttttgagacaaagtctcaatctgtttcccaggttggagtacagtgactcaatctcagcacactgcaacctccgcttcctgggttcaagcaattctcctgcctcagcctcctgactagctgggattacaggggtgagccaccacgcccagctaatttttgtatttttagcagagatggggtttcaccatgttgtccagactggtctcgaactcctgacctcaggtgatcggcctgccttggcctcccaaagtgctgggattataggcatgagccactgcgcccggccaccaatgacataatttaagaaaatttcccaaactgaagaatgaaagtttccagattcaaagagcccaacacaatgcatgaaaacagacccaaacctaggcacagtgtcgtgaaattttaggact

SEQ ID NO: 674016 - DNA, 615 bp, Homo sapiens
tgagcttctcacagacacagaaaatagagggggaaaaattaccaatgagatagatatatatatatatgtgtgtgtatatgtatatatatacacacacatatatatacacacacacatatatacgtatatatatacatatatacacacacatatatacgtgtgtgtatatatgtgtgtrtatatatatatatatatttttttttttttttgagacaaagtctcaatctgtttcccaggttggagtacagtgactcaatctcagcacactgcaacctccgcttcctgggttcaagcaattctcctgcctcagcctcctgactagctgggattacaggggtgagccaccacgcccagctaatttttgtatttttagcagagatggggtttcaccatgttgtccagactggtctcgaactcctgacctcaggtgatcggcctgccttggcctcccaaagtgctgggattataggcatgagccactgcgcccggccaccaatgacataatttaagaaaatttcccaaactgaagaatgaaagtttccagattcaaagagcccaacacaatgcatgaaaacagacccaaacctaggcacagtgtcgtgaaattttaggact

SEQ ID NO: 674017 - DNA, 615 bp, Homo sapiens
tgagcttctcacagacacagaaaatagagggggaaaaattaccaatgagatagatatatatatatatgtgtgtgtatatgtatatatatacacacacatatatatacacacacacatatatacgtatatatatacatatatacacacacatatatacgtgtgtgtatatatgtgtgtatatatatatatatatatwtttttttttttttgagacaaagtctcaatctgtttcccaggttggagtacagtgactcaatctcagcacactgcaacctccgcttcctgggttcaagcaattctcctgcctcagcctcctgactagctgggattacaggggtgagccaccacgcccagctaatttttgtatttttagcagagatggggtttcaccatgttgtccagactggtctcgaactcctgacctcaggtgatcggcctgccttggcctcccaaagtgctgggattataggcatgagccactgcgcccggccaccaatgacataatttaagaaaatttcccaaactgaagaatgaaagtttccagattcaaagagcccaacacaatgcatgaaaacagacccaaacctaggcacagtgtcgtgaaattttaggact

SEQ ID NO: 674018 - DNA, 615 bp, Homo sapiens
tgagcttctcacagacacagaaaatagagggggaaaaattaccaatgagatagatatatatatatatgtgtgtgtatatgtatatatatacacacacatatatatacacacacacatatatacgtatatatatacatatatacacacacatatatacgtgtgtgtatatatgtgtgtatatatatatatatatatttwtttttttttttgagacaaagtctcaatctgtttcccaggttggagtacagtgactcaatctcagcacactgcaacctccgcttcctgggttcaagcaattctcctgcctcagcctcctgactagctgggattacaggggtgagccaccacgcccagctaatttttgtatttttagcagagatggggtttcaccatgttgtccagactggtctcgaactcctgacctcaggtgatcggcctgccttggcctcccaaagtgctgggattataggcatgagccactgcgcccggccaccaatgacataatttaagaaaatttcccaaactgaagaatgaaagtttccagattcaaagagcccaacacaatgcatgaaaacagacccaaacctaggcacagtgtcgtgaaattttaggact

SEQ ID NO: 674019 - DNA, 1234 bp, Homo sapiens
gtggaaatttgtaattattttgaatggttgacttttaaaattatattttctccttccaaaagagcaacatgtcataccatatatgtcatcctcaaaactaggtcactctctacctcctgagagccaacagcccttaagaattgctgaggagagagttttaagttctcactgagaagcataaggacaagaatatttcctttctatccttaaccttgccaggatcttcctctttcaggttagctgtgataccctgtcttctctggtgactcagaagtgttacagcatgtttttaaaagtcactctaagagtgacttttatatagctacaaggagcagagctagtaggtgtctgaagtatgcatcacagttagcccaactagtttttcaggtgttgtgttttatgataagcttggtttgttgctggaagaaggatttgtttcttttctaagcaggtgtggcccattttcataacttgctcctacatgcatgttagctcttagtgaaactcctgacaaagtggaaaatattacaaaccactaaaagtatttggaatgaaaaactgttactcaatggcttaaagatatttagccatcctaaaatcctaaatcaaggtgtgtgtgtgtgtgtctatataagcacatgctaaaaagtagtttagaaattgctagacacagaaatatttgcatttccttagaaaatgctcagattctttgacaaaacctttgctatccaatccatccattttttaacataacagatcatttcactagacagtccatccgtttaatcttcataggtacacatggtcagttattttctacttaccctctttcatctattcctcaccagcatccctcctccagatgtgcctccctttgatctatcaaacggccccttcttcactgtcttggtacaatacaattttacaaaggagtcccaggaaccttaaaggttaagtatatgagaaattttgaattgaacrcttggtggcaaaatgaaggggggcttttttagggagattctctgtctagagggtggtcccctatcacactgttgggggcatatattatatagatgtaggggtgggtaagtccgtgatcagagcaaagggtgaacaggttcttgaactgttaggaagctacccaaaatgaaacaataccgtgtcttccaccctttttctggcagcagatgggaagataagctcttaaataacatttattatttctttttttttc

SEQ ID NO: 674020 - DNA, 646 bp, Homo sapiens
aacatgcctgggcctgggtagcccttttctattggcagaactgctggcattcactgtgcaagtttccagcttgcttatcaatgtctgcagttcaatttttcaggcttatttttgttagaaattatttgggggctcctttttgttaaaaggggaatcttgctgaggagtcttgtgccctcattatctgcctaatttctttctagctcctgtatcgatgctaacaggttggctatttggggttagatttaaaaataagagcataaatttggtaggagaatttaaatatttttactcctttggttaacaagagatatggtagagaaattatttagatctgtgaaaactcttatttccactttttttattgatttttcagcytaaattcatgtgtgtaataaacatgtatatttaacacgattttaaaaattcaaactgtacatattcaaaatctaaaatatatccttacagtaatttttcctcccaccctgttctggtcacccacttcctctctttggaggcaaccacagtatcaatttcttgcacatcccttcacagatggtctatgcaaatataaaaatatatctacacatatctgccttggacacaaggattcaccacccagatcccttttcatgggaggacttat

SEQ ID NO: 674021 - DNA, 859 bp, Homo sapiens
gaaataattcatttcaaattctatcataacattctgacacagatacacagaggcatttgtgaaaatggtgtattatcacagaagggcacataatgtaaagaaattaatattcttaagcttaagtttattcaaatgggcagcaatgaaattttgctttaaaaaaacaagttaacccaaatatagtttaccaacctgtttgttgttctcygccatagaaagctgcaatgccaagagcatggagtctgcaccacatagagtggttctctcagagttacaaagagcacgccaattttttcgaaactctttaatcatatccgagacagacttctgattaaacacagccattatcttaaagtaggacagaatacaaagttaaagtatcttatgttaacctgaaattaacatttaacatgtataggcaagcacagatagagaaaaacatatagtgaatgagaggtcatttcatatttaccaagattgcttttaattaaatttaggaaaacaaaataatacaatttctgcgcaatcatatttccctcccctttggtttcttaagccaaaccttttgaaagaacaaaatgtagccttcaattctgaaaattcacacaaaaacagacatgcaaatttactgcaaacttataattacaaatatacctaattaaagctgtatttaaatatatatatttgttttgagataggtaataagtctgataaattgggaaaaaaaaaaaaaaacctaaaaagccaatttcctcccatcctacgttgtcccaaaagaggtggcctatttttctacccttttgaatctggaccaggcttgtgacttgatttaaccaatagaatgtggcaagaatgacgc

SEQ ID NO: 674022 - DNA, 859 bp, Homo sapiens
gaaataattcatttcaaattctatcataacattctgacacagatacacagaggcatttgtgaaaatggtgtattatcacagaagggcacataatgtaaagaaattaatattcttaagcttaagtttattcaaatgggcagcaatgaaattttgctttaaaaaaacaagttaacccaaatatagtttaccaacctgtttgttgttctccgccatagaaagctgcaatgccaagagcatggagtctgcaccacatagagtrgttctctcagagttacaaagagcacgccaattttttcgaaactctttaatcatatccgagacagacttctgattaaacacagccattatcttaaagtaggacagaatacaaagttaaagtatcttatgttaacctgaaattaacatttaacatgtataggcaagcacagatagagaaaaacatatagtgaatgagaggtcatttcatatttaccaagattgcttttaattaaatttaggaaaacaaaataatacaatttctgcgcaatcatatttccctcccctttggtttcttaagccaaaccttttgaaagaacaaaatgtagccttcaattctgaaaattcacacaaaaacagacatgcaaatttactgcaaacttataattacaaatatacctaattaaagctgtatttaaatatatatatttgttttgagataggtaataagtctgataaattgggaaaaaaaaaaaaaaacctaaaaagccaatttcctcccatcctacgttgtcccaaaagaggtggcctatttttctacccttttgaatctggaccaggcttgtgacttgatttaaccaatagaatgtggcaagaatgacgc

SEQ ID NO: 674023 - DNA, 939 bp, Homo sapiens
caacctcgtcccagtatggaacttttctgtcacccccaagagttcctttatgcctttttccagccctttgtggactcattttgagacgttttggtaacggattattggctttcacatgggaagatgtaacctactccaggaaactaaggtgggggtttccccactgcacagaccacccaccatacgctccacctctagacctctcagcagcctgtctttcttgccctttcaaacatcttcatttgtgttccaccagacagtagccaataccatttccatctatcagcttggtgaaatgtgccctttaatggaagactaatgaggcctaatagaaaaagcttcctggctttattgatgttccctgtgactttacaggagagagagagatttaggtcagagtcattagactttctcttcctttccctgaaattgtgtggactagcagccaggtcagcaggcatgcaatcaaactctggtgtcgcaccatgtcaccttcctggattagatgactggggccgctgtaacaaagtaccacagaccaagtggcttggacaacagaaatttattgtctcacagttctggaggccggaagtccaaggtcaaggtgtcagcagggttgctaccctctgaatgctgagggaaattctgttccaggcctgtctcctggcttctggtgccttactggccatttttggtgttcccagcaagtgttgctcctatctctgctttcattttttktttttaattatttctcttttttgaaatggagtcttgctctgttacccaagctggagtgcagtggcaacgtctcagctcactgtgatctccgtctcccgggtttaagtgattctcccgcctcagcctcctgagtagctgggattacaggagcgtaccaccatgccaggctaatttttgtatttttagtagatgtggggtttc

SEQ ID NO: 674024 - DNA, 980 bp, Homo sapiens
gaagatttcatcagtcagccttcagtatgatttagagaggagagtagagttggaatgacagttttgaagctcatgtaaaaagtcagtgtatctatcattgtgcattgaataatcccataacttagtggcttaaaacaataatcagtgacttgtatctctcaaagtttctgtggatcaggaagtcaggaatggcttggcaagggtagtcctggctcagtcatgagctggaggcttcaagcaaatgtcagcccctgaccgcaagtaacttacccgcctcggcctcccaaagtgctggggttacaggcatgagccaccacgcccggcctccctgctttattatctccattttgtaactgacagacactaatccaaaaacctcagagctgaggaagcacaaccttcagaccaactctcagaagcagggcggaatgagaaagacacagaacagtacaatgtttgaatcatgatgaagcctttcaacagcatcatccaggctcatccttcactaaacctccctacctgcctcctgccccatcccttcatttagagctgggttcctgctgtgggcaaacatctactagggcctgtatgggagtaaagcagacctcagytagggaggccagcagcagaaaaactcgactttcactttgggtttctgtttgactcttgaaagccacatcaccaggcctcttatgcagctaggagctatgaaggtgcagggaaagagcaagatcagggagggcagctcacagaaagcctgtgcctacccacgtaactgaattctgccacttcatggatactgtgaaagaacgctccacttaaagagagtcactacacagataccctaacctgtaaaacacaataactgggaaccaatcagcaaaaaggtttttgtattttttattgacgtatcacagttgtacatatttatggggtgtatgtgatattttgatacctgtatacaatgtgtaatgatcaaa

SEQ ID NO: 674025 - DNA, 604 bp, Homo sapiens
tttttcttttttccccaaagtaggtaaatatggatgtgaaaagtgggcagtggtccaaaaggaaaaatgatgaacgactagaggcctgtgcttagagctgtccacccactgcaagtgtttggcagggccctggagtctaggcacttccattttgtttcccaagtgaccatgattggtcaatacctaggatatcttttctttaaatgcttgataatgaacatacctgtacctrcccatcatcatccttagaaaacaccactttaccaaaagagagaagggggtgattattcgtcccctaaagaaggaactcctgaagccccctttaagtattaacttgtctcctatacctggttttgagtggtttattgagataagatcccaggccaaatcagggccctgaacagtcccctagactagggggcccaacaaactatggcccaagggcctttttataaataaagttttattgaaacgcagacactcccatttgttaactattgtctatggctgcttttgtgccacagtagcagatgcgaggagttgtgaaaaaggtcacatgacctgcaaagttgataaggtttggctccatgtccccacccacatc

SEQ ID NO: 674026 - DNA, 418 bp, Homo sapiens
agtaaaattaccatatcaaagaacagaaactcttagcttttgatgtttatttccaatttgctttctttctcacaaatctgtcctaacttctttggaaggataagaagttgctgcatgtatacaatcttaaaacaactactctttataacattttatsatctgatagaaggaaacaatggtgttttacatgaatattaattattttctttgattgttagtgaggctgaattaaatcctccagagagaaacttagaatgaagatgggactaagaattacagcccgcaagccatgatgaagcatttcttcttgaatacttttcagaatatggagatatttatatcccttgagtgtcttcatctaaaactacctgaagaaaagaaaacgtcacattcatagggcattacttttataactttt

SEQ ID NO: 674027 - DNA, 732 bp, Homo sapiens
tggttataatctctactggtcgtggtcacaatcagagtactgaaaggtaaacaattccaaaaatgttagatatttcttagaagtcactttcagcatcctatcataggattggtttgaatttcctcagtattaccacatagtaaaatacatttttctctacaatagcatccattcaggattttctttgtttatgaagatacaaattaatgtatacattttataattttccttgtgaaatgatatagcagtatatttgtgtccattttatatttgtaaagaccaaaattttagatatctataattcccttttaattcttatgaccagttggttattttattatatttattatatttatcacccatcaaagtcattgaaagcccttattctgggttgttttcatattttcttatattttacagatcaacctgatttttttaaccaagaacttttatctttataatctttataagtatttgaatagttttatatacttcaatatatcttattgcatgagagtacagcagcctcaacacttattagaatatactgaaatatatattaatatttataatatttatatattatacaatatttaaaatatttaatgyagactaatatataatatttaaatggaatattttaaatacttaatgtatatttaagtatagtctgataagtgttggggctactataaacattaaggtaaatatattgtacaaatttatatcata

SEQ ID NO: 674028 - DNA, 931 bp, Homo sapiens
cattctgcaccattccccactaaagtagccctggtaactatggtctgactgactgaatagatacatgaatacagcactatctggtttataaaaaaaaatctttcttttatttgggctgtcatgccttgagctgctgctgaaatgtacataactataaaatgtataaaatgggaataatggtttctaccatgtttctttcttttcttttcttgtttttttgagacagagttttgttcttgtcacccaggctggagtacaatggagttatctcagttcactgcgacctctgcctcccaggttcaagtgattcttctacctcagcctctccagtagctgggactataggcatgcgccactatgcccagctaattttttgtatttttggtagagacggggttttaccatgttgtccagggtggtctcaaactcctgacgtcaggcratccacctgcctcggcctcccaaagtgctgggataacaagagtgagccaccacgcctggcaccatgtttttttatagagtgaaatcacttaataaccaatctcattctgggatgtagagcacaaaactttggtcctgaaaaagacctcagacatctattccaatcacttccttttacagatgaaaaacccgaggacagacattaaaagatttgcctggggttattgttcataaagtaagaatctatttttatttgcctgtatgggtggctgttgctattgccactatcagcattttgtcaggtttcctccagttgtagcacatctaaagactccacccatttggtgtagtttatgttaccccaagcctcacaccaatctctgtgtgattaagcttgccatggagggcaagaaaagttaataaaatccaatcccttgtagaaaattaccaaaccgatgaactcaccggccgtaggggtattctgatatcc

SEQ ID NO: 674029 - DNA, 1259 bp, Homo sapiens
atcaacagtgtgattttaatctgtacagaaacgttggttatatagaggagagcttttcaaagtgtggtaccctggataggcagtatcaggtcattggtcatttccccgacctactgaatgagacctactgaattcttttattttaattcaaattacttaaaatataatagaatatattggttcttcactcacaccagtcacacttcaagtgctcaatagccatatttggctagtggtaaccatattggacaggaaatatatagaacatttcygtcatcgtagaaactttactgattaacgttgccaatgtcaggacagcgatccaaactgctaaattcatcatgctacttttaattactgaaaaactgctaataccctcactcacttgtacttcttttcttttacttcatttttgtcatgtctggtagaattttagagatcagatgattttgcattaagatgtcagagggaggcagtattgcaaaatctccctcccaaatttgcaaaccaaaaaagcacaaaaccagttaaaaaatttgataagattcaccatcagcaaataaatataaacatcaaaaagtggcaatcaaaaaaaaaaaagaaaaaagaaaattctggaattgggtacaacagtatcgaggaaagaagaggagttagctgataaccttaataatatttctccagtttggagagaaatatattaagaatactagaagtaaaccagggaaaatttttagaatgaaaatagctcttgagattggaggattttacacagcaatgtaggactttggcagaggtagaaaaactcagagtgattgctttcttgaggtgggggacaggtgtgggaggttgctgacttgcagaacccctacctgtctaggagagctggctctagtacaaaacattcagtttcgaagaagagaatggagctatgtgctccaacaaggaatggtctcagctttatccaagataaagctgtcttcatgacttcaggtataaaaaagtagattatttttagtatccaccgttcaaataataatttcaaaggaaaagcaaaggtactagataagatggtgaaagtgtgaagaattcattcacttacattataacaaagtaaatagaaggtgtagacagagctgcccaaattaatgatgaatgagattttaaaaatggcatataactttgcaagcgtgtttggtcaagggtagggtgtgtgttgagaggatcacaacacacaaaatataaaacaacagagacaa

SEQ ID NO: 674030 - DNA, 1251 bp, Homo sapiens
atgtagtttaaattgattacaacattttaatgatttttaatttgtaaacattgttgagcatttaaaaaattcatataataaacatttatgcaaagttcagaattctacttcaaattatttcactttcattaaatcaagtaaaacttatttggtttattttaaatttattttaaacttctaacttaaaattaaatgtcctcttatttaaagcaattgattggctgggtacagtggctcacatctgtaatcccagtattttgggaggccaaggtgggtggaccacttgaggtcaggagtttgagaccagcctggccaacatggtgaaaccccatctctactaaaaatacaaaaattagctggtcgtggtggtgtatgcctataatcccagctacacaggaggctgaggcaggagaattgcttgaacccaggaggtygaagttgcagcgcactgagattgcaccactgcactccagcctgtgtgacagagtgagactccatcacaaataaataaataaatgaataaataaataaagcaattgttcactgattttaaaaatgctaagttaagatagaaataataagcacatcttaacatttttgtattagcacaaacgcatttttactagacaccattcactagttatttgatgcaggagaaatgtttcttctttgagtgcatagcccctagttgaagttcaaatttttcctttcagtataatcatgccacaatatattttctatggtctctaatttcatttttttaaaagaagagtaaaacattaaaacatttaaaatgtttgcaaaataatgtgattgcaaatccttcagccaggcacggtggctcacgcctgtaatcccagcactttgggaggccaaggtgagtggatcatgaggtcaagagattgagaccaccttggccaacatgatgaaaccccatctctactaaaaatacaaaaattagctgggcgtggtggcatgcgcctgtcgccccagctacttgggtggctgaggcaggagaatcgcttgaacccaggaggctgagatggaggctgcagtgagctgagatcgcgccattgcactctagctggggcaacaagagcgaacctccatctcaaaaaaaaaaaaaagcaaatccttctagatatttttctatctcacctgtcagttttatatttttttctttaacatgaattctacaagagtttttaaccacttaattgtgtcaagcctctcaaaacattccatttaatt

SEQ ID NO: 674031 - DNA, 1251 bp, Homo sapiens
atgtagtttaaattgattacaacattttaatgatttttaatttgtaaacattgttgagcatttaaaaaattcatataataaacatttatgcaaagttcagaattctacttcaaattatttcactttcattaaatcaagtaaaacttatttggtttattttaaatttattttaaacttctaacttaaaattaaatgtcctcttatttaaagcaattgattggctgggtacagtggctcacatctgtaatcccagtattttgggaggccaaggtgggtggaccacttgaggtcaggagtttgagaccagcctggccaacatggtgaaaccccatctctactaaaaatacaaaaattagctggtcgtggtggtgtatgcctataatcccagctacacaggaggctgaggcaggagaattgcttgaacccaggaggtcgaagttgcagygcactgagattgcaccactgcactccagcctgtgtgacagagtgagactccatcacaaataaataaataaatgaataaataaataaagcaattgttcactgattttaaaaatgctaagttaagatagaaataataagcacatcttaacatttttgtattagcacaaacgcatttttactagacaccattcactagttatttgatgcaggagaaatgtttcttctttgagtgcatagcccctagttgaagttcaaatttttcctttcagtataatcatgccacaatatattttctatggtctctaatttcatttttttaaaagaagagtaaaacattaaaacatttaaaatgtttgcaaaataatgtgattgcaaatccttcagccaggcacggtggctcacgcctgtaatcccagcactttgggaggccaaggtgagtggatcatgaggtcaagagattgagaccaccttggccaacatgatgaaaccccatctctactaaaaatacaaaaattagctgggcgtggtggcatgcgcctgtcgccccagctacttgggtggctgaggcaggagaatcgcttgaacccaggaggctgagatggaggctgcagtgagctgagatcgcgccattgcactctagctggggcaacaagagcgaacctccatctcaaaaaaaaaaaaaagcaaatccttctagatatttttctatctcacctgtcagttttatatttttttctttaacatgaattctacaagagtttttaaccacttaattgtgtcaagcctctcaaaacattccatttaatt

SEQ ID NO: 674032 - DNA, 692 bp, Homo sapiens
tacctggtctgtttatggtttttaaaacctctactgattgattctgtattttatgctgttttctcttccactttgcatatataattttattatttgtgcattcttccttcttttttcccttggttggtcttgctacatatttctatgtttaattggatgccatttcccrttagccttaagtgtggtagtggggttttttccttaaaattttaaataaagaattaacatttacattgtttgggtttattctgttattcttctgaaactgtcagttagctcgtttattttcattcttttgtttatttgttttttattttcttttcagaagtaaagaaaataggatctcactctgtcctattgagtgcagtggcgggatcacagctcactgcaacctaaacctcctgggcccaaacagtcatcccgcctcagcctccagagtagctaaaatgctcagaggcatttgaaccagagtaactccatcttgaataggggcttggtacaataaggctaagtcctattggactgcattcccaagaggttaaggcattcttagtcacacgatgagacaggaggtctgaacaagatacaggccataaacgactttgctgataaaacagcttgcagtaaagaagcctgccaaaactctccaaaaccaggatggcaataagagtgacctctgatcatcctcatgg

SEQ ID NO: 674033 - DNA, 625 bp, Homo sapiens
accctagctgcttcgtcactgtgggtgacagagatataattaattgaggctgactgattctacactgacacatggagttgccagtgagattaaggtactagcttgttaatgcatcctttattagctaccttaccttccctgccttttttccttactgcccttctgatgctttctgggatcatctctgaaaaaaaccatttaaacataaatgtgaatacttgtttgggggcctcttcttggggaacataaactagacagaattgttaagcccttataatattcattgttactgactttaatagtaatacatttagtgttaacaattccatgaagcatgacatagaatgtgatttcagatagattttcaaaatagctttaaggaaacattcttttaatttagttttatcacatagtttttttgtttttccctatccttctgagcttttttttttggttcagagttggtacattgtttaaccaccatgtatcaccaaaaaattataaaggtgcttccatctcctagagaggattagaattatagacgggggcaagaaagaatgccagtcatactttaatctgggaccctcaccytacagacaaaaatgtaagaatataaggccaaaaa

SEQ ID NO: 674034 - DNA, 575 bp, Homo sapiens
atgctactgaagaaggtgtttgggggaaaaagctgccatctgaaaggtatctttggtggtaggggtcggggagacagcgtggcatgctgtttgaataagtgaagcacttcttactgagatttctaaattcccaaccaattcatttgtcaggtcattttgctcctgacccacctgacttcayacaggaaaggccatttgagttttctatggtgggaacacctactcactatcattatcatggataccatgtttaacttctctgatatcagtatcttccgaaatgaaatataaacttaccatattcgtagataaaacaaaaatgtattcctacttgaggtttactccttccgcagggtcggctttttctttttccacctgataccagctctctcccctttcaacaaaactctatgtaggattatattaggccgttctcgtgctgctgataaagatatacccaagactgggtaattttaaagaaaaacaggtctaatggactcgcagttccatgtgtctggggaggcctcacaatcagggcagaaggtgaaaggcacattttacatggtgacaggcaa

SEQ ID NO: 674035 - DNA, 649 bp, Homo sapiens
aatatatcagattcaaattctttccaaagacctggtgattactctcaatctgcatgagtaacagcaatgttatggaacagcctggatatttccaatgtgttcccccaattgcatttgtcccatgaccacttgctggaaggttggaatattggccacttcttcaaaaagcttattaaaaagtttctgacttactaatatacctggtcaaaataatacttttcagaagagaatatatatcaacagatttgtatggaagtctttgccaagctgcaagtacctgtctctaaaacctaaatattttctgctccttttttttcattttctttgacwttaaggttttctctagcttgatcaactctcctctttaggatcactctccattctgctgtatagacacaatactgggctgggtgtgaggtagaaagatgaaaagacaagcccttccctcaggagggagatcacacacagtcatataaaacaattccatctagaaagagaaataagccaataagccacagtgccaagtgatttgtgacaggtcaaatgcatttatagcagaaaatgcattttgaatgcattttgaacacattttgaatcaggatggtttttaagatttcttaaagaaagaaaagtttgaattcagcctgat

SEQ ID NO: 674036 - DNA, 642 bp, Homo sapiens
gctcttaagtacccgctccacggaggcagcgggccagctgcatgtctctgggcataattgtcatgtcacgtgcctggcatggatggcacacaggttggtgtcttcaaagaggcgcaccaggtaggccttgctgggctcctgcagggcgctagtggttgcgctctggaagcgcaggtccgggctgatggcctgggtgatctcgcgcaccaggcgctggaagtgcagcttgcgcaggagcagctgagtggacttctggtactttctgattttgcagagtgccagggtgccagacctgtagccgtggggcttcttgatccctcctgtaggmggcgccctcttgctggcagctttggtggccaggggcttcctgggggcctccgaggtggtggctttgcaggtgttctgcttgatgtccactgtggtgcagggccgcggcctctcccctgtccttgggctgagcctggccagctgcaggcagctctggcgtcagggagcgagggcggtgggtttgtggacaggactcagagagcctgtgagttgagatctgtgcagaagacgcaaccccactcttagcccctttcaatccagccctagacttacctgctcacaggtctgcgggtcaggctgctcgttcgccctgtg

SEQ ID NO: 674037 - DNA, 642 bp, Homo sapiens
gctcttaagtacccgctccacggaggcagcgggccagctgcatgtctctgggcataattgtcatgtcacgtgcctggcatggatggcacacaggttggtgtcttcaaagaggcgcaccaggtaggccttgctgggctcctgcagggcgctagtggttgcgctctggaagcgcaggtccgggctgatggcctgggtgatctcgcgcaccaggcgctggaagtgcagcttgcgcaggagcagctgagtggacttctggtactttctgattttgcagagtgccagggtgccagacctgtagccgtggggcttcttgatccctcctgtaggcggcgccctcttgctggcagctttggtggccaggggcttcctgggggcctccgaggtggtggctttgcaggtgttctgcttgatgtccactgtggtgcagggccgcggcctctcccctgtccttgggctgagcctggccagctgcaggcagctctggcgtcagggagcgagggcggtgggtttgtggacaggactcagagagcctgtgagttgagatcygtgcagaagacgcaaccccactcttagcccctttcaatccagccctagacttacctgctcacaggtctgcgggtcaggctgctcgttcgccctgtg

SEQ ID NO: 674038 - DNA, 807 bp, Homo sapiens
agacaagcactgcagctgtgagagaatatgacagtctgcttgtgaagatgataggtgtaactttcattaagacctacacagataaacacacacacgtggggacaaagaccacaggagggtcatgaggacctagtcacatctcgataattaaaatggagccataaaaatcatataactggcatcacatacaagaatgctaacgatccagcccaattccactctcctcctactactttacagctaagtaaactgaggctgtgagtaggaaagcagctagacacaccgacacagaagtaaaacagagaaaaacctgaactcagccaggcatggtggctcacacccataatcccagcactttgggaggctgaggtgggaggatcgcttgaggatctcttggagttcaagaccagcccagaaaacacaaggagaccatgtctctacaaaaagtaaaatgattagccgggtgtagtggtgtgtacctctagtstctgctattcaggaggctgaggtaggaggattgcttgatcccaggagttggaagctacagtaagctatgattgagccactacactccagcctggatgacaaattgagactccatcacagaaaacaaaaaacagaaacaaaaaaaaaccctgaacagcccgaccccaggacctgcaaattttcccccacaccacactgcctcagtcataaaccctagtaaaatgtgtatccccaggttgtcaaattcaaatcactgagaacaaatgagaatcaacatttgatagcaacactcagatgtagccaatctctttcacaattcac

SEQ ID NO: 674039 - DNA, 589 bp, Homo sapiens
tgaatccactagcaccttgattttggcgcttctcagcctccagagttgtgagtaatacattcctgctgtttagaaatgacctagtctaaggtattttgttatggtagctgaacagactaagacagtgaggatgacaaaaagacacatgggatatgaggctgcctcgaagagggggctcactgtgaaagtgtgggtcaccccacttgaaaaacagcaagccaggtatggcagtgcatgcctgtaataccggcactttgggaggctgaggcagcaggattgcttgagcccaggagtttgagaacagcctggaytacataccgagactcccaactctacaaaaaataagaaacttagccaggtgtggtggcgtgcacctgtagtcccagctactcaggacgttgaggcaggaggattgcttgagcccaggtgttcaaggctgcagtgagctatgatcaggccactgcactccagcctaagtgacagacaagactctgtctctaaaagaaatgtatttaaacaggagagaccaaggcccctgagagaggttgaaggactggggatgactgcccaggttggggggagctgggga

SEQ ID NO: 674040 - DNA, 886 bp, Homo sapiens
taaaccaatgttttcgaaactagtgagtaatttaatttaatagagcaattcaaaactttgagcattgggacatataccactacaggaaaatttaaagcatttggttatctttcttgacctaaaaaaactttaattaaaaaaaaagacatagttagctattgctatacttattccctttctagtcattaccctagtcctaagaggatacagtagagaaacagaaaaatctgcagttacttcagatttatgtataactatttaaaaacaagagtaatttggaatttagaactgctaagtataaagccattcatatagtagtttatcaggtgctctcttcattcttcagaataatttttaatctaatacattccaagcaacacattccccttccaaatagctccaaggtcaaagactaattagccttttctcttgaaatttggcaacgatacagaccttgttgcttcactttaacgttttgaactctctaataaccctccaaaattatttaaatgctctctaaaatgcctcatagttctttgtgatctggtcaagactaatgaaatgcttaagctttcaccccagggcccctaaataaaaaaaccatgatgcagaaatgtagtgttaatcagagacctaactttaaaagaataccaaagaattgtgtgattttcagagttaacagtactccacatccttggaagaaagcatcatgtaagccaatcagaaaatcttactctcgctgacytgggaaacttgagctgctaacttaacatggaagtatacattttcccaacaaataatagaaaaaaactgtattcaaggtgttcacctcacaagaataatgcagtctagaaaaccatgtaccacacaaagaaacataaaaaat

SEQ ID NO: 674041 - DNA, 659 bp, Homo sapiens
gagaaaaatcaaagaagaggctgggcgcagtggctcacacctgtaatcccagcactttgggaggccgaggcrggtggatcacgaggtcaagagatcaagaccatcctggccaacactgtgcaaccccatctttactaaaactacaaaaattagctgggcatggtggctcatacctgtagtcccagctactcaggaggctgaggcaggagaatcacttgaacctgggaggtggagattgcagtgagatgagatcactccactgcactccagcctggtgatggagcaagactccatctcaaaaaaaaaaaaaaaaaaaaaaatcaaagaagaaaagttgaagaactgcaattaatttaccaaatgtagagaaacaaaagacagctgtgtaatctggaagaaagcatagtctagagactcagtgtttcccattcgctttaaagagtgggcaaggaggaataagcttgcaatccagggaattttaatttgattttaaggagtggaatttgtcataaaaatggcctcatagcagagattgtgattcagtagatcttgagcagaacccaggaatttgccttttatagccatcagtggtcctgatgcagatggtgatctacagactgcagtttgaaagctttctgagagaaatttattaataatag

SEQ ID NO: 674042 - DNA, 659 bp, Homo sapiens
gagaaaaatcaaagaagaggctgggcgcagtggctcacacctgtaatcccagcactttgggaggccgaggcgggtggatcacgaggtcaagagatcaagaccatcctggccaacactgtgcaaccccatctttactaaaactacaaaaattagctgggcatggtggctcrtacctgtagtcccagctactcaggaggctgaggcaggagaatcacttgaacctgggaggtggagattgcagtgagatgagatcactccactgcactccagcctggtgatggagcaagactccatctcaaaaaaaaaaaaaaaaaaaaaaatcaaagaagaaaagttgaagaactgcaattaatttaccaaatgtagagaaacaaaagacagctgtgtaatctggaagaaagcatagtctagagactcagtgtttcccattcgctttaaagagtgggcaaggaggaataagcttgcaatccagggaattttaatttgattttaaggagtggaatttgtcataaaaatggcctcatagcagagattgtgattcagtagatcttgagcagaacccaggaatttgccttttatagccatcagtggtcctgatgcagatggtgatctacagactgcagtttgaaagctttctgagagaaatttattaataatag

SEQ ID NO: 674043 - DNA, 659 bp, Homo sapiens
gagaaaaatcaaagaagaggctgggcgcagtggctcacacctgtaatcccagcactttgggaggccgaggcgggtggatcacgaggtcaagagatcaagaccatcctggccaacactgtgcaaccccatctttactaaaactacaaaaattagctgggcatggtggctcatacctgtagtcccagctactcaggaggctgaggcaggagaatcacttgaaccygggaggtggagattgcagtgagatgagatcactccactgcactccagcctggtgatggagcaagactccatctcaaaaaaaaaaaaaaaaaaaaaaatcaaagaagaaaagttgaagaactgcaattaatttaccaaatgtagagaaacaaaagacagctgtgtaatctggaagaaagcatagtctagagactcagtgtttcccattcgctttaaagagtgggcaaggaggaataagcttgcaatccagggaattttaatttgattttaaggagtggaatttgtcataaaaatggcctcatagcagagattgtgattcagtagatcttgagcagaacccaggaatttgccttttatagccatcagtggtcctgatgcagatggtgatctacagactgcagtttgaaagctttctgagagaaatttattaataatag

SEQ ID NO: 674044 - DNA, 659 bp, Homo sapiens
gagaaaaatcaaagaagaggctgggcgcagtggctcacacctgtaatcccagcactttgggaggccgaggcgggtggatcacgaggtcaagagatcaagaccatcctggccaacactgtgcaaccccatctttactaaaactacaaaaattagctgggcatggtggctcatacctgtagtcccagctactcaggaggctgaggcaggagaatcacttgaacctgggaggtggagattgcagtgagatgagatcackccactgcactccagcctggtgatggagcaagactccatctcaaaaaaaaaaaaaaaaaaaaaaatcaaagaagaaaagttgaagaactgcaattaatttaccaaatgtagagaaacaaaagacagctgtgtaatctggaagaaagcatagtctagagactcagtgtttcccattcgctttaaagagtgggcaaggaggaataagcttgcaatccagggaattttaatttgattttaaggagtggaatttgtcataaaaatggcctcatagcagagattgtgattcagtagatcttgagcagaacccaggaatttgccttttatagccatcagtggtcctgatgcagatggtgatctacagactgcagtttgaaagctttctgagagaaatttattaataatag

SEQ ID NO: 674045 - DNA, 1097 bp, Homo sapiens
cacttaaatattctctcacaccctaaaaacaaatgacaacttaaaaaatctaactttcacttcatgtttaaataagactgccaagacatgactcaaatgagactctyggagaatactttgcattcacttcaaaacttgatcaattgcattctataaatcatctgacctgcacctagccattttcctgctctacccctgctctctgcctagaatactgcttttctctttccttgcttcagcaagctcgactccatctaccctcttggatctctttgtcggcagccacaccaaaaaatgtatttttatacactaattagttgaattcaccactgcttacaagatgctaattcctgcagagtattcccctcatgagaaagtatgcctctccataagagtaagggagggcccttactcttcctacctccagctgctgagcatagaattttgagtaaatccaaaacttcgacaagtgtttgacaattcagttatcatttggaaggtaagtcttactacatttaattacagcaaaaacactactaacagtttactctttataggtattatttaaggtagtcacaaaatagaaacaaataatctaacgtcagtcagcataaatgagagtatgaaattttacaatatttaacaagaaatggaaggggttacttagtagttttaaggtttaatgacaaaaactagaaaataatcgtacctagtaatttagtaagtcaaaaccaaagccttaccatcaaaggtgcagtacccattggatgcggatgcccacgcactgacttctgctgtacctgctgcctctcattttaacccattaaaaatactaaagttgttttccttgtagacatctttcacctccttggttaggtctattccgaagtattttattttattttagtttatttttgcagctatcagaaaaggggttgagttcttggtttgattctaagcttggtcgcttctggggtataacagagctactgatttgtgtacattaattttgtctcctgaaactttgctgaattcatttatcggttctaggagctttttggaggagtctttagggtttcctaggtatatgatcatat

SEQ ID NO: 674046 - DNA, 1097 bp, Homo sapiens
cacttaaatattctctcacaccctaaaaacaaatgacaacttaaaaaatctaactttcacttcatgtttaaataagactgccaagacatgactcaaatgagactctcggagaatactttgcattcacttcaaaacttgatcaattgcattctataaatcatctgacctgcacctagccattttcctgctctacccctgctctctgcctagaatactgcttttctctttccttgcttcagcaagctcgactccatctaccctcttggatctctttgtcggcagccacaccaaaaaatgtatttttatacactaattagttgaattcaccactgcttacaagatgctaattsctgcagagtattcccctcatgagaaagtatgcctctccataagagtaagggagggcccttactcttcctacctccagctgctgagcatagaattttgagtaaatccaaaacttcgacaagtgtttgacaattcagttatcatttggaaggtaagtcttactacatttaattacagcaaaaacactactaacagtttactctttataggtattatttaaggtagtcacaaaatagaaacaaataatctaacgtcagtcagcataaatgagagtatgaaattttacaatatttaacaagaaatggaaggggttacttagtagttttaaggtttaatgacaaaaactagaaaataatcgtacctagtaatttagtaagtcaaaaccaaagccttaccatcaaaggtgcagtacccattggatgcggatgcccacgcactgacttctgctgtacctgctgcctctcattttaacccattaaaaatactaaagttgttttccttgtagacatctttcacctccttggttaggtctattccgaagtattttattttattttagtttatttttgcagctatcagaaaaggggttgagttcttggtttgattctaagcttggtcgcttctggggtataacagagctactgatttgtgtacattaattttgtctcctgaaactttgctgaattcatttatcggttctaggagctttttggaggagtctttagggtttcctaggtatatgatcatat

SEQ ID NO: 674047 - DNA, 1097 bp, Homo sapiens
cacttaaatattctctcacaccctaaaaacaaatgacaacttaaaaaatctaactttcacttcatgtttaaataagactgccaagacatgactcaaatgagactctcggagaatactttgcattcacttcaaaacttgatcaattgcattctataaatcatctgacctgcacctagccattttcctgctctacccctgctctctgcctagaatactgcttttctctttccttgcttcagcaagctcgactccatctaccctcttggatctctttgtcggcagccacaccaaaaaatgtatttttatacactaattagttgaattcaccactgcttacaagatgctaattcctgcagagtattcccctcatgagaaagtatgcctctccataagagtaagggagggcccttactcttcctacctccagctgctgagcatagaattttgagtaaatccaaaacttcgacaagtgtttgacaattcagtyatcatttggaaggtaagtcttactacatttaattacagcaaaaacactactaacagtttactctttataggtattatttaaggtagtcacaaaatagaaacaaataatctaacgtcagtcagcataaatgagagtatgaaattttacaatatttaacaagaaatggaaggggttacttagtagttttaaggtttaatgacaaaaactagaaaataatcgtacctagtaatttagtaagtcaaaaccaaagccttaccatcaaaggtgcagtacccattggatgcggatgcccacgcactgacttctgctgtacctgctgcctctcattttaacccattaaaaatactaaagttgttttccttgtagacatctttcacctccttggttaggtctattccgaagtattttattttattttagtttatttttgcagctatcagaaaaggggttgagttcttggtttgattctaagcttggtcgcttctggggtataacagagctactgatttgtgtacattaattttgtctcctgaaactttgctgaattcatttatcggttctaggagctttttggaggagtctttagggtttcctaggtatatgatcatat

SEQ ID NO: 674048 - DNA, 1308 bp, Homo sapiens
taataataactacttatgagcataccttttaaattttggtgaagtctaatttttcacgttttaaagggttagtgctttttgtgttctraacaaacaatatttatctattgaagatcttgaagatactatcttattttcatcaaaaacttcatagtggttgacttaagaatgtaattttgaagatgtctttaaggagcctgcagactttattaattgttttagctccatatagcttctgggttggagattattttttcttcagaatttttgaaacattacaacattatcttcgggctttcattgttgtagtcgatactctcctgaatcctgatcctttcacttataaaatattttttattcctgatgttctaaaattttgtgatgtcatatcttgaatttaggccttttgttatttatccctattgaagttgttgttgttactgtttttaaacctatttttacaagctctatatatacaaaggtttttaaccttttgtcatatacattgccattttttaaaacccaatgtattacttgtccctggaggttatgtgtttgccacacagacattttaaatttttatgtaattacatttcttagtggtttgttatgtaggtttcgcttttccttaagaatgacgggcagggcgcggtggctcaggcctgtaatcccagcactttgggaggccgaggcgggcagatcacaaggtcaagaggtcgagaccatcctggctaacacggtgaaaccccgtctctactaaaaatacaaaaaattagccgagcgtggtggcgggcgcctgtagttcccagctcctcgggaggctgaggcaggagaatggcgtgaacccgggaggcggagcttgcagtgagccgagattgcaccactgcactccagcctgggtgacaaagcgagactccctctcaaaaaaaaaaaaaaaagactcccaggtctgaacttatgcaagcattctcctaacattttctattttcattgcttaatttctgagtatgtatttaaaactttagtttgtctggaatttatgttggtatacaaaggatatgtggctgtaattttactattattattgatcccagaaggataatgagcaaaatgtattaagcaaatattttccctaaagaaatttgcctcttatttcaaaaattaatctttttttgctactgatttggtttgttttctttgtgatacatttaatttttataggttttggattattttattctactggtctttctattcttgccaccaaaaacatatttaataattgtcattcgtaatatttagtttacc

SEQ ID NO: 674049 - DNA, 610 bp, Homo sapiens
tctactgaaaatacaaaaaattagccagctgtggtgggcatgcgcctgtaatcctagstactcgggagtctgaggcaggagaatcttttgaactcaggagacggaggttgcagtgagctgagatcgtgccattgcactccagcctggggaaagagcaagactccgtctcaaaacaaaacaaaacaaaaaaacccccagatctctagtgcataatgggttatattatgcagttacacctcccttggaagttgggagagaaaaagagaagattgtctcctatttttactttacttcaataagaagcaacattaaagtagaagccttcacagacaaagctatattttctcatagatcataacttttggttaatatagatgtcactgactgactgtgacatcaactatttgaaagacaacattttaagtggcatgggttgatacaccacttatcaaatcaaatattacttcagtggaagtaatatttgcgctgtattttaaagataatttggaaagcaatacctatatgaaaatcttattgtatctgcttttcaaagtttcctattttgtccaaatgagaaaactttggttctgtgttagataacagtgcaaag

SEQ ID NO: 674050 - DNA, 610 bp, Homo sapiens
tctactgaaaatacaaaaaattagccagctgtggtgggcatgcgcctgtaatcctaggtactcgggagtctgaggcaggagaatcttttgaactcaggagacggaggttgcagtgagctgagatcgtgccattgcactccagcctggggaaagagcaagactccgtctcaaaacaaaacaaaacaaaaaaacccccagatctctagtgcataatgggttatattatgcagttacacctcccttggaagttgggagagaaaaagagaagattgtctcctatttttactttacttcaataagaagcaacattaaagtagaagccttcacagacaaagctatattttctcatagatcataacttttggttaatatagatgtcactgactgactgtgacatcaactatttgaaagacaacattttaagtggcatgggttgatacaccacttatcaaatcaaatattacttcagtggaagtaatatttgcgctgtawtttaaagataatttggaaagcaatacctatatgaaaatcttattgtatctgcttttcaaagtttcctattttgtccaaatgagaaaactttggttctgtgttagataacagtgcaaag

SEQ ID NO: 674051 - DNA, 661 bp, Homo sapiens
atgtttccaaaacagatgcagccgattgattaatggcattccccactaaaagtcagaaatgtcagaaacacgcgtagaagccagtgtcattctggactagaacaatagatacggctgagaaacagggacccacgccaagtattcttgaggctaggagttcatgtgtcactcttctgctaagagacaggtatatataagggcagggaaagcaggagtttgtgggtggggggtgggttggggatggctaggcatgtgctaataataggatgggtcacatgacgcctaagtcacctcaaaagaagcttagttggtgaaggtgaattaaagtgctcggaattaaggacatttcttcaaatattccctgacgtgtaaaaatagactgaaggaactaacatgtgtgatgaagagagaattgtgagtttagactgacctctgttcagagggcttttgtgatttgctaggggatagttaagagcaggaccagctayataatttgtagggcctaatgcaaagtgaaaatgtggggccctttattccaaaaatataaggtattttaagatggcaactgcagagcattaaagtgtgggcccttctgaacacaagccctaggtgactgtgcaggtaccataccctgaagtcggtgctggttaggagaacgtga

SEQ ID NO: 674052 - DNA, 2412 bp, Homo sapiens
tcaccactggactgtaagttccttgagggcagggctatgcctttttcattttcatatcaacagcaggacccaagcctctgaatctagtgccctattcattttgccatgctgctagctggccagcctcacatggcttcctcaagcctgtagcaaacatcaggaaaaaaagatttggaatcagcgcagaatttcttaaaccttcttcccaaccttctgattctgagcctataaattttgggttttctcttatctctgccataattagctcatcttgggaaaatgaataaatctttctagtttgcatcggttttctcataagttaaataaacataaacaaacttccccaagtatttttcatagggatgttataaatattagccagacgtttaataagcatctgttaacacctattatgtaaaacccagtgtaaaattttatccaaaggaaagaaagatgaaaaagacatagtcactgctcccaagtaatttatcatcaaatagataggaaactatatatatacccaaattaaatagtaaaatrtagaatgtactaagaatcataagagaagtacaaattatgagctgtagaagtgtgaagaagggaattatataaatattgtttacatcttttgttatattttagaaagcaagattttttccccctgaaactaaaattatgtcaaagtattttgcaataagattctgctcaagaatatgaaatactttattcacaggaggcctgagattgttgaaggagattgtctacctcccaagaataccaagaggaaaggggatcagttaagagcatttactgggctgagtttccaggagactgaatgttctggagcaagttgtctttaggggcatcagaaaagcttctctcagaattaggcagggagccccaggatgcctcgtccacagaggccagctgtggtcctcagcaccatccaagtgggtgctcaaaccatagccatggcaccagagtagaaagccttccctgtgggcacctcccaccccaacacacacacacagagcatccacatttgagaaactcctatttaaataaactgaatagacttttatattatagaatttcttggattctttgatatagtgatgtgttttagaaattttgaagagaaaataagcatttcccaaacttgctagactataaatttttatatttttccaaagcatttcatggagcttatgttgcacaaaatattttagaaaatgctgaatttaaaaaaaaattaaaacttaccagttaaatctcatgtacgtttgcatatttaaaagcattcaaatcttgagaggggcatttggagacaatggaccctccctgcctgtatcttactgattcataggaggaaagaggaaaagggctcacagggagaatgaatggctgatttctaaatctcaaatgtctttcctggctttattatatttttccctcttacaaatgccaataatgatgaaaacagatgatggactaatctgatccaattgcattactgggatccaggctggttttgaacaatttgagaaaaacacacactgcccagactttacctcttcaggaaagatgtctttgtttttaaagctctctgtgaattttcagacagctaagatatgaaccatgaatgtcaactagaattctctggggatccagttcttatctcattctgttgcttctcacttacttggaagacctgaaccaaatgcaaggtttgaatgtgctatgcatttggacacatcagtcaaggatatcttagaaattcactatatccccattcaactgacatatatagagaaccatctatgactcagcattgctccagagggacagaaagatggtcttacccgctatgaagataggcagatatacaagtgcacagtcagctagctatgttaagagctcagatctgcctctgattccctgcaacatcagagatttgccatccttataaaaacaaaaaattagcttgtgacccttttataacatgtatagccacttttgtgagccaccacacatcctgcttccgacttctttacaattgtccatgcctctcacccactggcctgtcttccctttctcagtcctgccttactgcctagacctaaataagaatctcagcaaaccagctctggctctttgcttctcttagtcacaatctgaaccatccctctggttctgctgttctctcacctgtacttcctgcacctgctgactttgattggcccctctatgcaccctcttgccctcctgctcctaccctacagagaatcctggggattgatggccgtccctcccaccatacagagctgcagttagccctaattgtgagggttgattggcaaacagcctgtgaatggctgcactgttggcctcctccacccccaccagcggcag

SEQ ID NO: 674053 - DNA, 614 bp, Homo sapiens
gagaaaaataagcagcataaaagggaaagataatctactggtatgaaaatgactatttgaatgagcattttctccttcttcttggaaatcatcccaaaactttaaaatcccacaaattacatttttggtgaggataacaataacaacaagtgctaacatctatataacattagcgtgccaaatactgtttctggaaatttgcacacattaagtcagttggcctacactatgtggtagaaacaactacaatatctatttttctggtgacattattgaggcacaagaaattaagtaatttacataaggtcacagagataacgaattgagaggtaggtctaaaactaggatagtttgattataaagttcaaagtcttaaccactatacactgttatcatctgccaaggcagacagagtatgcatattctaaaatatgtgtaaagtctagtcaaagcagattaaatcaggcagaagataaagttaaaacaaaraaatgaagagaaggatgataggactcaggaagggcatatctcagaaagcaccaatgaaattatacttgtggaaagtaaggagtgcatgctgaaatgcaaaatatgtctgtaatttgcaataatta

SEQ ID NO: 674054 - DNA, 539 bp, Homo sapiens
acaggcacacaccagcgtacccagctaagtttcgcttgtttgttttcagactttcaccatgttgcccaggttggttttgaactcctggactcaagcaatccaacagcctcagcctcctaaagtgctggaattacagscctggcttttgtaacagtttaaaaaagcctataaaaattaacaaatcttagaaattctgcttcttggaacttatcctaataaaaagaataactttaaaagtctagatacaagcatgtttatttcagaatatttcataatagtaaaagactcaattcagtaaacctataaacatgagtgattaggtaagttatggtaaagttaaaaaatggaatactgtgtagccattaaaaagctatattgtacattaatttgtcacagaaaagtgtttattatatattaagtaaaatggattataaaatagacgtttattatcagtttctactggctcttttttaaagtataaatgtatgtttttaaaaacctggtagagtggggcatggtggcttacacctgtaatctca

SEQ ID NO: 674055 - DNA, 640 bp, Homo sapiens
ttttttttcagcctactctaattactccttgtctatgttactgttcctatttgtacagagctcagactaccctatcatgtgttcctgctttttcatttctttttttttttgagatggagtctcactctgtcacccagactggagggcagtggtgtgatctcagttcacagcaacctccacctcccaggttcaggggatcctccacctcagcctcccaagtagctgggattacaggcctgtgccaccacgctcggctaatttttatatttttaatagagatggggtttcaccacattggccaggctagtctcaaactcctgacctcaagtgatccatctgccttggcctcccaaagttctggattgcaggtatgagccgtcgtacctgccccatgtgttcttttttatagtctattcrttatatacatgatatatttacttccccaattgtggtgtaagcatttttagaggatgcttacaccacaactggggaagtaaatatatcacgttcctattctatttgtatattgctttacaaagacattcagataacatatgcttgataatgaatacataaataaatgtatattatttacatttagcatcttctcttccctcagtctttgtgtatcctgaagaca

SEQ ID NO: 674056 - DNA, 1013 bp, Homo sapiens
gtttaaacatatgtaatcatactggaattaacaatttctatttgaagcttctaaggacacttgtgataattaatttttgcattaacttgactgggccatgagatgcccaggtatttggttaaacgttatttttgtgtgggcctgtgaatatgtttcagggtaagatcgacatttaaatcagtaaactgagcaaagaagactgccctctccaatgtggataagccccattcaattttttgaatgatcttttgaaggcctgagtagaatcaaaagctaagcaagaaagaattctttctctctgcttgactgtcttcaagctgggatgtgggtctcctcttgccttcaagctcagagttggactggaagtatcccattagctttctggggttattcagactaatacaacactaaaaagacaatcatacaacttaattatctgcaaaatttctaccaatggtaaaaactttaataactatgtcttcattgtttataagtgcataagcaaacctcaaactgaaaatgagtaaaactaatttggaaccacaggcattaactctaaatgaaaaattctaaatagtgaaaaagagaaattcattatttactttgcattaaacatgaagttttatttttttagctaattgcagcaaaaataatttatcacaaatatttaaaacactgcccccatataaggtaaataaagtagaagttgaatttgcttggtttcataatatgaacataaaataaattttaacatttcccattaaccctgacagttagcaacctaacagcttcctgcrtcttacagctcccagcaaaggccatggtacaattggttagtacagcagatggctggcagaggcagcagtatcaaagaattattactagttactcatatttgagcatacttcagtgatgacgctgtattgacagagaagtgttgtcaccttggaactgtatttacatagtttagaaatttaaagtgaagatcagccaaacctatcgacttatttaaa

SEQ ID NO: 674057 - DNA, 629 bp, Homo sapiens
gaaatgaaactcttttttgccaaagcatggatgagggtgtctattttgttctcaaaactcttctggtggaaccaggaaagactcaatacctgaacatccaccaggtgctcagtaaataaatcaatatgttgtggattgattacttgtcattcaggagtctcagagtggtcctggaccacgatccaggttgctatgtgagaactccgggtcaaggtttctgcaactcagctttggtctgtcgcctgggttcattcatttcctctcgtccacayagtaacacaacctgctgcttttccgcctccttgcactcccctgggctctccctgctcttattcccatagcattttactgtccaaaagagccacctgtcattgacacacttggagattctatcgtgagctcattatgacaaatggcctcgaaagagactgaagaccaggcagagtaagcccaggcttctagagttgtgtttttccatcttgcatccttgtagtcacagggggtatgttatgctatatgaagaagaagattgaagtcagacaagtcctaggtgcttttacctttaccacatctcttcctgggtgttctgatacagaactttaattttcaatatcatctacatggtgatg

SEQ ID NO: 674058 - DNA, 611 bp, Homo sapiens
aaaaatacttaaaaattgaaattattaatttgggcattgtttcattagctcttattagtctcttgtgttaacataaattacttgctgtcccatctagttatataaacttgtaaagggacaaaattcctaagtatgaggagttccttacaaaggaaattgagtccaaattatttttaaatgccaataaaagtggttagcacattcacaggaaaagtagtggactatgaagctaagggtaagcaattgggagatgggagtttaaaccacagagcattttaatcttttatgcattattaatggattgaagtagacatgggcctgaggtcttttgggtrctgtttacaaatcaacagggaccaccagctgacagttaaaggaaaagcaacagttacaagttaaagaaatgtgtactgctaaatgtgaactgctacttttttctaagtagtttgctatatctagggatcataaagctgttggaagatgaccttttgataaatggcaacacttcttgtatacctcggtcctccagagcacaaacctgtggcagatacataccggtccagccttaaccttaccagttaaaagtttgaggaatttatgatgaggtaaag

SEQ ID NO: 674059 - DNA, 575 bp, Homo sapiens
ttttttgtttgttttttttttttttgagacagaatctcgctctgctgcccagactggagtgcagtggcatgatctcggctcactgcaagctctgcctcctgggttcacgccattctcctgcctcagcctcccaagtagctgggactacaggcgctcgccagcacgcctggctaattttttgtattttttgtagagacagggtttcaccgttttagccaggatggcctcgatctcctgacctcaggtgatccaccggcctcagcctcccaaartgctgggattacaggcacgagccaccatgcccagccaatattctgttatttaaaaaaaattattggattactcaatatagaaatctaaagaaagtaaaaaaaaacttaaaaattgtttatcctcctgctcagaaataattcagttaacgtatggtgtatagtctcccagtcatttatctatgcacatgtatatgtttttctcctatcaaatgatatctaggttgtttccattaatatttttaaaatgctgacctggtaccagcagcatgatgggctgagttaatatagtctccttcccaaatc

SEQ ID NO: 674060 - DNA, 575 bp, Homo sapiens
ttttttgtttgttttttttttttttgagacagaatctcgctctgctgcccagactggagtgcagtggcatgatctcggctcactgcaagctctgcctcctgggttcacgccattctcctgcctcagcctcccaagtagctgggactacaggcgctcgccagcacgcctggctaattttttgtattttttgtagagacagggtttcaccgttttagccaggatggcctcgatctcctgacctcaggtgatccaccggcctcagcctcccaaagtgctgggattacaggcacgagccaccatgcccagccaatattctgttatttaaaaaaaattattggattactcaatatagaaatctaaagaaagtaaaaaaaaamttaaaaattgtttatcctcctgctcagaaataattcagttaacgtatggtgtatagtctcccagtcatttatctatgcacatgtatatgtttttctcctatcaaatgatatctaggttgtttccattaatatttttaaaatgctgacctggtaccagcagcatgatgggctgagttaatatagtctccttcccaaatc

SEQ ID NO: 674061 - DNA, 575 bp, Homo sapiens
ttttttgtttgttttttttttttttgagacagaatctcgctctgctgcccagactggagtgcagtggcatgatctcggctcactgcaagctctgcctcctgggttcacgccattctcctgcctcagcctcccaagtagctgggactacaggcgctcgccagcacgcctggctaattttttgtattttttgtagagacagggtttcaccgttttagccaggatggcctcgatctcctgacctcaggtgatccaccggcctcagcctcccaaagtgctgggattacaggcacgagccaccatgcccagccaatattctgttatttaaaaaaaattattggattactcaatatagaaatctaaagaaagtaaaaaaaaacttaaaaattgtttatcctcctgctcagaaataattcagttaacgtatggtgtatagtctcccagtcatttatctatgcacatgtatatgtttttctcctatcaaatgatatctaggttgtttccattaatatttttaaaatgctgacctggtaccagcagcatgatgggctgagttaatayagtctccttcccaaatc

SEQ ID NO: 674062 - DNA, 635 bp, Homo sapiens
ggcaaagcaaggcctttttcatccattcaaaatccataaactagaaaggaaaaggttaataaaatgaattcgttaaaaaatcataaacttctgtctgrcacaaagaagtcatgagtaaaaacaatcctatggttaatatcctcatccagtagttctcttagaatagtcctaaaagtgcttttgtggttcaaagagtaatatcttgagattttttgtgcatgttgtcaaattaccctttagaatgcctgttgcttttaaaataatttttcattttagcattttattgtttatccaattatggactgttttacatactcagtagacaacacaaagcctcacagttaccctgttctttttcttttaggcatcaggtatgtgaaaaagaagagatcaaggctttgaaaacattaagtattttttaccaagctgggaattccaaagctgggaagccaattttttatgttgcaaggaggtacgaaatactatgttttggtgtctcttaacagaattttttaaatgatagtaaatatagagagatggcaagtttggtttttcctgtttgacttaacaggaatcgaagacaagtttacctgggagcatatagtggggtaaatagcctgcctttcctaaaatga

SEQ ID NO: 674063 - DNA, 635 bp, Homo sapiens
ggcaaagcaaggcctttttcatccattcaaaatccataaactagaaaggaaaaggttaataaaatgaattcgttaaaaaatcataaacttctgtctgacacaaagaagtcatgagtaaaaacaatcctatggttaatatcctcatccagtagttctcttagaatagtcctaaaagtgcttttgtggttcaaagagtaatatcttgagattttttgtgcatgttgtcaaattaccctttagaatgcctgttgcttttaaaataatttttcattttagcattttattgtttatccaattatggactgttttacatactcagtagacaacacaaagcctcacagttaccctgttctttttcttttaggcatcaggtatgtgaaaaagaagagatcaaggctttgaaaacattaagtattttttaccaagctgggaattccaaagctgggaagccaattttttatgttgcaaggaggtacgaaatactatgttttggtgtctcttaacagaattttttaaatgatagtaaatatagagagatggcaagtttggtttttcctgtttgacttaacaggaatygaagacaagtttacctgggagcatatagtggggtaaatagcctgcctttcctaaaatga

SEQ ID NO: 674064 - DNA, 1025 bp, Homo sapiens
tgaagaaagctgcagggtttcaaagcttttgagtaatataaaatacattagactaacacaagctatcaacatgacagggaatgtttgatttacactcaggactatgttatagcatcgtggaatttttttcttttccttttcctttttcttttcttttctttttttttctttttgcagccatttacaataaatgacagaacagttggacaatctgcaacttgctgattgcaaaaaatgtatcacaatgtttggaatggtgcagtggcagctaggggagctctggggaaatggtgtccttggagcagggctgggacaagagccgtgggcctggcttcctgaggacagtgaacaaatagccttcccctgggtagatcagcccaaawggtaaacccacttctctttgctcttctccttgcgtgttgcagatcccaacaactgagattctttctgccagtcatattcaccaggttagtggttagctattggctctgtttgggtagccaaagtctcaatcagttaactatttttaggatcaaaataataattagtttgttttcagttacttcgtctctccttcaaaaataagcaaatgagtgattacacggaaaagccagcctaaaacaaaagaacaattttgtccaagccctgccagcctgcagtcaacactgtcctcttgccagcccctctcctggccagtgccgtcggcagtcaacgttccagatttgggagcctggcacgtgtgcctcttttgtttgaaataaagtgatcagtcaccactctggccaaatgcagcataattgatggtgtgagtggatggagaaaattttctgtcagaaaaaaggttaactgtggacatattacagccagggtctctgattccagtataatggcatttggacaaaagtagggcccgtcctttttatagcactttatgccccattagtattactgcaagtcccaggacctgcctgttcgggcacttaatcaaaagcaatgggttgaaaatcatgtcccagatctcctca

SEQ ID NO: 674065 - DNA, 1025 bp, Homo sapiens
tgaagaaagctgcagggtttcaaagcttttgagtaatataaaatacattagactaacacaagctatcaacatgacagggaatgtttgatttacactcaggactatgttatagcatcgtggaatttttttcttttccttttcctttttcttttcttttctttttttttctttttgcagccatttacaataaatgacagaacagttggacaatctgcaacttgctgattgcaaaaaatgtatcacaatgtttggaatggtgcagtggcagctaggggagctctggggaaatggtgtccttggagcagggctgggacaagagccgtgggcctggcttcctgaggacagtgaacaaatagccttcccctgggtagatcagcccaaaaggtaaacccacttctctttgctcttctccttgcgtgttgcagatcccaacaactgagattctttctgccagtcatattcaccaggttagtggttagctattggctctgtttgggtagccaaagtctcaatcagttaactatttttaggatcaaaataataattagtttgttttcagttacttcgtctctccttcaaaaataagcaaatgagtgattacacggaaaagccagcctaaaacaaaagaacaattttgtccaagccctgccagcctgcagtcaacactgtcctcttgccagcccctctcctggccagtgccgtcggcagtcaacgttccagatttgggagcctggcacgtgtgcctcttttgtttgaaataaagtgatcagtcaccactctggccaaatgcagcataattgatggtgtgagtggatggagaaaatttyctgtcagaaaaaaggttaactgtggacatattacagccagggtctctgattccagtataatggcatttggacaaaagtagggcccgtcctttttatagcactttatgccccattagtattactgcaagtcccaggacctgcctgttcgggcacttaatcaaaagcaatgggttgaaaatcatgtcccagatctcctca

SEQ ID NO: 674066 - DNA, 582 bp, Homo sapiens
tatatatttttttcataaagatttgtgaagaaagttcacaaaccttcttcatactttatacttccttcacaataggagctccattatgtaggaatttgtactggctaatccaagcacctagcttctagcttgtggaagcagaggcgcatccaagcaacaaaatgttgggaaagaaaggttatgaccactaagatagtatatcaaatagttttcagatgaaaccaataaaaatcagatttagacaagaaggctgaagaccagactgaagagattttgagttttgagtgatggatgttaatggattctgttcccaatggagcaatacgctggcctcactgttctagggaacaaatacggtcatttatcaaatctgtcccttccccaaataaagtgactcatctgtgtaacattttaacctaaagaactctgctgtgagaccccctccagaatggtgcaaaagtcaacagttgaagctgttgggcatgatgaaatggggcctggctctaaaracccccactagcaacacagagtagtgaaggcagtgaccgtctcactgtgtgagcacagggaacctgctctagg

SEQ ID NO: 674067 - DNA, 660 bp, Homo sapiens
cctgaactttttgattatttaagccaataaattccttcttttgcttaacccagtttgatttgaggttcttgttaattgcagcaaagtcctaaccaaacacttaaaacagcaaacctctgaaagttgctttaaggcttgattttgagagcccattggctttttgggttttggcaaattagtgtagggtttatgccttcctgaccayatctttgacatttttgtcattctctgatgtccttttgtgatcacgagtccctttttatatgcgttctaggattttaaatatctaagcaaacccctagcctggatccaggatttctttcattttaaaatgtctttttttcatgataaaagtatttcattgtaccacacatctaaatttagaaatagagaaaaatgggaggaaagaattacccagtgatcttctacccaaacaaaactagtgaacatttcccaaaaattctttcccacactttcttattcccacatagatcattggattctactctataaatagtttgacatattgcttttaaatttttaaaaagttaatacatccatatgccataaaatttaaaagatagcacacattcttctgcatcttatatttaaaaacattttcaatcggcaaataagtacatatatttatggggtacaatg

SEQ ID NO: 674068 - DNA, 637 bp, Homo sapiens
gaaggcacagagagatatgcgattagggtcacacggttaaaaagtggcagagctgggacttaaacccgagtttgcctgctacaaattctgctgtcttagtgctggattctgttgccctgccagggagcataacctcgtgggtgtgagcaagcctcgatgagatcgcgcttgtgacgagaattctagaaggtgatacgttaacaaaaaatgaaggtcgaatagatcaataaagcaacactgggcctcacgtgtatcagtgagaatgctttcagctgcaaggwacaggaaccctgattcaaaatggataaacaataaggaaaggtatcctgtaaccaagaaggctggaagcagggggattccagggttggtgaatttagcagcttgaggatatcaggacccaagtttctttgcatttggtcccgctgtcatttttattattttattattattattattttttttttttttttttttgagacggagtctcactctgtcacccaggctggagtgcagtggcgcaactttggctcactgcaacctccgcctcctgggttcaagtgattctcctgcctcagcctccctagtagctgggattacaggtgcccacaaccacgcctggctaatttttgtattttca

SEQ ID NO: 674069 - DNA, 637 bp, Homo sapiens
gaaggcacagagagatatgcgattagggtcacacggttaaaaagtggcagagctgggacttaaacccgagtttgcctgctacaaattctgctgtcttagtgctggattctgttgccctgccagggagcataacctcgtgggtgtgagcaagcctcgatgagatcgcgcttgtgacgagaattctagaaggtgatacgttaacaaaaaatgaaggtcgaatagatcaataaagcaacactgggcctcacgtgtatcagtgagaatgctttcagctgcaaggaacaggaaccctgattcaaaatggataaacaataaggaaaggtatcctgtaaccaagaaggctggaagcagggggattccagggttggtgaatttagcagcttgaggatatcaggacccaagtttctttgcatttggtcccgctgtcatttttattattttattattattattattwtttttttttttttttttgagacggagtctcactctgtcacccaggctggagtgcagtggcgcaactttggctcactgcaacctccgcctcctgggttcaagtgattctcctgcctcagcctccctagtagctgggattacaggtgcccacaaccacgcctggctaatttttgtattttca

SEQ ID NO: 674070 - DNA, 664 bp, Homo sapiens
aagtccaacttctactctgttttttcctagaatattcatgaatgcaaagaagagagaatagtacagtaatgaaatggaaacatttttcaaagccacaagtcataagatatggaaattcttattattatttaaaagttgctgaaaggaagcagctcgcctaatgtgcaaatttagtagttttaaaagtgtttttaaactgatattcaaattctaggagcatttatctaataaactaaatgcatcctaaagtacctggctcttcagatccactagtaattttcagaatggattttgaaatatagaattcttactaccacttgtctttgagagactcaaatttggatccttcctgagctgatgaaaacaattttctatttaaaaatattattttattcttaagataaagatatttgttagaacatgacatctctcatgttgtaactttaggagrgcaaaagggacctgaaaacttatgagtgtcagttagtgcttagactagggtatgaccctctgctctttgagtctattttagattctacatctaagtgtttgccaggtgttgtgggaagggggagattgggagatgtcggtaaagttttagttatgaagatctaatgtacacagcatggtgactatagtgaacaatattgtatcatatacttca

SEQ ID NO: 674071 - DNA, 664 bp, Homo sapiens
aagtccaacttctactctgttttttcctagaatattcatgaatgcaaagaagagagaatagtacagtaatgaaatggaaacatttttcaaagccacaagtcataagatatggaaattcttattattatttaaaagttgctgaaaggaagcagctcgcctaatgtgcaaatttagtagttttaaaagtgtttttaaactgatattcaaattctaggagcatttatctaataaactaaatgcatcctaaagtacctggctcttcagatccactagtaattttcagaatggattttgaaatatagaattcttactaccacttgtctttgagagactcaaatttggatccttcctgagctgatgaaaacaattttctatttaaaaatattattttattcttaagataaagatatttgttagaacatgacatctctcatgttgtaactttaggagagcaaaagggacctgaaaacttatgagtgtcagttagtgcttagactagggtatgaccctctgctctttgagtctattttagattctacatctaagtgtttgccaggtgttgtgggaagggggagattgggagrtgtcggtaaagttttagttatgaagatctaatgtacacagcatggtgactatagtgaacaatattgtatcatatacttca

SEQ ID NO: 674072 - DNA, 1244 bp, Homo sapiens
ctctgcacaagtaatatatctctttaattttcagctccttgtttttggaatttttggtcaccaaattccacagataaaactaaaatagataacagatctatatgtttaacagatccagaagacaggattcctcccatggtagtttgtgagatgacattgataagacacaaattgaaaatcaagtaacattgatagaaacagtaagaaagtcacttttattttttcaaatttttttctgatatgtcaaagataaagtcagataaagtccatttgaagttactgtggtattattttatttaccagtatctttttgtatgaaagagaatgaggaggcattggcagagggtcaagtatgtgtgagttcgtgtgtcttgcattgtatttattttcatagttccctttacttatagaaagtaacatgataataaggtaaaattttcttttaaaattagctttcagcagtctactttgggaaatatattttaatgtcattaatattaaatattaatttttttaaatagtgtcaggcttgtgagcattcaggaaatcattgcaggaataataatgactgttaccgaatatgcttgtccatgcaatcaaagcctttgacacttcattcaagaactctcttgtctgttacatcgaggatcatgtcaaatattcttaaagggaatcttctgttccagtaatttttgtgataatcccaccatatgttactattttggaaaacttgatagagagatgaaaatatcaaagtaggcatatgtttttatgaaagtttcagaaaagtatgtttattttgacttatgtctaaattagattcctaacagctgaatgaaatgtaaattagttgtttttgttgcagaagatagacattccataaaacatggtatcaatcgtcttaaaagtgctttattttggtctgtgaagtgatggccggcatgatcactcttacagctgataagaatgaacaccaaaaagtgttcagacactcaggacataacgtggaagtagtcaggtcrtgcatgtcctttcaatcttcagggtttttgtacctaccactctctctgaacagaaatctttctcttcttcctttctccttttttcctaacctgcatttctgaaaagctcttcaggtaatttggatcatcaggcaggtgggagtgactgatctagttcaaacttcttcatctataaaaaataaattagcacccacacaaagcctccctgatgccactatgtca

SEQ ID NO: 674073 - DNA, 550 bp, Homo sapiens
gtagatcgagaccagcctggccaagatggtgaaaccccatctctactaaaaatacaaaaatgaaatgaacccatccataggttacaaagcacaaagttaaactaggaccawtagctcctgaaaaaaaaaaaatgcccagatacgtttttggaaatggagaaagacctggaaaagaatgtgactaaattgttttgatcagtcctatcctataagacctagcaaaaaaaaaaaaaattgttttgaaagctgggtttcaaatgtgggacaattaagctatgtatttgtaaacatggctattgaaaagaatgtatgactttcctcccaattaaaataccatgcaaatgtgatgcaaatgtgtaaggctgagctttgtcagctaaaactaattaacagaacaactcaaatgatatcatttctaggtgaatttgtttgtgatcagaccattttctttttttttttttcagacagagtctagctctgtcgccaggctggagtgcagtggcgcagtctcagctcactgcaacctctgcctcccgggttcaagtgattc

SEQ ID NO: 674074 - DNA, 493 bp, Homo sapiens
aggaaataaaaataactttaagaaaaagtaaaagaaataaacaaaaaacaaaaacaaagaaaaaacaaaaataaagaaaattttaaaaattactttagtcttttttatttttttttttttgagacagagtctcactctgtcacccaggctgtgcagtgctgcaatctcgtctcactgcaacctccgcctcccaygttcaagcgattctcctgcctcagcctcccgagtagctgggattacaggcacccgccaccacgcctgactgatttttgtattttcagtagagacggggtttcaccatgttgaccaggctggtctcgaactcctgacctcaggtgatccacccacctcagcctcccaaagtgctaggattacaagcatgagccaccgcacccagcctgcagaaacagttctattaaccaaaagtaatatgttatagcatagaaacccagatatagcgaaagagtccaccccctctcatgtcgaggtgacc

SEQ ID NO: 674075 - DNA, 711 bp, Homo sapiens
caatctttggtatttatttctttccactaaatttggggttgggcttattctttcttttctagttccttgagatgcatcattaggttgtttagttaaagtctttctaatttttttatgtagacattcattgctataaatttgtctcttaataatgctttttctgtgtctcatacattttgagatgttgtgtcttattttcatttgtttcaaggatttttaaaattttatccttaattttctccttcatccattggtcattcaggagcatgtttaatttctatgtattagtatagtttaacatgttcctctattgttgatttccagttttagtccattgtgttcagattagatacttggtatgattttgattttttaaaaaaatttgtgatacttggattgtgtcctracatatagtcaatcctggaaaatattcattcctacttttcattggagtgtgtttttattagcaacataaaattggaagcagccatactgcagtagcaaatctaggcattttatttaccaagatatttgagttatagccctaagttttataaactcaaggtgaagtggagaagaaaagttataatttattgaatacttactatatactaggcactgtgctaagtaagcctgcgagtacacataactgcattgagacctcccagcacccctatgagtagttcttcttaacatccacattttacagat

SEQ ID NO: 674076 - DNA, 653 bp, Homo sapiens
gtattacytttgctcaacgatcaatttaccaaatgtatgtgggtctgtttctgggctgtctattctgtcccattgatctatttgtctgttctttcaccacattgcttaatcactgtagctttatagtaagtctttaagttgggtaacgtcagtcatctgatgtttttcttctctttaatgttgtgttgactattctgggtctttgcctttccatataaaaactcacattacaatcagtttcttcctaactacaaaataacttgctgagattttgattggaattgcattgaattcatagatccagttgggaagaactgctatcttaaaaatgctgtcttcctatgtatgaacactaaatattctgccatatttccattgtatacttttatggttttgtatttcgcatttaaatgtttgacacttttgaaatgtttccaaatggctatgcagttattccaacatcatttactgaactgtcctataatttgggttatcttctttatcatattccgaattaccatagtagttggacctatttctggattttctattttgtttcatgggcagcgctattcattcaccacaactaccttgctttagttattgaggctttatagtatgttttatacctggttaggctagccatttctttt

SEQ ID NO: 674077 - DNA, 666 bp, Homo sapiens
gactcgctgaaatgactataactatagtatcataaacataggcattttaaatggttcatttttagagaacatttgtcttacatttttaaagtgagttgtgtaatatgtctctggtcagccatttgactgggttgtcaatgtgttactagtattaatttattaaatttatttcttaaactattgctgagttcatagatttcctctacaaatgctatgtttgtggttggcacgaagaagaaaatacaatttcttccttgagaatatcactgtttaattgggacacaagaacagccatatgaacagattatgattgttmaaaatagaaaccaatttaaactaaatgaagacagcacagtacagcactaggtgtagattaaattactaagcaactaatttagacactgtgcctctgcagaaccctccatggaggagtcgaagcatatttcccattgaggttagtgttggtcacttgacctgctttgggaaaaggactgttaggagacatgacaggagcagaggctttaaatgagctgtgtgtttggcttggcctctcacacttttgccatctgtcctgaggagaatacgtctcaagtgcctgcagatccaaggtgaatgaagaaataggtagaatagatcgtgacccaacaagcaacctagagcacggcc

SEQ ID NO: 674078 - DNA, 666 bp, Homo sapiens
gactcgctgaaatgactataactatagtatcataaacataggcattttaaatggttcatttttagagaacatttgtcttacatttttaaagtgagttgtgtaatatgtctctggtcagccatttgactgggttgtcaatgtgttactagtattaatttattaaatttatttcttaaactattgctgagttcatagatttcctctacaaatgctatgtttgtggttggcacgaagaagaaaatacaatttcttccttgagaatatcactgtttaattgggacacaagaacagccatatgaacagattatgattgttaaaaatagaaaccartttaaactaaatgaagacagcacagtacagcactaggtgtagattaaattactaagcaactaatttagacactgtgcctctgcagaaccctccatggaggagtcgaagcatatttcccattgaggttagtgttggtcacttgacctgctttgggaaaaggactgttaggagacatgacaggagcagaggctttaaatgagctgtgtgtttggcttggcctctcacacttttgccatctgtcctgaggagaatacgtctcaagtgcctgcagatccaaggtgaatgaagaaataggtagaatagatcgtgacccaacaagcaacctagagcacggcc

SEQ ID NO: 674079 - DNA, 648 bp, Homo sapiens
taaatgagaatgttgaaaagtgtacaacagggacctggacctggaaaagctaaaagacacacaaattatactagtcaacaaatgtccaaaatggtggtacaatagtggtgggaagctgaagtttctaaatccagacggtattatgagacgcttccattattactttatttctgttctagaaatctattaatagaatatgtttggcctatcatgttaataatattataataaggccccatcagatacaattaaattaaagctataatatctccttgcacttgaagactcaatcaaggctttctgccctaacgatcttcctttatccttaaaataacactgtgaaatactcacagcaattcagttgcctacacttcagtgtttatgcatgatagacacgcatcagggagcayatctgacatgtgtgtccttctgcaccacatttccctctacaattgccattggatgggctcggaccctcaaacatggaatatgataccctagggcttgccactattctaaagtggtgttacaaatctcccaacaaataagctgcattcattggctacatagctctaacaatctctctgccattgcccgcatagaccacaagaaaaacttcagcaagttttccagaccttgataaatgga

SEQ ID NO: 674080 - DNA, 636 bp, Homo sapiens
tcttgctaccttccagctaatgcatatgaagtgatctttcttgttggttaggcttgaggcttctgtgggccaacttccacaacagacattaagatgggatcatgggaagggatggggagctggtacgaatcaaacctttcattctgagagagaaaaataaaaacctacgcagacgctcacatccatacaacacttgcatactggtacatacaacgtaaaatgagctcactggagccaaattgtttttgttttgttttgtttttttgagatagagtgtcactcttttgcccaggctggagtgcagaggcgcaatctgggttcactgcaacctctgcctcccggattcaagcaattctcctgcctcagcctccagagtagctgggattgcaggcacccaccaccacacctggctaatttttttttgtatttttagtagagaccgggattcgcagaacactgtacaggcagataagggagttggtcttacagaaggggtgaccaaaggtccacaaagcctagaagaatagtgacatcgttggagctcacggcccaatgtcccaagcaggcttctttacctgtgaatgcctcaaggacaggattacctttcaytcattgctacatctttagtaactagca

SEQ ID NO: 674081 - DNA, 814 bp, Homo sapiens
gaggctacataaaaaggggcaatggagartgcacaggaaagacacaggggaaggtcaagtcgagcaaggtagaaacaggagtagctagagccattgggaatccattttgaaacaagaaggagttttgaaagggaataggaaagtaagtgtcttgaagtaaaagataaatatggatggagaaagaagaaattctggatgatagagatgataaaaatatttattaagaaatgaagtcaggttcagtgtatgaaatggaaaggaatttttcagaattttaagaaaggggaagttcctcttggaaaagatatagcaaccatcggggaatgaccttttcatttcagaagtggatgaggaaggtggtgtgagcatcaggtatattctggaccatttcaagtgctggtgagaagaaaggaactctttgcctgaactgggcttggttttccaagtgctgctttggaaatgaagacccagagatgcagagcttatggtagttcataaatcttcatgttctattatctttcatctgccaataaagttcattttcaataatgtccaccattgctgtgcccagaataaccacaggcaaacatcaaaacaatacgcataagttagacaagattaaatcttgtctgatatctgcacaaacagatatgcaccatgttggaaacatgtgttttcctagtcccatccaggcttcccacaagaaagccatgatgtgggtctaaaccatatgttttgagtaaaggagaatagaagaaggggagtgtccgcaaaatggaaagagatgaagatgttccaaggaagtatgctgaaa

SEQ ID NO: 674082 - DNA, 814 bp, Homo sapiens
gaggctacataaaaaggggcaatggagaatgcacaggaaagacacaggggaaggtcaagtcgagcaaggtagaaacaggagtagctagagccattgggaatccattttgaaacaagaaggagttttgaaagggaataggaaagtaagtgtcttgaagtaaaagataaatatggatggagaaagaagaaattctggatgatagagatgataaaaatatttattaagaaatgaagtcaggttcagtgtatgaaatggaaaggaatttttcagaattttaagaaaggggaagttcctcttggaaaagatatagcaaccatyggggaatgaccttttcatttcagaagtggatgaggaaggtggtgtgagcatcaggtatattctggaccatttcaagtgctggtgagaagaaaggaactctttgcctgaactgggcttggttttccaagtgctgctttggaaatgaagacccagagatgcagagcttatggtagttcataaatcttcatgttctattatctttcatctgccaataaagttcattttcaataatgtccaccattgctgtgcccagaataaccacaggcaaacatcaaaacaatacgcataagttagacaagattaaatcttgtctgatatctgcacaaacagatatgcaccatgttggaaacatgtgttttcctagtcccatccaggcttcccacaagaaagccatgatgtgggtctaaaccatatgttttgagtaaaggagaatagaagaaggggagtgtccgcaaaatggaaagagatgaagatgttccaaggaagtatgctgaaa

SEQ ID NO: 674083 - DNA, 814 bp, Homo sapiens
gaggctacataaaaaggggcaatggagaatgcacaggaaagacacaggggaaggtcaagtcgagcaaggtagaaacaggagtagctagagccattgggaatccattttgaaacaagaaggagttttgaaagggaataggaaagtaagtgtcttgaagtaaaagataaatatggatggagaaagaagaaattctggatgatagagatgataaaaatatttattaagaaatgaagtcaggttcagtgtatgaaatggaaaggaatttttcagaattttaagaaaggggaagttcctcttggaaaagatatagcaaccatcggggaatgaccttttcatttcagaagtggatgaggaaggtggtgtgagcatcaggtatattctggaccatttcaagtgctggtgagaagaaaggaactctttgcctgaactgggcttggttttccaagtgctgctttggaaatgaagacccagagatgcagagcttatggtagttcataaatcttcatgttctattatctttcatctgccaataaagttcattttcaataatgtccaccattgctgtgcccagaataaccacaggcaaacatcaaaacaatacgcataagttagacaagattaaatcttgtctgatatctgcacaaacagatatgcaccatgttggaaacatgtgttttcctagtcccatccaggcttcccacaagaaagccatgatgtgggtctaaaccatatgttttgagtaaaggagaatagaagaaggggagtgtccgcaaaatggaaagagatgaagatgttccaaggaartatgctgaaa

SEQ ID NO: 674084 - DNA, 645 bp, Homo sapiens
catgggaaatagttaaaaatataatttctcagcccctactctagacctaccaaatcagaatctctgcctgtatgtcccagaaatctgcatcttaacaagacttccagataattctgaagcccaccaaagacagaggagctctgttctacatcaaactgtatcgatgacctacctcaatagtaaaaaacatttaagaatatgccctcgatttatgtgtacttatttccttagtctacgtacaagcagttctgtacttacatattatgatcagtacataaaaaattaaaacatgcaccaaaaaaatagaaattagcggatatttgctgttgtgtacaatgcacctctatatggagactggtccttgtgggtccctggttataattgcattgctccataaaaggattaaaaaygctgtagaaactccctttcccactgtgattaagtcttgataaattaagcagaattgccttcttatggacccattctatttcaaccagtggttgtttttttgtttttttttgcatcaagtactttccaaaatactcagtggaggcttcggtatcactgagactttcttttataaaagttaaggcagcaaagcctagggaaatccgacttcagagagaatttctgagggagctgctt

SEQ ID NO: 674085 - DNA, 1712 bp, Homo sapiens
atatattttgtagaaacaaggtctcgctgtgttgcccaggctggtctaaaactcctggccttaagtaatactcctgacttggcctcccaaagtgctgagattacacacataagccaccacacttggccctgagagccactgtatttaaaagaagagctagcagcagcattttatattacrtgcatatagaatacccatattcctccaaatattcttagggagctatagtacaatggttaactattcacccaagatttgtacttccttacatggtgtagcattgttactggaaagctcagccaagagctacaattcccagggtcccttcagttaggtgaggtattgtgacttcacctggacaatgtgagaaaataatgcttgtcacacgagagtgacagagaaaaagaagaagacttgaggactctagggaattacattggatgtgatcactggtaggtataacttatgggagaaagaaagactagggactgtctgagtacttgagagaactattttacccaaaagactagcactgatttttttaaaaaacgtatttcactgtttgaggctacagcaacccttggacttccaaatttgtataaagaagtaggttatgagagctatggagctccaaggtgggcacactgcctgacactcccttcagatgaggccatagaggatgatgaaaaagaaaacctgtcgaggctgtagagacagggccatggaggaaagggaccaagggcttctcccaagtggggatatttacaatgcctgcctggcaggatctcactttgttaggaaatggtgatcactgcttcttttcctttcttcccttctctgaaagggagttttaaaattgcagttattctgctcctgacacaacacctatgtgttttgtatttgggatgcggtgagggatagatgactcatgttgtggtttataggaaggtcagaatatgaggaggaatctcatttagaccctgatatggtttggctgtgtccccacccaaatatcatcttgatatgtaactcccacaattcccatgtatcatgggagaaacctggtgaatggtgattgaattatggggtcgggtctttcctgcactgttcttgtgatagtgaatgagcctcaggagatctgattgttttaaaaatgagagcccctgcacaaactctctccttgtctgccataatgtgagacatggctttcactttccaccatgattgtgaagcttccccagccacatggaactgtaagtccaacaaacctctttttttttggttttttttttttttttttttttgtaaattgcccagtctctggtgtgtctttatcagcagcgtgaaaacaaactaatacagacctgatggagaaactattcatgacctggagatcctagactgtgaggtagatgcttgaagggtagaacttagggctgtctctttttgggaaaagtaggcacagatatttggtggccagatataagaatagtgagggaaaaaggtagctgccttccagggttctgtgcttgtgcttcttagaggaaggatgttaccaggaagaggctgtcttacccaggactgcaattttcaggccccttgcaacaaggtggaaccccttaccaatggaatttgagtgtatgtaatctgagtcattttcgagccaaggtaattacgaagtagatgggccttctctactctctgccacttga

SEQ ID NO: 674086 - DNA, 858 bp, Homo sapiens
gaaagtgaggatgacctagagcccacatctgtcatttacctcctctacctatgatgaccttcccagggtatagggctgcctttggagacttctgttctgaccaaatctaaaacagaatcaaaaagcgaagaagccaaattgacccagtattaaaccactatgccaggaaaatggcttttttgttctcctaaaattgggccttttaacaaatgagatgactcccttatctgtccttaaattgtgttcactggagaaaaaagcacacttcacagatttgttgctctccactgggctggaattaagtcattttatccccaactctgatttttcattcagttgtctcccaccagctttgtgtaactgatccaagcaccaagcactagtagtctttggtccatctttggacaaacaaggagtctgtagcttttgtttctttggttgtctctgttcctagaagtcacattgtgaagatggacttgattgtgtctctgtttcttaagtaaagcctgatatagcgtgtaagccatttataggtgattctcaccttatcggtttatgttcagctgcacaaggacatcatgtgattattgtggtgtgagcactctagtagtaatttttatttggtgggtttgagaagtttttgatgctttaatggaccgggtgtttctgagctargtttgtggacaagtatatcattttgtattcatagccactatttgctatataatctggctgttcatgcaacaatggctgcagggaagtagggaacaatagaaggaaaactctaaatattcagaaaaaggcaggaaacagaaaaatcgagcctgaggcagacagcagaggagcaaggtcagtagg

SEQ ID NO: 674087 - DNA, 1807 bp, Homo sapiens
ctattataaatagtgcttttaaaaaaaaattcttttttgagatggagttttgcttttgtcgcccaggctggagtgcagtggtgcaatctcagctaactgcaacctccacctcccaggtttaagtgattctcttgcctcagcctcccaagtagcggggattataggcatgtgccaacatgcttggctaatttttttttttgtatttgtagtagagatggggtttcactatgttggtcaggctggtctcaacctcctgtcctcaagtcatctgcccaccttagcctcccaaagtgctgggattacaggcgtaaacagtgttcttatagacattctttatgtatcttttggcaaacatatataaatatttctgttggatataagcctaacagtggaatttctgaaaatatatatttttcagctttagaagatatagctagttttccaaagaggttctaccaatacttggtattatcaagtttaggctttgaaaaatacatattattggatatagagaggtaactcattgtcattttaacttgagttttagaatttgagtttagaatgagaggcatggatcatcagtaacacagaaatagttccactaatggcttggaaatcattcccctattcatgagagatttggagcctgtgctttgtccagcagaaaaggggaaagtgttttaaatcatggggtgaaatttagagcaaaaaggactatcagagatcaagactgaagttggtccttggaggtatgggcagacgtattccttgtgattcctgaattctcataggtaacagcagcagcatttactgtctcattaggtattcccaattttgccactctctttgtttaacaaattggaacacagtatggcaagttgacagagttgagaagaattctcagtgatgtgctcaaggcacctgtgcatatttatgtggtctgctcatggtcctcagcaagaaagtcaacaggccctttctaaatgagagatctggaagactttcagcaatctgtttgagataaaacatctaacagcatctatgacataaagtggaaataagaagaaaaaaaacaagtaaaaattactttcagtaaggcttagagtctgcaaaatatgggatcatgtctcaatgaatatttattcaccttccataagaagctaaaagttgaaatagtgactcttcccttacatgctggaatcatttctgtgccatcgtagtttattagctataaaatatgaataatcagtttttgtagattgagcctatcaattctaagacattattgcaagtggtcctcaacttctgttccactttgaaacaactagcaatttataaaatttaacataagaacaacctgaactataacatgtgagtgtacaagaaatcaaaaaatgttatttaaatgaataaatgattatttgaaaaaggtatgtgttgtatatggaaatacccaattctatatttctatattattaaagactccaaaaattaaatcaattttatgaaatattgaaatatcttttagaagtcacatatacatttttatgtcrtatatgtgtgtatatatatatatatacataaaaatatatatctgtaggccaggcgcagtggctcatgcctgtaatcagcactttaggaggccgaggcaagtggatcacgaggtcaagagatcgagaccatcctggccaacatagtgaaaccccatctctactaaaaatacaaaaattaactgggcatggtgacgcgcgcctgtagtcccagccacttaggaggctgagacaggagaatcgcttgaacccaggag

SEQ ID NO: 674088 - DNA, 1203 bp, Homo sapiens
ttgaacatacattgttgactttcaatatctcttttactgctggatttgagacttgattctgtgacaacaaagccatgagctctttattcaactcttgactgttatctgacttctgatgttatctggcaccaccagggagatcatctgagaccttactatgacaatggattgggggtctataaacagtgagtgttttaatctattaagtgtctgaagagtattaccacaaacaagtggtgtcttgctcaaactgctaaaactaatacagaccttcattctcagagtcactcatcttgggatctaaaagagtgttagaagaattggatgacgttatatacctcttttggctttcatgacaacacaccctttagaggcagagtttcattccgagctaaattctaccctaactcactacttctccttgaacagcttgcttaacattactgaaactctttctttatctctaaaattagactattaccttacctccagggktattgagagactctaatttgttaatttatataaagcagattacacaattcctagcacataggcatatatcaatatgtcgtagcttttttaattggtctaagtttttgatcaataatttagagatttgtctctaaatcactgattcagagagagcatttcttaatacgaattccttcattattttcctactaccatggcccagcatctttgactcattcttcttcatttcacactgaaacacagtaatggtcttctagttgcaatcttctcaaattcaccctactagagtaattctcccaagacacaacttttacacagaatctgttactcaagaaaagagatccaaaagacagcatactttcttttttttgttttgttttctgagacggagtctcgctctgtcgcccaggctggagtgcagtggcgcgatcttgactcactgcaagctctgcctcccgggttcatgccagtgtcctgcctcagcctcctgagtagctgggactacaggcacctgccaccatgcctggctaattttttgtatttttaatagagacggggtttaaccgttttagccaggatggtttcgatctgacctcgtgatccgcccgcctcggcctcccaaagtgctgggattgcaggtgtgaaattcttaaacatttattctgcatttactgggctcctcctgtatatcaggcactgtatttggat

SEQ ID NO: 674089 - DNA, 1279 bp, Homo sapiens
cagtttcatttaatgagtggattggattgaagctgaggaacagagagggagtggagaaaaggttaaaaattcttaaactgggttcaagttggcatttgccaattcggaattatgaaggcctccctgaagccctgatgtgcctttgcactgctaattccttctgttttgtttttcttttagatgcctttccagtaaagctaacaaaaaacaaaacaaaataaaaccatatccaaaatactaaacagctgtctccaagatcagaaggcatcagaaaagaccctcaagagttgtctaatcccagaggaagatcttaagtggggatgtgctcacagcagaaaccttggaaatttcagggagtgaaattttattgtcagaactttcaataaaagtgtagccacagatcctgggagcattaaataaaaattaccaacaagctgtcttacctgtgtgcactccactgaaaggaagggcaaacatgagcaaggagctcttgtacatcagtcaaaattctgacagctaccctgtgaagtttgacgggctgccatgtgctagactacctaagatactcttaactgaaccataaaaagacaaataaattagtaattgtatccctcctgtcaatgtcctttttcgtgaacttctcaaggtgttggttaacattgtctggaatgatttatcaatatattcttagctttcttaggaaacacagatagacttgattttttccaaattgttttttgaattgatttaagaaaatgatacagatattgccaattgctgggcctctctttttcactccctgctctgcttcctccgattattaaatcaaaccaataagattaacataatctttcttagaattgactgttctttttaaatagatcccatgatagacatgtgtaaaaatcaataacaggcccctcatttgtcaaagctaatgactaaactcattttgaagttcaatagtggttactggagagtggccacacattatatgtctaatcctgtatgtctcgacacttattctgcagaacagagaaaaaggctttgttgcttgaggcacagtataaaagctggtgtctccattgtatttgtacatattcacatttcctccaaactatgacaatkgttgattgtccaagctaatacattaaaggaaataaaaggaaaaataaatctggtaaatttgtaacactccccaccccaccttttaaccaattcaattaattgtaagttccttcaattatatgcttaactccttgaggttgtgaaatatgtc

SEQ ID NO: 674090 - DNA, 1279 bp, Homo sapiens
cagtttcatttaatgagtggattggattgaagctgaggaacagagagggagtggagaaaaggttaaaaattcttaaactgggttcaagttggcatttgccaattcggaattatgaaggcctccctgaagccctgatgtgcctttgcactgctaattccttctgttttgtttttcttttagatgcctttccagtaaagctaacaaaaaacaaaacaaaataaaaccatatccaaaatactaaacagctgtctccaagatcagaaggcatcagaaaagaccctcaagagttgtctaatcccagaggaagatcttaagtggggatgtgctcacagcagaaaccttggaaatttcagggagtgaaattttattgtcagaactttcaataaaagtgtagccacagatcctgggagcattaaataaaaattaccaacaagctgtcttacctgtgtgcactccactgaaaggaagggcaaacatgagcaaggagctcttgtacatcagtcaaaattctgacagctaccctgtgaagtttgacgggctgccatgtgctagactacctaagatactcttaactgaaccataaaaagacaaataaattagtaattgtatccctcctgtcaatgtcctttttcgtgaacttctcaaggtgttggttaacattgtctggaatgatttatcaatatattcttagctttcttaggaaacacagatagacttgattttttccaaattgttttttgaattgatttaagaaaatgatacagatattgccaattgctgggcctctctttttcactccctgctctgcttcctccgattattaaatcaaaccaataagattaacataatctttcttagaattgactgttctttttaaatagatcccatgatagacatgtgtaaaaatcaataacaggcccctcatttgtcaaagctaatgactaaactcattttgaagttcaatagtggttactggagagtggccacacattatatgtctaatcctgtatgtctcgacacttattctgcagaacagagaaaaaggctttgttgcttgaggcacagtataaaagctggtgtctccattgtatttgtacatattcacatttcctccaaactatgacaattgttgattgtccaagctaatacattaaaggaaataaaaggaaaaataaatctggtaaatttgtaacactccccaccccaccttttaaccaattcaattaattgtaagttccttcaattatatgcttaactccttgaggttgygaaatatgtc

SEQ ID NO: 674091 - DNA, 1529 bp, Homo sapiens
acactgtgtttacaggatcagatcctaaagtacagcttatactacattgggccagtttaatctagctctataactcctcatactcttctctttcttttagacccaagaatgtggcccttatgcccgtggaagcttttaattgcctcttttggaaactagttttgattcttcataatcacgtctgtttgaggacacagacgatcaatgtaaggacattcagaaccttctaactgtcaatacattttaattgttttatgttttctccaacatcaaaatcataaagcttctttaacaatgatttattcagcgtatactatatgtcaggcattgtgttaggaggtttagaaaacattatttcatttgattgctacggttttgtgaaatgaacacaattatcacctcttccatagatgagaaaagtaaatttaaatttaaatacaaagtaatgtaaacattttgtttgaaatctcaagttttatacaatcaggattcaaagccagagtttcctacttccaaaacatattctttttaaaaaacattttaaacaatacacagtcatggtattagatggtttcagatgaaaaattacaaagagtatagaaattttgtacatcattttcccagcttctcctraagttattatttcacataaacatagaacaattattgaaacaaaagtaaccttcatgcaaaactgtttattaatctacaggccttatttaaattttgcccattttcacactaatatcccttttctagatcattaattcaggtttttacattgcatttagtgtcacatttccttaatctcctctcgtatgtgacacttcctcaatcttcttgtctttcaataccttgattttttttaaggagtactgatgatttgttttgtaacttgtccttaaaacttcacccattttctaaactatgacgttcagtttgggtttgtctgatatcgtctcatgattcgactaaagttatacacgtttggcaagactatttcatcagtgatgtgtccttcttaatgcatctatcattatattgggtatattaattgatatgtattgcaaagcagaaatttattttcctatatttgtcttttaattgtgtgatatgaacaaactataatacagcattaagatctgagaaagattaaacagttcgaaatatgtcatattatatcatttagtagaaatcagattggctactgactagccatgattaattagaatatgcctaaatccttaactgaattagcactctgtgtgtgtgtgtgtgtgtgtgtgtgcgcgcgtgtgtgtgcgtgtgtatgcagaaaaatgctagtaaatgtttaataatcagctctcggggaaagaaaaagcccttatttggagtgcttgccaattttgtggtgtaaatactcccaccacggcccatttcaatctaccaacattgtcaatgaactcagagctaggaggaaaggaacacaaaatgaagtctcaggagctggtacaagccagcccctagcacgccactgaaataatata

SEQ ID NO: 674092 - DNA, 1529 bp, Homo sapiens
acactgtgtttacaggatcagatcctaaagtacagcttatactacattgggccagtttaatctagctctataactcctcatactcttctctttcttttagacccaagaatgtggcccttatgcccgtggaagcttttaattgcctcttttggaaactagttttgattcttcataatcacgtctgtttgaggacacagacgatcaatgtaaggacattcagaaccttctaactgtcaatacattttaattgttttatgttttctccaacatcaaaatcataaagcttctttaacaatgatttattcagcgtatactatatgtcaggcattgtgttaggaggtttagaaaacattatttcatttgattgctacggttttgtgaaatgaacacaattatcacctcttccatagatgagaaaagtaaatttaaatttaaatacaaagtaatgtaaacattttgtttgaaatctcaagttttatacaatcaggattcaaagccagagtttcctacttccaaaacatattctttttaaaaaacattttaaacaatacacagtcatggtattagatggtttcagatgaaaaattacaaagagtatagaaattttgtacatcattttcccagcttctcctaaagttattatttcacataaacatagaacaattattgaaacaaaagtaaccttcatgcaaaactgtttattaatctacaggccttatttaaattttgcccattttcacactaatatcccttttctagatcattaattcaggtttttacattgcatttagtgtcacatttccttaatctccyctcgtatgtgacacttcctcaatcttcttgtctttcaataccttgattttttttaaggagtactgatgatttgttttgtaacttgtccttaaaacttcacccattttctaaactatgacgttcagtttgggtttgtctgatatcgtctcatgattcgactaaagttatacacgtttggcaagactatttcatcagtgatgtgtccttcttaatgcatctatcattatattgggtatattaattgatatgtattgcaaagcagaaatttattttcctatatttgtcttttaattgtgtgatatgaacaaactataatacagcattaagatctgagaaagattaaacagttcgaaatatgtcatattatatcatttagtagaaatcagattggctactgactagccatgattaattagaatatgcctaaatccttaactgaattagcactctgtgtgtgtgtgtgtgtgtgtgtgtgcgcgcgtgtgtgtgcgtgtgtatgcagaaaaatgctagtaaatgtttaataatcagctctcggggaaagaaaaagcccttatttggagtgcttgccaattttgtggtgtaaatactcccaccacggcccatttcaatctaccaacattgtcaatgaactcagagctaggaggaaaggaacacaaaatgaagtctcaggagctggtacaagccagcccctagcacgccactgaaataatata

SEQ ID NO: 674093 - DNA, 1529 bp, Homo sapiens
acactgtgtttacaggatcagatcctaaagtacagcttatactacattgggccagtttaatctagctctataactcctcatactcttctctttcttttagacccaagaatgtggcccttatgcccgtggaagcttttaattgcctcttttggaaactagttttgattcttcataatcacgtctgtttgaggacacagacgatcaatgtaaggacattcagaaccttctaactgtcaatacattttaattgttttatgttttctccaacatcaaaatcataaagcttctttaacaatgatttattcagcgtatactatatgtcaggcattgtgttaggaggtttagaaaacattatttcatttgattgctacggttttgtgaaatgaacacaattatcacctcttccatagatgagaaaagtaaatttaaatttaaatacaaagtaatgtaaacattttgtttgaaatctcaagttttatacaatcaggattcaaagccagagtttcctacttccaaaacatattctttttaaaaaacattttaaacaatacacagtcatggtattagatggtttcagatgaaaaattacaaagagtatagaaattttgtacatcattttcccagcttctcctaaagttattatttcacataaacatagaacaattattgaaacaaaagtaaccttcatgcaaaactgtttattaatctacaggccttatttaaattttgcccattttcacactaatatcccttttctagatcattaattcaggtttttacattgcatttagtgtcacatttccttaatctcctctcgtatgtgacacttcctcaatcttcttgtctttcaataccttgattttttttaaggagtactgatgatttgttttgtaacttgtccttaaaacttcacccattttctaaactatgacgttcagtttgggtttgtctgatatcgtctcatgattcgactaaagttatacacgtttggcaagactatttcatcagtgatgtgtccttcttaatgcatctatcattatattgggtatattaattgatatgtattgcaaagcagaaatttattttcctatatttgtcttttaattgtgtgatatgaacaaactataatacagcattaagatctgagaaagattaaacagttcgaaatatgtcatattatatcatttagtagaaatcasattggctactgactagccatgattaattagaatatgcctaaatccttaactgaattagcactctgtgtgtgtgtgtgtgtgtgtgtgtgcgcgcgtgtgtgtgcgtgtgtatgcagaaaaatgctagtaaatgtttaataatcagctctcggggaaagaaaaagcccttatttggagtgcttgccaattttgtggtgtaaatactcccaccacggcccatttcaatctaccaacattgtcaatgaactcagagctaggaggaaaggaacacaaaatgaagtctcaggagctggtacaagccagcccctagcacgccactgaaataatata

SEQ ID NO: 674094 - DNA, 1529 bp, Homo sapiens
acactgtgtttacaggatcagatcctaaagtacagcttatactacattgggccagtttaatctagctctataactcctcatactcttctctttcttttagacccaagaatgtggcccttatgcccgtggaagcttttaattgcctcttttggaaactagttttgattcttcataatcacgtctgtttgaggacacagacgatcaatgtaaggacattcagaaccttctaactgtcaatacattttaattgttttatgttttctccaacatcaaaatcataaagcttctttaacaatgatttattcagcgtatactatatgtcaggcattgtgttaggaggtttagaaaacattatttcatttgattgctacggttttgtgaaatgaacacaattatcacctcttccatagatgagaaaagtaaatttaaatttaaatacaaagtaatgtaaacattttgtttgaaatctcaagttttatacaatcaggattcaaagccagagtttcctacttccaaaacatattctttttaaaaaacattttaaacaatacacagtcatggtattagatggtttcagatgaaaaattacaaagagtatagaaattttgtacatcattttcccagcttctcctaaagttattatttcacataaacatagaacaattattgaaacaaaagtaaccttcatgcaaaactgtttattaatctacaggccttatttaaattttgcccattttcacactaatatcccttttctagatcattaattcaggtttttacattgcatttagtgtcacatttccttaatctcctctcgtatgtgacacttcctcaatcttcttgtctttcaataccttgattttttttaaggagtactgatgatttgttttgtaacttgtccttaaaacttcacccattttctaaactatgacgttcagtttgggtttgtctgatatcgtctcatgattcgactaaagttatacacgtttggcaagactatttcatcagtgatgtgtccttcttaatgcatctatcattatattgggtatattaattgatatgtattgcaaagcagaaatttattttcctatatttgtcttttaattgtgtgatatgaacaaactataatacagcattaagatctgagaaagattaaacagttcgaaatatgtcatattatatcatttagtagaaatcagaytggctactgactagccatgattaattagaatatgcctaaatccttaactgaattagcactctgtgtgtgtgtgtgtgtgtgtgtgtgcgcgcgtgtgtgtgcgtgtgtatgcagaaaaatgctagtaaatgtttaataatcagctctcggggaaagaaaaagcccttatttggagtgcttgccaattttgtggtgtaaatactcccaccacggcccatttcaatctaccaacattgtcaatgaactcagagctaggaggaaaggaacacaaaatgaagtctcaggagctggtacaagccagcccctagcacgccactgaaataatata

SEQ ID NO: 674095 - DNA, 639 bp, Homo sapiens
gggacccctttcctgtaacatttgcagattccatgtttggtgagggttcggtctctgcttcataaatggcactttctagctgagttgtggtggaagggtaacaagcttcttagggccccttttataaggacactaattccagtcatgagggctatgccttcatgacctaatcacctcccaaattctccacctcttaatattgttgtattagggattaggttttaacataggaatatgaagtggtggaggacacaaacaaaccataatagtgttcatttttatcaatgacctcttctgyagttggaaacagaatgagaaagagagaaatgtctctgctattgataatccctaggtcaaaatctgcaagagttccagctgaggaatgagaaaaatgtctcctaaggtaggagggaggtcaggtggtcacagtcaccccaaatgtgttgttcatgtttatattttccattttgaaggtagatggaatgctcggcgcaagatggcaacttttcctagttgagctctaggctttagagaagctgctgataaaaatcattggttttgatcaatattttgtgaactaccctatgacctcatgacatttgttatcactttacaaagcaaccccaagtttacaatgtg

SEQ ID NO: 674096 - DNA, 908 bp, Homo sapiens
  misc_feature 235, 236, 237, 238, 239, 240, 241, 242, 243, 244, 245, 246,247, 248, 249, 250, 251, 252, 253, 254, 255, 256, 257, 258,259, 260, 261, 262, 263, 264, 265, 266, 267, 268, 269, 270,271, 272, 273, 274, 275, 276, 277, 278, 279, 280, 281: n = A,T,C or G
  misc_feature 282, 283, 284, 285, 286, 287, 288, 289, 290, 291, 292, 293,294, 295, 296, 297, 298, 299, 300, 301, 302, 303, 304, 305,306, 307, 308, 309, 310, 311, 312, 313, 314, 315, 316, 317,318, 319, 320, 321, 322, 323, 324, 325, 326, 327, 328: n = A,T,C or G
  misc_feature 329, 330, 331, 332, 333, 334: n = A,T,C or G
cccaattagtgatttcatagtgttttaaaactacaagagttgttatttctcataattctgagggttagacatttgatcagggtttggattggtggttcttctgttccacatagtctcaagtgatgggttaaactctagtcctgtagcagggcagcaccaggacaattgatcagatttcagagagcagagtggcgactctaaaccaaggataagccaagagccaaatatcagtttnnnnnnnnnnnnnnnnnnnnnnnnnnnnnnnnnnnnnnnnnnnnnnnnnnnnnnnnnnnnnnnnnnnnnnnnnnnnnnnnnnnnnnnnnnnnnnnnnnnnagttctaagttgacaactcaaaatattataaccaattataaaacagctttagatatttcttatcttgcacaaaagacttggatattaaaaagaatcccttgcaaaatggtacattgtgggagcccaaacacttgtggatttcagctgattgaggggagaagtatgaaggagccataggagtggggttggggtacagtccagttcttccacgttttgtaatgtgacactgggcaactcatgggagaaagcagagtctgtgaagtgaagaggacaaatcctggctggacttttgggattcagtagactgagaagatggacagaggcgctttgaaaagaatgaagtgcttatgatgatcccaggtggtatggcctgaggaagaaatagtgtgatggggaaacaaatatttgttgagctcctgctctgtgttatcctctaggccagacacttcccccatcctgacctcartggagaagcgagtaaactgcttaaggtcacaaatggaggagttgagatttgaacttggatgaccatgtggagagctgttggcttagtcccttcttcactgggtaggga

SEQ ID NO: 674097 - DNA, 655 bp, Homo sapiens
tgcatttcacaacttcggggcgcctcattcacactgcagctttgtggatgtcatctcctggagcacaccaatgatactgactggttgttgcaaattagacctgtcattattgcaggctttggatgttttctctttcagttgctgctcctgaatctgtctcctgccatctgaggtgtccttcctctctctccctgtgaatttctgtggcttyggttcttgtccctttcttttactttctctgtcttgaggatcagattcaaaatccttcttacagagagacctgtaataagtgtttgtattatttaagaacactctttatagaaaataagagaaagaaatatagagccaaaaaacttgtgagaaaggaggtagagacgatatgtgatgaatatttataggaagccatggaaggaccaaaaagcatctcatatttatgaggcatgtgagtcactatatcttcatgaagctctcagtattcatgaaatcttagacggacacccttgggtgatccccacttttggttccatttgttttcttcccaaggcatgctgcaggtaaggcatggttgcttagcaagtcgctggtgagcaacagctgttggttagacatacttgtttctgcatctctctgatggagcacctgctggccccaggca

SEQ ID NO: 674098 - DNA, 655 bp, Homo sapiens
tgcatttcacaacttcggggcgcctcattcacactgcagctttgtggatgtcatctcctggagcacaccaatgatactgactggttgttgcaaattagacctgtcattattgcaggctttggatgttttctctttcagttgctgctcctgaatctgtctcctgccatctgaggtgtccttcctctctctccctgtgaatttctgtggcttcggttcttgtccctttcttttactttctctgtcttgaggatcagattcaaaatccttcttacagagagacctgtaataagtgtttgtattatttaagaacactctttatagaaaataagagaaagaaatatagagccaaaraacttgtgagaaaggaggtagagacgatatgtgatgaatatttataggaagccatggaaggaccaaaaagcatctcatatttatgaggcatgtgagtcactatatcttcatgaagctctcagtattcatgaaatcttagacggacacccttgggtgatccccacttttggttccatttgttttcttcccaaggcatgctgcaggtaaggcatggttgcttagcaagtcgctggtgagcaacagctgttggttagacatacttgtttctgcatctctctgatggagcacctgctggccccaggca

SEQ ID NO: 674099 - DNA, 604 bp, Homo sapiens
gggatagagcaaggctttgtctccaaataaataaatcactgggatacgtttaacatgctcatggtgtacaagcatttttatatgttgatataccctgtttgctagtatttttttgaggatttgggagtctgtcttctcatttgggtttttttgtttgtctgtcttggagagggtcttgagacagggtcttgctctgtcacccaggctggagtgcagtagtgtgataacagctcactgcagcccctacctcccaggttcaaaagatctttccacttcagcctcccaagtagctgggactactggtgttcaccaccacacccagctaatttttaatttttttttgtagagatgggggtctcactatgttgtgcaggctggccttgaactcctaggctcaaagscattctctcacctcaacttctaaaagggctgggattataggtgtgagccaccatacccagccagggtctatattcataaagatattggtctgcagttttatttttatgtccttgtctggttttggtatcaggataatactgacctcatagaataaactgaaaagtattcatccttcttttttttttagataagtttgtaaata

SEQ ID NO: 674100 - DNA, 1855 bp, Homo sapiens
acctttaaaatgactttatagagaggtaactccattttaagtctagaagcatctgtatgtttgtttttgtttttgttttcagatggagtctcactctgtacccaggctggagtgcaatggtgcgatctcagctcactacaacctctgcctccttggttgaagcaattcttctgcctcagcctcccgagtacctgggattacaggtgcccaccaccacgcccagctaattttttgtatctttagtagagatggggtttcaccatgttggccaggctggtttcgaactcctgacctcctgatctgcccgyctcggcctcccaaagtactaagattacaggcatgagccaccgtgtccgaccctgaaattttctttaccatatgctgaagcttaatgaaacaaacttttaaaagtttatagaagttaaaaaaagtaacagtatcatagtacaactcaagcacaatattggtttcaagctcatgattacttcaagccaatgatttaataacatgatttattctcacacaactttaactggcatttaaaaacttacatgaatttccgaaaagctatatggaatattttttttcagtgaataaaatgccttctatctagaacacattttctaaaacattgttctattaaaccactcaatttgtcttagccaataataatgtcaagttttcatggcacacttatctttgttttatagtgtacctcagtctgcagatgattaaagaaaatttaatgtaaaatatccaagagaaaactgatcaaaagataaataaaacataatcaggaaaataaatccagaaaaatactagaaaaaaattaaaaataaataagcaagtggtaagcagctatatatttaagaacaatggaatttttgtgcttctagaaggcaaaacaatcagttttataatcctcagagtcagatattggaaaacttaccagggaatgcggggatgtttttttcagagctaaattttaaaattaaatcaatgtgagactttcttttagagaagtgacagacagataagttgcaaatttccttattgatatgattttttcaaatgcagtggtttagccttccaatggtctggttttgcctaaggatagcagttgagagcaggatttattttaaaaatatatattcttcagtcagttttcaaaaacaaaacaaaaagggaaaagaacacttgtctacgatgcatattcatggaaatctggaaaataagtagtttgaccttaaaaggtctcaaaaggttagtttgagcttttggttgagagtgaatacctaacaatggaaatcaaatcatcataaaatatttgatccatctcaagaggttcagaaatacctcctcctaatagagtatgccaaaaaaattggggaggaaaaaactgaacatattaactcttcatttaatgcacagataagctgatgaaagggtaaaacctacaggccataaagaacaaaaaagagctggcctaagcgaagactgtggtatgtaaattcacaaaggtatctgcccacctatctatggcataaaggttgcatgtaccataacttcaacctgtaacaaaaaactagagcccaagtatgggtaaaattacacagatatcctccaccacacacacacacacacacacacacaaacatgcacacataaaaacaggattctgtagaagaccatggccaatggcaggcacatgacaaaatacgaaaattatgtctgataattcctaaggaaaagcctactacactttaataacttaaaaaagctctaggcagaaaatttagattaacgtcaacctgttttgtcagtaccaatagagatctgtcagaagtaaatataa

SEQ ID NO: 674101 - DNA, 575 bp, Homo sapiens
gtaaatctgcctatgttcctttcatgcgaagtcaatgcccctgagtaaccttgtttagtgacctagttttaaaattactctttgtaatgtggtcactaggaattaagccttcaaggaaggaatccagtatttaaaattcatattaccatstgacaaattgatctcccttaagaaacccattctatcaaaatgtaaactaatatgtcgagctgcttgaatacccacaccactaaagtcacacctttcttccaaggtgttatttctaatttgatttccccaatgcatgaagtaaccatgcccagtcacgacaacgcttaatgactgcccaccaaagccttggctgatccacacctatggaccacatgaatgaacctttcagtgtttattcttcaaacttgtatcatgctattgcggactgaagtgagtacccccaaaattcatacattgaaaccctaaacttcaataagactgtttttgaagacaggaccttttaaagaggtaattaaggttaaattaatttgtaaaggtgaggacttatttcaacacgactggtgtctttaaataaagaggaagag

SEQ ID NO: 674102 - DNA, 575 bp, Homo sapiens
gtaaatctgcctatgttcctttcatgcgaagtcaatgcccctgagtaaccttgtttagtgacctagttttaaaattactctttgtaatgtggtcactaggaattaagccttcaaggaaggaatccagtatttaaaattcatattaccatgtgacaaattgatctcccttaagaaacccattctatcaaaatgtaaactaatatgtcgagctgcttgaatacccacaccactaaagtcacacctttcttccaaggtgttatttctaatttgatttccccaatgcatgaagtaaccatgcccagtcacgacaacgcttaatgactgcccaccaaagccttggctgatccacacctatggaccacatgaatgaacctttcagtgtttattcttcaaacttgtatcatgctattgcggamtgaagtgagtacccccaaaattcatacattgaaaccctaaacttcaataagactgtttttgaagacaggaccttttaaagaggtaattaaggttaaattaatttgtaaaggtgaggacttatttcaacacgactggtgtctttaaataaagaggaagag

SEQ ID NO: 674103 - DNA, 575 bp, Homo sapiens
gtaaatctgcctatgttcctttcatgcgaagtcaatgcccctgagtaaccttgtttagtgacctagttttaaaattactctttgtaatgtggtcactaggaattaagccttcaaggaaggaatccagtatttaaaattcatattaccatgtgacaaattgatctcccttaagaaacccattctatcaaaatgtaaactaatatgtcgagctgcttgaatacccacaccactaaagtcacacctttcttccaaggtgttatttctaatttgatttccccaatgcatgaagtaaccatgcccagtcacgacaacgcttaatgactgcccaccaaagccttggctgatccacacctatggaccacatgaatgaacctttcagtgtttattcttcaaacttgtatcatgctattgcggactgaagtgwgtacccccaaaattcatacattgaaaccctaaacttcaataagactgtttttgaagacaggaccttttaaagaggtaattaaggttaaattaatttgtaaaggtgaggacttatttcaacacgactggtgtctttaaataaagaggaagag

SEQ ID NO: 674104 - DNA, 617 bp, Homo sapiens
gaaacagcaatcatggacgctgttaagatcaagaagtcagaggaggaactgcagggctctgacatatatttaggaactagaacagcaaatgatgaaatgcattgtgactctggcagctggccgaaaaagaatacgacaagattatattgygttatcaagattaaattctaagaatgtaaatttagcataagatggtaggaagagaaaataagatatctacaaaattgtaataaaataagaacacatcattgaataataaatggtaagaaaactacagcaacaagaaatcagaatatttgaaactctaaatttaaaagaagttcaaagaagtgctatgatacaaattcacgcatttgccccgaaacttttataacaaagtttgtctttttataccttcaaagaagcaccgtaaaggtttagcaacccaaggaacttagtatttttgccacatttcatgaatatttgcccattagtctttttaaaatgcttcacgtatgtatagaatattgaaggaatattgaggaaacaataatcacttctctttatactaataatatgtgaaataaagagacaattccaatgtgctgtgtctatatcaccaccctctccaagcttcc

SEQ ID NO: 674105 - DNA, 617 bp, Homo sapiens
gaaacagcaatcatggacgctgttaagatcaagaagtcagaggaggaactgcagggctctgacatatatttaggaactagaacagcaaatgatgaaatgcattgtgactctggcagctggccgaaaaagaatacgacaagattatattgtgttatcaagattaaattctaagaatgtaaatttagcataagatggtaggaagagaaaataagatatctacaaaattgwaataaaataagaacacatcattgaataataaatggtaagaaaactacagcaacaagaaatcagaatatttgaaactctaaatttaaaagaagttcaaagaagtgctatgatacaaattcacgcatttgccccgaaacttttataacaaagtttgtctttttataccttcaaagaagcaccgtaaaggtttagcaacccaaggaacttagtatttttgccacatttcatgaatatttgcccattagtctttttaaaatgcttcacgtatgtatagaatattgaaggaatattgaggaaacaataatcacttctctttatactaataatatgtgaaataaagagacaattccaatgtgctgtgtctatatcaccaccctctccaagcttcc

SEQ ID NO: 674106 - DNA, 617 bp, Homo sapiens
gaaacagcaatcatggacgctgttaagatcaagaagtcagaggaggaactgcagggctctgacatatatttaggaactagaacagcaaatgatgaaatgcattgtgactctggcagctggccgaaaaagaatacgacaagattatattgtgttatcaagattaaattctaagaatgtaaatttagcataagatggtaggaagagaaaataagatatctacaaaattgtaataaaataagaacacatcattgaataataaatggtaagaaaactacagcaacaagaaatcagaatatttgaaactctaaatttaaaagaagttcaaagaagtgctatgatacaaattcacgcatttgccccgaaacttttataacaaagtttgtctttttataccttcaaagaagcaccgtaaaggtttagcaacccaaggaacttagtatttttgccacatttcatgaatatttgcccattagtctttttaaaatgcttcacgtatgtatagaatattgwaggaatattgaggaaacaataatcacttctctttatactaataatatgtgaaataaagagacaattccaatgtgctgtgtctatatcaccaccctctccaagcttcc

SEQ ID NO: 674107 - DNA, 617 bp, Homo sapiens
tgtcgattataattccactttcctgctaagtccatacaattagattactacagggacttcattacagccacagggaggacagcagctgaggtacacaattttcttcctatgatgccagcaatagtaaacagttattggaacaattgtctacaaaggagcaataaaagctgctgcattaaatattgttgtgtcattatatcatctcccaaaatatagcaaagacttgaaaaatgtcaatgccaggaaaattttgcttttcccacttgtctgttttgctaagtttcctataaatcagttgtttttcatttrttcatttaaacataattcagactacacattatctccaggccttagattcctagttttaaaatgaggggagtgaagaatttataaatatttgatgtctctccaaataaatcttcaacaatgaagaataatgatacattcttctgtattagattgctgcttgctcataacaatataaatttcagagctaaagtttacatcttattgtcatatagtccaatgtattttctactgtcattgctttaaagtatacatgctatatttcatattcaggattctattttcaattggcattctaatgtaattctttc

SEQ ID NO: 674108 - DNA, 617 bp, Homo sapiens
tgtcgattataattccactttcctgctaagtccatacaattagattactacagggacttcattacagccacagggaggacagcagctgaggtacacaattttcttcctatgatgccagcaatagtaaacagttattggaacaattgtctacaaaggagcaataaaagctgctgcattaaatattgttgtgtcattatatcatctcccaaaatatagcaaagacttgaaaaatgtcaatgccaggaaaattttgcttttcccacttgtctgttttgctaagtttcctataaatcagttgtttttcatttgttcatttaaacataattcagactacacattatctccaggccttagattcctagttttaaaatgaggggagtgaagaatttataaatatttgatgtctctccaaataaatcttcaacaatgaagaataatgatacattcttctgtattagattgctgcttgctcataacaatataaatttcagagctaaagtttacatcttattgtcatatagtccaatgtattttctactgtcattgctttaaagtatacatgctayatttcatattcaggattctattttcaattggcattctaatgtaattctttc

SEQ ID NO: 674109 - DNA, 606 bp, Homo sapiens
tttggacatttttctcccaaggtgtggaaaatctggttttcagacagggttagtttgctggtaaatttaaaaacacagcatgtagacaacagaagggaatgaattaatttggaatcacctaaacatggttcatcactaataatcgagccctagagaattctggtgacttctactgatctggatggtatgggagaaaaaataactagggtagcagagaccattttttaccttagtcccttgcctcacgtaaggggaaaatagttcaaaatattagtgcccaggaaatttactaataattccaaactagctggaatcattacttcagtatttttatataagtattcaggactgggaatagtagttgagcctccgagcagaagattgttttcatttaataaaatatttacgagtgaaaactattggaaggtagaggtcaagattgatgcattatgaatctcacgtttgacgaaaacmcaatatgtgcatagaaaaataaataacaacattatcaagtagtaacatgatctgaagatgataaatacaataaaaaagaaatacattatataagcaatataatgttaattagtgatagatattacaaatata

SEQ ID NO: 674110 - DNA, 506 bp, Homo sapiens
ttctaaacaaaactcggttttgcaggtcccccaaaataacagtaagtgtgcattcagttttgggagatgtatatctgtatagattaataatcaatatgctatgtaatatcactttaaacataacattttacagttttaagtgtgtgtgtgcgcatggaaaaattttgaagtttatgattttgctctcattgttcaagaaataaatcatgggctcctatttttctcttctagtctaacattgttttctacattaatctctgtttytaagtgtatcttttttttgttttcactatgacacttattctgttgtatttttattaagttctaaatttggatactcggctcaattatgtcattcttttctcttttctaaggtaagaaggtaattaatttctaggttcccactttatcggccttgtttaagttttgctatctggtattttccgaagcatttctaagattagtgactttctcctataattttattaatttggcttttgaagcta

SEQ ID NO: 674111 - DNA, 506 bp, Homo sapiens
ttctaaacaaaactcggttttgcaggtcccccaaaataacagtaagtgtgcattcagttttgggagatgtatatctgtatagattaataatcaatatgctatgtaatatcactttaaacataacattttacagttttaagtgtgtgtgtgcgcatggaaaaattttgaagtttatgattttgctctcattgttcaagaaataaatcatgggctcctatttttctcttctagtctaacattgttttctacattaatctctgtttttaagtgtatcttttttttgttttcactatgacacttattctgttgtatttttattaagttctaaatttggatactcggctcaattatgtcattcttttctcttttctaaggtaagaaggtaattaatttctaggttcccactttatcggccttgtttaagttttgctatctggyattttccgaagcatttctaagattagtgactttctcctataattttattaatttggcttttgaagcta

SEQ ID NO: 674112 - DNA, 636 bp, Homo sapiens
cacaagcatggcacatgtatacatatgtaactaagctgcacattgtgcacatgtaccctaaaacttaaagtataataaataaataaataaataaataaataaataaataaatgttaaaaaaaaaaaagaaaatttgttttatgacctcggagcaacacatccagaacagaatcagacaatatagatatacttatgtagttaaaaataaatgattcaaatttgcctctttttaaaatagagattgtgacattcagttatccttttacctagctgttgccaaacagattgaagcaaatattgatgaagaacctaaacgtagattgatgtagtaaaaatggcacttgtgtctgctagtcaggtgacctcattctagtcctagactggcattaattagtatggtayatattctagtatcaactttagctaagacacttcccttccctcccagacataaaataatagagtttataaaataatgagtgggaactagaggtctttatgagacctttaaaatttctctgggtagtgaactcctttgagaatatgatgaattttctaaaactatatgagtgaacaaaattttgcttttaaatataagagctgatgtgcctgtgccctgaaaaaaagtgaaacaga

SEQ ID NO: 674113 - DNA, 603 bp, Homo sapiens
tttgtaatgcaatgtacagaaattgagaggagcatttagaaatgtttatataatttttttgtttgtttttgttttgagatagagtcttgttctgtcacccacgctgcagtgcagtggcatgatcttggctcactgcaacctctgcctccccattcaagtgattctcgtgcctcagcctcctgagtagctgggattacaggttgtgcaccaccacacccagttaatttttgtatttttagtagagacaggatttttgccatgttggccaggctggtctcaaactcctggcctcaagtgatctgcccgccttggcctcccaaagtgctggggttacaggcatgagccaccgtgcctggctgtttatagcattttgacgtgacacagcattcaaatatattgatgcaaacatatcagtccatggccgactggaaaaagtaaaattggcccttcattgtggacagtttgtaaagccctgtattaaagtwcccagcacatgcctggaatgcagtaggcagtcaatatattaattccccgcatttccttaccattcgagtgaaccctacattgtaaaaacaagctttccaccacccccaccaccaaaca

SEQ ID NO: 674114 - DNA, 1092 bp, Homo sapiens
tggtcttggcttactgcaagctcaggcctcccaggttcaggccattttcctgcctcagcctcccaagtagctgggactacaggcacccgccaccacacctggctaattttttgtatttttagtagacacggggtttaactgtgtttgccaggatggtctcaatctcctgacctcgtgatccgcctgcctgggcctcccaaagtgctgggattacaggcgtgagccaccgcacccagctggaatactttcattattaacaaatgatatgactgtgcaccctgaagagccaagagagaatcgattaaaatatccttagaatcaattaaaatatccttagaatcttaaggaattccaaatgggtagatataagaccaatatcctcatttcaataactcagagtggctgctttcrctggttaagtggaggtatcttcagggaaatctgaacccgtgatgatccctggcaacccgatctgtttttggctgtttctaaacattagggaatggaaactccgtggcggctctaagtagcctggtttcaggctctcatggatgcactgatagaaggtgacacctgtatgctaaattatgagaaaaccccagcaactccagtttcaacatattgaggagatgcttctgttgcttcccaatttgcccatatgaagacatcaaaaaaggacttaaggattcagagaaagagaaatcttatgttaaagaaaagaattagatttttggaagaaaagcttataggagctcaattagatgaagaaacaagttttgtggaataccaacaagtaaataaggcctattctgtatattgaaagatttgcattgagagatgatttaaagagcaaattggataaaatgagtaaacacaactctgaatctttaaaagtattgaataaacagatgcaatctaaagaagtagaactctagctaaggacagaggtggaaactcagctggtgatgaggaatttcaatccaccttcatcaaactgggaggtggaaaagttaagctgtaacctgaagatccacggtttggaacaagagttgatgaggaaagaaggtaacgatctcaaaatagaactactca

SEQ ID NO: 674115 - DNA, 660 bp, Homo sapiens
tgcttcagcaggtaaattgagggtatattttatctgtgttcacactgcaccctctggtgtttccacagagaaaaggctctaagtagacacctacctagggtttattcatatcctttgtccatttctgttgtttttggattggacatatttttcccagatttctaatacctctttgtatattaaggaaattagcccttatgggagaaaaacttgaaaaaattatataaattacatcattactttttattttgaagaaagataactactatttgatcatttatattacagcagctaaataccagactgtagggtaccccagtcccatcctcccctcccctgattccactcctggcttgctttctgtgtcctgaccaaaaatcacagagggctttgactgctctgtgagacagcccagtgcagggttttcccatcaggcttgaactcaaaccaggaccttaaacatttccaggcrctgataaaggtatctaggttgctgctcaaaacactgaatgaaattggcctcagccctgagccagattccttaaaccctcatataaactccatacccagaccccctcactgtggatatacctaggtagaacaccccttatatcttgtccattgcaaggattggtgtgatactctgcaagttccctcaat

SEQ ID NO: 674116 - DNA, 543 bp, Homo sapiens
tctgccttgcacttgaaaaggctcatgtccccgtggggactgtgagtcccaatgggcgggaccctggtctgatttctgtgccattcctagacattgtrgcccgaatgtatttaataaatacccttttgactgaacaaataagtaaatgaaagcttctgggaaagtaagagaggctggtaaggctctcatcaccttaggggcttcactcacattcataagagacctcgtggggaaactaaggttcagggattgcagaggcgtattgggggcgcagggggcgggagcaagacaaatgggcggggcttaccgtgggggtggggcttacctgctagactcatgtagattggctggcgggagcggaagtgattcagagcgcccccagagcagttctgctcttcgcactgcagtacgcagtcgcggtacaccggctcacggtcgccctgggagccgctcgccagcgccgctgccccagctagcaggaccaaccgcgccgccaggccggccatcctttctccctggctcgccgccgggggaggagcttag

SEQ ID NO: 674117 - DNA, 679 bp, Homo sapiens
tgagccaatcatggtgtctctgactggcctggagctgggtggggcaggcctaccttaatcacaaggggggacgagagtggttctccaaaggaaactgaggatgctattagaagaacggggagagttatgctggttaggcagaaggaacatgtctttgtccrttttgtgttactataacaatacatgaggctaggtgattcataaagaaaagaggtttatgtagctcatggttctgcaggccgggaagtacaagaagcatagcaccagcatggcttggcttctggtgagggctttcatgctgcaccacaatatgacaaaaggtggtgggggaagtgggctcatgggaagaggcaaaacccgagaggtgcactggctttataacaacccactctcgtgggaacattccctccagaactagtccagcctccaaagagcgagaacagctccaagccattcgtgagggatccgtccccacaatccaaacacctcccactaggccccacctcccaacaccaccacctcagggatcaaacgtcaacatgatttttggtggggacaaactcaaaccataacacaacagaagcttatttttttcatcccttagtatagtacttacttcatcagacaattatgagaatggaatgagataccacgcatgaacacatttagcatagtgcca

SEQ ID NO: 674118 - DNA, 1778 bp, Homo sapiens
  misc_feature 837, 838, 844, 845, 846, 855, 1678, 1679, 1680, 1681, 1682,1683, 1684, 1685, 1686, 1687, 1688, 1689, 1690, 1691, 1692,1693, 1694, 1695, 1696, 1697, 1698, 1699, 1700, 1701, 1702,1703, 1704, 1705, 1706, 1707, 1708, 1709, 1710, 1711: n = A,T,C or G
  misc_feature 1712, 1713, 1714, 1715, 1716, 1717, 1718, 1719, 1720, 1721,1722, 1723, 1724, 1725, 1726, 1727, 1728, 1729, 1730, 1731,1732, 1733, 1734, 1735, 1736, 1737, 1738, 1739, 1740, 1741,1742, 1743, 1744, 1745, 1746, 1747, 1748, 1749, 1750: n = A,T,C or G
  misc_feature 1751, 1752, 1753, 1754, 1755, 1756, 1757, 1758, 1759, 1760,1761, 1762, 1763, 1764, 1765, 1766, 1767, 1768, 1769, 1770,1771, 1772, 1773, 1774, 1775, 1776, 1777: n = A,T,C or G
taggaattcaagactagcctgggcaacatagcaagatccccatttatgcaaaaaattttaaaaaattagccgagcctggtggcatacacctgtagtcctggctactcgggaggctgaggcgggaggatggctggagcccaggagtttgaggctgcagtgagctatggttgaatcactgcactccagcctgggcaacagagagagaccctgtctgttaaaaaaaaaaaaaaagaaaaaaaaagaaagaaagaaagacctgaaaagaactaattaacgctcatacatagaatttttgatgagaaccttctggctctaaagaaagtattggtcaactatactgtctaggctaatttcttagaaaataatgagcatagttaaggataactgagaaaatgtaaactatggagactgtatcccatgtcaaaattaaaaaattggtggattgatagggagagaggaggataagggagaaaatgtattttgccattgtagaaatcagaaatttgggccgggcacggtggcttacacctgtaatcccagcactttggcggggggatcacctgaggccaggagttcgagaccagcctggccaacatggtgaaactgtgtctctactaaaaatacaaaaattagctgggtgtcatggcagacacctgtcattccagctactcaggaggctgatgcaggagaatcacttgaacctgggaggcggaggttgcagtgagctgagatcgtgccactgcactccagcctgggtgacagagggakacttggtctaaaaaaaaaaaaaaaaaaaaaatcagaaatttgagcagtcaatgatgtgccctgggggtnncaagtnnnccccccggnccccccccccccccggagataatggatttggtgctttctttttgatttttcaaaataatactaaagtcattttcgcttccctctgaattactgcagtaaatttatatagggtggatgttggccttgccacagcaattatgtcgtttcgaagtatgccattgttttgtcctgcagctgaaaaacgggtgggtttattaggtccacagggcagcgtccttgttctgagaagagggaggcatgcaggaatggccagcattcctttttgttgggcttgtccctgtggatggcaagaatcccctggagccaggcacaaatcctgtctgagcagccctattattaccctgcagagtaaaagggagacaaagacccaaggtgaatttcgttacaaattgaaaagcaaaaaaatcaatccattcatgccttcttaaattctctgtcatgttcctccacactcagaggtttaaggaccatcagggaatggcccgtttgagggtggggagggcagggcccagccccatgagctgcctcagggcttctgcagagctggccacatgttgggctttattgatatcaggtgttgtgacccatggacttgatcaatcatttcggccttcccttgtggagcctgtccaggagaatggatgtggactgtgttctgatggaggaaaataaattgttcttggtcaggtttttgaaaataacagtccttgtctctcaggtgggcacatgcttggctgattgatggaatatctagaagccttgggcttaaatatagaacaaatgatattgagctacttaatcttactatcactgtaccaggttnnnnnnnnnnnnnnnnnnnnnnnnnnnnnnnnnnnnnnnnnnnnnnnnnnnnnnnnnnnnnnnnnnnnnnnnnnnnnnnnnnnnnnnnnnnnnnnnnnnna

SEQ ID NO: 674119 - DNA, 1778 bp, Homo sapiens
  misc_feature 837, 838, 844, 845, 846, 855, 1678, 1679, 1680, 1681, 1682,1683, 1684, 1685, 1686, 1687, 1688, 1689, 1690, 1691, 1692,1693, 1694, 1695, 1696, 1697, 1698, 1699, 1700, 1701, 1702,1703, 1704, 1705, 1706, 1707, 1708, 1709, 1710, 1711: n = A,T,C or G
  misc_feature 1712, 1713, 1714, 1715, 1716, 1717, 1718, 1719, 1720, 1721,1722, 1723, 1724, 1725, 1726, 1727, 1728, 1729, 1730, 1731,1732, 1733, 1734, 1735, 1736, 1737, 1738, 1739, 1740, 1741,1742, 1743, 1744, 1745, 1746, 1747, 1748, 1749, 1750: n = A,T,C or G
  misc_feature 1751, 1752, 1753, 1754, 1755, 1756, 1757, 1758, 1759, 1760,1761, 1762, 1763, 1764, 1765, 1766, 1767, 1768, 1769, 1770,1771, 1772, 1773, 1774, 1775, 1776, 1777: n = A,T,C or G
taggaattcaagactagcctgggcaacatagcaagatccccatttatgcaaaaaattttaaaaaattagccgagcctggtggcatacacctgtagtcctggctactcgggaggctgaggcgggaggatggctggagcccaggagtttgaggctgcagtgagctatggttgaatcactgcactccagcctgggcaacagagagagaccctgtctgttaaaaaaaaaaaaaaagaaaaaaaaagaaagaaagaaagacctgaaaagaactaattaacgctcatacatagaatttttgatgagaaccttctggctctaaagaaagtattggtcaactatactgtctaggctaatttcttagaaaataatgagcatagttaaggataactgagaaaatgtaaactatggagactgtatcccatgtcaaaattaaaaaattggtggattgatagggagagaggaggataagggagaaaatgtattttgccattgtagaaatcagaaatttgggccgggcacggtggcttacacctgtaatcccagcactttggcggggggatcacctgaggccaggagttcgagaccagcctggccaacatggtgaaactgtgtctctactaaaaatacaaaaattagctgggtgtcatggcagacacctgtcattccagctactcaggaggctgatgcaggagaatcacttgaacctgggaggcggaggttgcagtgagctgagatcgtgccactgcactccagcctgggtgacagagggatacttggtctaaaaaaaaaaaaaaaaaraaaatcagaaatttgagcagtcaatgatgtgccctgggggtnncaagtnnnccccccggnccccccccccccccggagataatggatttggtgctttctttttgatttttcaaaataatactaaagtcattttcgcttccctctgaattactgcagtaaatttatatagggtggatgttggccttgccacagcaattatgtcgtttcgaagtatgccattgttttgtcctgcagctgaaaaacgggtgggtttattaggtccacagggcagcgtccttgttctgagaagagggaggcatgcaggaatggccagcattcctttttgttgggcttgtccctgtggatggcaagaatcccctggagccaggcacaaatcctgtctgagcagccctattattaccctgcagagtaaaagggagacaaagacccaaggtgaatttcgttacaaattgaaaagcaaaaaaatcaatccattcatgccttcttaaattctctgtcatgttcctccacactcagaggtttaaggaccatcagggaatggcccgtttgagggtggggagggcagggcccagccccatgagctgcctcagggcttctgcagagctggccacatgttgggctttattgatatcaggtgttgtgacccatggacttgatcaatcatttcggccttcccttgtggagcctgtccaggagaatggatgtggactgtgttctgatggaggaaaataaattgttcttggtcaggtttttgaaaataacagtccttgtctctcaggtgggcacatgcttggctgattgatggaatatctagaagccttgggcttaaatatagaacaaatgatattgagctacttaatcttactatcactgtaccaggttnnnnnnnnnnnnnnnnnnnnnnnnnnnnnnnnnnnnnnnnnnnnnnnnnnnnnnnnnnnnnnnnnnnnnnnnnnnnnnnnnnnnnnnnnnnnnnnnnnnna

SEQ ID NO: 674120 - DNA, 654 bp, Homo sapiens
ccggtgccccccttctcctgtccccgcccggtgcatccccctcccaatgctcaccatgcactctgaccatacacacctccacttcagctccttcaatggctctgcctagtccaggatcaggtccaaagcctttaccaaggcctataagcccctcatgacctggcctctccagcaaccaggttcccagctggtgatgagcggtgaaggagccctgttcccaggtgcacagcccagagaaccagaaagaggcagaagtgagttcacttcccttcagcccaactccgcccctgcacattcccgccttacagacatccccactgttgtgggttgaattttgtcccygaaaaagaaatgtccaggtcctaaccaaccagtacctatgaatgtgaccttatttggaaacagggtctctgcaaatgtcatcaagttaagataaggtcatactggagtagtgtgagccctaatccaatatccaatgactggtgtccttacaagaagagggaaatctttttttttttttttttttgagacagagtcttgctctgttgcccaggctggagcgcaatggtgcaatcttagctcactgtagcctccacctcctgggttcaagcgattctcctgcttcagcctcctgagtagctgggactacaggtg

SEQ ID NO: 674121 - DNA, 1046 bp, Homo sapiens
gggaaaagaggaagttagatcaaagcagctgcaggaacctatcaggaagtagcctgacaagaaaacttttctccatcctggaaaaaaaaatcgccaggtgctgcaatggccctttctgagactgcatgcccttctgtgtcaactttttcaatycccttttccatccatattgaagcaaaacccagagctttctaaataggcagtctgagttgctcagactatcccttattatgctagctaagaaaaacttaaaagggaaatttaaatttttttttttttttgagacagggtctgtcacccaaggtgggatgcaatggcaagatcacagctcactgcaaccttgagctcctgggctcaagcgattctcctgcctcagcctcccatagctgggactacaggcatgcaccaccatgcttggctaattttttttttttgtagagatggggtcttgttatgttgaccaggctggtctcaaactcctgacctcaggtgatcctcctacctaagcctcccaaagtgctgggattataggtatgagccactctacccaacccaggaaagttaaatcttttgcaagccttgatcaatcagaaataaaaagaaaaaaaaatggatcacttatgattcaacaatgttggctcctcatctgttatggactgaatgcgtgtgtcgaaatccccaatgtgctggtattagaaggtggagcctgtgggaggtaattaggtaatgagggtagagccctcataagtaggattgatgcctttataaaacagaccctagaggatgggcacggagactgagatgggaggatcacctgagcccggaaggtggaggttgcagtgagctgagatcataccattgcattctagcctgggtgacaaagtgagatgctgcttttaaaaaaaagagagagagagagagcaagagagagagagaccctagagagttctccagccatcctcaaccatgtgaggctatggtgagaagttagccatctgcaaacccaaaagagagcctcactaacaaccaactagctgccacctgga

SEQ ID NO: 674122 - DNA, 617 bp, Homo sapiens
gataaggtcaaccctcagtgtgggggcagaacaacaagatgggaggggtctgggcttctgatgccatggcgtcgccacatcaggccatgtcaggactgtttagtgagagatgaactcccatcttctgaaagccgttgccatggaatagcagccagtcctataacctaatacactcatgtttcttcatctgaccctcacaaacagcacatgagtttggtaaaattatcttactcatctygcagatgggaaaaagtaccataaggaagttaagtgactagtctaagccaagcccctctaagtcactgagctagaatttcagctccaatttgagcactcttctcccaggttatgtgacacttctgttgcagactctgtccccggaagacatggctgaccacagcaatgtcacagcagaattcgattcacagcaaatccagtgagcaccttggcattctgctaattccaagagacccagaatgcgtgaaatgcagcccccatactcaaagagctcacagtctaatagaagggtttataatggaggatgtagcagcaacagtttgcaaagggttttcagattcactatggaaaagcagaacaaggacatcacctgcagaaac

SEQ ID NO: 674123 - DNA, 650 bp, Homo sapiens
tgaaaaaatctgaaaagatctacaacaaaacattaattatagattatctgtgaataatacaatatttcatttttgcttaaatctctattttgtgcttttttcttatacgtatataatagtcaaaattttacaagccaaaacattatcttggagatgcaacactttttaaaattattattatattgatattgcagaagcaccttcaatatattagctgccatcacacaaattatcctattccatcatcaaakaattaaataacaaaaagacttttcccatttcaccgttgaaaagcctgagttccatccaggcttggtctctaactagagtgcgctttcatagcacctcctcatttctataacacattaacacacagttttattgcatgtttgacatagatacagtgggtaaagcagaaattgtcatctctattttttacagatgagaaaacccaggtgcacagaagttaaaaatccctgcccctgccatcaccaatgccgccactggggctagcggtcctgcttcttgacctcacgatatcaactgcccatctcacaagcaggagaagaagaagcagttggaacactggtgtagaccactagaagtggatcagcacacagacccccagcctgcctctgacaccccggggg

SEQ ID NO: 674124 - DNA, 953 bp, Homo sapiens
accctggggcaggacaccacccaccccccgcccccacgaccaaaggatggggacatgaatgcctcttgatgcctctgtccctccatagtgcacacctggcacatgacctctgaccctcactacacttgaccaggagaggcctccaatcccagggctctgctgctacaccccattccccccttaagggaaactccaaggggctgagtagtcatagtcaggggttatctcgtggtgcccagttcctggttacatttgaaacgctaatcgtttaaattaaagaaaggatgctagtataggctacaaatcccagattcagtgcagtgcatcagaaattatgaaagtcttccatcttaccatattccagggcaggacctaaatgcacaggctgagattgggagagagagtgaggggatgagttcaggaaggcttgagtccaggagcctgcagaaatccaccctggctcacccaaatcattgtcacttatggagacaagctggaagatgaaccaacaggcagggatattttgtcagtaaatacttcagaacaattgccatggggtgccactgaaggacaaataaaggatggatcttcaagggaggtgcattatccattgaaacaagaagagagatttttgtagtttgttcagtaggccaagttctggctgggccccatgtgggcatgagagacccagactcccagccccacctgcggcaggaaagctggtactataatatgtggcttaaaagtgtaaattgtccccaaaagcctgtcatttctcagtctcccatgcaggctgtagtgggttgaatggtggcctctaaaagatatgcccgcccagagcctgtgaacgggatcttgttcggaaaaagggtctttgcagatgcaattaagaatcttgagatgagatcttcctggattaggrtgggctctaaatccaatgacaggaggcttca

SEQ ID NO: 674125 - DNA, 596 bp, Homo sapiens
ggtgaaagccagtctctactaaaaatacaaaaattagctgggcgtggtggcaggcacctgtagtctcagctacttgggaggctgaggcaggagaatcacttgaacccgggaggcgaaggttgcagtgagctgagattgcgccactgcactcctgcctgggtgacagagcgagactcccgtctcaaaaaaaaaaaaaaaatgctaaccaggaacaaattcatcattatttagtatttcttgttacatataaataccaaacccctaatgcttatcaaaaacataactatgcctggcacggtggctcatgcctgaggctgaggcgagtggatcaygaggtcaggagatcgagaccatcctggctaacacggtgaaaccccatctctactaaaaatacaaaaaattagccgggcatggggggcgggcgcctgtaatcccagctactcgggaggctgaggcaggagaatggcatgaacccaggaggcgaaggttgcagtgagctgagatcgcaccactgcactccagcttgggggacaaagagagactccttctcaaaaaaaaaaaaaaaaaaaaaaaaccagcaccaacaacaaaaaaac

SEQ ID NO: 674126 - DNA, 657 bp, Homo sapiens
ttgtgctgggtagagctctgccttcttggacaaggaaacaagaaaaaggagtagtctttgaaaaaatcatatggtcctgataaagtcagcctcgtgctaaaatttcactggaaacaatgtttttctaaaaaaaaaaaaaaaaaaaacctaaaacacattttaggaaacaatgatcatccttagataaaaaatcaaattgcctttttgaaatggaacaaaatgtcaaagggagaatagactgatatggaagcagcccagataaagaaaatcgagataagtaaaataagaaagtattaaaggaaacgagaaattcaatgctgaattaatccatgtggggatggtaaatcagaaatgacaccttggaaaatctgatccttagtgagggagacaaacctgagactctctctgagaatggagaggaaaggaaatcacgtrgaaatggtgggatggacagaaaaaaagaaaatacagcattggggtgaaagggcatgagattcagtgtctcacgcagacttgaagctcaaccccagcacttacaacatgtgcggacctgggcaaggcttccatctgcagtgcagggataacaatatctcctcagagtaccacagttgggacagcaacaaatatatatgggaattcagcatgacatatggcatc

SEQ ID NO: 674127 - DNA, 657 bp, Homo sapiens
ttgtgctgggtagagctctgccttcttggacaaggaaacaagaaaaaggagtagtctttgaaaaaatcatatggtcctgataaagtcagcctcgtgctaaaatttcactggaaacaatgtttttctaaaaaaaaaaaaaaaaaaaacctaaaacacattttaggaaacaatgatcatccttagataaaaaatcaaattgcctttttgaaatggaacaaaatgtcaaagggagaatagactgatatggaagcagcccagataaagaaaatcgagataagtaaaataagaaagtattaaaggaaacgagaaattcaatgctgaattaatccatgtggggatggtaaatcagaaatgacaccttggaaaatctgatccttagtgagggagacaaacctgagactctctctgagaatggagaggaaaggaaatcacgtggaaatggtgggatggacagaaaaaaagaaaatacagcattggggtgaaagggcatgagattcrgtgtctcacgcagacttgaagctcaaccccagcacttacaacatgtgcggacctgggcaaggcttccatctgcagtgcagggataacaatatctcctcagagtaccacagttgggacagcaacaaatatatatgggaattcagcatgacatatggcatc

SEQ ID NO: 674128 - DNA, 612 bp, Homo sapiens
tcaccattttagccaggatggtctcgatctcctgacctcgtgatccacacgtctcggcctcccaaagtgctgggattataggcgtgagccaccgcgcctggcctttttttttttttttttctytcagagtcttgctctgtcgccctggctggagtgcagtggtgcgatcttggctcactgcagcctctgcctcccggattccagtgattctcctgcctcagcctcctgggtagctgggattacaggcgcaccccacgatgccggctaatttttgtatttttagtagagtcagtgtttcaccatgttggccaggctggtctcccactcctgatctcaggtgatccgcccgcctgggcctcccaaagtgctgggattacaggcgtgagccaccgggcccggcctcacagaggcacttttacagaggagtgcctggtgctggacaggtaacaagtccacatactctgggcagcgccaaacaccctgtggaaactacatggccacggcagtcacgcctagaatcctttgtgcggtgttcacatagaatgctttggcccccattgtgccactcagggcacctgccttgaaatacccgcgacgctcggatcggagtct

SEQ ID NO: 674129 - DNA, 733 bp, Homo sapiens
cccgagtagctgggattacaggcctgtgccaccatccccaactaatttttgtatttttagtagagacggagtttcgccatgtttgccaggctggtcttgaactcctgacttcaggtgatccacccacctcagcctcccaaagtgctgggattacaggcgtgagccaccgaggctggcctgcattttttctttatttttttgagatggaatctcactctgttgcccacggtggagtgcaatggcacaatctcggctcactgcaacctccgcctcctgggttcaagcgattcccctgcctcagcctgggattacaggtgcccgccaccacgcccagctaatttttgtatttttagtagagacagggtttcctagctaatttttgtatatttagttgagacagggtttcaccatgttggccaggctggtctcgaactcctgacctcaggtgatccaactgccttgacctcccaagttgctaggattacaagcgtaagccaccacacctggcctgcattttttctaaatttggggaaagtagaggtagaagggattgggaaggttgaggtccaaaggagaraaaacggaagtgaacgggaaattattttgaagactacgtggccactgccttttatctaagaaatgcattggacaacaagcaacaatgggcaagaccaacctgaagcctacagtggctgagagagacaggaaggtgggtggttggtgaaggaaagat

SEQ ID NO: 674130 - DNA, 653 bp, Homo sapiens
ggggttctggggtgcaagtaggagatggagccgggaaggcattcatggagaggggtggggctcctggggatgatcgagggggctgcagagtgaaatctgcatgccttgggtcttggcaggtgtggagggctaggccgtgtgcagggatcgtccccaccccttacccttctccttcagcccatcagatatcttattcagcctctcagtaaagagattcttgtgcgtgtagatctcttccagaagtactgttttatctgggtagagcaggagggaaggggtgttcagggttacaacttgctcaaggttgggttttcagacccttgtttctacatggaagttccaaagagcacacggagacagactgcattcatctcccaccttcacaagacctcccacccatggccacatgggcctctgagaatgccttggagggtgggcctttgtcaacccaagccccaaggccctggggctcttggcttcctcaccatctcgtaacgttttaatggcttggtgtacttgagtgaagaatttggctgtttcttyttccaaatggtcacgatctgaggatgagatacaggtcaaagggaagtcaagggagtaagatcccaggtcaggtaaagaggccacatccaatccctgatctcctggctgtg

SEQ ID NO: 674131 - DNA, 627 bp, Homo sapiens
taaaatgtttacatgtgattaaatagggtaagcaatgatgccataaattatgaaggcccaaagaactgacattgatgacaagtgtcaaatcactgaaactgctaawttttttttttttttttaagacagagtttggctctgttgcccaggctggagtgcaatggtgcgatctccgctcactacaagctccgcctcccgggttcacgccattctcctgcctcagcctcccgagtagctgcgactacaggcgcccgccaccacacctggctaattttttgtgctttttagtagagacggtgtttcaccgtgttagccaggatggtcttgatctcctgaccttgtgatccgcctgcctcggcctcccaaagtgctgggattacaggcgtgagccaccgcgcccggctgaaactgctaaaatttaaagaaggaatcacttcagttcaggacaacatgatagaacatcctgcaagaggaccatttgaactggacatggaagtaggggaagatgcattcagttaatgatttgaattacacaaattagctttataagtttttcaggaataaaactatcacataaaatgagatgactatcttttgtatgaaatattgtatttgtgtatgttgaga

SEQ ID NO: 674132 - DNA, 586 bp, Homo sapiens
tgtccccggccaccgcgggcgtggtaaccttatcccccgctccgctggagggctcgggaaacggcctggaggccacccgctgtggaattacgtaataggcacttgagtccgaggttccaaatgcacggcttgcaggttccaagtaccagcctttatttttctctccggtggaaaactgtatcaggcaacttctttccatgaaaktgagatctgtgcgtcttgaagccgatagattatcacagaaaaaccagcaaccctgattttaaatcatttgccaacagtgttaatgggcggttcctaatccgtttcttaatttaagggtttgtaaatcaaaaaacagctcagaaatgatacgattaacatatgacggtgagtaactacgagagcaagctgtttcatactccgttaaaatcaggtacataaaaatctgaacttgtgaaaatttaagatgaaataattttttgcttttaaaaagaggctccaagatgtcactggcagctacttctattcgcacgacattcatccctttgaaaagttcctaatttttagctaccatttattgggactgagtgccagaccaggcttt

SEQ ID NO: 674133 - DNA, 613 bp, Homo sapiens
tgacaaatatatgttaaataaaaaaaatttttttttgttttgagatggagtcttgccttgtcgcccaggctggagtgcagtggggcgatctcggctcagctgcaagctccgcctcccgggttcacgccattctcctgcctcagcctcccaagtagctgggactacaggcgcccgccaccatgcccggctaattttttgtatttttttttttagtggagacggggtttcaccgtgttggccaggatagtctcgatctcctgacctcgtgatccacctgcctcggcctcccaaaggtgctgggattaaaggcgtgagccaccgcgcccggccctaaataaatcgttttaagtcctttccccgtgcatcwaatttgtcagacctgtgtccaatctaaagtttaagtccacgtggctcttaatctctctgagaagaaaagtctagtagggaagataaatgatatgcttatttgataaatatttattgaacttcctaatagcaggaatgatgctaggcactagggatgcaaaggtgaattggtcagggttctggtgctggaggactcactcagtgtggcgggaattgtcagtttccgctgacaataatgttaccagcg

SEQ ID NO: 674134 - DNA, 613 bp, Homo sapiens
tgacaaatatatgttaaataaaaaaaatttttttttgttttgagatggagtcttgccttgtcgcccaggctggagtgcagtggggcgatctcggctcagctgcaagctccgcctcccgggttcacgccattctcctgcctcagcctcccaagtagctgggactacaggcgcccgccaccatgcccggctaattttttgtatttttttttttagtggagacggggtttcaccgtgttggccaggatagtctcgatctcctgacctcgtgatccacctgcctcggcctcccaaaggtgctgggattaaaggcgtgagccaccgcgcccggccctaaataaatcgttttaagtcctttccccgtgcatctaatttgtcagacctgtgtccaatctaaagtttaagtccacgtggctcttaatctctctgagaagaaaagtctagtagggaagataaatgatatgctyatttgataaatatttattgaacttcctaatagcaggaatgatgctaggcactagggatgcaaaggtgaattggtcagggttctggtgctggaggactcactcagtgtggcgggaattgtcagtttccgctgacaataatgttaccagcg

SEQ ID NO: 674135 - DNA, 1277 bp, Homo sapiens
gcactagggattttttttttttttttttttttttttgagatagagtttcactcttgttgcccaggctggagtgcagtggcgcgatccggtcaccgcaacctccgcctcccaggttcaagcgtttctcctgcctcagcctccctagtagctgggattacaggcatgtgccaccacgcctggctaattttgtatttttagtagagacggggtttctccatgctggtcaggctggtctcaaactcccgacctcaggtgatccacccgcctcggcctcccaaagtgctgagattacaggcatgagccaccgcgcccggcagcactagggattttaagcagaaagggaaacaatatgagatgtaggtgcttagaaatgatttttagagaggctagaggagcaataatgatgcttagaacattgttgtagaactgaccttctttgggagcttttatgtgtgaggccaccaatggaaccagtaaactgttttaaaaacagtatatagctactattcaggactaggaagctgccactgctattgctttaggaatagctgcctcataacacccagcaaactggagaatggacattggaacactgtttcagaaatattttacacccaggtcagtgcctagcacattgtagatgagtgacaaaggtagtagttattggtttttctttttctttttaaatgaatcagtcatttaaattaagacttaatctgtacgagtctgctccatactcctgtgcctgtttatgttacagtgatttttttttttgtttcaaagaagtggttttgtggtccagtttcaatctcatttagtatttttcctaattttacccgagtttcaactagagtttgcctgagtctgattaggttgttgctaattctttgacagattagtttattcagtgagtagcagaattttattggcaccggaaactatcctttgtaactttgagtttatgcaaaagcatcttcttagtctttttgcayatgccagaggagacccttgttaatagaaattgtgatcacaaggccgggcatggtggctcacgcctgtaatcccagcactttgggaggccgaggcaggtggatctcctgaggtcaggggttcgagaccagcctggccaacatggtgaaaccccatctctactaaaaataccaaaaattagccgaatgtagtgtcgggcgcctgtaatcctagctactcaggaggctgagacaggagaatcacttaaacccggaaggcggaggttgcagttagctgagattgcgcca

SEQ ID NO: 674136 - DNA, 1430 bp, Homo sapiens
attgacaccctttcctacatctccttggaaatctttggtaaaattcaccttgctcactaatgctttgtgaaacactttctttggtatctgtaagtaaacatgacaccttgtttccaggtcagtgtagtgatcagagataactttgtagcctacgtacccataggaccattctaacragaatgaaaaggttatgcaggagacatgaagatagaccaaagggctctggaaaccagacagatggatttaaaccaagaatattttaatagtaatggcagactaaggggaatcatttaaaaaaaaaaaaaaagtctaggccaggcagcggtggctcacgcctgtgatcacaacactttgggaagccaaggcaggtggatcacttgaggtcaggagtgtcaggcctctgagcccaagcgaacgcatcatatccccgcgacctgcacgtatacatccagatggcctgaagcaactgaagatccataaaagaactgaaaattaaaaaaaagaaaaagaaaatagccttaactgataacattccaccattgtaatttgtttctgccccaccgtaactgatcaatgtactttgtgatctcccccacctttaagaagcttctttgtaattctccccacccttgagaacgtactttgtgagatccaccccttgcctgcaaaacattgctcctaacgccaccgcccatcccaaaacctataggaactcatgataatcccatcaccctttgtggactcctttttcagactcagcctgcctgcacctaggtgaaataaacagccttgttgctcacacaaagcctgttggtggtcttcacacggatgtgtgagacaaggagttcgagaccagcttggccaacatggtaaaacactgtctctactaaaaatacaaaaattagccgggcgtggtggctcctgcctgtagtcccagctactcaggaggctgaggcaggaaaattgcttgaacccaggaggtggaggttgcagtgagccaagattgtgccactgtactacagtctgggcaacacagcgagactccttctaaaaaaaaaaaaatgtctacacaacgtcttcagcttaggatagagagggaagaggaagaagccaattgaaaggctgtcacacaaggtgaacaagccttgaataaggacattcacaaagttagttgtaaagagcgcagatacaaactatgaatcacaagccaacaagccacagaatttaaagtaggccaaatatgagttatcagatgcaaagaagagtcgaagaaaactctaaattttcaagcctttgatcgggaagataatgatatttttgagaatgaggaacataagacaaaatattgagagaaggaagaatgcagtttgggcagtttgggttcgtccaggcactgagagatctaagtgatacctctggaaatgatatag

SEQ ID NO: 674137 - DNA, 1430 bp, Homo sapiens
attgacaccctttcctacatctccttggaaatctttggtaaaattcaccttgctcactaatgctttgtgaaacactttctttggtatctgtaagtaaacatgacaccttgtttccaggtcagtgtagtgatcagagataactttgtagcctacgtacccataggaccattctaacgagaatgaaaaggttatgcaggagacatgaagatagaccaaagggctctggaaaccagacagatggatttaaaccaagaatattttaatagtaatggcagactaaggggaatcatttaaaaaaaaaaaaaaagtctaggccaggcagcggtggctcacgcctgtgatcacaacactttgggaagccaaggcaggtggatcacttgaggtcaggagtgtcaggcctctgagcccaagcgaacgcatcatatccccgcgacctgcacgtatacatccagatggcctgaagcaactgaagatccataaaagaactgaaaatwaaaaaaaagaaaaagaaaatagccttaactgataacattccaccattgtaatttgtttctgccccaccgtaactgatcaatgtactttgtgatctcccccacctttaagaagcttctttgtaattctccccacccttgagaacgtactttgtgagatccaccccttgcctgcaaaacattgctcctaacgccaccgcccatcccaaaacctataggaactcatgataatcccatcaccctttgtggactcctttttcagactcagcctgcctgcacctaggtgaaataaacagccttgttgctcacacaaagcctgttggtggtcttcacacggatgtgtgagacaaggagttcgagaccagcttggccaacatggtaaaacactgtctctactaaaaatacaaaaattagccgggcgtggtggctcctgcctgtagtcccagctactcaggaggctgaggcaggaaaattgcttgaacccaggaggtggaggttgcagtgagccaagattgtgccactgtactacagtctgggcaacacagcgagactccttctaaaaaaaaaaaaatgtctacacaacgtcttcagcttaggatagagagggaagaggaagaagccaattgaaaggctgtcacacaaggtgaacaagccttgaataaggacattcacaaagttagttgtaaagagcgcagatacaaactatgaatcacaagccaacaagccacagaatttaaagtaggccaaatatgagttatcagatgcaaagaagagtcgaagaaaactctaaattttcaagcctttgatcgggaagataatgatatttttgagaatgaggaacataagacaaaatattgagagaaggaagaatgcagtttgggcagtttgggttcgtccaggcactgagagatctaagtgatacctctggaaatgatatag

SEQ ID NO: 674138 - DNA, 1430 bp, Homo sapiens
attgacaccctttcctacatctccttggaaatctttggtaaaattcaccttgctcactaatgctttgtgaaacactttctttggtatctgtaagtaaacatgacaccttgtttccaggtcagtgtagtgatcagagataactttgtagcctacgtacccataggaccattctaacgagaatgaaaaggttatgcaggagacatgaagatagaccaaagggctctggaaaccagacagatggatttaaaccaagaatattttaatagtaatggcagactaaggggaatcatttaaaaaaaaaaaaaaagtctaggccaggcagcggtggctcacgcctgtgatcacaacactttgggaagccaaggcaggtggatcacttgaggtcaggagtgtcaggcctctgagcccaagcgaacgcatcatatccccgcgacctgcacgtatacatccagatggcctgaagcaactgaagatccataaaagaactgaaaattaaaaaaaagaaaaagaaaatagccttaactgataacattccaccattgtaatttgtttctgccccaccgtaactgatcaatgtactttgtgatctcccccacctttaagaagcttctttgtaattctccccacccttgagaacgtactttgtgagatccaccccttgcctgcaaaacattgctcctaacgccaccgcccatcccaaaacctataggaactcatgataatcccatcaccctttgtggactcctttttcagactcagcctgcctgcacctaggtgaaataaacagccttgttgctcacacaaagcctgttggtggtcttcacacggatgtgtgagacaaggagttcgagaccagcttggccaacatggtaaaacactgtctctactaaaaatacaaaaattagccgggcgtggtggctcctgcctgtagtcccagctactcaggaggctgaggcaggaaaattgcttgaacccaggaggtggaggttgcagtgagccaagattgtgccactgtactamagtctgggcaacacagcgagactccttctaaaaaaaaaaaaatgtctacacaacgtcttcagcttaggatagagagggaagaggaagaagccaattgaaaggctgtcacacaaggtgaacaagccttgaataaggacattcacaaagttagttgtaaagagcgcagatacaaactatgaatcacaagccaacaagccacagaatttaaagtaggccaaatatgagttatcagatgcaaagaagagtcgaagaaaactctaaattttcaagcctttgatcgggaagataatgatatttttgagaatgaggaacataagacaaaatattgagagaaggaagaatgcagtttgggcagtttgggttcgtccaggcactgagagatctaagtgatacctctggaaatgatatag

SEQ ID NO: 674139 - DNA, 1430 bp, Homo sapiens
attgacaccctttcctacatctccttggaaatctttggtaaaattcaccttgctcactaatgctttgtgaaacactttctttggtatctgtaagtaaacatgacaccttgtttccaggtcagtgtagtgatcagagataactttgtagcctacgtacccataggaccattctaacgagaatgaaaaggttatgcaggagacatgaagatagaccaaagggctctggaaaccagacagatggatttaaaccaagaatattttaatagtaatggcagactaaggggaatcatttaaaaaaaaaaaaaaagtctaggccaggcagcggtggctcacgcctgtgatcacaacactttgggaagccaaggcaggtggatcacttgaggtcaggagtgtcaggcctctgagcccaagcgaacgcatcatatccccgcgacctgcacgtatacatccagatggcctgaagcaactgaagatccataaaagaactgaaaattaaaaaaaagaaaaagaaaatagccttaactgataacattccaccattgtaatttgtttctgccccaccgtaactgatcaatgtactttgtgatctcccccacctttaagaagcttctttgtaattctccccacccttgagaacgtactttgtgagatccaccccttgcctgcaaaacattgctcctaacgccaccgcccatcccaaaacctataggaactcatgataatcccatcaccctttgtggactcctttttcagactcagcctgcctgcacctaggtgaaataaacagccttgttgctcacacaaagcctgttggtggtcttcacacggatgtgtgagacaaggagttcgagaccagcttggccaacatggtaaaacactgtctctactaaaaatacaaaaattagccgggcgtggtggctcctgcctgtagtcccagctactcaggaggctgaggcaggaaaattgcttgaacccaggaggtggaggttgcagtgagccaagattgtgccactgtactacagtctgggcaacacagcgagactccttctaaaaaaaaaaaaatgtctacayaacgtcttcagcttaggatagagagggaagaggaagaagccaattgaaaggctgtcacacaaggtgaacaagccttgaataaggacattcacaaagttagttgtaaagagcgcagatacaaactatgaatcacaagccaacaagccacagaatttaaagtaggccaaatatgagttatcagatgcaaagaagagtcgaagaaaactctaaattttcaagcctttgatcgggaagataatgatatttttgagaatgaggaacataagacaaaatattgagagaaggaagaatgcagtttgggcagtttgggttcgtccaggcactgagagatctaagtgatacctctggaaatgatatag

SEQ ID NO: 674140 - DNA, 815 bp, Homo sapiens
tccgtccggtgcaggcagcgcagtgaggctcaatctgactgctgctggctcttcwcaggcccaccgcctctctgcccctgaccgggaggatttgatgcccttcaaaatgtagagcctattgatctgttttctaggcaacgaatgctgaagccatgtccactaatgtggctgcagaaggttaaatatggatttggcaagaattatgagctgcccacgaatgttttagagatggtctgaaatgtagacatagagaaagaggcagctcagtggcgggttttgtgggcacgtgtgcatctcctgaggtgaaagttatgtcctttgtgtttaattggctttgcagtatcctggatcttcattatacaatactcatacctgaaaaattagtaaaaatgggaggaacacaggcaatgtcaaagacaaaaaaaaattctctttacacatgtcttacacatttttgatattatgcatgtattaatcagtcaccctgtcattctcccattgcactcgagaaggtagagtattaagagagagagaaagaatataaaatcttctgtagaaggcagacttttaacatatgcggacaaagaaaacaagaatttagcaatatgttactaagtgacagatttagaaagttctttgtcatttgatcttcaggcttttttctcctcttgttttttatacaaagcgtgggtaataaaaatagttctgttggttttcatttcgagtctggtttcacgtctgtcttttatgtggtggtagctgtagtatgcttgaattcatagaaaatacctcacggaatgcttacatctactctt

SEQ ID NO: 674141 - DNA, 815 bp, Homo sapiens
tccgtccggtgcaggcagcgcagtgaggctcaatctgactgctgctggctcttctcaggcccaccgcctctctgcccctgaccgggaggatttgatgcccttcaaaatgtagagcctattgatctgttttctaggcaacgaatgctgaagccatgtccactaatgtggctgcagaaggttaaatatggatttggcaagaattatgagctgcccacgaatgttttagagatggtctgaaatgtagacatagagaaagaggcagctcagtggcgggttttgtgggcacgtgtgcatctcctgaggtgaaagttatgtcctttgtgtttaattggctttgcagtatcctggatcttcattatacaatactcatacctgaaaaattagtaaaaatgggaggaacacaggcaatgtcaaagacaaaaaaaaattctctttacacatgtcttacacatttttgatattatgcatgtattaatcagtcaccctgtcattctcccattgcactcgagaaggtagagtattragagagagagaaagaatataaaatcttctgtagaaggcagacttttaacatatgcggacaaagaaaacaagaatttagcaatatgttactaagtgacagatttagaaagttctttgtcatttgatcttcaggcttttttctcctcttgttttttatacaaagcgtgggtaataaaaatagttctgttggttttcatttcgagtctggtttcacgtctgtcttttatgtggtggtagctgtagtatgcttgaattcatagaaaatacctcacggaatgcttacatctactctt

SEQ ID NO: 674142 - DNA, 1361 bp, Homo sapiens
tctggctccaggtatgagagtcaagacctcctgtgagttgggtctaagtacatgagtcacagtcttaatagtggactgcatccctgcatgagagccacaattctaaatgcaggtttctcagtatacgagtcacagcctcacaggcatgmtgaatcctggtctttgagtcactatcttacctgtggacaagatgtattcacgaaagtcacaattccaactttcggctacctgcacatgtgaggttcacagcctcaacagtggatggtttccatttgggagggtgacaatgtttactgttggctgagtgtgcataagaaagtcacaatttcacctgtgtcctgggtcctgttatgacactctctgtaccacccaagggctttatgtggtatgagcgacagtcacaatctgctttgagatcttcatgctggtgtgaaccaatgatcgtacccattgttctattaccaggtatgtgtcaacatctctcttattggtcagatatatttatgacagtcatcacagtgcttgtaagctggctccaaaaataagtcaccatatcaactgtcccagtacacatacgaaagtcacaattccaattgtggactgtgcctgtgagattcaggacctcaccagtggctctgtcaatgtgtgagggtgacaatcctaattgtcagctgggtttgtctacaagagtagtaatttcacttgggtgctggatcctgtaatctctaaatgtcacacaagggctttagagaatatgcttgtcataatcttttgtgacctttcctcacccagaaccttatgcttcttcacccagaaccttacccattgccctaagcctagaaaatagaggccaaatctcctgtatcgactgggtccatgtatgagggctatcattacgcctctaaacttggcctagatatatgtcgcaatacctcctgtgagcagaaaccaaacgagagtcacatcactttggtgcttggccaaagatttgttacaatcccactcataaacaggacccaggaagaagatgtgtcacaatggccactgtaggcaggagtcacatcacctgggtgcttggcccagctatatgtcacaatctattctgttggcagaacacaggcaggaaatgagagtcacatcacccaggtgctgggcctagttatatgtcacaatcctcctgcaagcagggtcaaagcagaacacaaaagtcacatcatggaaatgatgggcccagtgatatgtcacaatccccactgagggcagggcccaggggaaaaaaaagagtcaaatcacataggtgatgggttcaggcatgtcgcaatgccttttttgggaacagcctaggcaggattggagaggca

SEQ ID NO: 674143 - DNA, 650 bp, Homo sapiens
tggtaagtgaggacccccatcttggaaataagatatatctgtaccaataataataacaataccacttatatgccaggcacttaataacactatatatatatatatatatatatatatatayacacacacacacacacacacacacacacatatacacacatatatatacatatatatgtatatctatgtctatgtttctatttatttgtctacctatctctgtatatagttctccacaatttcttatccacagttccaaaatccaaaaagctctgaaaaagcaaaaaaatttttttaaaacatatttgaagcaaagcctggtccaaaactgagtgaggctatttatagtctttgttcatggtttatgtgaatatttatatatttttctgtgaaaagattaatgtttgatttttgatacttttgtaatccctgacagggtgttatatgatatgtgttctaaaatttcctttcctaaaattgtcaaaattctgaatttggaaatatgtaagtccccaagtattttggtgaaggcattgtggactaatagtaactcatataattctcacaataacatacgtatttctcattaaaatacttctacatgtttcttattgaaggtcacactaaaaaaatgtgaggaacactgtatt

SEQ ID NO: 674144 - DNA, 2033 bp, Homo sapiens
tgcaagatcattcaatggacacattaatcttctaaaatggctgttttcttaggctgttttgttattaatgagaattagcaagccacactcaccactctatggtagacattctcctgcacactgctgtacatttataatctctttgaaagaaaaccaaccagtcatcccagatacaaaatctaaaacctaattaaataggtcataatatttctaaaatttagaggctaatcattaaaacagaatgaaataagctttgtcggcaaacttcagaattctctctcattccccattcactgctagggatttgacagtaaccttaagactttcctgttactccttctatctgtccctcaaatccttctctcatatatttctgatagagacctctattttttgacatataaaaagctaaacaacttaagatcaaaaaataggatacataaattctgagatgattagaatatgccttaaaatgctatttcacaataaggatatataaagaataatactctacaaaaacactcccttctattatacaatggggtaaaaggatttttgtgatctctaaaacattattcctttgagatgagattttaacatcctattgcccttgctaatgatgtcgctgggcttcatgataacaatattcctttggttatcatgaatcagctgttcttgtcttttatgagctactctgagacctttagaaggtcattacacctgggagaagaagggttgcctgactcactcttgatagttcgaggcaagaatctttgagcaatcagcatccaagctgagacctgaagcaacagaggcatggacattcaggggattggggactgcaagaagtttaatagatctagatcttgcagtacacagtagggaatggaaaaatcaactggagatttaagtagtggctttgtaaaccatgctaaggattgtggtttgtactttcccttggaggaatggaatagggatccacaggagtttctgctgatttccacttcttccagaccactccgtgggtgatgttgactgtagagcccagagagagagggtacagctatagctctacctccatagcatctgcatccacatgcacacatatacttagtccactcacgacccccaaactgcaatactcaagtcttttaatattatcaaaatggaaaagaaagggctgggtctgcccttagctggttggctcaatcatatcatcagtagaaaaggtctgtagagaaattggtccctaagttccgtatattattttctagatggactacagataagtgataaaaaccgaggggctacagaattgggtagctggagaaggaaaagtgtaatgttaaaaatgtaatctgagcattaataaaaaaaaaaactaatgatgctacttaacagagataacaggatgtcctacctaaggttaaattaggtcactgccactgataaatttaagactgaaagtttaacatgyttattttgttaccagccttctgtgagcccaagggctatttgctttatatttatcctatttggatccttctgcgaagcttaaaatggccatgagacacgggttaggtcatggtgaaaatggtaagaagccactttagtttcttcctgccaaccttccttcttgaatcagacactttaatttcaattgctatgagatcacatagtggaaacatgtattcccagagggtgatacagtgcaatactatccttaacaggcaaatccaaggcatagccagtcccaagttgatcactagtgcaaatcataaaatacctaagtaacttttaggtgactttctcataaacaccagaatgacatgggttttcttaacaaaatatcactggtttgagacctaggatgcttctaaaacattgttattgctcccagatttcctttctcagagaattaggagagaaacaaaggtttgttgaggacctgttatctataagttgtttcaggtgggtgctttatgtaatttgttcataaaatatacatatcaggtattattattgtcttcatt

SEQ ID NO: 674145 - DNA, 2033 bp, Homo sapiens
tgcaagatcattcaatggacacattaatcttctaaaatggctgttttcttaggctgttttgttattaatgagaattagcaagccacactcaccactctatggtagacattctcctgcacactgctgtacatttataatctctttgaaagaaaaccaaccagtcatcccagatacaaaatctaaaacctaattaaataggtcataatatttctaaaatttagaggctaatcattaaaacagaatgaaataagctttgtcggcaaacttcagaattctctctcattccccattcactgctagggatttgacagtaaccttaagactttcctgttactccttctatctgtccctcaaatccttctctcatatatttctgatagagacctctattttttgacatataaaaagctaaacaacttaagatcaaaaaataggatacataaattctgagatgattagaatatgccttaaaatgctatttcacaataaggatatataaagaataatactctacaaaaacactcccttctattatacaatggggtaaaaggatttttgtgatctctaaaacattattcctttgagatgagattttaacatcctattgcccttgctaatgatgtcgctgggcttcatgataacaatattcctttggttatcatgaatcagctgttcttgtcttttatgagctactctgagacctttagaaggtcattacacctgggagaagaagggttgcctgactcactcttgatagttcgaggcaagaatctttgagcaatcagcatccaagctgagacctgaagcaacagaggcatggacattcaggggattggggactgcaagaagtttaatagatctagatcttgcagtacacagtagggaatggaaaaatcaactggagatttaagtagtggctttgtaaaccatgctaaggattgtggtttgtactttcccttggaggaatggaatagggatccacaggagtttctgctgatttccacttcttccagaccactccgtgggtgatgttgactgtagagcccagagagagagggtacagctatagctctacctccatagcatctgcatccacatgcacacatatacttagtccactcacgacccccaaactgcaatactcaagtcttttaatattatcaaaatggaaaagaaagggctgggtctgcccttagctggttggctcaatcatatcatcagtagaaaaggtctgtagagaaattggtccctaagttccgtatattattttctagatggactacagataagtgataaaaaccgaggggctacagaattgggtagctggagaaggaaaagtgtaatgttaaaaatgtaatctgagcattaataaaaaaaaaaactaatgatgctacttaacagagataacaggatgtcctacctaaggttaaattaggtcactgccactgataaatttaagactgaaagtttaacatgcttattttgttaccagccttctgtgagcccaagggctatttgctttatrtttatcctatttggatccttctgcgaagcttaaaatggccatgagacacgggttaggtcatggtgaaaatggtaagaagccactttagtttcttcctgccaaccttccttcttgaatcagacactttaatttcaattgctatgagatcacatagtggaaacatgtattcccagagggtgatacagtgcaatactatccttaacaggcaaatccaaggcatagccagtcccaagttgatcactagtgcaaatcataaaatacctaagtaacttttaggtgactttctcataaacaccagaatgacatgggttttcttaacaaaatatcactggtttgagacctaggatgcttctaaaacattgttattgctcccagatttcctttctcagagaattaggagagaaacaaaggtttgttgaggacctgttatctataagttgtttcaggtgggtgctttatgtaatttgttcataaaatatacatatcaggtattattattgtcttcatt

SEQ ID NO: 674146 - DNA, 2033 bp, Homo sapiens
tgcaagatcattcaatggacacattaatcttctaaaatggctgttttcttaggctgttttgttattaatgagaattagcaagccacactcaccactctatggtagacattctcctgcacactgctgtacatttataatctctttgaaagaaaaccaaccagtcatcccagatacaaaatctaaaacctaattaaataggtcataatatttctaaaatttagaggctaatcattaaaacagaatgaaataagctttgtcggcaaacttcagaattctctctcattccccattcactgctagggatttgacagtaaccttaagactttcctgttactccttctatctgtccctcaaatccttctctcatatatttctgatagagacctctattttttgacatataaaaagctaaacaacttaagatcaaaaaataggatacataaattctgagatgattagaatatgccttaaaatgctatttcacaataaggatatataaagaataatactctacaaaaacactcccttctattatacaatggggtaaaaggatttttgtgatctctaaaacattattcctttgagatgagattttaacatcctattgcccttgctaatgatgtcgctgggcttcatgataacaatattcctttggttatcatgaatcagctgttcttgtcttttatgagctactctgagacctttagaaggtcattacacctgggagaagaagggttgcctgactcactcttgatagttcgaggcaagaatctttgagcaatcagcatccaagctgagacctgaagcaacagaggcatggacattcaggggattggggactgcaagaagtttaatagatctagatcttgcagtacacagtagggaatggaaaaatcaactggagatttaagtagtggctttgtaaaccatgctaaggattgtggtttgtactttcccttggaggaatggaatagggatccacaggagtttctgctgatttccacttcttccagaccactccgtgggtgatgttgactgtagagcccagagagagagggtacagctatagctctacctccatagcatctgcatccacatgcacacatatacttagtccactcacgacccccaaactgcaatactcaagtcttttaatattatcaaaatggaaaagaaagggctgggtctgcccttagctggttggctcaatcatatcatcagtagaaaaggtctgtagagaaattggtccctaagttccgtatattattttctagatggactacagataagtgataaaaaccgaggggctacagaattgggtagctggagaaggaaaagtgtaatgttaaaaatgtaatctgagcattaataaaaaaaaaaactaatgatgctacttaacagagataacaggatgtcctacctaaggttaaattaggtcactgccactgataaatttaagactgaaagtttaacatgcttattttgttaccagccttctgtgagcccaagggctatttgctttatattkatcctatttggatccttctgcgaagcttaaaatggccatgagacacgggttaggtcatggtgaaaatggtaagaagccactttagtttcttcctgccaaccttccttcttgaatcagacactttaatttcaattgctatgagatcacatagtggaaacatgtattcccagagggtgatacagtgcaatactatccttaacaggcaaatccaaggcatagccagtcccaagttgatcactagtgcaaatcataaaatacctaagtaacttttaggtgactttctcataaacaccagaatgacatgggttttcttaacaaaatatcactggtttgagacctaggatgcttctaaaacattgttattgctcccagatttcctttctcagagaattaggagagaaacaaaggtttgttgaggacctgttatctataagttgtttcaggtgggtgctttatgtaatttgttcataaaatatacatatcaggtattattattgtcttcatt

SEQ ID NO: 674147 - DNA, 2033 bp, Homo sapiens
tgcaagatcattcaatggacacattaatcttctaaaatggctgttttcttaggctgttttgttattaatgagaattagcaagccacactcaccactctatggtagacattctcctgcacactgctgtacatttataatctctttgaaagaaaaccaaccagtcatcccagatacaaaatctaaaacctaattaaataggtcataatatttctaaaatttagaggctaatcattaaaacagaatgaaataagctttgtcggcaaacttcagaattctctctcattccccattcactgctagggatttgacagtaaccttaagactttcctgttactccttctatctgtccctcaaatccttctctcatatatttctgatagagacctctattttttgacatataaaaagctaaacaacttaagatcaaaaaataggatacataaattctgagatgattagaatatgccttaaaatgctatttcacaataaggatatataaagaataatactctacaaaaacactcccttctattatacaatggggtaaaaggatttttgtgatctctaaaacattattcctttgagatgagattttaacatcctattgcccttgctaatgatgtcgctgggcttcatgataacaatattcctttggttatcatgaatcagctgttcttgtcttttatgagctactctgagacctttagaaggtcattacacctgggagaagaagggttgcctgactcactcttgatagttcgaggcaagaatctttgagcaatcagcatccaagctgagacctgaagcaacagaggcatggacattcaggggattggggactgcaagaagtttaatagatctagatcttgcagtacacagtagggaatggaaaaatcaactggagatttaagtagtggctttgtaaaccatgctaaggattgtggtttgtactttcccttggaggaatggaatagggatccacaggagtttctgctgatttccacttcttccagaccactccgtgggtgatgttgactgtagagcccagagagagagggtacagctatagctctacctccatagcatctgcatccacatgcacacatatacttagtccactcacgacccccaaactgcaatactcaagtcttttaatattatcaaaatggaaaagaaagggctgggtctgcccttagctggttggctcaatcatatcatcagtagaaaaggtctgtagagaaattggtccctaagttccgtatattattttctagatggactacagataagtgataaaaaccgaggggctacagaattgggtagctggagaaggaaaagtgtaatgttaaaaatgtaatctgagcattaataaaaaaaaaaactaatgatgctacttaacagagataacaggatgtcctacctaaggttaaattaggtcactgccactgataaatttaagactgaaagtttaacatgcttattttgttaccagccttctgtgagcccaagggctatttgctttatatttatcctatttggatccttctgcgaagcttaaaatggccatgagacacgggttargtcatggtgaaaatggtaagaagccactttagtttcttcctgccaaccttccttcttgaatcagacactttaatttcaattgctatgagatcacatagtggaaacatgtattcccagagggtgatacagtgcaatactatccttaacaggcaaatccaaggcatagccagtcccaagttgatcactagtgcaaatcataaaatacctaagtaacttttaggtgactttctcataaacaccagaatgacatgggttttcttaacaaaatatcactggtttgagacctaggatgcttctaaaacattgttattgctcccagatttcctttctcagagaattaggagagaaacaaaggtttgttgaggacctgttatctataagttgtttcaggtgggtgctttatgtaatttgttcataaaatatacatatcaggtattattattgtcttcatt

SEQ ID NO: 674148 - DNA, 2033 bp, Homo sapiens
tgcaagatcattcaatggacacattaatcttctaaaatggctgttttcttaggctgttttgttattaatgagaattagcaagccacactcaccactctatggtagacattctcctgcacactgctgtacatttataatctctttgaaagaaaaccaaccagtcatcccagatacaaaatctaaaacctaattaaataggtcataatatttctaaaatttagaggctaatcattaaaacagaatgaaataagctttgtcggcaaacttcagaattctctctcattccccattcactgctagggatttgacagtaaccttaagactttcctgttactccttctatctgtccctcaaatccttctctcatatatttctgatagagacctctattttttgacatataaaaagctaaacaacttaagatcaaaaaataggatacataaattctgagatgattagaatatgccttaaaatgctatttcacaataaggatatataaagaataatactctacaaaaacactcccttctattatacaatggggtaaaaggatttttgtgatctctaaaacattattcctttgagatgagattttaacatcctattgcccttgctaatgatgtcgctgggcttcatgataacaatattcctttggttatcatgaatcagctgttcttgtcttttatgagctactctgagacctttagaaggtcattacacctgggagaagaagggttgcctgactcactcttgatagttcgaggcaagaatctttgagcaatcagcatccaagctgagacctgaagcaacagaggcatggacattcaggggattggggactgcaagaagtttaatagatctagatcttgcagtacacagtagggaatggaaaaatcaactggagatttaagtagtggctttgtaaaccatgctaaggattgtggtttgtactttcccttggaggaatggaatagggatccacaggagtttctgctgatttccacttcttccagaccactccgtgggtgatgttgactgtagagcccagagagagagggtacagctatagctctacctccatagcatctgcatccacatgcacacatatacttagtccactcacgacccccaaactgcaatactcaagtcttttaatattatcaaaatggaaaagaaagggctgggtctgcccttagctggttggctcaatcatatcatcagtagaaaaggtctgtagagaaattggtccctaagttccgtatattattttctagatggactacagataagtgataaaaaccgaggggctacagaattgggtagctggagaaggaaaagtgtaatgttaaaaatgtaatctgagcattaataaaaaaaaaaactaatgatgctacttaacagagataacaggatgtcctacctaaggttaaattaggtcactgccactgataaatttaagactgaaagtttaacatgcttattttgttaccagccttctgtgagcccaagggctatttgctttatatttatcctatttggatccttctgcgaagcttaaaatggccatgagacacgggttaggtcatggtgaaaatggtaagaagccactttagtttcttcctgccaaccttccttcttgaatcagacactttaatttcaattgctatgagatcacatagtggaaacatgtattcccagagggtgatacagtgcaatactatccttaacaggcaaatccaaggcatagccagtcccaagttgatcactagtgcaaatcataaaatacctaagtaacttttaggtgactttctcataaacaccagaatgacaygggttttcttaacaaaatatcactggtttgagacctaggatgcttctaaaacattgttattgctcccagatttcctttctcagagaattaggagagaaacaaaggtttgttgaggacctgttatctataagttgtttcaggtgggtgctttatgtaatttgttcataaaatatacatatcaggtattattattgtcttcatt

SEQ ID NO: 674149 - DNA, 1669 bp, Homo sapiens
tgccatagtttttgtagtaagttgatatgcctccatcacatatattttatccatctaaggaaaccaaatggctattttgagtagccactattttccaggaatatgctggaagcaagtaagtggaaatgaaagtcatggtttttactctcaaagaacttgtaatctactgagaagacaataaaatgttatgttatttttcataagaaaggcatactaaattatgtagaataactctcccagaatgcacagggagcagacaatatgatgaaaagtaaaataaactagagtccagatgaggatattcaagcttccagaggaagaaaacagagcattatgatcacaatcatgaaccaaagatatggaaaacaactctcctgagttgaaggaagaagagattatagaggaaaaggagttaccaagtactagacaaagttaacaagaaaaaataaaaagatgctacctggacattccttgtcagaattttaatgtttttaatataatgagccatacagggagggaagccagaaggaatgtataaaaggaaygaatatgaggctgtccataatcttttccaaaacattacataccaaaaaagagtattgaataggtgttgtggagaaaagactgtgaccaggtaattattcatgtaccaatgtaaaaaatatatatgtattatagatatgcatggacttatattggtgttcccttcctaagagaattacttgaagacatattccagataacttttggataaataactcaagtagcataatataaaaagtactggcaataagaataaagccactttaaaaatgtggtcataggctgggcacaatggctcatgcctataatcccagcactttgggaggccgaggcaagcagatcacctgaggtcagcagttcgaaaccagcctggccaacatggtgaaaccccgtctctactaaaaaaatacaaaaattagctgggtgtggagacaggcgcctgtaatcccagctactcaggaggctgaggcaagagaatcgcttgaacccagaaagcagaggttgcagtgagctgaaatcgcaccaccgcactccagcatgggtgacgagcaaaattccatctcaaaaaaatatatgtgatcatgaaaattaaatacaaatgcaagctgctattcctggaaaagaatatttatctagtttaaaatatttatatgacagaaaggcgaatagcagtatgcagattaaattaacaagtattagctggcaggcaggggatgagagtggagtaaagagtacatatttctcatcctcccatgcataggtgggaatcaggagttattgctttgttcttgaatttaattattaggtatatcattcatatatacagttgactgatctaacaacaatgatgggtagaagttaaaacaggatttcttccctccagatcaccacaggcaataaaagcaaacaaggtagaatttatagagcactggagaaaaaataaaatagagcagtctaagagatgcgattcaggagtcagactagctagcctgaaacaccaccttgatcaaaggtaaattacttgacatacacagcacatgattccccaatcattaagtaaaatccattccccttttaatatacatatttaatgtgtgcctactatgtgccaggtactgtttcagat

SEQ ID NO: 674150 - DNA, 1063 bp, Homo sapiens
gatttttctttttttttttttaaggaaaagaatacactagttggaaaagtctaccttcccattaaaatatcttttttaaaactatcttatgcattgtttagtgaaaatattaacgaattgattattagtatcaaattccatgaacttacacaatctacatacatttttaaaaatatttgttaaaattcttaggaaaaaggaaaggccagttcttagtctcttttttacacgttaggaagaaatacacaaacctcccastttcattaatgaaaaaatcttaataaatcactttcatggtttatcaccagtaaacacgaacctgcacaaattgtatcaaggagcttattttaaaagcctttgagatacaaaacaaaaaccttatttctcagactataattaactcctacttacaccgagtttgtctatttggaattcttatgacaacagcaggtaaatcatatattacttttgcagagtaagttttgttccctttggttttttttttttttttttaatttatctttaacaggacgaagggtctttgcttagaccatcatcacggaactgaaaagaacagaaaataacaattatcaatgtaactaaaagttcatttccaacagacattttgtgttagcacttgctactcattttaaatagtgaaaatcagcaagccttttcttttaataactaaaagtgaatcagatcttaatcacaaaaaccttcctaagtgtactgcgtttttttgtttgtttgtttgttttttggagacggagtctggctctgtcgcccctgctggaatgcagtggcgcgatctcggctcactgcaacctccggttcaagcaattctcctgcctcagcctcccgagtagctgggactacaggttaagtttactattaaacctacctcaaaaatagccttagatattctttgcaaatatatatatttatacatacatacatacacacacacacatatatatatatatatatatctatttccagataaggaaactttcggaaaactttgctgtccaactggtaattccctgcatactttgcattg

SEQ ID NO: 674151 - DNA, 660 bp, Homo sapiens
catgagtattaaatgactgcggccggatgtggtggctcacacctgtaatcccagcactttgggaggtcaaggtgggtggatcacttgaggtcaggagttcaagagcggcctggccaacatggtgaagccccttctctactaaaaatacaaaaaatttagccgggcgtggtggtgtatgcctgtaatcccaactgtttaggaggctgaggtggcaggatcgcttraacccaggaggcggaggttgcagtgagccaggatggcactgttgcactccagccttggtaacagcaagactctgtctcaaaacaaaacaaaacaaaacaaaacaaaacaaaacaaaaccaaaatgactgagtaaggaatttgttttactctttaaaggagttttgtgtgaattgtattttattgatatctgaaagatctttttttttctttttacacaaacatcagtaataatgaaagacattttaaagttattttggaattctctgtataactgaaaaaataaacttttccattttttttttttttagtgaacttgagttctctacttttttttttttttttaatttatttttagtttttaaaaaaaagctgggatcttgcattgttgctcaggctggtctcaaacttctggactcaagtgatcctcttgcttca

SEQ ID NO: 674152 - DNA, 768 bp, Homo sapiens
tgagaggcttgccctgggaacctagccaccacgttgcagggaagcccagaccacacagagcagccatgtgtaggtaggtgtcccggccaacaatcccagctaagattccagctgacagccagcattgaccatcatacttgtgaaggagggagcctttgggagacttcaggccccacccttccagccaccccagctaactccacgtagagcaaagacaagctgctccctgtaagccatgcccaaattgcctattcatgagcaaaataaacattgtcattttaagtaattgagtgcggggtgctttgttccacagaaacagatcactggaatggggaccttgactgaggatccaactgtgtaatatttagaggtctcttaactcctagctattttctagtcctgactttctggwttccccctactattttaagcacaaaatatatttggcgacagcaatactgagtttctgttgcttgcaaccactacccccagccaaggaagggcacacggccatggtccaggggaggaatgctgagggcctgaggatagacatggtggggaaggtttggagctgataaacatacagggcacagaatccaccaggacttgaggaagatacaggaaatgatggaggcaagaaggcttctcagatttctaactggaccactgggcagatgttcatgccattcaatgagaaaggtattccaaggagagaaaggagctttcagggaacgaacacacgtaaactcattacaagcgcggttatca

SEQ ID NO: 674153 - DNA, 768 bp, Homo sapiens
tgagaggcttgccctgggaacctagccaccacgttgcagggaagcccagaccacacagagcagccatgtgtaggtaggtgtcccggccaacaatcccagctaagattccagctgacagccagcattgaccatcatacttgtgaaggagggagcctttgggagacttcaggccccacccttccagccaccccagctaactccacgtagagcaaagacaagctgctccctgtaagccatgcccaaattgcctattcatgagcaaaataaacattgtcattttaagtaattgagtgcggggtgctttgttccacagaaacagatcactggaatggggaccttgactgaggatccaactgtgtaatatttagaggtctcttaactcctagctattttctagtcctgactttctggtttccccctactattttaagcacaaaatatatttggcracagcaatactgagtttctgttgcttgcaaccactacccccagccaaggaagggcacacggccatggtccaggggaggaatgctgagggcctgaggatagacatggtggggaaggtttggagctgataaacatacagggcacagaatccaccaggacttgaggaagatacaggaaatgatggaggcaagaaggcttctcagatttctaactggaccactgggcagatgttcatgccattcaatgagaaaggtattccaaggagagaaaggagctttcagggaacgaacacacgtaaactcattacaagcgcggttatca

SEQ ID NO: 674154 - DNA, 1185 bp, Homo sapiens
tgtgtgcgggtttgttatgcaggtacattgcatggtgcggggatgggatttggcgtacagattattttgtcacccaggtaataagcatagtgcctaataggcagttttgcgatcctcatccacttcccaccctccatcctcaagtaagccctgatgtctgttgttctcttctttgtgtccatgtgtactcaatgtttagctcccacttataagtcagaacatgtgctatttggttttctgtttctgtattagttggcttaaaagaatggcttccagctctatccatgttgctgcaaagaacatgatttagtttgtttttatgactgtgtagtattccatggtgtatatgtaccacrttttctttatccagtccaccattcatgggcatgtaagttgactccataagaccttctcttttcttctcccagactccttccctttatgcatagaacttacttgaattagattaaatttatgaaaaccagaggaaaatcagaggatgaatattgacctttccatttgattgcttagtatggcatttaaataacagtggatgggccctaccatattatttttgaaatagctaaccacttgacagaaagattgggctttggagagaaatttaacagtaaggtattaaagggttgtaccccactgaagatcaagttgaaatacaaatgaagagtctctgcagtgttcattggaaaagcaaagtatctttttggtcaatattatagcaacagaaaactcagaaaatagaaaaaaatattgtttatcaacccactccaactcaaaaaattatgatttttatctgtaatatcaatagtgagaacagggtcttctcgtgtaactgttcatgacacatccatagagaaaggtctttatcgtatgtttttttttctttctttttttttttctgaccaaattggatttatcccagaaatgcaagcttggcttatcacaaacaaaacaaaaaacctactgagacaattcacctaataaattatgaaagaaaccccatatgatcgtcttagcaggtaccaaaaaagcatttgataagtgtcaatgcttacttgtggtaaaagcttctagcaaactagaaatagaaaggaaatttatttacctcataaagcaatcaaaactctataataatgacaaaaatacatcaaaagcatttttttaaaa

SEQ ID NO: 674155 - DNA, 1185 bp, Homo sapiens
tgtgtgcgggtttgttatgcaggtacattgcatggtgcggggatgggatttggcgtacagattattttgtcacccaggtaataagcatagtgcctaataggcagttttgcgatcctcatccacttcccaccctccatcctcaagtaagccctgatgtctgttgttctcttctttgtgtccatgtgtactcaatgtttagctcccacttataagtcagaacatgtgctatttggttttctgtttctgtattagttggcttaaaagaatggcttccagctctatccatgttgctgcaaagaacatgatttagtttgtttttatgactgtgtagtattccatggtgtatatgtaccacgttttctttatccagtccaccattcatgggcatgtaagttgactccataagaccttctcttttcttctcccagactccttccctttatgcatagaacttacttgaattagattaaatttatgaaaaccagaggaaaatcagaggatgaatattgacctttccatttgattgcttagtatggcatttaaataacagtggatgggccctaccatattatttttgaaatagctaaccacttgacagaaagattgggctttggagagaaatttaacagtaaggtattaaagggttgtaccccactgaagatcaagttgaaatacaaatgaagagtctctgcagtgttcattggaaaagcaaagtatctttttggtcaatattatagcaacagaaaactcagaaaatagaaaaaaatattgtttatcaacccactccaactcaaaaaattatgatttttatctgtaatatcaatagtgagaacagggtcttctcgtgtaactgttcatgacacatccatagagaaaggtctttatcgtatgtttttttttctttctttttttttttctgaccaaattggatttatcccagaaatgcaagcttggcttatcacaaacaaaacaaaaaacctactgagacaattcacctaataaattatgaaagaaaccccatatgatcgtcttagcaggtaccaaaaaagcatttgataagtgtcaatgcttacttgtggtaaaagcttctagcaaactagaaatagaaaggaaatttatttacctcataaagcaatcaaaactctataataatgacaaaaatacatcaaaagcattttttwaaaa

SEQ ID NO: 674156 - DNA, 626 bp, Homo sapiens
aaaagcaatcttcatgaggtgggaaagttagactggatttattacctaagatcaccaccagattattattctagaagggaccaaaggatattgcctccactaagacaacaaagaatgtctagaaagggggacaccaacatctttaagctgtccagtggtggctgacctctataggccagggttgacagtagaagatgctgctatagaatggcatgaatagaaatctagaatggcctaggccagggccagtgcttaataaccttgtcaatggcaaggtgaaagtagttgctgcaatggacagcacagctggaatagaaatagagtccagggatctgtggttatgactaatagactattatgtttctaggtaagagatagatggctaacacacttgagttttgcttgatttctataacaagaaaaactcacgtattggcccagcagaaagctgaaagcaactacagtgcaaaatgaagcaagcatccagcacttggccatatcatctggcagatctacaatgctagagatacccatggcaaattaaggccgaccgtctggcatgtctcaatgagagattcattrcacaggctccctagtattctggaacaaggtcatgttttctccac

SEQ ID NO: 674157 - DNA, 582 bp, Homo sapiens
cctagctacttgataggctgatgtgggaggatcacttgagcccaggagttcgcggctacagtgagctatgattgcgccactgcatttcaacctgggtggcagagtgaaattctatctttttaaaaaataaaaaagaagacatttggacacagagacacagggagaacgctgtataaagactgtcataaagactgtcattacactgtcgcaaaccaagtgacatcaatgattgttggcaaactgccagaagctaggaaggaggcatgagacagaattcccttcccagccctcagaaggaaccaattctcccaataccttcatctcagacttctggcctccagaactgtgagacaataaattctgttattctaagcctccrggtttttgatactctgttatagcagccctaggaaactaatatagtaataagataccatattggaatggcttacttgtggcttcactaaagcaggagttcatcctatagaatgggaaaactattcttcacagtgcactatcagcattgaactagtgtatcaagctatgtccccaatagctaaaatatacaagtctagaagctaa

SEQ ID NO: 674158 - DNA, 865 bp, Homo sapiens
ttttcttcagtattccaaataattttctgactcgaagaacgttcaaaaattgttaaagccaattattttccctgtcaacatgcacaagtatgatatagtgggcagaatgcgggatttaaagaagcacaggcccgaattaaggaacatgtctgtccttgactagagggatggctttcagttaattaactcaaagagcttcagttccatcatctgcaaaatagagatcaaaccattacttcacagaattactgtcaagaaagcccccagctcttgtatcacatagaagacacttaataaacgttgcattttctcctttctgtaactcagctgtgccttcacttagtaaattctattaaacttactgtgaatgaattcatgcttaccagcccacaatgggggggggaatctgatggaggagcaaaagtagctatcaaatgtttaagagccacaaataccacctctgagcacagagcacagatttctcaagggagaaattttcttctgacctcagaatagccaagttcaagccaaagtttctatccttgaaatccattcacgytcatgctgagccacattgaaaggaatatttaagtcaattctatggctctccctggggctactcctccccctggcagggctaagaaaggcccagggtcatccgcttcctgggggtgatgaatttcagtggcctgtgctgctccctcctgtgatttggaaatgtcacaagagtggggctgacttggatattactgttccaagtcatcctctctctctagggtgtcgggacagggcaacacagaacaatagcaatttttacttgctggaaatggtaatttttggattatttttaagtcttgaggtacag

SEQ ID NO: 674159 - DNA, 2009 bp, Homo sapiens
caaataaggccgggcacagtggctcatgcctgtaatcgcagcactctgggaggccgaggtgggcagatcacgaggtcaggagttcgagaccagcctggccaacatagtgaaaccccgtctctactaaaaatacaaaaattagctgggtgtggtggcacacacctgtagtcccagctactcaggagactgaggcaggagaatcacttgaacacgggaggcagaggttgcagtcagccgagaccatgccaytccactccagcctgggggagagtgagactccgtctcaaaagaaaaaagcaaatgagaggttgccagcagcatctaactaaactaggtaccaaactagattgttattaggtgttaaaatcacttcttaagtcatgtatgacgtgcatgttaactaattcttgataatataattatcttttatatctcacaggcattaagaagaaatgcactcaccatgagcaccaacttctgcatctgcctgatcatatttaaaggaacagagaaatatttgtaattaatctgcccagtaaataccagctcgtagcagttggcaggtgcatgtctagataaaatttcttgcagctaatttaaactttctacacgcaccagtagataatctcaatgtaaataatacatttcttcttggctctttaatgtaagccaacatggagaggaagatcttgacttatattctgtaccacatacacttctgtggacttttagcatttgtgggtagacttaataaagcatgtataaaagtggcacctttggtagaactctgtgtttttctgaaattcagattaaatgtaatgatgagtggaattaagtaccagttttcccatttaaagccccagctgcttattaatttatagattctgtagaaatttttttaaagatttatctagtctattgtgtagcctctatctcaggagtgagtttttattttcctatgcttatagagaaaaaaacattttcaaggttttaaaattttacaccatttataaaatattagagtgtattttttcagtacaaatgtttaaaatatgaagttttttttgaactaaactacaaagagtactgaatttaaagaaaagacctttattaaggggcaatatgtgatccattccaaattattttgaaatattaaatttcagttattctgtggtgttttctgtcatcatcatgtttttgttgtcactcccaaaataaaggggaggagggaatcacagagtatgttatcttgatagtgaaacctctgcttttcttgaccatttctgtaaggaaaactgctactcctttggtacttgccctaagttttaacaaaattagtagaaaatattaccatgtcatttgtatatatcatgaaaaatgaaaactacatgaaaatctgaaacaaaatataacaagttaaggttgaaaaatttccactgcgtgcaatggcacaagcctttaatcccagctactactctggaggctgaaacaggaggattgcttgagcccaggagtttaagatcagactgggcaacacagcaagacacctatctcagaaaaaaagaaaataattcactttccacttagagaaattttagattcacctttttaaaatgaaaggtttttaaaaactgttactataaattatataaattaccttcattaattatgttcttcatactgtttaagaaatttattctgatacagtgcttataataggatgttaccaaaaatatactaaaaaaggattattatagcattgaaaactaaccttaggttataagccaaaacattttataaagtaatctatgttagtcaggtaatacagagttaagaagtagattggtttcatatataattcaagttatataggtatgtgcttaatgctattaaaccagttactgtatgtttgacctcttgatatactaagcttttgccttttagaacagctgggtctgctgagaatcatttcccagttcttttcattgtagatcagatgactctcactt

SEQ ID NO: 674160 - DNA, 2009 bp, Homo sapiens
caaataaggccgggcacagtggctcatgcctgtaatcgcagcactctgggaggccgaggtgggcagatcacgaggtcaggagttcgagaccagcctggccaacatagtgaaaccccgtctctactaaaaatacaaaaattagctgggtgtggtggcacacacctgtagtcccagctactcaggagactgaggcaggagaatcacttgaacacgggaggcagaggttgcagtcagccgagaccatgccattccactccagcctgggggagagtgagactccgtctcaaaagaaaaaagcaaatgagaggttgccagcagcatctaactaaactakgtaccaaactagattgttattaggtgttaaaatcacttcttaagtcatgtatgacgtgcatgttaactaattcttgataatataattatcttttatatctcacaggcattaagaagaaatgcactcaccatgagcaccaacttctgcatctgcctgatcatatttaaaggaacagagaaatatttgtaattaatctgcccagtaaataccagctcgtagcagttggcaggtgcatgtctagataaaatttcttgcagctaatttaaactttctacacgcaccagtagataatctcaatgtaaataatacatttcttcttggctctttaatgtaagccaacatggagaggaagatcttgacttatattctgtaccacatacacttctgtggacttttagcatttgtgggtagacttaataaagcatgtataaaagtggcacctttggtagaactctgtgtttttctgaaattcagattaaatgtaatgatgagtggaattaagtaccagttttcccatttaaagccccagctgcttattaatttatagattctgtagaaatttttttaaagatttatctagtctattgtgtagcctctatctcaggagtgagtttttattttcctatgcttatagagaaaaaaacattttcaaggttttaaaattttacaccatttataaaatattagagtgtattttttcagtacaaatgtttaaaatatgaagttttttttgaactaaactacaaagagtactgaatttaaagaaaagacctttattaaggggcaatatgtgatccattccaaattattttgaaatattaaatttcagttattctgtggtgttttctgtcatcatcatgtttttgttgtcactcccaaaataaaggggaggagggaatcacagagtatgttatcttgatagtgaaacctctgcttttcttgaccatttctgtaaggaaaactgctactcctttggtacttgccctaagttttaacaaaattagtagaaaatattaccatgtcatttgtatatatcatgaaaaatgaaaactacatgaaaatctgaaacaaaatataacaagttaaggttgaaaaatttccactgcgtgcaatggcacaagcctttaatcccagctactactctggaggctgaaacaggaggattgcttgagcccaggagtttaagatcagactgggcaacacagcaagacacctatctcagaaaaaaagaaaataattcactttccacttagagaaattttagattcacctttttaaaatgaaaggtttttaaaaactgttactataaattatataaattaccttcattaattatgttcttcatactgtttaagaaatttattctgatacagtgcttataataggatgttaccaaaaatatactaaaaaaggattattatagcattgaaaactaaccttaggttataagccaaaacattttataaagtaatctatgttagtcaggtaatacagagttaagaagtagattggtttcatatataattcaagttatataggtatgtgcttaatgctattaaaccagttactgtatgtttgacctcttgatatactaagcttttgccttttagaacagctgggtctgctgagaatcatttcccagttcttttcattgtagatcagatgactctcactt

SEQ ID NO: 674161 - DNA, 2876 bp, Homo sapiens
cccatatactttaatcatctctagattacttataatacctaacacaatgtaaatgctatataaatagttgttatactatattggtttaggaaataatggcaagaaaaaaaagtttgtatatgttcaggacagatgcaaccattcatttttttctcgaaatattttcaatttgtcattggttgaatccacaaatgtgtaatacacagacatggagagccatctgtattcttcccagatttttcctacgtagactttctgcagataatgtcttcattcaaaggaaccaccagcaggacaatttgaaaaagattggttgctcgcatgtaggccttccaggttcctctagatctctcactctgctggcttcactgtttctagctccatcctgaaccagctatttgttaagacactttgttcctaaaccacgcattacttctccatccatgtaaatctgaaataagtgtcttcctcagttttaccctgcgctggtctattacgcataggctcggagaacagggctcaatgagtattaaaattaaggcatcatatataaccattatagaacatcacaaaccacatcacaactaaggtattctacttacttaagaaagaatatttcaggtcaggtataaactattaatttctacaaataaatgcttttaaacggtcactttaacaaatatgaacgtctttctgcaagatacacatatataatttcaaaaataacaaacttactcatcattgtcttttgttgtagattctttgctttcagttaaactggggtgattcaatttttttctcttttctatatatgtgtaataaagaaaaggacataaagttaaaggagaaatcatcaaattttaaatagaatttagtttgtcaaattttaaatagaaagtaaaaaggacaaatggaagggaggtgggcaaagaaaaagtatcctattttgttttttttcatttcccattttcctaatttcttactcacaataccatataagaaaaaataatcttttgaataaaatttccactgaaggttggtatattaaagagaaatcaaatataattctataattaggttaaaatgcattagtaaactttattagataaaggatactttcatcaaatattttaatcaatgatatcatataaaggcttccagtttgcattattccacctttattttttttctcaagttaacaacaagggattggtgataccgatactcagaaaatagttaagttcctcgtaatatcattgtaaaataaatttgattttaggggtaaaagtaccttttaattttatttttaaactgacacaatatttacagtgtataacatgttctgaaatatgtatatattgtgaaatggctaaatcaaactagttaacatatctattaccttacatgcttatcattttttatggtatgaacactgaaagtctactctctcagcaattttcaagtatataatatgttgttattaattacagtcaattatacaataattgaacttgttcctcctgtttagctgaaattttttatcatttggtcaacatgttcccaatcactcggccctcccgaccagcagaacttggtagtcaccattctattttctgttctatgattttgacttttttagatcccacttataagtgagatcatgtggtatgtgtctttctgtgcctggcttacttcccttaacataatattctccaggttcattcatgttgtcccaagtggcaggatttccctctttttaaaggttaagagcattccactgagtatatataccatattttctttatccattcatgtgttcatgggcacttaggttgattcagtatctaagctattgtgaataatggtgcaatgaacatgggagtccagatatttctttgacatactgatttaatatcctttgaatatatactcagtagtgggattgctgggtcatatggtagttttatttaaattttttgaggacctgaatctttaaatgcatatttatttagtaaatccttggaaagatctaagtatatcactcattatttatttaagataacaataaaataaataaatggttaccttccatttaaaatgccatgtagttatccaaggtcatggcttatctaaacttttacaagtttcacaaattgacagatgcacacgtgaagacataggatgtaactaagtcataatccttcatatgcccactgggttgaaatgtaagtgtgtttgattttatagctctagtagaacataatgtttgtacttatcaatggtcaagtagataactgttttatgagctatttagttgtttgttctagagtactttatactaccatatacactatgtactttaaacacatttgatatataattagcaagtatttgaggacacatattagtagagttaagattttcagtgtcttaaatatacyggcttttgatgtttatgaatgaacaagcaaatgaatgaataacccaaactgttcaccactaatgaaaaacagtcaaacgaaactcaatttcattgagtccactggttcagaaactgattaataataattcctctcattgttactttggacctatgtcttcctcaaaaaaaacaaaacaaaaaaaaccctatcacaattaaattgttaccccaaaatagtctctaatgcaaaaggagaaaaaacttacagaaattttgttaaagcactagttatttctcttgtttatgaactatgccttatttgacaagtctttatccttaagttccaaacagaataaattaatatggttaaaaatttagtaaagaatgtaaggggaaaagaataacaatatattatgattttagagagttttggagtaataaattaaaatctgtc

SEQ ID NO: 674162 - DNA, 1241 bp, Homo sapiens
tgacacgctttatttaaagtagcccaataattaagggaagatatataaacaaagattcttagttctaccaaccaatttttatattatgtattaaagcagaataccatatgaagaaagcaattatttatgatgacaggtttgattctaattgcatatctctaaatgggatcataattaaatatttaaatgagtttctttaaaaaatatatgcagttatatatacaaggactaccrtacaatttaaacatcagtcctatattataaaaactcttataaaagttagtatgtttgtctgctttaaaataccactattacaatatcatatataagagcaaaataatttatacactttcagtggagatgttgaaagtacagtacagaaacagtgcactaggtgttaaaggtatgagcatggtgaaaaaaagttttgcacattattctagctttaaacatgattcagtgcaaccagactatgacttaactgaggaacagatgctctatgtctttataagtccccaatccataagaaactattttttgtttccttcactaaactgattcaggaatatgccaggctctctgtgtgcaaaatctgttctgctaaactggatgcccagctgttggtgacaatgcttagaaagggaagctgaatatttataatactttatttcatacagctgtcttctaaagagcagtcatcaacattttattgaatgcagactaaatgttcaaaggagaaaaaggtcaatataaattaaaactagttttttcagtgacaaatgcagtgttaaaagtatcttcctgattcttgagaaatagaaatagaattaaaatattaaagaattagagcataaagcaaaaagattgtactatgttatattacagaaatcccccaaaagtttgtattgatcttagaaaatgactattcgtaagtaactattgatttacaaaggacaggaataagaaaaaatagaagagatggtcaatctaagaaaatcattgaacagtaaatatacagtacagaaatttaatctatctaaaagattattttgctactatatccacattaccctatcacaacattatttcttgagattaaactggtttaaagaattatttatgcttttagaaatctacttaatatcaatttaatctgatttcccaatgaggcaagaagaaaacagaggtacaaacaaactaaaatgcagataattttttaaaatttatatttagctttggaa

SEQ ID NO: 674163 - DNA, 927 bp, Homo sapiens
tctcaaggtggaagcagagccgtcaactcccctcggctgtcttttcctggttttccctttaataaatacccaggatctcggccaggtcttaggcagtggagggcctgacttgaacaacaaagagagcccggggaagagagtacttagcacttggggaggaaagacaggcctctgtgatatttgggtgattcagtgacaggaaccgtggtgggaaatgttgaggacgcagaacgggacagtgaccccaagtggccccatcctgcccagactgggctgctgtagaaccggccctggatccagataatcatgtttttttttccctactgcctcttgtatttactggtcttccctcattatacaggaagcatccttgaggattgtcttctatttcaccttgccttcccttgtgtctatttcaagttactgacmgactaaatgtaaataatggccaaaatctctcagcaaatcaagtggtgagctcgcccaggtgctggagagggaggaatccagatcctaatctcagtgattgctgtcttcagctaaccctgaacttaagtttgctatgctggagctggtcagctgatgtgcttctgtagaaaaaaagcactttatggagctttatacatcacagggtatctgttttgggaaaataacttgcaataattattttaaaaattatattgccaaggatagggctcttcccattttcctattgaaaaactgaatatagaagaattagcaaatggatatgtgatatacatatccattgtatgcctgcagcagggtaactgagtcaggaatctagaacttggatatagtgaaaaccatttatatgtttataagtgtctgtcaaagaagagaagtagcaaatcattttaatttcaagtgcttttgtagaaactcaatatgacttctatctttccaacc

SEQ ID NO: 674164 - DNA, 657 bp, Homo sapiens
gggggtaggaactttataaaacacccaatctcgattatattattattttgccaaaaactaggaaagataacctcaaaagtgtattcaagaaagcaacacttaactatttttaaagaattactaatagttaactaaaatgtcaatatatcccattaacattatcagtgatatacgaggtctccttagacctccaggtaagattatggcttcaaagttaaacgttttcaataaaacctaatacttaactttatatataaatgatcatacagtacatttatttaagcagtagttaagtgttcaaatgaaaaaaaaaagtttctctaaagcaaaaagttttcctgttatccatctttttgttaaattatrtggatacatacaagagagactttgtcccatttttttcctgttttttaatacctgtaacgatgaggtttcttcacccctccagtagagggcgcactcttgcgagcggcttttgtagccagttgcttcctgggtgctttaccaccggtcgatttgcgggcagtctgctttgtacgagccatggtacagagacctccttacttacctaccagcattgaaaaatcaaaaatcaccatatgcaactaccaaacatacaacttttcctgccacgatcaccccctccccaaatctgga

SEQ ID NO: 674165 - DNA, 469 bp, Homo sapiens
gcaacctccgcctcccaggttcaagtgattctcctgcctcagcctcccgagtagctgagattacaggcgccagccaccacgcccagctaatttttgtatttttagtagagacggggttttaccatgttggtcaggctggtttcgaactcctgacctcaggtgatccacccgcctcaaagtgctgggattacaggcgtgagccaccgcgcccggccgtgtttattatctaaagtaatttagatcagaatcttagagttggtaaggagaagcctgcctttttgtctgtctgtagccccgtggtcggtgtccaagcgcagttttaagtagcagccctcatttaaacactgggagagtggacttgttttctctgcacccctggcggtcatacagctgtcagtctcaacagctggcatgagcaaaawacctccttgattagtttgacaagggagtgcagaccttaaaaaacagg

SEQ ID NO: 674166 - DNA, 610 bp, Homo sapiens
aatgtttcttcattttccaactacatatctgtgaaaaattggattttcctttgtttgaagatatacttcaaacaaaataaattgcaacagattgaaaacagacatgatatgagaattcaactgtcttttattaagccagacattaaagagattaacaaaaatgtaaaacatttctttggaaaataatgttactttaatgtgcagtaggtttactatagttatttaaatgaattaataaatattttaaagatttctgttgtaattcataggttgactattgaaagaaataacctatataacaaaaactccttggggtccacaataattttcagactgycaagtggccctaagaacgactgtcatatgaactaggctcactcatgaaagaaggttgaaagatcatcagaagcttatgataatattctgcccatggattggccatcacctcagttgtattgtataatacaattctcattttacacaaatgtaaatagatccttctatacataaacttctagagtgttatagtcgacatctctacattgggggctgggacaacagaaccgatagaaaccatcctgcaaatcttgaagcttggataaaacagtat

SEQ ID NO: 674167 - DNA, 617 bp, Homo sapiens
ggaatgttgctgttgaatgcccaccatatgaaaggcagtgtcagcatgcagcgggcagtgtagaggtaaagtgattacacctgtccacacttgtagtcacagcactttagaatcatagaattctaccaaagacaacctcttataataraaagtatctaacaatgtcaactcatctaaatctatcaccaccaaatgttaacagatgggaaagggagatgatgggaggtaacagattttcttaaagtcatattgctttaggtgattgtaaattccacacttttctgattcctggaccaatattctcgtaacacctcatgatttatgtatagaacctgtggagaatgaagctacctaaaagtgccctttgtgcacagtctctgataaaatatgttatgatttgcctaaattgtctcttacacttgaaattacttttaaaaaatccatgaaaaatcaaagttaaaagtagcagaccattaatgttataaaacaacagctttcctagttttcttcttactaataaaagtcctgattggtgtttgttaagttgcatcagctagagattaaaataattattaactattttgctaagattcaaacagatggaaaatgcttgaaat

SEQ ID NO: 674168 - DNA, 2140 bp, Homo sapiens
  misc_feature 2031, 2032, 2033, 2034, 2035, 2036, 2037, 2038, 2039, 2040,2041, 2042, 2043, 2044, 2045, 2046, 2047, 2048, 2049, 2050,2051, 2052, 2053, 2054, 2055, 2056, 2057, 2058, 2059, 2060,2061, 2062, 2063, 2064, 2065, 2066, 2067, 2068, 2069: n = A,T,C or G
  misc_feature 2070, 2071, 2072, 2073, 2074, 2075, 2076, 2077, 2078, 2079,2080, 2081, 2082, 2083, 2084, 2085, 2086, 2087, 2088, 2089,2090, 2091, 2092, 2093, 2094, 2095, 2096, 2097, 2098, 2099,2100, 2101, 2102, 2103, 2104, 2105, 2106, 2107, 2108: n = A,T,C or G
  misc_feature 2109, 2110, 2111, 2112, 2113, 2114, 2115, 2116, 2117, 2118,2119, 2120, 2121, 2122, 2123, 2124, 2125, 2126, 2127, 2128,2129, 2130: n = A,T,C or G
ggtaaacctcccatcctgttaataggaccatagaagaacccatttgtcacagtgtcctacccagtgctcttttcattacacagtgttattgctcaccatgtttcttctcatttgtagcttgcatgagaaacccttggcctggctcagagtttccaaatcttgcaacactgagaatgtatttcaatgatgtatgttttccagctgaagttgtatttgttaaaattaatcaaatcttatctggaactacaatacatgcaacaggtagaatcaaggaatcattttgttaggcaattaaaatttccattgtaaaarcccctcatgccctttcaaaggtccaaaatatctggggagctcagtttgaaaactacttgagactgagggaagggcacatttggtagcaggagttgtgaattcggccactcaatcaacctaatgctccccttggacttgaacagagctggcagatacagcaaaaggttactttagcattcttttttttttttttttttttttgagatggagtctcgttctgtcacccaggctggagtgcagtggcacaatcttggctcactgcaaactccacctcccgcctcccgggttcacaccattctcctgcctcagcctcccaactatatgggacttacaggcgcccgccaccacgcccagctaattttttgtatttttagtagagacggggtttcaccatgttagccaggttggtctcgatctcatgacctcgtgatctgcccgcctcggcctcccaaagtgctgggattacaggcgtgagccaccgtgcccggcctactttggcattcttatgtctcttaacagtgcactaaataattaccacaatgagatagtagtgtaaagcagagctcagccaagacagaatgatacaaaattgggcagtaggagtggtcctcccatgctttctttccttcctttccaccttacatacattcattttaacaaatcatgtttctggtttttgcactgtttcccctaaggagcattagtcaccaatatcttggcagtgtccaaagtgctccagtaacgtaaagatctgaaatggaggatgcaacaggcaatttttaaaatatggtttatgttctagacaacgtcagtcattaagttattcacacaggcctactccatatttcaagctcctagtaattcttcaatgtctatttcttatcctagctcttttgtgaagccatgtctaactcatctaaaggaggccaagattgcttcctcctttaaattgttacagcgttttgctcagacttcttttgtaatacctagattcatcagaactagtcttcacaggacttcccttctctctgcccaacgattctcttctctccttaccccacaacacacacctctatttttgaggcagctgctctctttatctacgtatccaaaagagcaaccagcccagtacctggaaaaagacgagactttaggaaagatgaattgagaatatattttagtcttagcatttttttatcttaacatattggttatgtaatcattttgtatctcaatattcccatctgcaaaatggggataatacctgtcttggagaggtaggtaaaattcttggtaaatattgtaaataatgcctgcagtatcattattcaacacatatttattctaattcactggcatggagctttgggtctgctctttggtttgtagattgtcatggctacagtaatagtctttctgccagacctagaaggctgcgtagcccagagcttggcccatcaattctgtcttgtacaggcagatttttttttctacccaatttgtttcgtggtcctcggcatacccaagaaagcaagttatgatgggacaaacgctggatttggaggcagaaaaccttggttaaacctaagctttaattgattgtatgatatggaggaagtcagacacctgtatcctcagttaattcacatataaaatgagaatacctgtcatgtttgcctcacaggctttttgcaagtaccagagggaattacagaagtnnnnnnnnnnnnnnnnnnnnnnnnnnnnnnnnnnnnnnnnnnnnnnnnnnnnnnnnnnnnnnnnnnnnnnnnnnnnnnnnnnnnnnnnnnnnnnnnnnnngaattcaaaa

SEQ ID NO: 674169 - DNA, 2140 bp, Homo sapiens
  misc_feature 2031, 2032, 2033, 2034, 2035, 2036, 2037, 2038, 2039, 2040,2041, 2042, 2043, 2044, 2045, 2046, 2047, 2048, 2049, 2050,2051, 2052, 2053, 2054, 2055, 2056, 2057, 2058, 2059, 2060,2061, 2062, 2063, 2064, 2065, 2066, 2067, 2068, 2069: n = A,T,C or G
  misc_feature 2070, 2071, 2072, 2073, 2074, 2075, 2076, 2077, 2078, 2079,2080, 2081, 2082, 2083, 2084, 2085, 2086, 2087, 2088, 2089,2090, 2091, 2092, 2093, 2094, 2095, 2096, 2097, 2098, 2099,2100, 2101, 2102, 2103, 2104, 2105, 2106, 2107, 2108: n = A,T,C or G
  misc_feature 2109, 2110, 2111, 2112, 2113, 2114, 2115, 2116, 2117, 2118,2119, 2120, 2121, 2122, 2123, 2124, 2125, 2126, 2127, 2128,2129, 2130: n = A,T,C or G
ggtaaacctcccatcctgttaataggaccatagaagaacccatttgtcacagtgtcctacccagtgctcttttcattacacagtgttattgctcaccatgtttcttctcatttgtagcttgcatgagaaacccttggcctggctcagagtttccaaatcttgcaacactgagaatgtatttcaatgatgtatgttttccagctgaagttgtatttgttaaaattaatcaaatcttatctggaactacaatacatgcaacaggtagaatcaaggaatcattttgttaggcaattaaaatttccattgtaaaaacccctcatgccctttcaaaggtccaaaatatctggggagctcagtttgaaaactacttgagactgagggaagggcacatttggtagcaggagttgtgaattcggccactcaatcaacctaatgctccccttggacttgaacagagctggcagatacagcaaaaggttactttagcattcttttttttttttttttttttttgagatggagtctcgttctgtcacccaggctggagtgcagtggcacaatcttggctcactgcaaactccacctcccgcctcccgggttcacaccattctcctgcctcagcctcccaactatatgggacttacaggcgcccgccaccacgcccagctaattttttgtatttttagtagagacggggtttcaccatgttagccaggttggtctcgatctcatgacctcgtgatctgcccgcctcggcctcccaaagtgctgggattacaggcgtgagccaccgtgcccggcctactttggcattcttatgtctcttaacagtgcactaaataattaccacaatgagatagtagtgtaaagcagagctcagccaagacagaatgatacaaaattgggcagtaggagtggtcctcccatgctttctttccttcctttccaccttacatacattcattttaacaaatcatgtttctggtttttgcactgtttcccctaaggagcattagtcaccaatatcttggcagtgtccaaagtgctccagtaacgtaaagatctgaaatggaggatgcaacaggcaatttttaaaatatggtttatgttctagacaacgtcagtcattaagttattcacacaggcctactccatatttcaagctcctagtaattcttcaatgtctatttcttatcctagctcttttgtgaagccatgtctaactcatctaaaggaggccaagattgcttcctcctttaaattgttacakcgttttgctcagacttcttttgtaatacctagattcatcagaactagtcttcacaggacttcccttctctctgcccaacgattctcttctctccttaccccacaacacacacctctatttttgaggcagctgctctctttatctacgtatccaaaagagcaaccagcccagtacctggaaaaagacgagactttaggaaagatgaattgagaatatattttagtcttagcatttttttatcttaacatattggttatgtaatcattttgtatctcaatattcccatctgcaaaatggggataatacctgtcttggagaggtaggtaaaattcttggtaaatattgtaaataatgcctgcagtatcattattcaacacatatttattctaattcactggcatggagctttgggtctgctctttggtttgtagattgtcatggctacagtaatagtctttctgccagacctagaaggctgcgtagcccagagcttggcccatcaattctgtcttgtacaggcagatttttttttctacccaatttgtttcgtggtcctcggcatacccaagaaagcaagttatgatgggacaaacgctggatttggaggcagaaaaccttggttaaacctaagctttaattgattgtatgatatggaggaagtcagacacctgtatcctcagttaattcacatataaaatgagaatacctgtcatgtttgcctcacaggctttttgcaagtaccagagggaattacagaagtnnnnnnnnnnnnnnnnnnnnnnnnnnnnnnnnnnnnnnnnnnnnnnnnnnnnnnnnnnnnnnnnnnnnnnnnnnnnnnnnnnnnnnnnnnnnnnnnnnnngaattcaaaa

SEQ ID NO: 674170 - DNA, 606 bp, Homo sapiens
caacaaaatatctaaaatttatttcatcatcacaccattggtattggttttgccacagaccaataaatgctatgaagagtgaacaaacaatatattgaattctggtcatttgcatgagaatttttttttctactttaaatcacttttggatggtctataaagcattctcagataagcagttttaagtgatacattaatttagttgagactttttgtattacaatgttttctaacttcttcatctacttgaataaaattttattatatttygcttttccaataatatatactttttcttcactttgattttaaaaagtccaattgcactcaggttttgagtttctttctcctacctgcgaaggctttcacaattaaataaaaactaaaacttctctaatgaaattccatatcctgaagtaaaattatattgatttaaatcaacaagactttgaggcaatttttcaactctatattggtttacttagttctctcttttatggttactgtatttatcctttagtatgagattatgtcctgaatttctctataccaggagcatggcatgaaaccattttcacatacatctttaatgggaagattctgtca

SEQ ID NO: 674171 - DNA, 593 bp, Homo sapiens
tgcaggaaacaatgcatgcttttggtagataaagtaaagtaagtgtaaaaatttaacaaaattaaacaatgagcatcttaatctctggaaggtgatgtaatgactgagacctttattttgtgtttatatgaattcagaaagctctattttgaggaaactatcatctaactgaaaaatgcctattttagcatagattaattacataggaatgtcaagtaaaacccatgcaagtttctttgtgaaaaccaaatatatctcagctgtaagtcatcacaagcattctgatgttccgcaatcaatctcaggagaagatttttgaaataatgtttttctttcaaatgctaaaaaatctaattaaatggatgtaaatttttatgtttayttattataatctcttacaacatggcacgtacttttttagatttgtatttgtgagtcctaatttgtcaaaacatgacttctttagttttacggcctttagcaatttcacttataacacattcatagtctgattctccttgagccctcatgaatcttgattttacagcataagcacaaatgcaatagaacatggttctcatttaaattacgtg

SEQ ID NO: 674172 - DNA, 3222 bp, Homo sapiens
tcagggttattgttgggaaactgctatgaagttctcagtgaataatattctataaacataatttgatgatgttttaatagcaaagggttggtaataattatgctttccaatgtgctgaatagaaaagatcttaacgtctggtgctcttgaggtctttactctgcaagattactcttgctaaatatctggcagcgagtctccaccaggaggttaactttgtgctttctatttgtgtgtgcatgtactttccaacattgaatcatcttgtcttatttctatttgatgtggtaatgacactatttaattacatgcttatcaagaattaaatatgacagcaactgcaatagacatagcagtggtagtagataatttcctgcaacattcttcgccagccataacagaatctatccaaaaatagaattaaagaaaatccattgttctttgataaacaacttctacgactttaagtagcaaagaaagctgttgaatctaataatttttaaaatatcttgctctattatttaaagttctataagctttgtatccacttcctccatgtccttagctttatatttccctctagcacaatagcctaattttatgaatccaaggtggtagtaaacccgcttttaatcattactattgtagattgcctgacataaatttgagaatcaatgaaaagaaagaaaaaataagttagtctttaatggacccatattaattattaaagcattcttctaacaaatttgagatccttaaaggcaggctgagaaaatgtccctgtatctaggaaattaagtagggtttcttggacaaaaagatattgtcatttctccctgccccttgtttaaacaatgtagaaaaatatttgttgatccataagccaatgagtaatttttaatttgcaatggatttattacgatctacacggaaaattgtaaaaattaactacattaccagatttcttggttctgaaaaatattattttatttctctttgactatcggtcaacttgtgttttcgtataatctgatgcatattgataggaattgaaagcttgcgctgttcaaagtaaaacaaaataatacaattctaaaataaattactctcattgaatcaaaggaaaaattaggaaattgtgatagatataataaacaatttttagtttagtacgataaatgcccatgatgcatttatgaagagaacaagaaaattcacttttattcatgttgaatttaaggttctagaataattaaaaaatttctattaaactattaatgtaaaatcttcttaaaacctagccactgaagtaacaaaactacttacaaaatttgacacttaatagtactctgagactctaaggaaaaattctagtctttaaatttgtatttctatgtttatagagaaatacattttctttgtgtacatatgtttatacaaattaatataacactttaaatttaaaaatatttaattatttcatcatacattacccagttaattactcagaaaaaccaagtaaagtgaatagaacaatttttatagatgaagaagctaatactcagagaacttgtaatttttgccattttatttatttttatagaaatataaaaatagacttacaaagtgacacatgaaacattcttgactcaccagtagtacaacaaataaagtatcacacttctactcttcccaacccccaggctcctacctcctctacagaggcaaccactatcctgaatgcagtatttataaaagtataaatactacttacatatgtcacttaaaatataccattattttgtacataacttatcatcatataaataatatcaaatttcatgtcatttttaacttgcttcttttcctcagtattctgttattgacatttatctatattcatacatagttacgtaactttattattgcgatatctgttatatggtgttaaaatgatgaatatatagcaatatatttaacctttctcctcctgatgaaccttaggtttctttttttttttttagctattgtaaacaatgcatatatataaaattctgtggctcagaaaacaatacccaaaatgaaggcctcagaagcaacctcacaggcaaaagttttacctctgactttcttctgccctcctctctttcattcccattcttccccaaagctagtcagagcattagggtccttccccagtgcaggtcatagaaaccagaggaccccttgtcttgaaagccagccataaagcctaaaaatattctgtgtgataactggccataaataaattatctgacctaccttctttgagtgtgggtcatattaccaccattccagtgatggtcatgcccatacccagaggaaggaatgcatattcagaaaggccaagaaggacctagacagagagggcttgctgggtttccacacttgattagcattagactgtaccctttctgtcaaattatacttcaacagaagttgccaatactttgtcaaaactaagcgtaaaaatggacaatttcccctgtacctttagatcttcattctgaagcttcccatgtatacatgataaataaattygtaagccttttctccaattaacgtgccttttgccagttgattttttagtacaacttccggggtcaagggtcttagcccctacgatggattgcatactggtgtgaaagttcctttaacaatgggtttgtttgatggtaggcatatgcatcttttgctgtattaaacatcatgaaattatacttcaaagcagtttcctgaattatacatccacaaacaatgtataaggaatctctgacagtcccgtgttgaacctgtttacactcagaaacttagcaaatggtgaatatttgaataggattccagtacatttttcaccatacttcatgaatatagttaagattcacataaaaattaacataacattatacactcaaacaatagcttttaaatatgtttgtctctttagaagttttatgttaataattctgcttgtacctatataataaacatgcatcttctgcatatgcatcccagaacttaaagtaaaataaaaaaattaaattttttaaaaaactgcttgtattattaaattgtatagtaagttatctcttcatacacaataaaattaaaaagttcaaccaacgtactagcatggaaaaatttgaattagttgatgggtggggttatattgaattttatgca

SEQ ID NO: 674173 - DNA, 1720 bp, Homo sapiens
aacatgtgtccaaattctctgtttggaagcagttttactgtaatgggtactattcaagactgaaattatttaatacaaagaaacattctttattcacactgtgaacaactgtcttccaaaatacagaccacaatacaggcattcttatatgaataatacagagaattatgtcaaattattttgcagtttttcctagtcataacaaagtttccacaaaagtgcgttcttgatcatagattttagagttggaaggaacctaagagatccagactaactccttcctgccacccagagatatgaagcaatttatctaaattcatgtagctaactaatgacagagccagggagagaaccagtccttcatctcttacgccacaatgctacattcctctgggaaaaaaactgcctactcattcttggtttttaatgctagttagagtcttagggtaaggtttttttccatgactaactagtgctcttttgttttctgtgtgggtgtttgggaacaagctaactggttgtgttttttgttttgttctgttcataacaattatacagtgtaaggcaataacaaagcatttgtttaacactttaggggttaggaagaaattgttttaactccaattctccgccctcattgttgataggcagatattttaaagttgtgttttttcatctggggtttgaattccctaaattcttatgaaaattatgtgaatatatgcttactttttttctttgtttgtttttgagatggagttgcgctcttgttgctcaggctggagtgcaatggcgcgattttggcttaccacaacctccgcctcccgggttcaagcgattttcctgcctcagcctcccaagtagctgggattactggcatgcaccaccacacccgtttaactttgtatttttagtagagacggggtttctccatgttggtcagactggtctcgagctcccgacctcaggtgatcgcccgcctcggcaacccaaagtgctgggattacaggcatgagccaccatgcctggcctgtgcttacatattaagaaaagaatctgtagttttcatcaggttatcaaaggatacatagttcaacactatggttttagagggagagagaactaagcctggttgcactctatatatactaattgtaccagagggctcccttatctccagccccctcctgctcatgccctttcctcctgacaagacttttccaaatagcttcctggatcttgtcacggaagccactggaggcctgaaccttytcagaggaacctttcccataggttttccaaggataccttctttctcccttcactgcttactgtttccaggagagggtgtgagactcgggcatttttgttcattagaaagctcaggggggttatttcagttagatttccattaaaagggatttgtgagctgacccgagatcctaagactattgaaataagaaaaaaaaaaatgcagttggaattccagtcaatactttgcaagttaacttttagaatgccgctagttctgtagttcaggattctctgtgtttgatctagaaactaacattttctaggaacaagatgaaaatgcatggattgtttaggagctgcacagatctgtctatagaaactgaatttttttttgacttagataaatctacccctgaataggaatcccgtttttgttgttgttgttgttgttgtttgtttgtttttg

SEQ ID NO: 674174 - DNA, 1720 bp, Homo sapiens
aacatgtgtccaaattctctgtttggaagcagttttactgtaatgggtactattcaagactgaaattatttaatacaaagaaacattctttattcacactgtgaacaactgtcttccaaaatacagaccacaatacaggcattcttatatgaataatacagagaattatgtcaaattattttgcagtttttcctagtcataacaaagtttccacaaaagtgcgttcttgatcatagattttagagttggaaggaacctaagagatccagactaactccttcctgccacccagagatatgaagcaatttatctaaattcatgtagctaactaatgacagagccagggagagaaccagtccttcatctcttacgccacaatgctacattcctctgggaaaaaaactgcctactcattcttggtttttaatgctagttagagtcttagggtaaggtttttttccatgactaactagtgctcttttgttttctgtgtgggtgtttgggaacaagctaactggttgtgttttttgttttgttctgttcataacaattatacagtgtaaggcaataacaaagcatttgtttaacactttaggggttaggaagaaattgttttaactccaattctccgccctcattgttgataggcagatattttaaagttgtgttttttcatctggggtttgaattccctaaattcttatgaaaattatgtgaatatatgcttactttttttctttgtttgtttttgagatggagttgcgctcttgttgctcaggctggagtgcaatggcgcgattttggcttaccacaacctccgcctcccgggttcaagcgattttcctgcctcagcctcccaagtagctgggattactggcatgcaccaccacacccgtttaactttgtatttttagtagagacggggtttctccatgttggtcagactggtctcgagctcccgacctcaggtgatcgcccgcctcggcaacccaaagtgctgggattacaggcatgagccaccatgcctggcctgtgcttacatattaagaaaagaatctgtagttttcatcaggttatcaaaggatacatagttcaacactatggttttagagggagagagaactaagcctggttgcactctatatatactaattgtaccagagggctcccttatctccagccccctcctgctcatgccctttcctcctgacaagacttttccaaatagcttcctggatcttgtcacggaagccactggaggcctgaaccttctcagaggaacctttcccataggttttccaaggataccttctttctcccttcactgcttactgtttccaggagagggtgtgagactcgggcatttttgttcattagaaagctcaggggggttatttcagttagatttccattaaaagggatttgtgagctgacccgagatcctaagactattgaaataagaaaaaaaaaaatgcagttggaattccagtcaatactttgcaagttaacttttagaatgccgctagttctgtagttcaggattctctgtgtttgatctagaaactaacattttctaggaacaaratgaaaatgcatggattgtttaggagctgcacagatctgtctatagaaactgaatttttttttgacttagataaatctacccctgaataggaatcccgtttttgttgttgttgttgttgttgtttgtttgtttttg

SEQ ID NO: 674175 - DNA, 924 bp, Homo sapiens
tcaaaaagacacttctatcttttaatgactctccatctggtatgttacagaagagaaaactctgagaaatcctgcccctactctaaggactgggaaactgtggacgggagaggctgcactgagcctgagcagaagggccagtgaggcaggggacgcacccagcagcgtttggcaacactgcagggagagccaccaaagtcacaaatcatgccaagcgcgaggtcaggatccacctgatcagatcccactcgtttcctagaaaacggcgtgtagaacgttctctctggtttttgttgaccagcaggctctgaagcgtcacaggacagcagtgtctattctgtgaaatgcacgtcggggattttacggtgaggtctccttgagtgagatttgggcaacaaccacactaagaacaagggtctcataaaataygcaaataagcaaaaggtgatgtcgctgcagaagccacagtttgtttgtttttaccttaaatctcgcctgcttccttttggcaaatagataaataaatataagcttcagaggtcgttttgagaagttttctttccacacgtgaacatttgtctagtgctattatcagatcaaaaagtatacatctgggacaaaagaaaatcttcaccacccaagtgatgccagtcaggcgaatttcccaaatctcaagttgttttttacttccgaagaatgtcatggttttctgcttcctaacctttgagtctgaagctggtagacgtcgaagagggcggtgggttttctgcttcctaacctttgagtctgaagctggtagacgtcgaagagggcggtggtggtgtgccgagtcagttcagtctggctcagaaagtcaggaggacgcccaccattccactgaatcactgtctctttaaacgggtggttgtcacagccactttttaa

SEQ ID NO: 674176 - DNA, 1285 bp, Homo sapiens
ttacggtgcttcaatctcgagtacactgaaatacaaaaacaagctcagttaagaaaaatgggctctgtgtttgcttcaagaccgtcatgatttctatgaggacaaagaaagagcagcgatgatggcattttaagtggcgtaacatgacgaagtgagtaccaggagaggaaaagggggaagaagtaaggaacagtctctacctgtgttgaggggaccaggtgtacaccgtatattactaaygccaagcagcatgtataaaacaattagtatagaacaaccggtataaaaccacgtgatgtaaaaatttggaagatgctgcaaagaggcaggagagatgggggatctgctaaggacagctttctagtgaaggttttgtgtttaggttttgaaagaaacaacagacgtcacttggaggagaagaaagttcagaaggttttccagcggctcttcaaaccagagcttagagctgcctgagtccatcttctcaaaagttctaaatacttttcagttttctgtttcaacaagtatagtaaccaccaaaagtaaggtttttacctttctttgggcctgaaactaaagattacacttaaaacgatacggaggcaggtccctgaaaagcagggccaaggttctgatttcacgactggtaaagaaagagatcaaactctcgcttgtttcaagcatgatttctaacattcactgttcttttctttctgaggcgttgtaagaaggagagtcttctcaagagcccagctgacattctgctttgcacaaggaagataaacccttcagaagccatgtctctctcctctcaaagccaacagaaaccagttacaggacagaactggatccctgcaggagcctcttcaaaacacaaggagggggagagcaagttcctaagggccaggatcaggaaaccacgcaatggaaacgtcattttggctgctaataaacatgtcaccactagaagccccggtttttcatctcagcctgtgcggcagcagtgacggtatggtgagcccaggggggtcctcctccagcaatggtgtctgttatttgaaaatgagtcccatgagggaggtgccgggtgccctgcttcaccggcctgtgtggcccctgtacacacactctgtattcacactgaccctcccccacaattaacaactgagcgaaaccagccagcgaactttcaagagcgactttcaccacattcccagaagcctgaccctgaaaaaaaaaaaaagaattaaaagccaaatttaaatttgaaccactcctcccctga

SEQ ID NO: 674177 - DNA, 634 bp, Homo sapiens
tcctatgttagtggtaataccttgaggctaagagaagccatatggagaacactgtgcttgggtaattgaattcagaatgagtatgattgttcatcatttggtaaaacccaggttacttgtgataggaaagaggtgccataatatacacaccttgaaataattgaagtattttaccttgttgatttgatgactaaatgctcccatttttgtaaataatcttataactgttgatttattttgtatgaataattttattctaaaattgtataggaaagtttcccattttaatcagtaaattaggccaatggttctcaaactatagagagcaaaagaatcacagtactgggccccatcctcataatttgtgattcagtaggtctggaatggggccgagaatgtgtatttctaacaggttcccaggcaatgctgttagtccagggamcacactgaaaaccattgaattaggcaaatgatgtaatatatgtggtgccatgagggtttgataatatagttaagtcttaaacttgagatataaacctttacactttcaaagaaaaataatcattcccctggagaagttacgcctcaaaaaaattgtttttcagccatcatgtatttttgaccaggtgttaat

SEQ ID NO: 674178 - DNA, 894 bp, Homo sapiens
ccaatctttgatatttcttggcctgtaggtgcatcactccaatctctgcctccatgatcacatgactgtcttcttataaggacaccagtcatattaaggcccacactactccaagaggacctcattttaacaaactatatctgcaactcccctacttccaaataaggtcacatcttgagacattgaggattgtgacttgaatacatcttttgggaggacacagttcaacacatagcaataggcagtgggtaactcaaactcaccagatctcaaattggcctccatgtcttttccccggactcactcattttcctgtactccttatcctgattgggggcactaggccctaaagcagaaacctggaagtcattctattcttctccttcttttatatctacatagtcatgatgttctaacaagtatctctttaagagttctcatattcatcccccaaatccctgttttagtttcttcatcatttttaacctatgcaactataagaatcaaactagtttttctatctcttgtttcaaccccctctaactcattctctgcattgctgcatgagactttttttttttttttttttttttttttgagatggagtctcgctctgtcgcccaggctggagtgcaatgacccgatctcggctcactgcaacctccacctcccaggttcaagtgactctttcgtctcagcctcccaagtagctgggactataggtgcccgccaccatgcctagctaatttttgkgtttttagtaaaaacagggtttcaccatgttagccaggctggtctccaactcctgacctcaggggatccgcccacctcggcctcccaaagtgctgggattacaggcgtgagccaccgtgcctggctgagacatttttaaaa

SEQ ID NO: 674179 - DNA, 584 bp, Homo sapiens
agtgctttcttttccatgacctcccactttcctttcctgcagaatcacatcgttagcaattctctaaactcctgtagtgctgacacaggcctgtttattaacacctgtctcaggttgttgtgaacaatctgttsctttgtatttgtgggtcctgtctctgttgttctgtttccagcatctggcacaatgccctatagagtacctggccctattaaagtaagtcaaaacctggagggttctcaatgaggaaatcagaggtcagattcagcacctcacacagggtgtgaggaagcagtgccgtacagtgctctctagtggcgtatctgcacaatggaaggaaaaaatgtgagccccgtaaatgcaacaacaaaaaaaatacatcagattacatttttctctttcaggcattccttaatcttctttaaatttttcagaaatatttttactgaagtacacattcataattatcataaaattctacctatgagctatatcatgcaaattattagacaaatccacatcttttaagaattttgaatctttgcataaaataaaacaagtacttttgaggcatttaatcaaac

SEQ ID NO: 674180 - DNA, 395 bp, Homo sapiens
agggggaggatcacttgaacccaggagtacaaggttacagtgaattatgatcataccactgcactccaggctgggtgacagaatgagactccatttctaaagttaaaaagtgtatatattgaaaaaacttacttgaaaacttttagagtagaaattatctttatagtatgtaatctatccagtcaaatgagctggcagtggaaggagcactggacttagagtcggaaggcatggccttttctcttttgccaatcaatgtgacatttagattttcattattatcattatcattattattattaagatttaaaaaaattgtgggctagaaatgtaactttcttcgtggcagaattttacacttatttttatttcataatktgctcttccaactaaga

SEQ ID NO: 674181 - DNA, 665 bp, Homo sapiens
gcccagtcagtacctgtgattgtgcttctggagtttatgaggttttgctattggctcccattcttcttacagatgtggattttgtgattattcaggccaagggcaatttgggtatgatccctgttccaggcatgacacgtgattggctctaggaaaaactgttgcagagacaaaattcttgctgttttcaaaggtagaaagctgggattgaggcactcctgaaaggctcagactggagaatttgaagactgaccagtcccttgaatgggctctggccagttataccactttttatagtaggttatatcttcttttcatttaaaaatatgctggtccaggttccaagatggccaaataggaacagctctggtctgcagcwtccagcgtgattgatacagaagatgggtgatttctgcatttcctattgaggtacttggttcatctcactgggagtggttggacagtgggtgcagcccatggagggtgagctgaagcagggcagggcattgcctcacccgggaagtgcaaggggttggggatttccctttcctagcaaagggaagctgtgacagactgtacctggaaaaatgggatactcccacccaaatactgtacttttcccaaagtcttagcaatgggcagacaaggagactctctcctgtgcc

SEQ ID NO: 674182 - DNA, 665 bp, Homo sapiens
gcccagtcagtacctgtgattgtgcttctggagtttatgaggttttgctattggctcccattcttcttacagatgtggattttgtgattattcaggccaagggcaatttgggtatgatccctgttccaggcatgacacgtgattggctctaggaaaaactgttgcagagacaaaattcttgctgttttcaaaggtagaaagctgggattgaggcactcctgaaaggctcagactggagaatttgaagactgaccagtcccttgaatgggctctggccagttataccactttttatagtaggttatatcttcttttcatttaaaaatatgctggtccaggttccaagatggccaaataggaacagctctggtctgcagcttccagcgtgattgatacagaagatgggtgatttctgcatttcctaytgaggtacttggttcatctcactgggagtggttggacagtgggtgcagcccatggagggtgagctgaagcagggcagggcattgcctcacccgggaagtgcaaggggttggggatttccctttcctagcaaagggaagctgtgacagactgtacctggaaaaatgggatactcccacccaaatactgtacttttcccaaagtcttagcaatgggcagacaaggagactctctcctgtgcc

SEQ ID NO: 674183 - DNA, 673 bp, Homo sapiens
agagccagctgtagccaacatggctgggtatatacttgatccttgtttcctgggagaagctctctgttgtctcaggcaagagctgatttatgaagttcaatggtctgtactccctgttcagccctgaggaggtggtcaaaaagggtggggccagacctgacaagtccaactacaggtcctctgacagcagacacaagcgcctgtgccaaggaagaatccagtgggcaaccactaagcacccagaggtgtgcttaggtgtggagctgggaaacctcctgggccccaagttctctgcacagggatggggagatggcctaaactaattcaggagagtgagagctccagattcctggagacctgcctggatgtggagtggasagaacacatccctgcaggaggatctctgcacaggaagggtggcagcccctgttcttagaatcaaatattttcccaaggaaccccaatttcattagtcagagagtggtactacaaaccacactctcagttccagatgaactccttgcttctggggtttcattgctttcagactgactcagctgacagagcaaggatatatgtatttgtgtatactaacctgtgtgtatacaaatatctataaatatttctatgtgtaaccatctgtatttatattgagctagatataaattcatac

SEQ ID NO: 674184 - DNA, 673 bp, Homo sapiens
agagccagctgtagccaacatggctgggtatatacttgatccttgtttcctgggagaagctctctgttgtctcaggcaagagctgatttatgaagttcaatggtctgtactccctgttcagccctgaggaggtggtcaaaaagggtggggccagacctgacaagtccaactacaggtcctctgacagcagacacaagcgcctgtgccaaggaagaatccagtgggcaaccactaagcacccagaggtgtgcttaggtgtggagctgggaaacctcctgggccccaagttctctgcacagggatggggagatggcctaaactaattcaggagagtgagagctccagattcctggagacctgcctggatgtggagtggacagaacacatccctgcaggaggatctctgcacaggaagggtggcagcccctgttcttagaatcaaatattttcccaaggaaccccaatttcattagtcagagartggtactacaaaccacactctcagttccagatgaactccttgcttctggggtttcattgctttcagactgactcagctgacagagcaaggatatatgtatttgtgtatactaacctgtgtgtatacaaatatctataaatatttctatgtgtaaccatctgtatttatattgagctagatataaattcatac

SEQ ID NO: 674185 - DNA, 673 bp, Homo sapiens
agagccagctgtagccaacatggctgggtatatacttgatccttgtttcctgggagaagctctctgttgtctcaggcaagagctgatttatgaagttcaatggtctgtactccctgttcagccctgaggaggtggtcaaaaagggtggggccagacctgacaagtccaactacaggtcctctgacagcagacacaagcgcctgtgccaaggaagaatccagtgggcaaccactaagcacccagaggtgtgcttaggtgtggagctgggaaacctcctgggccccaagttctctgcacagggatggggagatggcctaaactaattcaggagagtgagagctccagattcctggagacctgcctggatgtggagtggacagaacacatccctgcaggaggatctctgcacaggaagggtggcagcccctgttcttagaatcaaatattttcccaaggaaccccaatttcattagtcagagagtggtactacaaaccacactctcagttccagatgaactccttgcttctggggtwtcattgctttcagactgactcagctgacagagcaaggatatatgtatttgtgtatactaacctgtgtgtatacaaatatctataaatatttctatgtgtaaccatctgtatttatattgagctagatataaattcatac

SEQ ID NO: 674186 - DNA, 1192 bp, Homo sapiens
tcctctggaggctgagtcaraaaaatcgcttgaacccgggaagcagaggttgcagtgagccaagatctcaccactgcactctagcctgggtgacagagtgagactctgtctcaaaaaaaaaaaaaaaaaaaaaaaaaaacagtcttctgaattttggtgagctttggaaatacagaaagttaccgacaataggtttcacacttctttggacctatggtgctttctatgtcttttacattttactctgtgaccatgacatggtcataagttgatttgcagaaaggttataaagaaccaagaaacttacccccaaaattgctatgccctgcaaagttttcatccagctttgttcagtaccctggcgaggatatgcttgattaaaggatctttagcaattgagaacaagtgttcaataattccaaagtttgtacttccaaatttgtaaatctatacatctgtattattctgtatgtttactctagcctgtgacatagagccagagtgaagattgctaaggtgccagtcctgctcaaatttcaattagcagcaagtcctaaggtactcagggtcttagaacccgttggtttgttttggagagagaccacgtacaaacttagaagagcggctttcacttctctgtttcctatcagcaatccctcagctattcactcaagagatctctaaggtcagtttctggcaggaacatcccttcacactcctccaacaatcagtcattcacaagtggccattattttaatatgagcacatatacctatgcgccaagatgattacagtctgcaagcatagccatgttttcctatttcctttgtaatctcaagggtagtcctaaagccatgtacacaaaatccattttccacttaaaggcctgagccaatgcccccaaccagcctatcttacttttattctttatgttagccccatatcgccaagtaggaacatggtcctctgtttagaaaacggaaataatgaactgtatgttggttgtcattgtttgaaaagagaaaacaacccaaagacattctacattctaagacaatttggttgctgtttctcttgcttttcttccaaatttctctccaagctccagggcttacagccttgggcactggcactgtaaagtggatttgcagagccaataggagctggccttcctctgaagagtcttaaaagg

SEQ ID NO: 674187 - DNA, 1192 bp, Homo sapiens
tcctctggaggctgagtcaaaaraatcgcttgaacccgggaagcagaggttgcagtgagccaagatctcaccactgcactctagcctgggtgacagagtgagactctgtctcaaaaaaaaaaaaaaaaaaaaaaaaaaacagtcttctgaattttggtgagctttggaaatacagaaagttaccgacaataggtttcacacttctttggacctatggtgctttctatgtcttttacattttactctgtgaccatgacatggtcataagttgatttgcagaaaggttataaagaaccaagaaacttacccccaaaattgctatgccctgcaaagttttcatccagctttgttcagtaccctggcgaggatatgcttgattaaaggatctttagcaattgagaacaagtgttcaataattccaaagtttgtacttccaaatttgtaaatctatacatctgtattattctgtatgtttactctagcctgtgacatagagccagagtgaagattgctaaggtgccagtcctgctcaaatttcaattagcagcaagtcctaaggtactcagggtcttagaacccgttggtttgttttggagagagaccacgtacaaacttagaagagcggctttcacttctctgtttcctatcagcaatccctcagctattcactcaagagatctctaaggtcagtttctggcaggaacatcccttcacactcctccaacaatcagtcattcacaagtggccattattttaatatgagcacatatacctatgcgccaagatgattacagtctgcaagcatagccatgttttcctatttcctttgtaatctcaagggtagtcctaaagccatgtacacaaaatccattttccacttaaaggcctgagccaatgcccccaaccagcctatcttacttttattctttatgttagccccatatcgccaagtaggaacatggtcctctgtttagaaaacggaaataatgaactgtatgttggttgtcattgtttgaaaagagaaaacaacccaaagacattctacattctaagacaatttggttgctgtttctcttgcttttcttccaaatttctctccaagctccagggcttacagccttgggcactggcactgtaaagtggatttgcagagccaataggagctggccttcctctgaagagtcttaaaagg

SEQ ID NO: 674188 - DNA, 906 bp, Homo sapiens
taattcccacatcctgtcttcatagccaagaaatataaaccctttaagcagaaaaagaaaagccatcattccttgcccaaacttgatttctttccacctctctgatgtaaatcctgcagctggcctgtgggtttatcagataaaattactactttaaagttagtggcaaaggggcaatgtttagcacagagtggctagtcaatagatttttttttgaataagtgaatcaatacaattggcttggcattggcattttaactaatattcacatcttatttctctgatgtagttgagcaacagatgattcaaaagtcaatgggaaaagatcagcaaaggatttatattttgctgacagtattttctggtctattatctcaactatgaagcttgccttctactgcctttatcttacaggcctggagaaagaggtagcacttttctcagtactttttagttttacaccacacatttacacattttcatttactaaacaattccttcgccttctatttttgctttaacacctaaactaaaacattcttttaagccttgccaccatctctgtgaatttcattatttctrttaataatcctctcaacagcctgacttcagaattcctcatcttgttccatcccaaggggctccatcttcgttcagtctcagttactaagtaataattcatacatacccaaaaaattttaaacagaaatgcattattttttacatcaaaattctgagatctccactaatgactatacacttgacccttgaactacatgggattgacctgcatgggtccacttacatgcagatttttttcaataaaagttacatgaaatgtattgccctctcctgcctccccttacctcctctacctcttccacttctattacccctgagacagca

SEQ ID NO: 674189 - DNA, 648 bp, Homo sapiens
ttatacaatcaaaaggtaggataaaatgtattacaaaagcttgtgatttcaatatttatttatttgttttgagccacctctgggttagaacagttgagtgttcacagctggtagagttctcgttttcaaatacttcagaagaagttcttaggacaccaaacaggagccacaatgttagacttctgaatagtcaccctataagtaaaatgtataaggctctcctcaggctgggtttgttattaatccaagattaaaagtgtagttcacagactacaactgagagcccaaagactcctcatccacccmcttggtcagcgcctcattcattctttgtcgaactgtcaacactgcctccagttggccactgtttgagcacctgagccgcacgcactggagacacggcagtgcgttacagaacctgctcgtagggagctccagtaatcggacataaatcctgagttccatagcctagctcttctctgggtggctaatctcacctaaccattccagtttgtcagactgaggacttctctactcaaagccttaagtggcttactgctggctccctatattaaaataaacctccttaggccaaatttccaaatgatccacaataagacccacgttgtttctagcccaactatgatc

SEQ ID NO: 674190 - DNA, 950 bp, Homo sapiens
tatttacagttgcaattcacctgggatttccaaaagaatatgtgctccagcattcgcctattttcttaggaagtatacagatccatatatacccaaggcctttttctgtgctcataaagcaaactttcctagtcttactcttattgtaataatagagttcataatatttgcccacagrgtacaatgtttatacacataaatgctcatctctgccatatctctatgagggggacccaggagcccaggaaccagttatatccctctcaatgtcaactccatgctccttggacatatttccatagtatgtcccactaagtaactcctgcagttagtttaggcatttaggagcatttttttttctattattattggttctttcttgccttattttgcaatttgatgactcttttctcttccataaccaaccccaaacaaaaggggtaattattgacatcctgatgaatctctttgttctaaaaattgctgagtgttacagacggaatgtttgtgtatccccagaatgcatatgctgaaatcctaatgaaatggtttcgttgtctggggtaaacacctgaggtaaggcatctcacaccaggaaaatttagaacatggacacacacacaaggattttaggaatggaggtttaataggcaaaagaaagaggagagaagctctttctctagtgacaaaggggggctttggagagaaatgaccggtccatggtgaattcgccggatattataggcaggcttgaggatgctgtgtctgatttacatagggaccacagattggtttgatcaagtgtgatgtttacacagcatgctgggaaggctggctacccccaccataatcttattatgcaaatggactatccacttgatcaaggccatcttgtctgctccttactatacacgtggctggcaaaaaaatggagccaccatttttaacac

SEQ ID NO: 674191 - DNA, 950 bp, Homo sapiens
tatttacagttgcaattcacctgggatttccaaaagaatatgtgctccagcattcgcctattttcttaggaagtatacagatccatatatacccaaggcctttttctgtgctcataaagcaaactttcctagtcttactcttattgtaataatagagttcataatatttgcccacagagtacaatgtttatacacataaatgctcatctctgccatatctctatgagggggacccaggagcccaggaaccagttatatccctctcaatgtcaactccatgctccttggacatatttccatagtatgtcccactaagtaactcctgcagttagtttaggcatttaggagcatttttttttctattattattggttctttcttgccttattttgcaatttgatgactcttttctcttccataaccaaccccaaacaaaaggggtaattattgacatcctgatgaatctctttgttctaaaaattgctgagtgttacagacggaatgtttgtgtatccccagaatgcatatgctgaaatcctaatgaaatggtttcgttgtctggggtaaacacctgaggtaaggcatctcacaccaggaaaatttagaacatggacacacacacaaggattttaggaatggaggtttaataggcaaaagaaagaggagaraagctctttctctagtgacaaaggggggctttggagagaaatgaccggtccatggtgaattcgccggatattataggcaggcttgaggatgctgtgtctgatttacatagggaccacagattggtttgatcaagtgtgatgtttacacagcatgctgggaaggctggctacccccaccataatcttattatgcaaatggactatccacttgatcaaggccatcttgtctgctccttactatacacgtggctggcaaaaaaatggagccaccatttttaacac

SEQ ID NO: 674192 - DNA, 620 bp, Homo sapiens
gaccagtggtgtgcctgtcatattggagaaactgtctcactgcagctactcaccatacataactgctaccacaactatccagactatcactgccaccaaaatcacccacataatctccaccaccgccaccactgccacaatcactcttagcatccatatcatcagtcaatgagtctggagatgatctcataaggtttctttgatacaggaaatattgcctaaagcagtgtttcatraacttatttgaatctgatgcgttagtctgagattctacattttcaatcaggagtgacaggatctgatgatgttggtcaaccacatttcaagtaggcagggtctagagaatatttcagtctcaaagcactctgtttcagaggacaccatgctggaggagatcaaaagcttcacgaagttatagtcatgagcagggacagaaatgaggaggaaagtactttgaaattttaaatggaactcagtcttctaagttaatggaatttctcttatttcaaaattctattgcccaactccagcatgagatcatcgggccattggcaagaaacccagagccaagtttcgttttagtctgtaaacaaacataccttttactcaatggaactatg

SEQ ID NO: 674193 - DNA, 620 bp, Homo sapiens
gaccagtggtgtgcctgtcatattggagaaactgtctcactgcagctactcaccatacataactgctaccacaactatccagactatcactgccaccaaaatcacccacataatctccaccaccgccaccactgccacaatcactcttagcatccatatcatcagtcaatgagtctggagatgatctcataaggtttctttgatacaggaaatattgcctaaagcagtgtttcatgaacttatttgaatctgatgcgttagtctgagattctacattttcaatcaggagtgacaggatctgatgatgttggtcaaccacatttcaagtaggcagggtctagagaatatttcagtctcaaagcactctgtttcagaggacaccatgctggaggagatcaaaagcttcacgaagttatagtcatgagcagggacagaaatgaggaggaaagtactttgaaattttaaatrgaactcagtcttctaagttaatggaatttctcttatttcaaaattctattgcccaactccagcatgagatcatcgggccattggcaagaaacccagagccaagtttcgttttagtctgtaaacaaacataccttttactcaatggaactatg

SEQ ID NO: 674194 - DNA, 620 bp, Homo sapiens
gaccagtggtgtgcctgtcatattggagaaactgtctcactgcagctactcaccatacataactgctaccacaactatccagactatcactgccaccaaaatcacccacataatctccaccaccgccaccactgccacaatcactcttagcatccatatcatcagtcaatgagtctggagatgatctcataaggtttctttgatacaggaaatattgcctaaagcagtgtttcatgaacttatttgaatctgatgcgttagtctgagattctacattttcaatcaggagtgacaggatctgatgatgttggtcaaccacatttcaagtaggcagggtctagagaatatttcagtctcaaagcactctgtttcagaggacaccatgctggaggagatcaaaagcttcacgaagttatagtcatgagcagggacagaaatgaggaggaaagtactttgaaattttaaatggaactcagtcttctaagttaatggaatttctcttattkcaaaattctattgcccaactccagcatgagatcatcgggccattggcaagaaacccagagccaagtttcgttttagtctgtaaacaaacataccttttactcaatggaactatg

SEQ ID NO: 674195 - DNA, 1298 bp, Homo sapiens
ggctgttataacaaattgccacaaatggggcagcctaaaaaaacttacaccactgtagttaagaagtatgaaataggtcttaccctgctaaaatcaaggtatcagcagagctgtgtccctctttcagggagaatccattgacttagcctttccgtcttctrgagtttgtccatgtggcttggccagtggccctcttcctccatctttccagccagtaatggtaggttcatttatcacatcacattcctctgatcttcccttaggtcttcctttttcacatttaaggatgcttgtgactacattggtccacctggataatcaaaattatctccctgctttaaggtcagctaattagcagccttagttccatctgcaaccttaatcccctttgccatggaacgtaacatatttatagtttccagggattaggacagggacatctatagggggctattattctgcctgccacaatctaccctctgacctttaagatttataagcaaaatacagtcacactgtcccaaccaccccaaagtctcaacctgacagcaattatatgaattatagtattatataaatattatcttaatgatattatattgtgatgaatttagctaatagcacactttaattgacattcctttaagatggctactttcctctctagcaaccaaaaatcagactgttgactagtagaatatgagacaggatggaagaagagaacaaatctattgggttcgagatttaggctttctaaaggattgtagattgaaacaacttccagttttcttcacaatattgagttattagagttgttttccccttaagatcaaaagtatacagtaccctggcaggtcctggctgccctcattcctacagaaggatcagttcaagttcttttaaacctgtaggagccataccagtaaagaaacctgagatctccaaattatctgcctccttaagtacttcaaactacaaaagagataaagaaaaaacactgttcaaccaatgttattcgactataatcccagataatgttaattttagatgaaattatgtgattaaacaatttttatgctttaatatctccctttacattttttactaatccttttttcctccaattccacattatatcatgcctacgtagcttgtcttttagttctcattccccatggctgctcttttatttactaggttgtcacatgaatttttcttaatacatagccttcaagtatacatggatctgagcaaatcatttttctagtctagtgacaaaaacactggcaaatcaaaaa

SEQ ID NO: 674196 - DNA, 1298 bp, Homo sapiens
ggctgttataacaaattgccacaaatggggcagcctaaaaaaacttacaccactgtagttaagaagtatgaaataggtcttaccctgctaaaatcaaggtatcagcagagctgtgtccctctttcagggagaatccattgacttagcctttccgtcttctagagtttgtccatgtggcttggccagtggccctcttcctccatctttccagccagtaatggtaggttcatttatcacatcacattcctctgatcttcccttaggtcttcctttttcacatttaaggatgcttgtgactacattggtccacctggataatcaaaattatctccctgctttaaggtcagctaattagcagccttagttccatctgcaaccttaatcccctttgccatggaacgtaacatatttatagtttccagggattaggacagggacatctayagggggctattattctgcctgccacaatctaccctctgacctttaagatttataagcaaaatacagtcacactgtcccaaccaccccaaagtctcaacctgacagcaattatatgaattatagtattatataaatattatcttaatgatattatattgtgatgaatttagctaatagcacactttaattgacattcctttaagatggctactttcctctctagcaaccaaaaatcagactgttgactagtagaatatgagacaggatggaagaagagaacaaatctattgggttcgagatttaggctttctaaaggattgtagattgaaacaacttccagttttcttcacaatattgagttattagagttgttttccccttaagatcaaaagtatacagtaccctggcaggtcctggctgccctcattcctacagaaggatcagttcaagttcttttaaacctgtaggagccataccagtaaagaaacctgagatctccaaattatctgcctccttaagtacttcaaactacaaaagagataaagaaaaaacactgttcaaccaatgttattcgactataatcccagataatgttaattttagatgaaattatgtgattaaacaatttttatgctttaatatctccctttacattttttactaatccttttttcctccaattccacattatatcatgcctacgtagcttgtcttttagttctcattccccatggctgctcttttatttactaggttgtcacatgaatttttcttaatacatagccttcaagtatacatggatctgagcaaatcatttttctagtctagtgacaaaaacactggcaaatcaaaaa

SEQ ID NO: 674197 - DNA, 1298 bp, Homo sapiens
ggctgttataacaaattgccacaaatggggcagcctaaaaaaacttacaccactgtagttaagaagtatgaaataggtcttaccctgctaaaatcaaggtatcagcagagctgtgtccctctttcagggagaatccattgacttagcctttccgtcttctagagtttgtccatgtggcttggccagtggccctcttcctccatctttccagccagtaatggtaggttcatttatcacatcacattcctctgatcttcccttaggtcttcctttttcacatttaaggatgcttgtgactacattggtccacctggataatcaaaattatctccctgctttaaggtcagctaattagcagccttagttccatctgcaaccttaatcccctttgccatggaacgtaacatatttatagtttccagggattaggacagggacatctatagggggctattattctgcctgccacaatctaccctctgacctttaagatttataagcaaaatacagtcacactgtcccaaccaccccaaagtctcaacctgacagcaattatatgaattatagtattatataaatattatcttaatgatattatattgtgatgaatttagctaatagcacactttaattgacattcctttaagatggctactttcctctctagcaaccaaaaatcagactgttgactagtagaatatgagacaggatggaagaagagaacaaatctattgggttcgagatttaggctttctaaaggattgtagattgaaacaacttccagttttcttcacaatattgagttattagagttgttttccccttaagatcaaaagtatacagtaccctggcaggtcctggctgccctcattcctacagaaggatcagttcaagttcttttaaacctgtaggagccataccagtaaagaaacctgagatctccaaattatctgcctccttaagtacttcaaactacaaaagagataaagaaaaaacactgttcaaccaatgttattcgactataatcccagataatgttaattttagrtgaaattatgtgattaaacaatttttatgctttaatatctccctttacattttttactaatccttttttcctccaattccacattatatcatgcctacgtagcttgtcttttagttctcattccccatggctgctcttttatttactaggttgtcacatgaatttttcttaatacatagccttcaagtatacatggatctgagcaaatcatttttctagtctagtgacaaaaacactggcaaatcaaaaa

SEQ ID NO: 674198 - DNA, 635 bp, Homo sapiens
cagagcatagccccagcaagaggtcaagggccaggattcaactgagatgttctgagtctacacacagggggctcaattctcccttcggttcatgaactcatcatggattccaaactggatcatagccagtttttaattgyacccaaatgcaaatccgatgggaatgctatgaagaagtcaaaaagtgataacgaagctcgctgaccagtgtagtagggtgagaaatattagattaaatctcaaataacagagagattagagaatatgcaggtagttgataggctagaaacttaaaaagttcccagattttagaagttagtttcactaatacttgagagacttcagtcatgtctgactgagaacctattgcacattgcagctaaatactctttttagtagttaaaagcagcctaatctttcttgtctcttagttgccttaaaacatccaagcaatttccaataataaaaaaaaaaaaacttagcactgaagaagcaaactacctcccccactttatcacagcttgctctccctatcagaacattattgctggtattattctggaattctatcttagataatatctgattgatgtagttctttttattgaaatacagagcactgattataatataca

SEQ ID NO: 674199 - DNA, 652 bp, Homo sapiens
attgactgaagagtagctgggtccccatgcagagggaccttgtgatgtccagcctttcttcaaagggacaatggccattgacttgggtaaytatccactggggaactgacatatccaggtcacatctgctcctgactgacccacaggaggctacaaagcccctgcctttttgtctttgaggtggacccctatgtagaaatagccaggcttcagagttccctgtaggactgacggaagcatccctgtgcactcgctgcttctaccctgtcctgcttctgtaaccacccaatgggttcacttttcctgctgcctagtcagagccaatttattaagatgggggattgcaatggagaaagagtaattcatgcagagccagctgtgcgggagactggaattttattcttactccaatcagcctccctgagcattcaaggattagcgtttttaaagataatttggtgggtaggggcttgggaagtgggaagcgctgattgatcaggttggaattatagggggttgaagtgagtttctcttgctgtcttctgttcctggatgggatggcagaactggctgagccagattaccatcagtctgggtggtgtaagctgatccatcgagtgcaggctctgcaaaatgtctcaagcattgatct

SEQ ID NO: 674200 - DNA, 1947 bp, Homo sapiens
agagataatggagggttctttttttttttcttttcagacttttaaaggtgtcagatgctcagtctctcctaaatcctggaaaggtgctgataaggcagcactgatgtccatgcttttattttgacccatattgccagggtgttgtggctgcctgctccaggtctatcttgtccctaggtagggcccctctggctaagggaaatagagcaaaaagacttatagccaattaaacattttaggtcaggcagaaatggaagtgggcaggcattcataaatcccttaaaccttttagacaacatgagagtcaaaaagcaagtttacaaaattgatatccataagcactacctgttgagccatctgctgtttaagtgtctgttgaccatctttgatatggagggtctgaactaattatacggttatgagtatagcagaatacatgactcttagtagctacataagaagttttctgattacattgaaaaatgtagataaagccaagagtacagaatcaatttatactaaggaaaatattgctttttccatttttttagacctttaatataaaatatttcagcatcaggccataacagtagttagaatcagagggaaaaaaattacagaagctgactgataaaaaaattgaaggacaaagttattatcttaggccttctcaaagacagaaaaagctgaaagcagcaaaatttgaacgtctgagatatgaatctgagaagttgtcaaataaataaaacagtttatagaattaaacataaaaacatcttataattttattaggagaaactcaataccttaagaaaatcttgttttaacataggggaactatcattaaaaagttatataaatatatgtgtttaaaaattatagccaacctaattatatacacaaatgtttacctttctttcttttttataacttttaaagtccacaatttgaattaacctttaaataatttttaggcaatttttcaataaaaacataattttatgtctttttataattaattttatattaaaaataatttttaaccacttttaatgcctatgaacataagatattcacctaagtaagaaccttaacattaagcagatgggcttttgccgataactcmgaggatttagctgttttcattaaaccaatgatcttaaattagttttagtcttatttttgtcatgggtttgtagctataatcttcttaatcagccagggtatggcccaatgggctcttaggtagaataaaaattgagctgcacattttgaagttagggaacaaaggagcacaaatacacagatcaaagaaaacagagtactcccaaacaaattcccatagagggagactggaaagttaataaatcttatctcaaaccagttggtactgcaaacaacatatgttaggtccaaatgccacaaaaccaaaatgccagagacagaggatgttcagtgtacataccagtttagcttaagcagtcctgaagcccttcagcttcccaatcatagtattccttgcaccagtgaagtgttgcaggcacctgatgccacaatggagaaagaagggaggatacctgagataaagaattcttagcagctcctggatgtctttagaatcccagctgtgaggtcagctatccatgagcagctggcactcgtgagcagttgtcactctgcccatagtgcgtacaggtaagtcctgacgctgccttggccaattactccatctgtttgaaaccagagaggctggatgcctgaggcctatcaccctgtgctgaatgccaggtaattgtaaccaaactcaggttcaactgctcactacttgatggaaagaaagcaggtttatttatgtgctagcaactttggagatggccagactgaaatctcaaaaagccatctcagagtctcaggctggctaaagggattttaaggggaaatgtggca

SEQ ID NO: 674201 - DNA, 661 bp, Homo sapiens
ggaatggaggagtaatggtttgatgatggatggatgatgatggatggtggatgtgttttagatctaaggacctacatatgtaaacagattttaacaggcttatcactgtcaaggtgccstaatcaccagctacaaagaaaactcctcaaggattggatgaaaacacagactgtgaaatccccctcatggagattctgatactggctcatatcctacgaatccatcttttagaacaaaacagaagattctggtacacagctagtcctaagaatcattatgtgttaattacactcaataaaatattttttaaaatcattattagggaaatcagtaattttaacaggaaagacgtgcctctggatttctgatttgaaaagactttttatgacatcttggaacctcatgattacatgcctagaggtgggtattcccaggcctctaaataatacaaacaagcacatggaaattctatattcatctcctggtgcaactgcactggctggaagatactttattcaaggacagtgctgtctttccgctaagtcgtggttcagaaaccaacacggataaatgccaaaaaaatctagggtctcaaaataccaatacaaacccactgtatttactaacagaaatggttctagcgccccaggtaggtgggaaa

SEQ ID NO: 674202 - DNA, 661 bp, Homo sapiens
ggaatggaggagtaatggtttgatgatggatggatgatgatggatggtggatgtgttttagatctaaggacctacatatgtaaacagattttaacaggcttatcactgtcaaggtgccgtaatcaccagctacaaagaaaactcctcaaggattggatgaaaacacagactgtgaaatccccctcatggagattctgatactggctcatatcctacgaatccatctttwagaacaaaacagaagattctggtacacagctagtcctaagaatcattatgtgttaattacactcaataaaatattttttaaaatcattattagggaaatcagtaattttaacaggaaagacgtgcctctggatttctgatttgaaaagactttttatgacatcttggaacctcatgattacatgcctagaggtgggtattcccaggcctctaaataatacaaacaagcacatggaaattctatattcatctcctggtgcaactgcactggctggaagatactttattcaaggacagtgctgtctttccgctaagtcgtggttcagaaaccaacacggataaatgccaaaaaaatctagggtctcaaaataccaatacaaacccactgtatttactaacagaaatggttctagcgccccaggtaggtgggaaa

SEQ ID NO: 674203 - DNA, 2334 bp, Homo sapiens
tgaaaagttaaaaaccgtgcatggaatagatgacacaatgttaccaaatcactgaaaattcaataaagaaaattggacagacttctttgccagttattgtcacttggcttcgtttgaagaaattttacttatattttaatgaaagttttcccccttttgctggyttaatccgaagcttccaacatttttaaatattgtaagccagatgaatgttttgtggtcaaaaagaaatgaggaatgcaagaaacacatggcaaatagcaaaaaattattcatgtggcaatttaatgatgctaaaaataagactgctatggtagaaatgtaggtcatagtctgtgctccctggggagcctcacagtatagattctggttcagtgatgggagacctaccatgggtgtaaatagagtagatcaccaattatgatccggttccacaaccctagtgcactagtagtcaaagttcttggttacaaacaatggaaacctctctggttagcttactcagaagaaatttattggaaggatatccaatatttcttagtcccaaagaaagcagagacactcatagctcaggcagaaaccaggagaatgcattcaattccaagtttagccacaggaatgttctacgtagggtgctgtgagggccattgtcactaccactgaagccattggcattgatggctcccttcatgcccctgggctctcaatgctgcagcaagacatctctgatactgagcctttgtgtcttcaccaagacttggcacccgatggctcctgagcccttgatctcactgcagggagcaggagagggcatgggcatttagcctcttagctattgggccttgctttactctcatcttggaattgcccaatgtagaatattcagagtttatgtagtcaaaatgtcagaggaccactctttctgagtctggggtcagtactgtgtctgagagagaggaaaagctaagccaaagatggttcccctaaatagaggttgaagcaatattgacagtagctgagaaatgtgagcagaggtggcttgaagttgacatcaaataaccaggaaagacatgatcggagaccagtaggtcacaactagaaccagttgggatatactatatggccaaagtttaaaggcaggtagccaatgctcatggatatggtttctaccatccttagatattttgggggtagatcttgaacactgaaagaacagagacaagctagatgcctgtgaacactattagttaacattccccttctcgactgggagcgatggttcatgcctgtaataccagcactttgggaggcccaggcaggtggatcacctgaggtcaggagttcaagaccagcctgggcaacatggtgaaaccctgtccttactaaaaaatacaaaaattagccaggcacagtggcacatgcctatggtcccagctacttgagaggctgaggcaggagaattgctcaaacctgggaggcagaggttgcagtgagctgggattgcaccactgcgctacagcctgggcaacagagcaagactctactcaaaaacaaacaaacaaaattccccttctcctccaaacacttctgccgtccatctgtcagcacagtaccttcccctacgtcagtgtttcccaaataatggtacacataccatgagtggtatgagacgtgatttttagatggctatagggtaaacattttttcatatttatgcatttattttaatggcattcagaactatataacgacaagtaacatttacttactctgtgctaggcatggttccaactcctttacatacattcagattcatgcaatcctcacaacagcctaaggagatgattactagtattatgtattacccacattttgcagatgatgaaactgaggcccagagaggttatgtaacatgcttaccatcacagggctagtgagggagggagccaggattagcaaaggggcagtctagctccagagtccttgttcttcctgtgccatgatgagggtctttaccatgagatgagcagctaccagggcattacgaacgaaaaacataatttcaccttttttctctttaataaacatgaatgtgtttcctcaccacaacccagtgagtgtagcaatatttacatagcgaacatatagtatttaatacatgccaattgctatttcaagtgcgtcacatataataaactcaggaccatgagacagaggctctcattatccccattttacagaagcagcaaatgaggcacagagaaattattatgtgccgaagttatccagttagtaaatggcagagatagaatttgaattattttttttttcctg

SEQ ID NO: 674204 - DNA, 2334 bp, Homo sapiens
tgaaaagttaaaaaccgtgcatggaatagatgacacaatgttaccaaatcactgaaaattcaataaagaaaattggacagacttctttgccagttattgtcacttggcttcgtttgaagaaattttacttatattttaatgaaagttttcccccttttgctggcttaatccgaagcttccaacatttttaaatattgtaagccagatgaatgttttgtggtcaaaaagaaatgaggaatgcaagaaacacatggcaaatagcaaaaamttattcatgtggcaatttaatgatgctaaaaataagactgctatggtagaaatgtaggtcatagtctgtgctccctggggagcctcacagtatagattctggttcagtgatgggagacctaccatgggtgtaaatagagtagatcaccaattatgatccggttccacaaccctagtgcactagtagtcaaagttcttggttacaaacaatggaaacctctctggttagcttactcagaagaaatttattggaaggatatccaatatttcttagtcccaaagaaagcagagacactcatagctcaggcagaaaccaggagaatgcattcaattccaagtttagccacaggaatgttctacgtagggtgctgtgagggccattgtcactaccactgaagccattggcattgatggctcccttcatgcccctgggctctcaatgctgcagcaagacatctctgatactgagcctttgtgtcttcaccaagacttggcacccgatggctcctgagcccttgatctcactgcagggagcaggagagggcatgggcatttagcctcttagctattgggccttgctttactctcatcttggaattgcccaatgtagaatattcagagtttatgtagtcaaaatgtcagaggaccactctttctgagtctggggtcagtactgtgtctgagagagaggaaaagctaagccaaagatggttcccctaaatagaggttgaagcaatattgacagtagctgagaaatgtgagcagaggtggcttgaagttgacatcaaataaccaggaaagacatgatcggagaccagtaggtcacaactagaaccagttgggatatactatatggccaaagtttaaaggcaggtagccaatgctcatggatatggtttctaccatccttagatattttgggggtagatcttgaacactgaaagaacagagacaagctagatgcctgtgaacactattagttaacattccccttctcgactgggagcgatggttcatgcctgtaataccagcactttgggaggcccaggcaggtggatcacctgaggtcaggagttcaagaccagcctgggcaacatggtgaaaccctgtccttactaaaaaatacaaaaattagccaggcacagtggcacatgcctatggtcccagctacttgagaggctgaggcaggagaattgctcaaacctgggaggcagaggttgcagtgagctgggattgcaccactgcgctacagcctgggcaacagagcaagactctactcaaaaacaaacaaacaaaattccccttctcctccaaacacttctgccgtccatctgtcagcacagtaccttcccctacgtcagtgtttcccaaataatggtacacataccatgagtggtatgagacgtgatttttagatggctatagggtaaacattttttcatatttatgcatttattttaatggcattcagaactatataacgacaagtaacatttacttactctgtgctaggcatggttccaactcctttacatacattcagattcatgcaatcctcacaacagcctaaggagatgattactagtattatgtattacccacattttgcagatgatgaaactgaggcccagagaggttatgtaacatgcttaccatcacagggctagtgagggagggagccaggattagcaaaggggcagtctagctccagagtccttgttcttcctgtgccatgatgagggtctttaccatgagatgagcagctaccagggcattacgaacgaaaaacataatttcaccttttttctctttaataaacatgaatgtgtttcctcaccacaacccagtgagtgtagcaatatttacatagcgaacatatagtatttaatacatgccaattgctatttcaagtgcgtcacatataataaactcaggaccatgagacagaggctctcattatccccattttacagaagcagcaaatgaggcacagagaaattattatgtgccgaagttatccagttagtaaatggcagagatagaatttgaattattttttttttcctg

SEQ ID NO: 674205 - DNA, 2334 bp, Homo sapiens
tgaaaagttaaaaaccgtgcatggaatagatgacacaatgttaccaaatcactgaaaattcaataaagaaaattggacagacttctttgccagttattgtcacttggcttcgtttgaagaaattttacttatattttaatgaaagttttcccccttttgctggcttaatccgaagcttccaacatttttaaatattgtaagccagatgaatgttttgtggtcaaaaagaaatgaggaatgcaagaaacacatggcaaatagcaaaaaattattcatgtggcaatttaatgaygctaaaaataagactgctatggtagaaatgtaggtcatagtctgtgctccctggggagcctcacagtatagattctggttcagtgatgggagacctaccatgggtgtaaatagagtagatcaccaattatgatccggttccacaaccctagtgcactagtagtcaaagttcttggttacaaacaatggaaacctctctggttagcttactcagaagaaatttattggaaggatatccaatatttcttagtcccaaagaaagcagagacactcatagctcaggcagaaaccaggagaatgcattcaattccaagtttagccacaggaatgttctacgtagggtgctgtgagggccattgtcactaccactgaagccattggcattgatggctcccttcatgcccctgggctctcaatgctgcagcaagacatctctgatactgagcctttgtgtcttcaccaagacttggcacccgatggctcctgagcccttgatctcactgcagggagcaggagagggcatgggcatttagcctcttagctattgggccttgctttactctcatcttggaattgcccaatgtagaatattcagagtttatgtagtcaaaatgtcagaggaccactctttctgagtctggggtcagtactgtgtctgagagagaggaaaagctaagccaaagatggttcccctaaatagaggttgaagcaatattgacagtagctgagaaatgtgagcagaggtggcttgaagttgacatcaaataaccaggaaagacatgatcggagaccagtaggtcacaactagaaccagttgggatatactatatggccaaagtttaaaggcaggtagccaatgctcatggatatggtttctaccatccttagatattttgggggtagatcttgaacactgaaagaacagagacaagctagatgcctgtgaacactattagttaacattccccttctcgactgggagcgatggttcatgcctgtaataccagcactttgggaggcccaggcaggtggatcacctgaggtcaggagttcaagaccagcctgggcaacatggtgaaaccctgtccttactaaaaaatacaaaaattagccaggcacagtggcacatgcctatggtcccagctacttgagaggctgaggcaggagaattgctcaaacctgggaggcagaggttgcagtgagctgggattgcaccactgcgctacagcctgggcaacagagcaagactctactcaaaaacaaacaaacaaaattccccttctcctccaaacacttctgccgtccatctgtcagcacagtaccttcccctacgtcagtgtttcccaaataatggtacacataccatgagtggtatgagacgtgatttttagatggctatagggtaaacattttttcatatttatgcatttattttaatggcattcagaactatataacgacaagtaacatttacttactctgtgctaggcatggttccaactcctttacatacattcagattcatgcaatcctcacaacagcctaaggagatgattactagtattatgtattacccacattttgcagatgatgaaactgaggcccagagaggttatgtaacatgcttaccatcacagggctagtgagggagggagccaggattagcaaaggggcagtctagctccagagtccttgttcttcctgtgccatgatgagggtctttaccatgagatgagcagctaccagggcattacgaacgaaaaacataatttcaccttttttctctttaataaacatgaatgtgtttcctcaccacaacccagtgagtgtagcaatatttacatagcgaacatatagtatttaatacatgccaattgctatttcaagtgcgtcacatataataaactcaggaccatgagacagaggctctcattatccccattttacagaagcagcaaatgaggcacagagaaattattatgtgccgaagttatccagttagtaaatggcagagatagaatttgaattattttttttttcctg

SEQ ID NO: 674206 - DNA, 195 bp, Homo sapiens
tgaattattagtcactgggtatcttacaattataatgttcatttcagctttggagaaggaaaataaagatgtttccactttgccttcactcgcatgtatgtgaacttccctccagaaatttccaagctgcttgatttgcaggttctgcatacctcttggaaacagtctgtgcctttgtgaataacrcagggggtc

SEQ ID NO: 674207 - DNA, 1863 bp, Homo sapiens
ctattatactaagaagttatatgtaagaaaattactgggtaacagtgtttaaaaacagttttaaaactttcaaatcagttcttttatactgcaattgttctaaaattatctaatttaggaaacatattattcagtgaaaaataaaaatggatgaagtaagggacattaattgggtcaacacgcttactaaaggagctttatcctgctgtggccataccaacacatggatttacagaacctactgtataaccttttaagaaacaactgctggctctccatctactcactccttttttttgtttggtttaacatgtgtctaatcctgtaacagggaaatacagagactcacttctttttgcaaatcacagaaattacagaaattcatatcacactaatgtatctgaataaacaccttcacttctcaaataatcagcagcaggttctatgatacagactaaatctacatcttttctgactgcaactatcaagtttactgaagacaaaaatgctacatatagtttggccagcaaaattcatagtgatgaaatgagtcagatgactgacacctattcagatgactgactagaaaatgtgagatctaatgtttcaggttactgtccaaattctctttggtaactgttaaggatagagaagctataaaatagagaaaaaaagaagcacaggaatttcatgatattgatagctgggcacacaggcaaagaaagagagaagtaattatacaaatgtctgctaatatgaaaagtttacaatattattatgatttaaaatacaaagaatacatacaaagtttctccagcaaaacaacataacatttcatcctaattagagcatagaatgtcatatataattacatttatataggatttatctgaagaataaaatgtaaatatttactatgcttctcactttataattcatagatggtaataacgtctatttgacctgtgaatctgaatcttttctctatgttttaaggtaaccaacatttccttgatttagtaaaaaaccaaacacatgtaaaagagtacatcagaaaattctttttgttcaaattctcagttatttcaggtcaactttgaatagattccataaaataatcatttgtggaataccttctcaaggcaaaggtatcatgataggtggtatggggttggatataaagatggaaactagactgtgtatgtccacaaagacattacaaccaaagagtgtgagcccttgaattacctcaaaacccctaggtcagatcagctaagcacataacacaagtatagagagccatgagggttaaaggaagttagaggaaacaagaaaagtttgaaggagaaaacagaatttgaaacaacayacacacctaaatcccatacacacacagaaacacaggcctaaatcctaacaatggggctgaaccaagtgggaggaaagaagccagtacacaaacatgtgctagtgaagtgagggaataggaaaggaggtgtgagaactgagatactgggccgggcgtggtggctcacgcctgtaatcccagcattttgggaggccaaggcgggtggatcatgaggtcaggagatcgagaccatcctggctcatatgatgaaaccctgtctctactaaaaatacagaaaattagccgggtatgatggcacgagcctgtagtcccagctactcgggaggctgaggcaggagaattgcttgaacccgggaggcggaggttgcagtgggctgagattgtgccactgcactccagcctgggcgacagagtgagactctatctcaaaaaaacaaaaaacaaaacaaaacaaaaaacaaacctgagatactgtcgcttgtgctctatcgaca

SEQ ID NO: 674208 - DNA, 1473 bp, Homo sapiens
ataaatgctttgattcacttggtctgaattacaagatgatttatttgctctccaaactgcaactgtaaatttttcactgctctttcctctcagtttgacatgtctatgattccatctcatcttctggtgaaggaaatccccactggttttaaccccttttctttccaagttcatttttcttctctgacatagggcctaaaagccaagggaattatgcaaagtctctctgctctgaaagtatcaaacttcctttccaaagaggtattttcctatttcagcacaaaaagcactaaattgcttaatttaatacaaagagaaaagcagtgggtaaagctgctgtagtcaggatttcttgatctatgttgaatgggctatggatggttggagagtgtggattattacacttgagctcagacaagtctttcagaactcattctgagacaggaagtgatgaaatcagctctcacatgaactgtgaggctgtcacgtgcacttagccactttctgtctcaatgggtgacaggggaatgcggaggggagagtagggcatggggaagtgggtagtggggagcgggaagaagaggccagatacagatggtgggaaaagtcccaactctgcccctcacagtttcccttattcttctagggctaggattaagtaaactgggttatttctactcccaatgaccaatctctcattgtgacaatctgctgaatttaaccaccccttgtgaacattcaatttcccaactctgacgctattgacaacggttatggaagacagcaagtcgcatcattatcgcacagcctactaactgtttagttagagctgacacagcaaatggacttctgtaattcctcttctgctttatccctaaatttccaccctaaatagtaaagtggggggaaggtatagaaaaggttggattatcgaagtatctgggccccagggatctctgtcaccgtggggcagctttaataataattctattgtcatgttatgcactatggaaaagtgatagatttaattagtggcacatgatagagaaggaaaggtaagataatgcagagatggccttcttggcacagacagatcatttcagaaaggtgtgtgaaggaggaggaggagcrctgggtagcagtggtcatcagtgagggcatcccaggcggacgagggagcaggcgcagtgagcagaaactagaagtggaaggtatgggatttcaggctgaagctgaagcgtacaggccctactccttgttgccaagggtaagacccctttctcaaattatctgtattataataagaaaagccacaggtacaagaagcagataatgattaaggatggagaccaggtggtctcaccagcgccaccttgagggaagggctgggaaagagtctgagtgaggtttgcagcttgagcaaagatgaactcaaatggagccagtgcttagttgtaaggaaaatgaattttg

SEQ ID NO: 674209 - DNA, 1473 bp, Homo sapiens
ataaatgctttgattcacttggtctgaattacaagatgatttatttgctctccaaactgcaactgtaaatttttcactgctctttcctctcagtttgacatgtctatgattccatctcatcttctggtgaaggaaatccccactggttttaaccccttttctttccaagttcatttttcttctctgacatagggcctaaaagccaagggaattatgcaaagtctctctgctctgaaagtatcaaacttcctttccaaagaggtattttcctatttcagcacaaaaagcactaaattgcttaatttaatacaaagagaaaagcagtgggtaaagctgctgtagtcaggatttcttgatctatgttgaatgggctatggatggttggagagtgtggattattacacttgagctcagacaagtctttcagaactcattctgagacaggaagtgatgaaatcagctctcacatgaactgtgaggctgtcacgtgcacttagccactttctgtctcaatgggtgacaggggaatgcggaggggagagtagggcatggggaagtgggtagtggggagcgggaagaagaggccagatacagatggtgggaaaagtcccaactctgcccctcacagtttcccttattcttctagggctaggattaagtaaactgggttatttctactcccaatgaccaatctctcattgtgacaatctgctgaatttaaccaccccttgtgaacattcaatttcccaactctgacgctattgacaacggttatggaagacagcaagtcgcatcattatcgcacagcctactaactgtttagttagagctgacacagcaaatggacttctgtaattcctcttctgctttatccctaaatttccaccctaaatagtaaagtggggggaaggtatagaaaaggttggattatcgaagtatctgggccccagggatctctgtcaccgtggggcagctttaataataattctattgtcatgttatgcactatggaaaagtgatagatttaattagtggcacatgatagagaaggaaaggtaagataatgcagagatggccttcttggcacagacagatcatttcagaaaggtgtgtgaaggaggaggaggagcactgggtagcagtggtcatcagtgagggcatcccaggsggacgagggagcaggcgcagtgagcagaaactagaagtggaaggtatgggatttcaggctgaagctgaagcgtacaggccctactccttgttgccaagggtaagacccctttctcaaattatctgtattataataagaaaagccacaggtacaagaagcagataatgattaaggatggagaccaggtggtctcaccagcgccaccttgagggaagggctgggaaagagtctgagtgaggtttgcagcttgagcaaagatgaactcaaatggagccagtgcttagttgtaaggaaaatgaattttg

SEQ ID NO: 674210 - DNA, 633 bp, Homo sapiens
ttttcagctacacttacacaacgcatagtgtcatcactgcacggcatcaacttcaagaaatgcttgaataaaatctcaggaggaaacaaacagtttctggagaatgtctacatcaataatagaaaaaaatctgaaacaaaattaagtacaattaaataatttaaaagtcatttttgatcaatactgaaaagaaatgaaacatagaaatacaagaaaaacaaccatgtgtgaatcccagaatattatttagactaaagtatggttcacatatatttatatatataatggtctactatgagatcaatgaggtgctcacaatttctcagaaatgttttcagttgtccattccatgtttcttcaaacacagtgtcagaattgttaaatgtatacctttcatacttggtctcattttaaatcagtaaaagtattgtctagatcttcaaggtttgattccatatgtattttgctrtgaaaattgctccattcatttagataatgtgacatcaaattataagctctaagcagctgtcactctttgccagacactcggaaatcctgatgagaactggcatgccatttatctcacaattcagtgtcaacagtaataaaatctatgggcttaatacattaaca

SEQ ID NO: 674211 - DNA, 1187 bp, Homo sapiens
tggtaatacattcatattggtaactaccaattaattattaataacaattattttattaagtttaatttwaaaataattgattttgaatagcttataagggaaaaatacaaacattacttgagagatgagttgactaagttaattcccaaactcattttacagtaaatatgtggcatttcaacatatattatattttcacactttccttttggttttagattaagaacaaagccataaatattctccatgattgcaaatttgccaagctttgggtctgcaattcttatgtgggaaattagttaacttttatcaattatgccaccccttttagataaacatttaaatataattcagataaacattctttctcaattgaaagcagcattctcagtttcctttgtaaactatggaatacatatagctattcgtagtagaaacttcttggtgaccaattcaatagagtttcaactattttcctcaccgttactgcactattgtggttgaaaatctaactaattgcttccccatgctccctatgcattgcacttctgaccactaaaatgtaaccagaggtagagtgtatgcttctgctaacaatttatgtttttcttgataaaagagaatggttactactggcacaaacaccaccacactgcctttttacacaaacaccaccacactgcctttttacacaaacaccaccacactgcctttttaccctctgctatcttttttttttttttttttaggcagagtctgtctttgtcgcccaggctggactgcagtggcgcgatctctgctcactgcaagctccccttcccgggttcacgccattctcctgcctcagcctctccaagtagctgggactacaggcgcccgccaccacgcccggctaattttttgtatttttaatagagacggggtttcaccgtggtctcgatctcctgacctcgtgatccgcccgcttctgcttcccaaagtgctgggattacaagcgtgagccattgcggcccgccaatcttcttgcatgaaggtgcagcaaaggtcttgagtccctgaggcagagacacaggggctgccctaatgctggcactgctgagcagctaacccaatatcaacactgatttcttcttaacaagggaaacaatgtgcaatttaagtttctcaatacttgatgctcctcactt

SEQ ID NO: 674212 - DNA, 1476 bp, Homo sapiens
gcagaggagtattttctgtatatgtccacgtggtggtggaaagtggctttccaagtctgcctacctgcgtgagaattcttcttcatcacttactacctgcacttctctgtacttcagctttcttctctacaaaatggatttaataatagtactcaccatatgargttgttggatggaatgaatattatatatgtgtaaatgcatagcataggttatggtgcacagaaggtgtgcagtaaccatcaggaagtatttaatattattatttttaaagcaatagttctcaagcctggcaatttttgatcacttaagagcctctttaaaaaaatacagttgctcagaccttgctgaatctcctggatcagaacctcttgggttggggctatggcatctgttatttcttgaaaacatctacaaatggttttgatcctctgtctgttgaaaatcactggcctagaattctattagttattattattcagagaacacaaattgtgccacaggttctcttacacagcctttgtttagagttaagcatgaggaggtctggaaataaaatcaccagggatgtaatttagtttggcaaagatgggagttccgaattcctcgaagccagagaactgagtatggaggccagtgacagaggtgtccaagactgggattaaagcctgaacaatagagccaagggctggagtccaggaaaacgaggctagattaaagttgctgcaagaaacctgagaagtggaaggcctgagcaactataactaacacaaaatggcacttagagtttatcagccaacaggagctctatggagtgagtgttacaggcatggatagcaggagtggagcagacagttgtcatttagatgtttgtagacattattcagataatcatgttgactccattcacataggctgctaaaataaaccaatatgatatgagcttccaagttaagggcacaaaataactacatcagaaatcctataacaccagatagagaaaagcaatgttgtcttagaatcatagactcccatagttggaagggaattgtatctctcccaagagaatcccttctctttctggagaacatagatatcttatttatgttgatttgaacttttaatctttcctatttccacgtattggcgtttttcttgttcttagcatcatataacaaacgtgacagtcattgacatatttgaaaacagaaccttgctcggattcctctattctccgagctctgcctcccactgtctctaaccattcttctgagctcacatttggaagttgcattctgatttaaaacacactctgaaaggatggtaccagaacagtgtggaatggaccatcacttctgaacaatgtaaaatggattcaatatatagtgtaaaagatgaattatttttctgaaaattggatcaatgtacatcattttgctcatcttgtatagcaccataaggatcactgaaggtgtt

SEQ ID NO: 674213 - DNA, 1476 bp, Homo sapiens
gcagaggagtattttctgtatatgtccacgtggtggtggaaagtggctttccaagtctgcctacctgcgtgagaattcttcttcatcacttactacctgcacttctctgtacttcagctttcttctctacaaaatggatttaataatagtactcaccatatgaggttgttggatggaatgaatattatatatgtgtaaatgcatagcataggttatggtgcacagaaggtgtgcagtaaccatcaggaagtatttaatattattatttttaaagcaatagttctcaagcctggcaatttttgatcacttaagagcctctttaaaaaaatacagttgctcagaccttgctgaatctcctggatcagaacctcttgggttggggctatggcatctgttatttcttgaaaacatctacaaatggttttgatcctctgtctgttgaaaatcactggcctagaattctattagttattattattcagagaacacaaattgtgccacaggttctcttacacagcctttgtttagagttaagcatgaggaggtctggaaataaaatcaccagggatgtaatttagtttggcaaagatgggagttccgaattcctcgaagccagagaactgagtatggaggccagtgacagaggtgtccaagactgggattaaagcctgaacaatagagccaagggctggagtccaggaaaacgaggctagattaaagttgctgcaagaaacctgagaagtggaaggcctgagcaactataactaacacaaaatggcacttagagtttatcagccaacaggagctctatggagtgagtgttacaggcatggatagcaggagtggagcagacagttgtcatttagatgtttgtagacattattcarataatcatgttgactccattcacataggctgctaaaataaaccaatatgatatgagcttccaagttaagggcacaaaataactacatcagaaatcctataacaccagatagagaaaagcaatgttgtcttagaatcatagactcccatagttggaagggaattgtatctctcccaagagaatcccttctctttctggagaacatagatatcttatttatgttgatttgaacttttaatctttcctatttccacgtattggcgtttttcttgttcttagcatcatataacaaacgtgacagtcattgacatatttgaaaacagaaccttgctcggattcctctattctccgagctctgcctcccactgtctctaaccattcttctgagctcacatttggaagttgcattctgatttaaaacacactctgaaaggatggtaccagaacagtgtggaatggaccatcacttctgaacaatgtaaaatggattcaatatatagtgtaaaagatgaattatttttctgaaaattggatcaatgtacatcattttgctcatcttgtatagcaccataaggatcactgaaggtgtt

SEQ ID NO: 674214 - DNA, 1476 bp, Homo sapiens
gcagaggagtattttctgtatatgtccacgtggtggtggaaagtggctttccaagtctgcctacctgcgtgagaattcttcttcatcacttactacctgcacttctctgtacttcagctttcttctctacaaaatggatttaataatagtactcaccatatgaggttgttggatggaatgaatattatatatgtgtaaatgcatagcataggttatggtgcacagaaggtgtgcagtaaccatcaggaagtatttaatattattatttttaaagcaatagttctcaagcctggcaatttttgatcacttaagagcctctttaaaaaaatacagttgctcagaccttgctgaatctcctggatcagaacctcttgggttggggctatggcatctgttatttcttgaaaacatctacaaatggttttgatcctctgtctgttgaaaatcactggcctagaattctattagttattattattcagagaacacaaattgtgccacaggttctcttacacagcctttgtttagagttaagcatgaggaggtctggaaataaaatcaccagggatgtaatttagtttggcaaagatgggagttccgaattcctcgaagccagagaactgagtatggaggccagtgacagaggtgtccaagactgggattaaagcctgaacaatagagccaagggctggagtccaggaaaacgaggctagattaaagttgctgcaagaaacctgagaagtggaaggcctgagcaactataactaacacaaaatggcacttagagtttatcagccaacaggagctctatggagtgagtgttacaggcatggatagcaggagtggagcagacagttgtcatttagatgtttgtagacattattcagataatcatgttgactccattcacataggctgctaaaataaaccaatatgatatgagcttccaagttaagggcacaaaataactacatcagaaatcctataacaccagatagagaaaagcaatgttgtcttagaatcatagactcccatagttggaagggaattgtatctctcccaagagaatcccttctctttctggagaacatagayatcttatttatgttgatttgaacttttaatctttcctatttccacgtattggcgtttttcttgttcttagcatcatataacaaacgtgacagtcattgacatatttgaaaacagaaccttgctcggattcctctattctccgagctctgcctcccactgtctctaaccattcttctgagctcacatttggaagttgcattctgatttaaaacacactctgaaaggatggtaccagaacagtgtggaatggaccatcacttctgaacaatgtaaaatggattcaatatatagtgtaaaagatgaattatttttctgaaaattggatcaatgtacatcattttgctcatcttgtatagcaccataaggatcactgaaggtgtt

SEQ ID NO: 674215 - DNA, 605 bp, Homo sapiens
catgtgtaacttctcactctcttccaatcagcccctctccccactctaggtcaagattggccccagatatggggcctgtaggaaaatcagagtctcctgatgaggccaagtaggaaaatcagaaactaagaagactgttgccccattctgaacccatatgctaacttcagttgcttgtgtactgtatgccagtagtcctgatctgggatctattatgctaccagctcttggctttagtagaactctttgccacatcaaattatgggcaggattggcagcaagatcctctctaggattccatggcatcttagagtggggtaatccattttcattggtgaggtaggcccatgaagacagagaaagagacactactgggaggaagatgtggttaatccatgtgagacaatttcccaagacttctagaattaaaatatccatctcacttttacctttttgctttcatgaataactaccttccactttagatggtgaatgctccttgttcatcactatatacctacggcctagcacagtatctagcgcagagcagagttcagtaaacatttgttgaatgaatgaatgaatgaatgaatgamtgaatgaat

SEQ ID NO: 674216 - DNA, 1854 bp, Homo sapiens
tgaaatgattcagagttagctcattaatcactaaagcaaactttcattttttgttttacttttcaaattagtgtttaggtaacataaaagcctattaaaatctaattataytagtaacaatttcaaatactctgggagagaactaaacaacagactcttaattatgaggagtaactcttgaaccttaataaatctttaagttcagaggtatgcctatggtaaataatttccctcttaaaaatgtattttaaaagaccagcagaaaaatttgacctctgcagacctttagtgaaatttgctacaaaactgatgatagggaggaaacaacaaagccaggtaggtggtaggcagctggtaaagttcactagttaaggcactcactgttggacacaaatcaggaagtgtacacaagtgcaaacttgttctctcagaattacagtaatatagtggctgtgtccccacctaaatctcatgttgaattgtagctcccataattcccaaatgttatgagaaggacctggtaggagataattgaatcatcaggatggcttcccccatactgttcttgtggtagtgaataagtctcacgagatctgatggttttagatcatgaggtctctctcttgcctgctgccgtgtaagacatgcctttcactgtctgccatgattgtgagacctccccagtcatgtggaactatgagtccattaaacctctttttcttcataaattacccagtctcaggtatgtctttatgagcagtgcaaaaagggactaatataagtccctttacagataagcatgtacatgaaggctttcttactaagagtcaaaacctcagatataatagccataaatgctctgtgagtctatcatttccttaaaaaaacattttctcccctagttctcttccacgttaggtccaccagtgataatcatttgacatcttttgtacatggcccaatgtgaggggacactattttctgattaagtgcagctcctctgtctctcctgataacagtacaagaaggtcttgtactgcaccaaagattaggatctgcaatccaaaggaactgcaagtggaaacagtgaggaatgggccatgtgtccagatggacctgggagatcaccaacccaaatatagacagcaaattaacagctaccatcttgagacagtgtgtgcacgcagcggtttagaatcgggggaagtagttaactgagacccaggtttgggtaaagataccactgcaagtaattggcagtcttactgaaaaacggtaataaacagttccacaaagaggcatatctaagaccctgaaatcaatggcttcattttgctaccactcagtttgagtctccttttgcattctgaactgctgggtaatgggagtcttttctaactagaagtggttttcagtattagctgtttgacaggatcatttggggcatcaagttccctatagacacactcaggcctcgttgaatccatcactgaggaatgaaccgtgcagctgtgtggtgtattctgtctgtgatccaacaagtgtttaagaatgagggctctgggggcctggagcggtggctcaggcctgtaatcccagcactttgggaggcccaggtgggcagatcacgaggtcaggagattgagaccatcctggccaacgtggtgaaaccctgcatctactaaaaatacaaaaaatcagctgggcatggtggcgggcgcctgtagtcccagctacttgggaggctgaggcaggagaatggcttgaacccgggaggcggagcttgcagtgagccgagatcgcgccactgccctccagcctgggcgacagagcgagactccgtctcaaaaaaaa

SEQ ID NO: 674217 - DNA, 1854 bp, Homo sapiens
tgaaatgattcagagttagctcattaatcactaaagcaaactttcattttttgttttacttttcaaattagtgtttaggtaacataaaagcctattaaaatctaattatactagtaacaatttcaaatactctgggagagaactaaacaacagactcttaattatgaggagtaactcttgaaccttaataaatctttaagttcagaggtatgcctatggtaaataatttccctcttaaaaatgtattttaaaagaccagcagaaaaatttgacctctgcagacctttagtgaaatttgctacaaaactgatgatagggaggaaacaacaaagccaggtaggtggtaggcagctggtaaagttcactagttaaggcactcactgttggacacaaatcaggaagtgtacacaagtgcaaacttgttctctcagaattacagtaatatagtggctgtgtccccacctaaatctcatgttgaattgtagctcccataattcccaaatgttatgagaaggacctggtaggagataattgaatcatcaggatggcttcccccatactgttcttgtggtagtgaataagtctcacgagatctgatggttttagatcatgaggtctctctcttgcctgctgccgtgtaagacatgcctttcactgtctgccatgattgtgagacctccccagtcatgtggaactatgagtccattaaacctctttttcttcataaattacccagtctcaggtatgtctttatgagcagtgcaaaaagggactaatataagtccctttacagataagcatgtacatgaaggctttcttactaagagtcaaaacctcagatataatagccataaatgctctgtgagtctatcatttccttaaaaaaacattttctcccctagttctcttccacgttaggtccaccagtgataatcatttgacatcttttgtacatggcccaatgtgaggggacactattttctgattaagtgcagctcctctgtctctcctgataacagtacaagaaggtcttgtactgcaccaaagattaggatctgcaatccaaaggaactgcaagtggaaacagtgmggaatgggccatgtgtccagatggacctgggagatcaccaacccaaatatagacagcaaattaacagctaccatcttgagacagtgtgtgcacgcagcggtttagaatcgggggaagtagttaactgagacccaggtttgggtaaagataccactgcaagtaattggcagtcttactgaaaaacggtaataaacagttccacaaagaggcatatctaagaccctgaaatcaatggcttcattttgctaccactcagtttgagtctccttttgcattctgaactgctgggtaatgggagtcttttctaactagaagtggttttcagtattagctgtttgacaggatcatttggggcatcaagttccctatagacacactcaggcctcgttgaatccatcactgaggaatgaaccgtgcagctgtgtggtgtattctgtctgtgatccaacaagtgtttaagaatgagggctctgggggcctggagcggtggctcaggcctgtaatcccagcactttgggaggcccaggtgggcagatcacgaggtcaggagattgagaccatcctggccaacgtggtgaaaccctgcatctactaaaaatacaaaaaatcagctgggcatggtggcgggcgcctgtagtcccagctacttgggaggctgaggcaggagaatggcttgaacccgggaggcggagcttgcagtgagccgagatcgcgccactgccctccagcctgggcgacagagcgagactccgtctcaaaaaaaa

SEQ ID NO: 674218 - DNA, 1854 bp, Homo sapiens
tgaaatgattcagagttagctcattaatcactaaagcaaactttcattttttgttttacttttcaaattagtgtttaggtaacataaaagcctattaaaatctaattatactagtaacaatttcaaatactctgggagagaactaaacaacagactcttaattatgaggagtaactcttgaaccttaataaatctttaagttcagaggtatgcctatggtaaataatttccctcttaaaaatgtattttaaaagaccagcagaaaaatttgacctctgcagacctttagtgaaatttgctacaaaactgatgatagggaggaaacaacaaagccaggtaggtggtaggcagctggtaaagttcactagttaaggcactcactgttggacacaaatcaggaagtgtacacaagtgcaaacttgttctctcagaattacagtaatatagtggctgtgtccccacctaaatctcatgttgaattgtagctcccataattcccaaatgttatgagaaggacctggtaggagataattgaatcatcaggatggcttcccccatactgttcttgtggtagtgaataagtctcacgagatctgatggttttagatcatgaggtctctctcttgcctgctgccgtgtaagacatgcctttcactgtctgccatgattgtgagacctccccagtcatgtggaactatgagtccattaaacctctttttcttcataaattacccagtctcaggtatgtctttatgagcagtgcaaaaagggactaatataagtccctttacagataagcatgtacatgaaggctttcttactaagagtcaaaacctcagatataatagccataaatgctctgtgagtctatcatttccttaaaaaaacattttctcccctagttctcttccacgttaggtccaccagtgataatcatttgacatcttttgtacatggcccaatgtgaggggacactattttctgattaagtgcagctcctctgtctctcctgataacagtacaagaaggtcttgtactgcaccaaagattaggatctgcaatccaaaggaactgcaagtggaaacagtgaggaatgggccatgtgtccagatggacctgggagatcaccaacccaaatatagacagcaaattaacagctaccatcttgagacagtgtgtgcacgcagcggtttagaatygggggaagtagttaactgagacccaggtttgggtaaagataccactgcaagtaattggcagtcttactgaaaaacggtaataaacagttccacaaagaggcatatctaagaccctgaaatcaatggcttcattttgctaccactcagtttgagtctccttttgcattctgaactgctgggtaatgggagtcttttctaactagaagtggttttcagtattagctgtttgacaggatcatttggggcatcaagttccctatagacacactcaggcctcgttgaatccatcactgaggaatgaaccgtgcagctgtgtggtgtattctgtctgtgatccaacaagtgtttaagaatgagggctctgggggcctggagcggtggctcaggcctgtaatcccagcactttgggaggcccaggtgggcagatcacgaggtcaggagattgagaccatcctggccaacgtggtgaaaccctgcatctactaaaaatacaaaaaatcagctgggcatggtggcgggcgcctgtagtcccagctacttgggaggctgaggcaggagaatggcttgaacccgggaggcggagcttgcagtgagccgagatcgcgccactgccctccagcctgggcgacagagcgagactccgtctcaaaaaaaa

SEQ ID NO: 674219 - DNA, 565 bp, Homo sapiens
tggccctattcagcagcaatgtattgttttaatttgctagttggtacattacgagagcttggtaatttgttcatccctttattaggtgtaagattgaaatggggctgggaagggaaaaataacaattggctggatgagcagaataatatgttctttgaaatgaagcattcttkgtaatggatgtttatttcagatgattacattgtacagtgcattcaaatgggaaaaacaaacaggaggccagctgcactaattttatcaaagttatttatatcagcagtataattaaaggcagtaatttcaaattaggttttctgaaaatccatttatagacaacacaaggcaacttgtcttagtggcatctaggccatgattgtgctctaggggcaatgttaactattgccaattggccttggcattttgaaaattaattacggtttcaaaagattctaaagtggttgcttcctggtgccctgaccagtttagatccaatccactaggagaacccaatatataatttatgagtgtgaaaaagaataatcgtgcataatcatttacaaatggt

SEQ ID NO: 674220 - DNA, 660 bp, Homo sapiens
tgagtatttcaggaacagtgccaaaaaatagtcagataatttagaaaacctatctgtatacctcttctgcattttgcctaagaataagtttcagggaatatacaacttacgtaaatataaacaatacacagatacaaacaatacaagataaagtttaattaasaatatatttaagaaactcctagaagaaaaacatagggaaaaactgtatgacattggatttggcaatgatttcttacatatgataccaaaagcatgggcagcaaaggtaaagagataaatcagcctacatcaaaattttcaaaaactgcgcatcaaaggacacaacaggatgaaaagccaacctacatacagagaaaatatttacagatcatgttaattattgcaaatggccaaaggattgtatagacatttcttgagagaagatacaccaacggccaaaaaacacatgaaaagatgttgaacatcactaataatgagggaaatgcaaatctaaaccacaatgagatgtctcacacccattaagatggctactataaagaaaacagaaaataacaagtcttggtgaggatgtggagaaattggaacccttgtgcactattggtgggaatgtatggtgcagttactctggcaaatataggtagaattactttatgatat

SEQ ID NO: 674221 - DNA, 258 bp, Homo sapiens
ttttttggtcaycattataaatgggatttctcttttgatttctttctcatctactttgtttcactggggtttggaaacactattgatttttgtatgttgatgtgtatcctgcaaatttactgcatctgtttatcagttccaggagttttttggtggtgtctttaggtctcttaacaaatggtttcctctaccttaaatatttttaagcttttaaaataattcctatttgccttttaagattagctggatcgttacctc

SEQ ID NO: 674222 - DNA, 1071 bp, Homo sapiens
tttgttgctaccaaataaggatatatagctgagaatttatatatagcttgaagattttctgcatttctaattaccacagttaggttctcatcttccctataaccattgcagagtagttgtatatttatttcaaatcttctgcagttgggatttaaataggcaaatttaaatactagtatctaatttggttcggaaattaaaatgcccctgcagcaacctcaacgagttttcttttgctcttagcactctgacagccctaaacacagcacagtatcttccttcccacttctgtcagatacaaggactccaggagcgtgttagttctccttcattcactttcaggtttatgcagaactgaagatgccataattcagaagtgtctgtgtttggcgacggattttagtatcgacattaaactgagaacttccttctttccctgaaggttacccaacaagtgctaatcaaaacctctccatgttctgcctgatttttaccagcttgttcttatttggaccctctgaggcccactttaacaattctgatgtctttattttagaaactcttttacctaaattagatcatgactctctgggggtgtaaccaaattaaaatgttttgccacacagtaagagggtcacaatggaggaaaaaaaggaataaggaaaaaataatcataaccagaatgaaatagaagccatatagactgtcaaaatgctccacacatcagaggactctttgttccaatcagcattccacagtctcaaaactccaccagttagagctagaaaagccctgagacattgtctcaccaagtggttcccaacctaggcttcatgttacactcacctgggaaaattttatgtttttaatgctgccaggattccatccagattgcttggaagtggcgcttcagcatgggtacattattagaagcatgccagataatttaatgagcaaccgaaagctgagaaccactgatttttagcctaatctgaggtgaacaaattgatgcccaccacctatatgtgtgtgtgtgtagtgtrtgtgtatataaaatatgtgtgtataaat

SEQ ID NO: 674223 - DNA, 1071 bp, Homo sapiens
tttgttgctaccaaataaggatatatagctgagaatttatatatagcttgaagattttctgcatttctaattaccacagttaggttctcatcttccctataaccattgcagagtagttgtatatttatttcaaatcttctgcagttgggatttaaataggcaaatttaaatactagtatctaatttggttcggaaattaaaatgcccctgcagcaacctcaacgagttttcttttgctcttagcactctgacagccctaaacacagcacagtatcttccttcccacttctgtcagatacaaggactccaggagcgtgttagttctccttcattcactttcaggtttatgcagaactgaagatgccataattcagaagtgtctgtgtttggcgacggattttagtatcgacattaaactgagaacttccttctttccctgaaggttacccaacaagtgctaatcaaaacctctccatgttctgcctgatttttaccagcttgttcttatttggaccctctgaggcccactttaacaattctgatgtctttattttagaaactcttttacctaaattagatcatgactctctgggggtgtaaccaaattaaaatgttttgccacacagtaagagggtcacaatggaggaaaaaaaggaataaggaaaaaataatcataaccagaatgaaatagaagccatatagactgtcaaaatgctccacacatcagaggactctttgttccaatcagcattccacagtctcaaaactccaccagttagagctagaaaagccctgagacattgtctcaccaagtggttcccaacctaggcttcatgttacactcacctgggaaaattttatgtttttaatgctgccaggattccatccagattgcttggaagtggcgcttcagcatgggtacattattagaagcatgccagataatttaatgagcaaccgaaagctgagaaccactgatttttagcctaatctgaggtgaacaaattgatgcccaccacctatatgtgtgtgtgtgtagtgtgtrtgtatataaaatatgtgtgtataaat

SEQ ID NO: 674224 - DNA, 2073 bp, Homo sapiens
caagttcacgcaacatgcaaaagaaaaggttaaatgggatgactttagttagatgtcactgtcaaatagaagatcaaagaaaaatgattgtggaaatgaaacttagattatgggagtcaaagctgttaaactcaggtttcttttcttcattgaatgacatcccatagaataaactcacagtggcctggcttgtatttctaatcactttttaaatattggtttaacttccattgctttgttgctgttgttgttgttctggattagaggtttttcctgcctctgatgattacaagttcatgaccttaagaattattattattagaaattatgcctttaatgtggcttcttccaaggatgaagattgaattttgtgtgtacaaaggtgtgtgtttgtgtgtgcgtgtgtgtatgcataaaatttatcttgcctaaatattttgctcaaagttacatcagcagtaagtatgcagaactgacagctgcctgtcagtactgttactcaaactcagtactgttaaatcccacactatatatgcaacattaattgacttaaattctcccttcttacgcacaaatttatctaggtaactaaaattttgtaagtttgtctttttctctttttttcctttttttaaaatgtctttgaaactttctcaatttaccacactgctcaaagtcttcaactctcagtctagaaagcagaatgtgacataggatgatctagatttactttgaggttaacagagtacaatatcaatcttgaatgtttcacatataaatttcatactcaacatatgcaattctttacaacatagagataagctattctggtcatttattttggtgggtgttcctcttagagcacttcttttacatttacttgttaaaattggctaaaaatataggcagagatacattttcgcttaagtatatgaaaagttttgctaaaccctttacaagcttataggtgcaggatatttgaaaacatcaacttatggctccagaaactcaaagactctaatgtaaaatgggtattagattgtatttggcccaaactattgccatatccaattgccatgtcttctgctgtgaccagatcagccaccctctcggctgaatggttgtatatgcatatgttccagtgcaaatcatgatatgtaaccatattttgttgagttgtcatttaattattctcgtgtaacttgaaagacagtcctatagtgaactcacttagtactagacacctctattcttagactataatgtacttttaagagcatatatttccctaggatacatccaagagcctttgatttacatttatgtttgaaatgcaacagatgttaaaacttgcagaactagattaaaatggtaaaaaaaaattagtggctgacacaaaatacttcaaatatccagaataaatgataagcaatctccaaaggattttaagaagtatgtatatatgatccccgagaacaacttgaaagttcttggcaagcttcttctttcaattcctgggttatattagtgaatctttaggaagtaatggacagtaatgcaggcttacaaatgtcaagctttgctgccttttaagttagaaattttattaaaatttatttttattttgtaaacagaattttgttatcactactataatgtaattatttgtgcattatattaagctcaatagatttctaaaggatttagaaatccagataacctggtgagttgtgaaggtgataaataaaactacttctaatagccacagtggggagatatttgtattagaacactatcattaattatcrtcatatgtacatagccaaaatatatgtcttacatattttaagtaatgtgattaaatgaaagaaaattattacacatgatatgtgtaacatcacagccacttatcatttttgcaaagagtgacatggaaaggaggagagacagaagtagttgaaatatgcattcattcccaagtcccttacctgtcgcaaattgtacttccatcactcttttttatgacaccagaagattactgatgatgctatttttcacatcatataacgtttg

SEQ ID NO: 674225 - DNA, 814 bp, Homo sapiens
ggccttttgtccatcaccatgccccatccttcttttccctaacacatccttcccacttaacttacctattctttatatgccttcttctcatcctagaagcctttcatgatctgtctatccccaatggattatgtgagcctcctatgtactcgtagaacacctttttttctctcagagcattttccacattttaactttccctttatttgtctgagtcatgcagtagatgagtgattttcgatcattagagtgtacctggaggacttgtttaaatgcagaatgttggaccccatcctcaagagtttctgattcagtagctcttgagtgggtcctaaggatgtatatatctgaaagtgatgttatggttctataactccgtttttgtgaaccctgcaatggaaaaaaactgagaraagttatgtcagcatgatggtggaatataagattcccttgtatcactactcccacaaaaatataattagaaagtattcaaagacaggaacaccaccctgaattcaggggagtaatgaagaaatctcttgggcctacagtatcgagagaaggcatgaccagtaggagaaatagtcattttagtctgtgctgctccctcctccaagctggcataacaccatttgcaaagaatttccctagacctgtgggttctgaggtgagaggaaggagttggaggtggatattcaatctctccactggtctgataatcttcatgggaagccaactccagttccatcccactggaaagactgggagtgccaggaaggctcaatcacctggggtaaattggataaagagtacg

SEQ ID NO: 674226 - DNA, 2223 bp, Homo sapiens
atggagagtgacagtatatgcatttcagagtaatcctggtaggtccagcaaactatgtattttgtgtgttataatctcctccatttttataaggctaacagaatcagtagaagcagcaccgaatcaaaaactgtttgtgtttcagtgcatggtgttatagcacaaactcctgtctggtcagtgaatttagcacaaaaacaaggcaagtattgatggaataaagaaaaggaccatctcctgaatacctatgagtaagatgattcacaaacattctttcatttaatcctcacagcaattctatgagcaattattgttatccttttttttttctaaatgaaaacattgaggcttagaagaacgaagtaacttgtccaagactcaatagcttcctaattgatgggagcctctatttgaatccaggtgggtttgatttcaaagctgcatctcttcctaagacatccactccttgccaaaacaaaacaaggttatttgctgacatgaagcaggcaggacaaccaattcttccctaggaattgtaagagctgtttccagaatcaaagcaaaagggtctgcctccttcatcctggcctggagacaactctgtttttcaattggttggcgtcctccaagtttttatgggactgttttgtgtgtgaagcggtgtagctagagtaaaagccaaggacagaaccccaggagttctaacatttacaggcctggtagaggatggcatttggcaaataattcaaaagggagcagtcagtgaggtcagaggaaagctggtaagaatagcaattagacatttagaaaataaagtattttaggaaggatggagtggccaataacaaatgtttctgataggttaagtaaatgaggccagatgattgaccattggtttaggcacagtacagatgaaagagctaagatagttttagcagaagcccaacgaaagtgattctaccgtacctcttcgctgcgatgaaaaatacaactgtctatagaattctaggtactactacactgggattttaaatgaaagtaagataatgttttgttttgttttattgattgattgattgattgtgacatttccctggtctttgtagggacacatctccagaattaccacctccagcagagtctstctggatgtatttctaacagaaaccatattattttaaattctactcttccctacatcccagattaggatgggtttttcttttaatactgcattatattttccctgcctgcctggcatctgacactatttcagttattggtctaataatttttttaatgtctacctctctggctagagtcccatgaggatactgactgtgtttgtcttgttcactgaaatttctcttattcttagtgtttggtacacaacaagaagtcaacaaattttatttattgtatatatgtgaataaatgaattacatttaaatcctttttcctgtatgagacagaaagctcaaaactaatcttcctgcataattttgaatgcttcctcttggccattttcaccattgccaaagaagaacgtctcaaagatagaatttttcaatagataaaattgtaaaaatcaataaaacaggatacataaactgcattttcaataagatattttaaggaatggtaacaaaattgaacacctctatagagagccatatagcatatttaaggaaaataaaacgcatcatggaaataaagaaagggaccaattcatttcctggtgagattccattatccattaacttgttctggagagagcaaggggaaattggattactggattattacaatctagtctgtctttgctagccatctatcagagattatatatagacaccacttatgagtgatagcaaaaatacatatatattctagaatttagcataattaattgctgtatttttgttttatgccttctgtttgacactgttctgacgaatcaggaactttagaagaaacatgctacaaaatatgagacttttaataaaagagactatgtctaatcagcacattagataccatttcattaatgcaacaccattttattcacatgattttgttgctggtgatgaattaaacaattatgaccaataatattcttcagagaggataacctgactcactctctctctctctatatatatatatacatttatataattatatttatataaaatatatattaattatataaatataattata

SEQ ID NO: 674227 - DNA, 2223 bp, Homo sapiens
atggagagtgacagtatatgcatttcagagtaatcctggtaggtccagcaaactatgtattttgtgtgttataatctcctccatttttataaggctaacagaatcagtagaagcagcaccgaatcaaaaactgtttgtgtttcagtgcatggtgttatagcacaaactcctgtctggtcagtgaatttagcacaaaaacaaggcaagtattgatggaataaagaaaaggaccatctcctgaatacctatgagtaagatgattcacaaacattctttcatttaatcctcacagcaattctatgagcaattattgttatccttttttttttctaaatgaaaacattgaggcttagaagaacgaagtaacttgtccaagactcaatagcttcctaattgatgggagcctctatttgaatccaggtgggtttgatttcaaagctgcatctcttcctaagacatccactccttgccaaaacaaaacaaggttatttgctgacatgaagcaggcaggacaaccaattcttccctaggaattgtaagagctgtttccagaatcaaagcaaaagggtctgcctccttcatcctggcctggagacaactctgtttttcaattggttggcgtcctccaagtttttatgggactgttttgtgtgtgaagcggtgtagctagagtaaaagccaaggacagaaccccaggagttctaacatttacaggcctggtagaggatggcatttggcaaataattcaaaagggagcagtcagtgaggtcagaggaaagctggtaagaatagcaattagacatttagaaaataaagtattttaggaaggatggagtggccaataacaaatgtttctgataggttaagtaaatgaggccagatgattgaccattggtttaggcacagtacagatgaaagagctaagatagttttagcagaagcccaacgaaagtgattctaccgtacctcttcgctgcgatgaaaaatacaactgtctatagaattctaggtactactacactgggattttaaatgaaagtaagataatgttttgttttgttttattgattgattgattgattgtgacatttccctggtctttgtagggacacatctccagaattaccacctccagcagagtctgtctggatgtatttctaacagaaaccatattattttaaattctactcttccctacatcccagattaggatgggtttttcttttaatactgcattatattttccctgcctgcctggcatctgacactatttcagttattggtctaataatttttttaatgtctacctctctggctagagtcccatgaggatactgactgtgtttgtcttgttcactgaaatttctcttattcttagtgtttggtacacaacaagaagtcaacaaattttatttattgtatatatgtgaataaatgaattacatttaaatcctttttcctgtatgagacagaaagctcaaaactaatcttcctgcataattttgaatgcttcctcttggccattttcaccattgccaaagaagaacgtctcaaagatagaatttttcaatagataaaattgtaaaaatcaataaaacaggatacataaactgcattttcaataagatattttaaggaatggtaacaaaattgaacacctctatagagagccatatagcatatttaaggaaaataaaacgcatcatggaaataaagaaagggaccaattcatttcctggtgagattccattatccattaacttgttctggagagagcaaggggaaattggattactggattattacaatctagtctgtctttgctagccatctatcagagattatatatagacaccacttatgagtgatagcaaaaatacatatatattctagaatttagcataattaattgctgtatttttgytttatgccttctgtttgacactgttctgacgaatcaggaactttagaagaaacatgctacaaaatatgagacttttaataaaagagactatgtctaatcagcacattagataccatttcattaatgcaacaccattttattcacatgattttgttgctggtgatgaattaaacaattatgaccaataatattcttcagagaggataacctgactcactctctctctctctatatatatatatacatttatataattatatttatataaaatatatattaattatataaatataattata

SEQ ID NO: 674228 - DNA, 620 bp, Homo sapiens
catggtgaaaccctgtctctactaaaaatacaaaaattagctgggcatggtggctcacacctgtaatcccagcactttgagaggctgaggcgggtagatcacttgaagtcaggagttcgagaccaatctggccaacatggtgaaaccctgtctctactaaaaatacagaaattaggggtggtggcaggcatctgtaatcccagctacttgggaggctgaggcaggagaatcacttgaacccaggaggcagaggttgcagtaagctgagatcgcactactgcactccagcctgggcaacagagtgagagtctgtctaaaataaataaataaataaawaaacttagccgggcatggtggttcgcacctgtagtcccagctacttataaggctgaggcaggagaatcgtttaaacccaaaaggcagaggctatagtgagctgagatcacgccattgcactccagcctgggtgacaaagtgagactccgtctcaaaaataaataaataaaataaaataaaatttaatgatcctagaatttattttgagagcattagaaaacacagataagtataaaaaccagtatcaaatcaactttactgatcaagctctgcttaggattctg

SEQ ID NO: 674229 - DNA, 590 bp, Homo sapiens
tgattcygcttccagcaagggtggactggattgtttcagaccaaccaccagctgagagcaactagagaagctgaacactaggttaaagaccacgcaggaattagggtgaccagcaaatagagcagcaccggggactgaaacccagttttagatcttctcaattgctgattggattaaggtgacctgggactgagagagcccccagcacagtctgctataccaagcaaatacaatcctctttgaacttaagctgcaagcaacgactctgtattgtttaccagacaccagttaaatagaagaagaaagaaatgttaaaaataaatgtacacgtcaagtgtttgcatgtgcaaatattccaactaaaaggaagctgatgtatcttgtattagaccaagtagactcccaagtaaataggaagcattggtagaagtaccaagggccagttcatgaagattaaaggccactctgtgagaagatataagaattcttaatttataggcaccaataacatcgtttcaaaaaatatgtaaagatgcacccatttgactaacttgcagcagctaatgtctgctgccaaggtttcctctcca

SEQ ID NO: 674230 - DNA, 590 bp, Homo sapiens
tgattccgcttccagcaagggtggactggattgtttcagaccaaccaccagctgagagcaactagagaagctgaacactaggttaaagaccacgcaggaattagggtgaccwgcaaatagagcagcaccggggactgaaacccagttttagatcttctcaattgctgattggattaaggtgacctgggactgagagagcccccagcacagtctgctataccaagcaaatacaatcctctttgaacttaagctgcaagcaacgactctgtattgtttaccagacaccagttaaatagaagaagaaagaaatgttaaaaataaatgtacacgtcaagtgtttgcatgtgcaaatattccaactaaaaggaagctgatgtatcttgtattagaccaagtagactcccaagtaaataggaagcattggtagaagtaccaagggccagttcatgaagattaaaggccactctgtgagaagatataagaattcttaatttataggcaccaataacatcgtttcaaaaaatatgtaaagatgcacccatttgactaacttgcagcagctaatgtctgctgccaaggtttcctctcca

SEQ ID NO: 674231 - DNA, 1091 bp, Homo sapiens
aaaraaaaagctgacagagctgagtgaatagtaagttataactcagaagcaacattcagagaaggctacaccttgtgaaggatgtcttcagagttcacaaaaagaacattgtgggggtgaaagttttagcttagaaggcaaaagatttcaaaaatatacagaatcaaaatgatgttaaaaataaacatggaggcattccactactgtttatgaaagaatagttcatgagcaaactgacctactgagaacaactataaaagctataaatggacaagaaacagctctttggaggcacgcgtggacacccacatccacacccacccagccccccaagacaaagcagcacaacttcaggaaacaaattgggagacaacaggaataatacattgagatgaaccccatatttgctactgttttctttccctgtatcaatatattttagattagtaatggggcatagaggccaagaaaaagggataccctcaaaatttgtgacaagctcactaggctgccaaaaggaatgatgttgggaaatgtctcagactttgaattgataatcttgaaggactacactctaggagtaagggcaagcttaatacagacaagtcctcaaaacactagaagcagaacctagaatcaatgaaacctctgtttagatccaggttatatgcctgtactttatatgaccaccagaaaaagtatcctctttaaagaaatatagcatcacctagaatttctattatttttatatacaatgtacagcattcaatctaaaattaagagacagcccaggatatagggccaagtgactgaaagccaagagagaaaacaaaattataatggacccacacgtgattaaaatagtagcactatcaggtacaagctaagaaacaatttgatttgcacattcaaaaatatattgaaaaacaatttcaagagagaactgtaatctgaaaaataatcaaactgatatcctagaaatgaataatacaatgactcaataattcactagctgtgttgaactgcagattacacatagcagacaagaggcttagtaaactggaaggcaggtcaatacacagtattcactt

SEQ ID NO: 674232 - DNA, 1091 bp, Homo sapiens
aaagaaaaagctgacagagctgagtgaatagtaagttataactcagaagcaacattcagagaaggctacaccttgtgaaggatgtcttcagagttcacaaaaagaacattgtgggggtgaaagttttagcttagaaggcaaaagatttcaaaaatatacagaatcaaaatgatgttaaaaataaacatggaggcattccactactgtttatgaaagaatagttcatgagcaaactgacctactgagaacaactataaaagctataaatggacaagaaacagctctttggaggcacgcgtggacacccacatccacacccacccagccccccaagacaaagcagcacaacttcaggaaacaaattgggagacaacaggaataatacattgagatgaaccccatatttgctactgttttctttccctgtatcaatatattttagattagtaatggggcatagaggccaagaaaaagggataccctcaaaatttgtgacaagctcactaggctgccaaaaggaatgatgttgggaaatgtctcagactttgaattgataatcttgaaggactacactctaggagtaagggcaagcttaatacagacaagtcctcaaaacactagaagcagaacctagaatcaatgaaacctctgtttagatccaggttatatgcctgtactttatatgaccaccagaaaaagtatcctctttaaagaaatatagcatcacctagaatttctattatttttatatacaatgtacagcattcaatctaaaattaagagacagcccaggatatagggccaartgactgaaagccaagagagaaaacaaaattataatggacccacacgtgattaaaatagtagcactatcaggtacaagctaagaaacaatttgatttgcacattcaaaaatatattgaaaaacaatttcaagagagaactgtaatctgaaaaataatcaaactgatatcctagaaatgaataatacaatgactcaataattcactagctgtgttgaactgcagattacacatagcagacaagaggcttagtaaactggaaggcaggtcaatacacagtattcactt

SEQ ID NO: 674233 - DNA, 1091 bp, Homo sapiens
aaagaaaaagctgacagagctgagtgaatagtaagttataactcagaagcaacattcagagaaggctacaccttgtgaaggatgtcttcagagttcacaaaaagaacattgtgggggtgaaagttttagcttagaaggcaaaagatttcaaaaatatacagaatcaaaatgatgttaaaaataaacatggaggcattccactactgtttatgaaagaatagttcatgagcaaactgacctactgagaacaactataaaagctataaatggacaagaaacagctctttggaggcacgcgtggacacccacatccacacccacccagccccccaagacaaagcagcacaacttcaggaaacaaattgggagacaacaggaataatacattgagatgaaccccatatttgctactgttttctttccctgtatcaatatattttagattagtaatggggcatagaggccaagaaaaagggataccctcaaaatttgtgacaagctcactaggctgccaaaaggaatgatgttgggaaatgtctcagactttgaattgataatcttgaaggactacactctaggagtaagggcaagcttaatacagacaagtcctcaaaacactagaagcagaacctagaatcaatgaaacctctgtttagatccaggttatatgcctgtactttatatgaccaccagaaaaagtatcctctttaaagaaatatagcatcacctagaatttctattatttttatatacaatgtacagcattcaatctaaaattaagagacagcccaggatatagggccaagtgactgaaagccaagagagaaaacaaaattataatggacccacacrtgattaaaatagtagcactatcaggtacaagctaagaaacaatttgatttgcacattcaaaaatatattgaaaaacaatttcaagagagaactgtaatctgaaaaataatcaaactgatatcctagaaatgaataatacaatgactcaataattcactagctgtgttgaactgcagattacacatagcagacaagaggcttagtaaactggaaggcaggtcaatacacagtattcactt

SEQ ID NO: 674234 - DNA, 361 bp, Homo sapiens
taagcacagggtttggataaagagacgcaattaggaaaggaaaaagcagaaggctcgttccagacctggatgagatcctaaaaagcagcagcttttgccagtaaagayccttgaaatgattcaattaccctcaaagcactccttgtctccaagacaatcactcataagcacaattccattgaagccaacgtaccattttgtgattttcgtttccacctgaggctgttcattcaataaactcacataaaagtgtttattgccttgatttccaaattcaggcgtatttcctggtaagtagagctacttgccttgcctttatgagattaccacctaactagatgtatgcccagtaaaatccaac

SEQ ID NO: 674235 - DNA, 636 bp, Homo sapiens
gatcacccagtagataaagggaaaagctctttcagaaaaaaaaagtaaatttaattggcatataatcagaatatgtatgagcattttggagttcttgttttcttgttaactaaggtagaattttacaggtttgtagaccaaggcttcatctccatgaatgtggccccatgattaagatggcttggggtcagacagactcagtcctgctgtttgttagttgtgtaacatcagacatgctcaaagcctcaacttactcattttggggaaataataataattattaagactggtgagggccagctcggtggctcacgcctgtaatcccagcactttgggaggccgaggcgggtggatcacgaggtcaggagatcgagaccatcctggctaacaccgtgaaaccccgtctctactacaaatacaaaaaattagccgggcgtggtggygggcgccggtagtcccagctactcgggaggctgaggcgggagaatggcgggaacccgggaggcggagcttgcagtgagccgagatcgcgcccctgcacttcagccccgggggacagagcgagactccatctcagaaaacaaacaaacaaacaaacaaaaaaactggtgagggttataataaatatatgtgaat

SEQ ID NO: 674236 - DNA, 2260 bp, Homo sapiens
tgatcaattaaaaaaaaaaagatcgaaaaaaaaaaaaaaaaaagaaagctgggaacaaatacagtccctaccctagtagtgcttacattcttgtagaggaagatgagcaatgcacaaatagacaagttcaaatatgccagatggggatacgtgttgtggagacagaggtaggaggttagggagtgtggggctgctgtttcatagtgaggtcttgaaaaggcctcattgataaagtgacattcaaaagagacttgtagggctgggggaagggatctgtgtggttattgtgggacagagcttttcaggcatttggttggtgtgtttgaaaaaacccagaggctagtgaggactgagcagagtggatgaacaagcagaggttggggcgttgtggtcatttagggcccaagtcaccgagagctctttagtaagagtccatgcataggtccaaggttgttgtgtctcccttcactggttcttactctgcactagaccctgtgctgggtactggggagatgcaaagaagctccagtttctgccctcaaggaacctgtgtccctcctaatgtcaatccaaatggtggctggggtttgtgaggatgcagttaagactcaggaacatggaacccaggcctgatctgagctttggcactagcttgggcaagccatttgaacttacaaagcgttagtattttcatctgcaaaatgtgagatgtagaaatatcagaaggggcttttctaactgaagaaaaaaaaaaaacaagaaaaagccctatgattttataaaatcaaagcatagaactttatcttaatacaaaaacttttgttaaaattgtgtcagaaaagtacttcagacataatatacataatgcatatacagggtcacttaaaatttaattcacaatttgctaagttcaaaaaaagtcttggttcagccaacacaacgagctttgtaaacaggtggtacttaggaaaaaccacatattttaatttagcatatggtgtagattatatgaaattactttaaccattgtgtttcctttatgatctagaccttgaaacttttctttggccaaagatcttcaaaactaaatacagtgttaaagcagagttacagagcagcctggattagggggatagatattttcctttcctgactatggtttaaaactttctgttgtacattttattgggcaacgacttttccccagtgcccagtacagagctggacatatagaagtcatcaatatatattgtggtggaggggataagtggcaagtcatctctaatacatagtattagtatgcaagtacatagagcataaaatattaaaagaccatgtagttaatgttctgacattcttctctccaccagcgacacaaggagagaaatatatctaattagaaagcttgagttcaataaacaaatatttattgagcaccaactgwgtatcaggaacatcagtgaacaaaacggacccaaaccctgccctcatggaacttacgtttcagtggtgggggacggatcataaataatcaccgtgacaaaattaatgcactagaaggtggtaaatgccatggggacaaaggaagcagggaaggagaagaggaagtgtgggatggattgtgactgagtccaaacttgttcttcttgccacatcacgtcaataagtcaagagacaaggaggtggaggaaggaaagcgactttattttggggagccaggaaaccaagaagaagcagaccaatgtcctaaagaaccatcttagaattatgcgagctttgccttgtcttttatatttaagtgacagggaaccgcagacatctgggcaccaacaagggtccaggggaagtctgtgaaacttctttgtccttgggtaacgttctctcatgtaacgatagccaaacctccttgttcctgtaaatctttaacaaaacatagttgtttatatacttcttctttaatcctagggttagtttccaagactacatgattgcagtttttgcattgtatcttagtgctctaaaattatcctaaccgatgtgcaggaatgggtatccccttaaataaaaaatggagttagttatgttagttcttttactgtttcgctgttgcagtatggaaatagagcagagaagagcccctccaggtgtgagcagaaccttgaaggagacagggagcagccatgtggctctcagaggaacagcatttccaggaggaattgtgattgtatttctgggaacacatcttggcagggtaagtaat

SEQ ID NO: 674237 - DNA, 519 bp, Homo sapiens
gaattcccgagcttctcgcttcctacgcgcgcagcagacmcgcagctcggtggccttggctttcatggcctcccagcgtgtgccaaaggtccccctcaaggaggaggaaaagcagtgaacccatctaataactatgctcatgacataatgagccctgcgatcccggaccaaggccatcataagaggagagcaggctgcctaataagctgtctccacctgccacaaacgtaggcgttcctggacaaaatatttccttgcagagattaaacagatttctatttaatgaggtcagaatgtgaggcgttaagtcttaaactataccatctagtgtggaattcaattttaccaggtttctacaataataagagttaatagtgaaactgttgtcatccttagttttaaattatgtatcactcattgtcaactaataggagacacctattctaatatcagtatgtcattgtttttctgtaaacgactggctaaatttatttttaaaatgtcattgtctggtttaga

SEQ ID NO: 674238 - DNA, 568 bp, Homo sapiens
gtctcaaaataaataaataaataaagatttcaattttaaaaaattgaacatttcataagttaacattgtttttacttgttcagttaataggacttcaggcacaattttaaaatttgaagtgcttctctgacataccacaggtataaatagaatatgtatttatataaaaatatygcctaccagttattaaaagtgataacatctcagattaactagcatgagaatttgattaagagtcaagtgctgactctaaacatagtaatttatgtattccagttgggtagtatcagttctatagtctaataagagccaagaggtttcagtttaggtttgtaatttaaattctttctagagcgtcatcacatgcgaagtgcttatttttcttttatcaccagctataatatatgattatgtggtggaggctctgttatgtaaacttgttttatgtcatgcttcatccacaaccaaagttcttaaataaagtctttggaaggacatagtaaggctcttagccagggcaatataatgctactaaatcctttatggcaaaactcctgagactagatca

SEQ ID NO: 674239 - DNA, 568 bp, Homo sapiens
gtctcaaaataaataaataaataaagatttcaattttaaaaaattgaacatttcataagttaacattgtttttacttgttcagttaataggacttcaggcacaattttaaaatttgaagtgcttctctgacataccacaggtataaatagaatatgtatttatataaaaatatcgcctaccagttattaaaagtgataacatctcagattaastagcatgagaatttgattaagagtcaagtgctgactctaaacatagtaatttatgtattccagttgggtagtatcagttctatagtctaataagagccaagaggtttcagtttaggtttgtaatttaaattctttctagagcgtcatcacatgcgaagtgcttatttttcttttatcaccagctataatatatgattatgtggtggaggctctgttatgtaaacttgttttatgtcatgcttcatccacaaccaaagttcttaaataaagtctttggaaggacatagtaaggctcttagccagggcaatataatgctactaaatcctttatggcaaaactcctgagactagatca

SEQ ID NO: 674240 - DNA, 568 bp, Homo sapiens
gtctcaaaataaataaataaataaagatttcaattttaaaaaattgaacatttcataagttaacattgtttttacttgttcagttaataggacttcaggcacaattttaaaatttgaagtgcttctctgacataccacaggtataaatagaatatgtatttatataaaaatatcgcctaccagttattaaaagtgataacatctcagattaactagcatgagaatttgattaagagtcaagtgctgactctaaacatagtaatttatgtattccagttgggtartatcagttctatagtctaataagagccaagaggtttcagtttaggtttgtaatttaaattctttctagagcgtcatcacatgcgaagtgcttatttttcttttatcaccagctataatatatgattatgtggtggaggctctgttatgtaaacttgttttatgtcatgcttcatccacaaccaaagttcttaaataaagtctttggaaggacatagtaaggctcttagccagggcaatataatgctactaaatcctttatggcaaaactcctgagactagatca

SEQ ID NO: 674241 - DNA, 568 bp, Homo sapiens
gtctcaaaataaataaataaataaagatttcaattttaaaaaattgaacatttcataagttaacattgtttttacttgttcagttaataggacttcaggcacaattttaaaatttgaagtgcttctctgacataccacaggtataaatagaatatgtatttatataaaaatatcgcctaccagttattaaaagtgataacatctcagattaactagcatgagaatttgattaagagtcaagtgctgactctaaacatagtaatttatgtattccagttgggtagtatcagttctatagtctaataagagccaagaggtttcagtttaggtttgtaatttaaattctttctagagcgtcatcacatgcgaagtgcttatttttcttttatcaccagctataatatatgattatgtggtggaggctctgttatgtaaacttgttttatgtcatgcttcatccacaaccaaagttcttaaataaagtctttggaaggacatagtaaggctcttagccagggcaatatwatgctactaaatcctttatggcaaaactcctgagactagatca

SEQ ID NO: 674242 - DNA, 607 bp, Homo sapiens
atgctgattctattctgggaaccctcattagaagataactgcttcatcttcacaatgtcaaacttgcttccaatggataaattatcatgatacaaaaatagactgcagataaagcctttaattctacttgggcaaatccaagaataacgtaagagtgttacttaaacttacatttagaaaagtcaaagattttaagggaaaatatataattactttgaaaacatagrctatttttctagatttatttatttatttattttacctgtcacttacttaacaaatacttatttacactggtcaggcatgtgaaagagttttccagattctagaagcagactctccaaatcatgctaaaggctcacactgagctctcaatcaaaccatgatatattttcatgatccggtaagaggtgtcatccataatttcctttgttcccattttgtttataaggctagcccaaatcttaccgtgtctcaatcagtctgaaactccaagttcacatgtattatcagtcagctagattatctctcaaaggcaaatgaaaaaaaaaaatagtcctgtttcccagagatttttttctttttttgagacagggtctcactctgt

SEQ ID NO: 674243 - DNA, 615 bp, Homo sapiens
atgccagtggatctccaattttagtatgcatccaaaatgcctggaagatgctggctcccaccctgagtttctgactctgtagaccttgggaggggctgaaaatatgccttcgtracaagttcttaggttatgctgattattctggcctggggaccccactttaagaaccattattttattttatttttgtttttgtttttgtttttgagatggagtctcgctctattgtccaggctggagtgcagtggtgcaatctcagctcactgcaacctctgcctcctgggttcaagcgattcttgtgcctcagcctcccaaatagctgggattacaggtgcctgccaccatacctggctaatttttgtatttttagtagagacagggtttcgccatgttgcccaggctggtctcagattcctgacatcaggtgatccacccgcttcagcctccctaagtgctaggattacaggtgtgagccaccacgtccggttgagaaccatgaaacattcagaaagatgctctgcataggcttgcctgaatgctggaaagtttctgtgactaatagacacagagagaggatccctcacagatgttccggtcctaagtgcttaggtcata

SEQ ID NO: 674244 - DNA, 615 bp, Homo sapiens
atgccagtggatctccaattttagtatgcatccaaaatgcctggaagatgctggctcccaccctgagtttctgactctgtagaccttgggaggggctgaaaatatgccttcgtaacaagttcttaggttatgctgattattctggcctggggaccccactttaagaaccattattttattttatttttgtttttgtttttgtttttgagatggagtctcgctctattgtccaggctggagtgcagtggtgcaatctcagctcactgcaacctctgcctccygggttcaagcgattcttgtgcctcagcctcccaaatagctgggattacaggtgcctgccaccatacctggctaatttttgtatttttagtagagacagggtttcgccatgttgcccaggctggtctcagattcctgacatcaggtgatccacccgcttcagcctccctaagtgctaggattacaggtgtgagccaccacgtccggttgagaaccatgaaacattcagaaagatgctctgcataggcttgcctgaatgctggaaagtttctgtgactaatagacacagagagaggatccctcacagatgttccggtcctaagtgcttaggtcata

SEQ ID NO: 674245 - DNA, 1228 bp, Homo sapiens
actgaactcccaaatatttaacaggtagagctaagagagtgaataatatattaaacctgaacctaatgtagctaaaattctttttagaatctggcaggttataaagtaattaacacattactgagatactaatcagtatctaagggaaatgaaattgtttctatcacacgatttctctgaattgaaatagattttcgaagtgatttatggattttttttctgaagaatattctagctacattttcaaaactgctggaaattctccctgaggattagtataaaagtacatgtgaatctatgctcttcttttatttaattgaatatatatgtttatatatatatttgtattatatatatgtattttatatatatatatatatatakagagagagagagagagagagacaagctctcgctgtgtcagccaggctggagtgcagtggcgcaatcacagctcactgcagctttgaccacctgggctcaagcagtcctctcacctcagcctcccaagaaactgggactgctggtgtgcaccaccatgctcagctactttaaaaaaatgttttgtagagatatgggtctcactgtgttgcccaggctggccttgaattcctgggctcaagcaatcctcctgctatggcctcctaaagtgctgagatcacaggcgtgtgtgactgcacctggctaagctgtgttctttttattctttaccaacatgagaactcaagagtagacagacactcagacttcccccaaagtcaaccttgcacataggtgaattttacagctacaagattacaggactatcagcagttctattttttttttcccccatttggtcatttataagccagtagtgacaccatccttttccctgtaaatctcctgaaagaaatcccaaatattagactattgctttgggttacacactaaacaggtaaatgatctcctggaccactagaacccactactaaaatatatatttggtaccataatctctctggtctgtttcctcatctataaaatgggaataatagtagtatccacctaatagaatttttaaaagtacttatttatagtatgaaatagagacagggtctccttgtgttgcccaggctggtctcgaactcctgggctcaagcaatctttctaccttggcctctcaaagtgctgggatttcaggtgtaatcaccatgcccagcctacagctgtcatgaagagtaaatat

SEQ ID NO: 674246 - DNA, 2010 bp, Homo sapiens
  misc_feature 1143, 1144, 1145, 1146, 1147, 1148, 1149, 1150, 1151, 1152,1153, 1154, 1155, 1156, 1157, 1158, 1159, 1160, 1161, 1162,1163, 1164, 1165, 1166, 1167, 1168, 1169, 1170, 1171, 1172,1173, 1174, 1175, 1176, 1177, 1178, 1179, 1180, 1181: n = A,T,C or G
  misc_feature 1182, 1183, 1184, 1185, 1186, 1187, 1188, 1189, 1190, 1191,1192, 1193, 1194, 1195, 1196, 1197, 1198, 1199, 1200, 1201,1202, 1203, 1204, 1205, 1206, 1207, 1208, 1209, 1210, 1211,1212, 1213, 1214, 1215, 1216, 1217, 1218, 1219, 1220: n = A,T,C or G
  misc_feature 1221, 1222, 1223, 1224, 1225, 1226, 1227, 1228, 1229, 1230,1231, 1232, 1233, 1234, 1235, 1236, 1237, 1238, 1239, 1240,1241, 1242, 1565: n = A,T,C or G
tcaccatgcccaactatttttttaaattttttttgtagagataagggtctccctatgtttttcaggctggcctcaaactcttgggctcaagcagtcatcctgcctcagcctcccaaagtgttgggattacaggcctgagccaccacttctggcagaatgttaacattttaaacaagaaatagcatataccctaaggtacatgctttcaaaggttgatatattcataagtgagcttgttttcctactgagttgtatttttcttccttgaattccattttgaattgtaaatcaaaagtaaaattctaagccctcctaaccatctgaatggactctcctctcagccaagggtgttccatagtaaacctgaaaaaactagttcaggccatgatgggaagcaggagccagacatgcctcattataccctcctcctttttggaattactgatagaacagactctttaaatctgataagaaacatttgcaatctattctctctgaaggctgctacctagagacttcagccgcttgataaaaccttggtctcaacaaccccttttcgtagctcatacattcctttctattgacagtaattctttcaaccaattgacaaccagaaaactttaaaatctacctatgacctggagccccctccccactttgagttgtcctgcctttctggactgaaccaatgtacatcttacatgtattgattgatgtctcacgtctccctaaaatgtttaaaaccaagctgtatttgaccaacttgggcagataccacctaaggccgtgtcataggcatgtccttaaccttggtaaaataaaatttctaaattgatggagatctgtctcagatacttttgggttcacagaatgatactgagaaaataagaacggatctacgttttatcaataaaattttaaacttatattaattcataaaataagatatggtatatctgtctttgtttatagtgcttgttttttcttttaagtttttaatctgtgttttgaaggaaaatgcatgtgtctgttgcaggtttcttatgaagcattgctggcaaggggacatctggctcttgtaaaatgaaatgaaaggcaacattttccaacaattgttaagtatcaagtactttggagtagctnnnnnnnnnnnnnnnnnnnnnnnnnnnnnnnnnnnnnnnnnnnnnnnnnnnnnnnnnnnnnnnnnnnnnnnnnnnnnnnnnnnnnnnnnnnnnnnnnnnntgggaaaaaaaatcccttaccctgggggcccccttttggtttcccataagccaaaaaaaaatatttcttggttcaaaatcctttttaagcccggttattttgtcccgggcaaggggtccccccctttttttagggaatttttttttttaaacccttgggggtgggggccgggactccaccccaaaaaccccccccttttggggggttaggccgggggatccctttgggtccggggtttttaaacccccctttccccaagggtgaaccccttttttttttaaaaaaaaaaaaaaaaaaaaaaaaaaaaaaaaaaaaaaaaaaanaatccgggcatggtggcacacgtctgtaatcccagctacttggtaggctgaggcaggataatcgcttgaacccagaaagtggaggctgctgcagtaagccaagatcatgccattgcactctagcctgggcaacaagagcaaaactctgcctcaaaaaaagaaaaagaaaaaagaraacatttgggtttctagtttttcagtgttataagccatatgatgcaaacagtcagtttggtgtatatttctatagaatatatttttcatctctatatataggtccccaggtaatgtttaatccttctcttaggttatatttgatagctcagagttcgtcagtttacagacttaggttgtatcatttttctttaattgcattatttaacatttgtccttaattaaagctcctgtgccacttttctgcccacaaatgtgtcctcgaattttt

SEQ ID NO: 674247 - DNA, 604 bp, Homo sapiens
aataagacttgatttcccctttatcttcccttctgaaggccaaatgcctcttgcccctttcagaaattgaggagtcatttctgtgtatgctgcacatgtgacactgtgtktgtgcgtgtgtggtgtatgtgggtatgtgtctgtgggggaagggtatgtgttcatgtaacaagttggataaagcattggtatttcttatatagttggaaattcctattttatgccatgagcttgtcatatgagcaggcctcaaactaaaaggtcaaatagacaagttcctcttcagttgttttgcttctgggaaacccagctccatcccttgggtctgagaggaactgaaaaagcaaagtcccacaaagctgtgagtgtttcaatattatccctattggagctgtggcattaaagaagatgtatcagaaggtatgacgtcatactaactgctaacactgcggattttgaccatcagctagaataagtcatatttacaagtttcacatcagtcatttactcaataagcatttagtgattataaaactgcttttgcaaaattatgacaatgtgtagggaaacactctccccaaactgtttttcctctactttcaca

SEQ ID NO: 674248 - DNA, 604 bp, Homo sapiens
aataagacttgatttcccctttatcttcccttctgaaggccaaatgcctcttgcccctttcagaaattgaggagtcatttctgtgtatgctgcacatgtgacactgtgtgtgtgcgtgtgtggtgtatgtgggtatgtgtctgtgggggaagggtatgtgttcatgtaacaagttggataaagcattggtatttcttatatagttggaaattcmtattttatgccatgagcttgtcatatgagcaggcctcaaactaaaaggtcaaatagacaagttcctcttcagttgttttgcttctgggaaacccagctccatcccttgggtctgagaggaactgaaaaagcaaagtcccacaaagctgtgagtgtttcaatattatccctattggagctgtggcattaaagaagatgtatcagaaggtatgacgtcatactaactgctaacactgcggattttgaccatcagctagaataagtcatatttacaagtttcacatcagtcatttactcaataagcatttagtgattataaaactgcttttgcaaaattatgacaatgtgtagggaaacactctccccaaactgtttttcctctactttcaca

SEQ ID NO: 674249 - DNA, 619 bp, Homo sapiens
agaacgaattcatctcacaaggattttcttttgagacggagtctcactctgtcacccaggctggagtgcatggcctgatctcagctcactgcaacctccacctcccgggttcaagcgattctcctgcctcagcctcccaagtagctgggattacaggcatctgccaccatgcccagctaatttttatatttttcatagagatggggtttcaccatgttggccagggtggtctcaaactcccaacttcaagtgatctgcctgccttggcctcccaaagtgctgttatataggcgtgagctaccgcgcctggccttacaaggatattaattgccctggttttattttcgttctcccatgtccgtatcaactcaatgtactttcctaatactatgatcttgaggtaaaacccaagtttttgaataggaaaacaataattgtactaaaaacttcaggaaacaaactcttgttttatgccttcttgcaayctttattaaaagaggctcagaaaaatagatagagcacatgtaaacttccttcgttctaatgctgtaagacctctacatttctagatggtctatacagatacgtgaaatatttatagttaaaatacaaaacactt

SEQ ID NO: 674250 - DNA, 1323 bp, Homo sapiens
atttttctattttaattgaaggcacctattagcatatgacattgaggtcatctttaatccaggtgatgaccactatagaactcctggctccctaaactcagtgactacagccttgatgctaccggtggcaattgcttgattcatagaatcatattaggagtcaatatcaaatgatcaattcttctttcgtgggaatggtggacttctaaggagatgtaagcattatcatatccattagctctatacacattggcattgtagatgatattctgcatctagtagtctaagaagtaacaagatgtgtgcactttatacatgtttcccagaattcatccaaataaattttgtgaaatagatgaattttcagagttatttttgtacaaggatcagcaaacgtttctcatcaycttctgatttctgttgtcctcctccattctctctccctggtattgttccccttacaatgtaagtttctctctggggtgatttcaatagctgtcagccttttcttacgcacaaccaatcatgtttccaattatgccctctccaacttattgaaataaaaaggaaataaaattagacaagaaagcatctgtattataatacaaataccacattacaagcttcaaaagtcaggaatgatttttataaaaatacaatttgcttcaacttgaaagagtatttgtgagtgatatgtaactcaaccaataattactcaattaaggaataaataagtaggtgtaaacccactttactgaagtatgttgcactctactgtttgagaaagccttgagagcacatctcagacattttgtctttgaagagtgaggtctgaaggtacaggcggtttcctaaaaacaggaaaaaaagaaaaaaagatggcgatgtcccagctgaagtccatttccctaaacagaagctattattggtgccttacccctaatttcacttccaacaaaggatatgaaatatccaaaggaaaatgtgggtgatgggagaatgagaaaacactctgctaagagttatttttgaagcttcaaacagaaggccacagtcaggagcaaactcatacaataattcaccaagtactccaaccttgcattgcataagaaaggctggacctctgagaatctggaataaacagatacttgactggaattccgcttggagcctgcaatagaagagagcattgaggctgactgtggcatttcctgcagactcatggatgagattaaagtgattttaataagctcccagaaagtaggtcctggtaaaagcaaatgtaaattctgtctggaaaaaaatgtcccaaatgcagcccct

SEQ ID NO: 674251 - DNA, 1665 bp, Homo sapiens
gctctgatgtaaggatgaaggtggcagatcaggaagacagatccactattactaccattgccattgagtgtcaggacggagggagctggagaggggacaatgccatgtcacaggtgatccttgcattcctgggaccctactagcctgcagcaataaccaggtccccacctcaattctacatttcaaatctcatgcaaaaacatctaggaccctagttttaatagagtctttaaaatatagtcatttcctattttaaggttcctacccagaaaatagcttgaatgtgaaatgagtgagtcaacccagcgtacgcagcggagggaggctgaggaatgggttaagcacaggagaaggcagaactagtgtgcagaacagaacacagactgaagaagagctcagaatgcttattgatttgaggagatgggaaatataaacagatttaaggatgttgagaggagaatatgagtatctaagtttatatctatttgcatgctagaagcagggagaacagaaaatgtgtattatttaaagttataatttctgataattgttaaatcctgtgagaaacatgaatcacaaatataagaaacacaggcatgcaaagcaggataaataaaaagaaattcaacccyggacacattgtcttgaaatagctgaataccaaaaacataatgacaaccttacaagcagccagagagaaaagtcgtaccatttattaaaggatgataattagacaagagtaatgtcccaaaaacaaaaacaaaaaaaatcatgaaacaatattgtcaaagaactaagataaaataactaccagtgaagaattgggtattcacaaaactcagtctcaagaataaacacgctttcaaatacacaaacaaaaatcagaatgtataaccttaatagagttatttatttcaggaaatagtagagtatttatttcagatttatttgtttatttcgattttataatagagcatttcttttggaaaaataaaacaactacagaaggaagatcttaaaacaataaggataaacaatccgaaaagtgtataaacatgagtaaatacaaacagacagtgcctgaagaaaataatcataataataatcataatattgtcaaatctgtggtttataaaataagtcaaaacaaaaactttgaaaacaatcatttgtaaatcataagagtaataaaatcctatcttgttaggaagagtgagtaagcaagataaattacccagtgtaaaaatccaatggcaacaattgaaagaatataaatgaagagtataaaataaagtccagtagaataaagtgagataaacaaaatttaaaaaaatagagtaaaagtaattagttcaaaagaaggaaagtaaaggtaggggacaatgaagcttaacaaaaagtggaagattataataaattaaaaattcctaaaataagtccaatattctaagtaatataaatagaccaaactatttatttaaaatacattaaaatgagatttttaaacgacagctatgttctttttgtaagagatctaacacagacatattgaaattaaaaatatggaaaaaggtggccaggcattggtggctcgtgcctataaccccagcactttgggaggccaaggtgggtggatcacctgaggtcaggagtttgagacgagcc

SEQ ID NO: 674252 - DNA, 604 bp, Homo sapiens
tgtcagcagaagtttccctaaataaaaaagtcagagcgtttagttatttgcagaattgccttcccttttgttttactctgcctcaggcaaatgttttaaataaacacaaatactcaagcatctccctataagtcagtccctctgataaatgaatatttaaataaatttctatgacaggctgaataagggcccccaatgatgtctatgtcctaatttctggaacctgagaatgtgtcagcatatatggttaaaaaaaaaaaaagaaaaaaaaaaagactttgcagacgtgactaagttaaggatcttgagagcagatataatcctgattgtcctagtgaccacagtgtaatcataagcgtccttcgaagacagaggcaggagggtcagcgtaagagtaagaggcctaagaatggragtaattcagagtgactcaaggacggagctacaatacagggagtctccagaaggtgaaaaagccgaggaaacagattcttcactaagagcctctagaacaaaccagccctgtaaacaccttgactttagcacactgatagggtttggctttgtgtccccacccaaatcttatctcaaactgtaaccccca

SEQ ID NO: 674253 - DNA, 604 bp, Homo sapiens
tgtcagcagaagtttccctaaataaaaaagtcagagcgtttagttatttgcagaattgccttcccttttgttttactctgcctcaggcaaatgttttaaataaacacaaatactcaagcatctccctataagtcagtccctctgataaatgaatatttaaataaatttctatgacaggctgaataagggcccccaatgatgtctatgtcctaatttctggaacctgagaatgtgtcagcatatatggttaaaaaaaaaaaaagaaaaaaaaaaagactttgcagacgtgactaagttaaggatcttgagagcagatataatcctgattgtcctagtgaccacagtgtaatcataagcgtccttcgaagacagaggcaggagggtcagcgtaagagtaagaggcctaagaatgggagtaattyagagtgactcaaggacggagctacaatacagggagtctccagaaggtgaaaaagccgaggaaacagattcttcactaagagcctctagaacaaaccagccctgtaaacaccttgactttagcacactgatagggtttggctttgtgtccccacccaaatcttatctcaaactgtaaccccca

SEQ ID NO: 674254 - DNA, 1938 bp, Homo sapiens
tcaatgtgtgtgtgtatgtgcgtgtctctgtgtgtgtaactctggttacattgtggagggtagaaacctatatactttctaactttttaagctttgtttttatttttgctacaaatagatgccttaaaaayccggaactctcttagtcactgtcctatactcagtccccagcatgatgtctttttcattgtaactttagtgcagatgcattagttgtgttcaaagagaaactttagacaaatttaacttaaaagtttatttgagcaattcatgagtcaagcagcactcaaatcagaagaggttcagagaggtctcctagtggacagtgaatatttatagacagagcactgaaataatgtacagaaatagctttattggttgcagctaagtgtttgtcctatttggacatggcctaatcatttggaagcctgtgattggctgaagttcgactgcttatgattgagtgagaactggctgtctgtaatttaaaaatatgcccctagttaggttcagtttgtctatgtactaagtaagactgtagtttattatgtaagaactcgaagtatggagacagtcttaggccaatggcctcctgcttatttaatttaacaggtgaggtaatgaataaaataattggatggatgaagacaattaagagacaagacaattacaattatacttatgtcagaaaaacttaggtctctggtccttgggagtgaatacaattaaaaacattgagaatgaatatgagaaataaaatgaataaatatttcagaggtaaaattagcagaaatgggtgaccaactggttactttttacccattattttatatgttcagggctgacatttagttttctagtctgggtaaaattaagatagctttatctcctttctctttgtttctcctgataatattcttaatccttatccaatactaacttgaataatggtgatgctactgatataaaatgaatacaaaaagaagtatattttcagtggaagaaaataatatatcttggtaggaatatattgaattgaataaccagcaacatatctggttggagtttcccctccaggtgttgaaaagaaataaagggcacctttaaattgaggatcaatcttcatgggataattaattgaagttgcaggaatagagtattgaggagagaaagagtattgaggaagagtgggtacagatctcgttcatttattcatgcagttataaactttgtaatggaatataactgacactgaatatctaacactgaataagtagctggatattcaaaggttattaatcccagtccttaccctcacatgtattatgataaacatacttaatagaatataaaataacctattatagtcatatttcaagtgtattctttatctaatgaaatagtctgctttgcaaattcaagaaatctttctatagaaatttgttggcaacctttttttttaaagaacaaagtagtaaatatttttcatttgtagaccgtatagtttgtcacaactacttgactgtcagtgtagcatcaaagcagccagaaacaatagttaaaaaaaaagaatgattgtgttccaataagacactatttacaaaaacaagacaatgagatggattttgccagcaagtcttagttcgccagcccctaatgcagaaattgatgactgggctgcatctggaagaatgactaagagtttcccaagcatgaagtgttaagttcagatataatactctttttttgtctcctgttatagtaatttccatgtaagaagagttattatttatttactgatctactgtcaatgaaaagaaaaatgtatttcccataatagatactcaataaatatttgttaaataattattttaccattcaggttggtctttgtaccaggcagataatagtatttgcagaagattccaactatcttac

SEQ ID NO: 674255 - DNA, 1938 bp, Homo sapiens
tcaatgtgtgtgtgtatgtgcgtgtctctgtgtgtgtaactctggttacattgtggagggtagaaacctatatactttctaactttttaagctttgtttttatttttgctacaaatagatgccttaaaaatcyggaactctcttagtcactgtcctatactcagtccccagcatgatgtctttttcattgtaactttagtgcagatgcattagttgtgttcaaagagaaactttagacaaatttaacttaaaagtttatttgagcaattcatgagtcaagcagcactcaaatcagaagaggttcagagaggtctcctagtggacagtgaatatttatagacagagcactgaaataatgtacagaaatagctttattggttgcagctaagtgtttgtcctatttggacatggcctaatcatttggaagcctgtgattggctgaagttcgactgcttatgattgagtgagaactggctgtctgtaatttaaaaatatgcccctagttaggttcagtttgtctatgtactaagtaagactgtagtttattatgtaagaactcgaagtatggagacagtcttaggccaatggcctcctgcttatttaatttaacaggtgaggtaatgaataaaataattggatggatgaagacaattaagagacaagacaattacaattatacttatgtcagaaaaacttaggtctctggtccttgggagtgaatacaattaaaaacattgagaatgaatatgagaaataaaatgaataaatatttcagaggtaaaattagcagaaatgggtgaccaactggttactttttacccattattttatatgttcagggctgacatttagttttctagtctgggtaaaattaagatagctttatctcctttctctttgtttctcctgataatattcttaatccttatccaatactaacttgaataatggtgatgctactgatataaaatgaatacaaaaagaagtatattttcagtggaagaaaataatatatcttggtaggaatatattgaattgaataaccagcaacatatctggttggagtttcccctccaggtgttgaaaagaaataaagggcacctttaaattgaggatcaatcttcatgggataattaattgaagttgcaggaatagagtattgaggagagaaagagtattgaggaagagtgggtacagatctcgttcatttattcatgcagttataaactttgtaatggaatataactgacactgaatatctaacactgaataagtagctggatattcaaaggttattaatcccagtccttaccctcacatgtattatgataaacatacttaatagaatataaaataacctattatagtcatatttcaagtgtattctttatctaatgaaatagtctgctttgcaaattcaagaaatctttctatagaaatttgttggcaacctttttttttaaagaacaaagtagtaaatatttttcatttgtagaccgtatagtttgtcacaactacttgactgtcagtgtagcatcaaagcagccagaaacaatagttaaaaaaaaagaatgattgtgttccaataagacactatttacaaaaacaagacaatgagatggattttgccagcaagtcttagttcgccagcccctaatgcagaaattgatgactgggctgcatctggaagaatgactaagagtttcccaagcatgaagtgttaagttcagatataatactctttttttgtctcctgttatagtaatttccatgtaagaagagttattatttatttactgatctactgtcaatgaaaagaaaaatgtatttcccataatagatactcaataaatatttgttaaataattattttaccattcaggttggtctttgtaccaggcagataatagtatttgcagaagattccaactatcttac

SEQ ID NO: 674256 - DNA, 1938 bp, Homo sapiens
tcaatgtgtgtgtgtatgtgcgtgtctctgtgtgtgtaactctggttacattgtggagggtagaaacctatatactttctaactttttaagctttgtttttatttttgctacaaatagatgccttaaaaatccggaactctyttagtcactgtcctatactcagtccccagcatgatgtctttttcattgtaactttagtgcagatgcattagttgtgttcaaagagaaactttagacaaatttaacttaaaagtttatttgagcaattcatgagtcaagcagcactcaaatcagaagaggttcagagaggtctcctagtggacagtgaatatttatagacagagcactgaaataatgtacagaaatagctttattggttgcagctaagtgtttgtcctatttggacatggcctaatcatttggaagcctgtgattggctgaagttcgactgcttatgattgagtgagaactggctgtctgtaatttaaaaatatgcccctagttaggttcagtttgtctatgtactaagtaagactgtagtttattatgtaagaactcgaagtatggagacagtcttaggccaatggcctcctgcttatttaatttaacaggtgaggtaatgaataaaataattggatggatgaagacaattaagagacaagacaattacaattatacttatgtcagaaaaacttaggtctctggtccttgggagtgaatacaattaaaaacattgagaatgaatatgagaaataaaatgaataaatatttcagaggtaaaattagcagaaatgggtgaccaactggttactttttacccattattttatatgttcagggctgacatttagttttctagtctgggtaaaattaagatagctttatctcctttctctttgtttctcctgataatattcttaatccttatccaatactaacttgaataatggtgatgctactgatataaaatgaatacaaaaagaagtatattttcagtggaagaaaataatatatcttggtaggaatatattgaattgaataaccagcaacatatctggttggagtttcccctccaggtgttgaaaagaaataaagggcacctttaaattgaggatcaatcttcatgggataattaattgaagttgcaggaatagagtattgaggagagaaagagtattgaggaagagtgggtacagatctcgttcatttattcatgcagttataaactttgtaatggaatataactgacactgaatatctaacactgaataagtagctggatattcaaaggttattaatcccagtccttaccctcacatgtattatgataaacatacttaatagaatataaaataacctattatagtcatatttcaagtgtattctttatctaatgaaatagtctgctttgcaaattcaagaaatctttctatagaaatttgttggcaacctttttttttaaagaacaaagtagtaaatatttttcatttgtagaccgtatagtttgtcacaactacttgactgtcagtgtagcatcaaagcagccagaaacaatagttaaaaaaaaagaatgattgtgttccaataagacactatttacaaaaacaagacaatgagatggattttgccagcaagtcttagttcgccagcccctaatgcagaaattgatgactgggctgcatctggaagaatgactaagagtttcccaagcatgaagtgttaagttcagatataatactctttttttgtctcctgttatagtaatttccatgtaagaagagttattatttatttactgatctactgtcaatgaaaagaaaaatgtatttcccataatagatactcaataaatatttgttaaataattattttaccattcaggttggtctttgtaccaggcagataatagtatttgcagaagattccaactatcttac

SEQ ID NO: 674257 - DNA, 1938 bp, Homo sapiens
tcaatgtgtgtgtgtatgtgcgtgtctctgtgtgtgtaactctggttacattgtggagggtagaaacctatatactttctaactttttaagctttgtttttatttttgctacaaatagatgccttaaaaatccggaactctcttagtcactgtcctatactcagtccccagcatgatgtctttttcattgtaactttagtgcagatgcattagttgtgttcaaagagaaactttagacaaatttaacttaaaagtttatttgagcaattcatgagtcaagcagcactcaaatcagaagaggttcagagaggtctcctagtggacagtgaatatttatagacagagcactgaaataatgtacagaaatagctttattggttgcagctaagtgtttgtcctatttggacatggcctaatcatttggaagcctgtgattggctgaagttcgactgcttatgattgagtgagaactggctgtctgtaatttaaaaatatgcccctagttaggttcagtttgtctatgtactaagtaagactgtagtttattatgtaagaactcgaagtatggagacagtcttaggccaatggcctcctgcttatttaatttaacaggtgaggtaatgaataaaataattggatggatgaagacaattaagagacaagacaattacaattatacttatgtcagaaaaacttaggtctctggtccttgggagtgaatacaattaaaaacattgagaatgaatatgagaaataaaatgaataaatatttcagaggtaaaattagcagaaatgggtgaccaactggttactttttacccattattttatatgttcagggctgacatttagttttctagtctgggtaaaattaagatagctttatctcctttctctttgtttctcctgataatattcttaatccttatccaatactaacttgaataatggtgatgctactgatataaaatgaatacaaaaagaagtatattttcagtggaagaaaataatatatcttggtaggaatatattgaattgaataaccagcaacatatctggttggagtttcccctccaggtgttgaaaagaaataaagggcacctttaaattgaggatcaatcttcatgggataattaattgaagttgcaggaatagagtattgaggagagaaagagtattgaggaagagtgggtacagatctcgttcatttattcatgcagttataaactttgtaatggaatataactgacactgaatatctaacactgaataagtagctggatattcaaaggttattaatcccagtccttaccctcacatgtattatgataaacatacttaatagaatataaaataacctattatagtcatatttcaagtgtattctttatctaatgaaatagtctgctttgcaaattcaagaaatctttctatagaaatttgttggcaacctttttttttaaagaacaaagtagtaartatttttcatttgtagaccgtatagtttgtcacaactacttgactgtcagtgtagcatcaaagcagccagaaacaatagttaaaaaaaaagaatgattgtgttccaataagacactatttacaaaaacaagacaatgagatggattttgccagcaagtcttagttcgccagcccctaatgcagaaattgatgactgggctgcatctggaagaatgactaagagtttcccaagcatgaagtgttaagttcagatataatactctttttttgtctcctgttatagtaatttccatgtaagaagagttattatttatttactgatctactgtcaatgaaaagaaaaatgtatttcccataatagatactcaataaatatttgttaaataattattttaccattcaggttggtctttgtaccaggcagataatagtatttgcagaagattccaactatcttac

SEQ ID NO: 674258 - DNA, 632 bp, Homo sapiens
gtagagataagcaggtaattaggaagtrtagaaggccttaactttatgaaggtcatcataaatgacaatgcagcctcagaggcgtggctggaaaatgggtgaaagaacctggaaggaactctggcccaaggcaggtaggtcatgacttcagtctgtaatcccagctactcagaggctgaggcaggagaatcgctggagcccaggaggtggaggttgtggtgagtcgagatcgcgccactgcactccagtctgggtgacagagtgagaccctgtctcaaaaaaataaaaataataaataaataaataaaggatgtgaagacaattggaagagccccgtgccctggaagccatctccacagagacaatgccacgaggactcttgcatgctcctttgggtagcaccctgcgctgaagtcaagctctggccaaaatctggtttgtgggtctgccttagacataggcctttggaaggatgggaattcaatgctcacttcagcctcacttctgacatccttagatttttgcataactacagtgatcacctaagttactaacatgcaaagtcagtatagcaatatcagtgatccaaacaagttattccattcagggttgttcttatttaaacattccct

SEQ ID NO: 674259 - DNA, 632 bp, Homo sapiens
gtagagataagcaggtaattaggaagtatagaaggccttaactttatgaaggtcatcataaatgacaatgcagcctcagaggcgtggctggaaaatgggtgaaagaacctggaaggaactctggcccaaggcaggtaggtcatgacttcagtctgtaatcccagctactcagaggctgaggcaggagaatcgctkgagcccaggaggtggaggttgtggtgagtcgagatcgcgccactgcactccagtctgggtgacagagtgagaccctgtctcaaaaaaataaaaataataaataaataaataaaggatgtgaagacaattggaagagccccgtgccctggaagccatctccacagagacaatgccacgaggactcttgcatgctcctttgggtagcaccctgcgctgaagtcaagctctggccaaaatctggtttgtgggtctgccttagacataggcctttggaaggatgggaattcaatgctcacttcagcctcacttctgacatccttagatttttgcataactacagtgatcacctaagttactaacatgcaaagtcagtatagcaatatcagtgatccaaacaagttattccattcagggttgttcttatttaaacattccct

SEQ ID NO: 674260 - DNA, 455 bp, Homo sapiens
tctcmaaacaatatctccacagtgtagcctgggagggaaaggaaagaccctaataaaactctaacctggggctactcaaagtgagcccccatgctcacctgccccttaccttttcagggctccctttttattagcacagttatgctccatctccctccttcccttcctctctgtctttctgtttccactcccgatctcagctggagcagttcctgaagttcttgctgagggtaagaggaagaagctccattgcgccttccaccatttagccagcactgccggaagcactcgattccctcctcactcccactcccttccgctctgcaggtgttgcctgtaccaggggcttgctttcccggcccaggcctttggccctctagtccagcttcttgttcagcatagttgatttctcctcatttgaatctgcagcaccaccctcttaattaagtgcatta

SEQ ID NO: 674261 - DNA, 641 bp, Homo sapiens
agaactatacaagataaagaactattatcctattttttagagaagaagtaattattgcagttcttttatagcagacttcagattaaaattttagttttattatttccaatctgagatatatatatatttttactacatcacactgttttcctggtgtaccaaagcactatctttttaaaaatacaaatgttcttggggatgtataacagtatattgcgtatttaaaagtggagtccaatgttcaataattttagaaacagcttaaccatgctttttaaatgcagggttttggagggcctttgacatgcttatacaaataagtatcttccagagtaggattatagtatgagtgcttcccagactcatagggaggggcacagaacacccctcccagttttactcatatataatcttatatcatcttcttgtagatctctttaggaaatggtacctgaattgttscatgaatttaatcacaccttccaataaaacaggggtctgtgaacaggtataagaaaggaaagtgaggaagaaacattatgcaacttagcattcgtcttggagacataagcataagagaaagttgggcaagcccaactcgagagagtgaagaaaaggcttttgaagaaaaacttgaccta

SEQ ID NO: 674262 - DNA, 1408 bp, Homo sapiens
gctgtcatgccccatgggtagaagtaaaattaataagcacaatatagaaactagttagtccatgggaagaagaaataatgaaactggggaccctgaacatgcccaactagtgcagggctgcagggcttggcacctgcctgcccctgctgtacatatacagccatcagcttccacagctaataagcaagcagagggaatgacaggctttacctaatgaaaatggcagctatcagtctgtgactcaaaaggtctggctccaattcctcttacagttgacgatttgatccttgtcgaattagtgggtcgtaacaaggaggctgcatgtgaaagctgccaagtgtttctttttaatcctctctgatttttatgttcatgcttttccacagaaaatttgaagaatgtgtgatctttactttctcttctgggaaaagagtgatattattaactgaatatcactaagaatagcaccaaattacaattagaaaatctccaaactatttaagtgagtcaatatttaattcaagaatgtagtgactttggccaatcctcacattcacctttacattttgttcatcatgtaaatgtaaactcctggtgtatacccgccgtttaagatttcactgtacttcatggggctagttttgacctgaaggtactcaaacaaatttgatctcagaaggttgcttttcatgatagagtcccttctaccacatggctcttagaaagcaagaatgaaaggagtcacttaagtgatcttatttacatgggacagcacaaagtgtttagcttacaaattttccatatgctctgatatgcaccaactgtactcaccatacctccaacccccacccctgccacagtgccagaaccttcccacttttcttacctctagttctcacaattggaaacattgtatatttttaaaagttttatatatataaatatatatatttatattatatatatatatatatgtacaggtttctcaagatgtttaatagaggtagatggaacaggaattttcatcttaggagatggagcaaggcaaatgagttcaaaaagatatttggaaatcctatccacgtgctatatccctctgcataactctgagtctggtcttctctccatcactaatattctctccataattctcttctatagtcatgtgacttaaaatgtggtcatagaaggctattaaagaaaarattgtcaaagatcacaggtgaaaacaactgagcttagaacaattatgcaagtttccccaagcccacaggtagcaaacaaggaagtaagaactatagctcaggacatttggatctcagcacagcgagtagcctttctatgcactataacaactttgtactcatcagaagcagataaaaaaatagagtattcttaaatcatattc

SEQ ID NO: 674263 - DNA, 1230 bp, Homo sapiens
tttctttctttyctttcttttttttttttttttttttttttttttttgagatggaatctatctctgtcacccaggctggagtgcagtggcacatttttggctcactgccacctccgtcttttgggttcaagagattctcgtgcctcagcctcctgagtagctggaattacaggcacccgccaccacgctcatctaatttttgtatttttagtagagacaggttttcactgtgtttgccactgttcttgaactcctgacctcgtgatccacccacctcggcctcggaaagtgctgggattacaagcgtgagccaccacgcccagccacaggtggctatttctacaaataaaaccagtggttgccaggacaattaatagaggtgttctgtaaaccacagggctaaacctctgtgccaggacctgagtcaagtgcaagatcagctgataacttgcagagttgcttcctctctgacctgcttctctgcacatctgtgaaatggaaggaaatgagcttatatcatgaggtggaataaaacactaactagaatgtacacctattgcaggactctgctgctcactgaatggagtcctcaagagaaagagaatgaatgtgccttctctgatcctccctaaagtagaaatgaagctttaaatctagtttcataaaaaaaattattgtggggtgcaggatatgaacatcaggaggagagagcagaattaagcacatcattaattcatggtgtccagtcatcatcactctgggcaaggctctttctcgttttgtttgctcttttttgttttatgtgagtcatccctgacttctacttgcccccaacctccccgcaatacgtgctcactgagtgttcttgggtgtgtgtatatagcaatacatttgaaattttatgatgttgcattatctctgtctattctctatatataaatggtagtaactataaagctcattctttctcttcctttttcactcagcattatgcttttagagttgtccagagcttgacgcacactgttccctatttacctacccattccccagcggtggacacagaggtagagcatcaagcctaatggttaaggcttcatccacaggaagcaggctgcctggcatgacaccctattcaccagctgtgcgaacttagcccatttgctacacctcccatgcctcagttttctcatttctaaagtggagatagtaagagtattgagaagatgt

SEQ ID NO: 674264 - DNA, 1230 bp, Homo sapiens
tttctttcttttytttcttttttttttttttttttttttttttttttgagatggaatctatctctgtcacccaggctggagtgcagtggcacatttttggctcactgccacctccgtcttttgggttcaagagattctcgtgcctcagcctcctgagtagctggaattacaggcacccgccaccacgctcatctaatttttgtatttttagtagagacaggttttcactgtgtttgccactgttcttgaactcctgacctcgtgatccacccacctcggcctcggaaagtgctgggattacaagcgtgagccaccacgcccagccacaggtggctatttctacaaataaaaccagtggttgccaggacaattaatagaggtgttctgtaaaccacagggctaaacctctgtgccaggacctgagtcaagtgcaagatcagctgataacttgcagagttgcttcctctctgacctgcttctctgcacatctgtgaaatggaaggaaatgagcttatatcatgaggtggaataaaacactaactagaatgtacacctattgcaggactctgctgctcactgaatggagtcctcaagagaaagagaatgaatgtgccttctctgatcctccctaaagtagaaatgaagctttaaatctagtttcataaaaaaaattattgtggggtgcaggatatgaacatcaggaggagagagcagaattaagcacatcattaattcatggtgtccagtcatcatcactctgggcaaggctctttctcgttttgtttgctcttttttgttttatgtgagtcatccctgacttctacttgcccccaacctccccgcaatacgtgctcactgagtgttcttgggtgtgtgtatatagcaatacatttgaaattttatgatgttgcattatctctgtctattctctatatataaatggtagtaactataaagctcattctttctcttcctttttcactcagcattatgcttttagagttgtccagagcttgacgcacactgttccctatttacctacccattccccagcggtggacacagaggtagagcatcaagcctaatggttaaggcttcatccacaggaagcaggctgcctggcatgacaccctattcaccagctgtgcgaacttagcccatttgctacacctcccatgcctcagttttctcatttctaaagtggagatagtaagagtattgagaagatgt

SEQ ID NO: 674265 - DNA, 1230 bp, Homo sapiens
tttctttcttttctttcttttttttttttttttttttttttttttttgagatggaatctatctctgtcacccaggctggagtgcagtggcacatttttggctcactgccacctccgtcttttgggttcaagagattctcgtgcctcagcctcctgagtagctggaattacaggcacccgccaccacgctcatctaatttttgtatttttagtagagacaggktttcactgtgtttgccactgttcttgaactcctgacctcgtgatccacccacctcggcctcggaaagtgctgggattacaagcgtgagccaccacgcccagccacaggtggctatttctacaaataaaaccagtggttgccaggacaattaatagaggtgttctgtaaaccacagggctaaacctctgtgccaggacctgagtcaagtgcaagatcagctgataacttgcagagttgcttcctctctgacctgcttctctgcacatctgtgaaatggaaggaaatgagcttatatcatgaggtggaataaaacactaactagaatgtacacctattgcaggactctgctgctcactgaatggagtcctcaagagaaagagaatgaatgtgccttctctgatcctccctaaagtagaaatgaagctttaaatctagtttcataaaaaaaattattgtggggtgcaggatatgaacatcaggaggagagagcagaattaagcacatcattaattcatggtgtccagtcatcatcactctgggcaaggctctttctcgttttgtttgctcttttttgttttatgtgagtcatccctgacttctacttgcccccaacctccccgcaatacgtgctcactgagtgttcttgggtgtgtgtatatagcaatacatttgaaattttatgatgttgcattatctctgtctattctctatatataaatggtagtaactataaagctcattctttctcttcctttttcactcagcattatgcttttagagttgtccagagcttgacgcacactgttccctatttacctacccattccccagcggtggacacagaggtagagcatcaagcctaatggttaaggcttcatccacaggaagcaggctgcctggcatgacaccctattcaccagctgtgcgaacttagcccatttgctacacctcccatgcctcagttttctcatttctaaagtggagatagtaagagtattgagaagatgt

SEQ ID NO: 674266 - DNA, 1230 bp, Homo sapiens
tttctttcttttctttcttttttttttttttttttttttttttttttgagatggaatctatctctgtcacccaggctggagtgcagtggcacatttttggctcactgccacctccgtcttttgggttcaagagattctcgtgcctcagcctcctgagtagctggaattacaggcacccgccaccacgctcatctaatttttgtatttttagtagagacaggttttcactgtgtttgccaytgttcttgaactcctgacctcgtgatccacccacctcggcctcggaaagtgctgggattacaagcgtgagccaccacgcccagccacaggtggctatttctacaaataaaaccagtggttgccaggacaattaatagaggtgttctgtaaaccacagggctaaacctctgtgccaggacctgagtcaagtgcaagatcagctgataacttgcagagttgcttcctctctgacctgcttctctgcacatctgtgaaatggaaggaaatgagcttatatcatgaggtggaataaaacactaactagaatgtacacctattgcaggactctgctgctcactgaatggagtcctcaagagaaagagaatgaatgtgccttctctgatcctccctaaagtagaaatgaagctttaaatctagtttcataaaaaaaattattgtggggtgcaggatatgaacatcaggaggagagagcagaattaagcacatcattaattcatggtgtccagtcatcatcactctgggcaaggctctttctcgttttgtttgctcttttttgttttatgtgagtcatccctgacttctacttgcccccaacctccccgcaatacgtgctcactgagtgttcttgggtgtgtgtatatagcaatacatttgaaattttatgatgttgcattatctctgtctattctctatatataaatggtagtaactataaagctcattctttctcttcctttttcactcagcattatgcttttagagttgtccagagcttgacgcacactgttccctatttacctacccattccccagcggtggacacagaggtagagcatcaagcctaatggttaaggcttcatccacaggaagcaggctgcctggcatgacaccctattcaccagctgtgcgaacttagcccatttgctacacctcccatgcctcagttttctcatttctaaagtggagatagtaagagtattgagaagatgt

SEQ ID NO: 674267 - DNA, 1346 bp, Homo sapiens
taactgttctctactagtctgagcctctgtacagagaaatgtcagttttgtattcctggttcctggaaaagtacatatagaatagtataaatacaataaatgtttgaattatcgtataacttgagtctaaattttaagttagtatcctgtattaagaactgggttgatcaaatggttctttctttgcacatatcaaggctttcgactattcccaaccaggtcttcccaaatttgggcatattcctgcctctgcctaccctgttctaatttggcactctaaagatagttcataaaaagcaagccaaagatagaaaagagagctaaggctacaggaggaatttactctttaacatttgggggaaggaaaatgaggcttgtctacagcagggactggctgtcttccagaaatggtttcccaaggtgttccctacctctctttttcttggatatctttttgcattatagatagccttgggaagggtgtcacctttatcctatcagttccacctaatcaactgtagtcatctgagagccagaattattattgatagaggggcctgggaaaggagaaaaggaccaggagagaggaaggtatacttattgcagaggagaaaagccaaagaacgtttgcccatgggcagtcttagctatttaaaatcacccacttcttcatccggctcccttggcatatgtatcagcccatggattgggaggtgtaggaccattctttttctttctggaaggaaagcactgacatttaagctctgtgcggtctgctcaggggctgcccagtttgtccaagctttaggatattagagagattacgcatttgtggtctcaagttaggaaactgttgaagaacaaatatgtcccttattagagggmctctttagatgtttagggtactcacaatccttgccaacctgatgtccttggaagctccagtctggctgtaaggagatgatgaggggttctgtgtgttggaggtgatgacctcattgagtctcagccacagcagggcattatgcaggaaagaattcaatggagttatttaatacctttccctattcccacaaaaatctggaactgggttctgaactgagaagtctgggttccctgagaattggacatcagttcaaccacaggaagcctctaaatttagcactctactcacagagggccaagaaaaattcacaaatgtcacaaacttaggaacttaggtatctagtcttctctgtcattttgtaatgagaaactgaggcccataggtaaaacatctcacctccagtcacacaggtaagtacatggcagggcaaggacaggcacccagttttcccaagtccagt

SEQ ID NO: 674268 - DNA, 535 bp, Homo sapiens
ttttattttgtcagatgtggctaagtgaacaatttcccccccccmaaaaaaaagactaaaatagtgagcctttaaaactcctatttctcttctagacttggatccctaagtaccagccaaggaaaatatctgatttcgtcaaggaaaaagagttcatatttcttttgaaacatatcatgttgccatagttaccaaatgctctcattttatttcctaacaataatatcaccatctaggtacacatagcttacaaaagtaaatgttttattgtggaattttataaggacacaggatctgctttcaatgacttttaaaaaattaaaatggaaggattctttctaataaatacacctgagttgaaattaaatgttttctgagcaagagcataagagaaaaggaggagcagagagaaattgaaaaggacacatacagttttaacatttcaaaggtgaaggtgatttaaattatgatgtgggcatggttgttcttctccaccccagtgtatataaacattctcatatgggttgccatgtct

SEQ ID NO: 674269 - DNA, 535 bp, Homo sapiens
ttttattttgtcagatgtggctaagtgaacaatttcccccccccaaaaaaaaagactaaaatagtgagcctttaaaactcctatttctcttctagacttggatccctaagtaccagccaaggaaaatatctratttcgtcaaggaaaaagagttcatatttcttttgaaacatatcatgttgccatagttaccaaatgctctcattttatttcctaacaataatatcaccatctaggtacacatagcttacaaaagtaaatgttttattgtggaattttataaggacacaggatctgctttcaatgacttttaaaaaattaaaatggaaggattctttctaataaatacacctgagttgaaattaaatgttttctgagcaagagcataagagaaaaggaggagcagagagaaattgaaaaggacacatacagttttaacatttcaaaggtgaaggtgatttaaattatgatgtgggcatggttgttcttctccaccccagtgtatataaacattctcatatgggttgccatgtct

SEQ ID NO: 674270 - DNA, 611 bp, Homo sapiens
tagaattctggctctgtcatacattatttaatctctgtgaactcagtttccagatccataacattctcatgaggatagcgcctttggagggtgtcgtgaggattacatgaaatagtatatgggaagaacctaatagcctacctggcacataattcatcttcaataaatagtaattattgtatcttcgcttattgttctttggaaaataccgacaccctgtgagcataccagcccctcaatctgtccagtcttcatccccactgccacatccctagtccaagctgttatcaccaactctcgacttgamcaacatggcagtctcttagaagagcccttcttctacttttgcttccctgtaatgtattgtcaataccattgtcagaataattttgtaaaaaatataatctaatcatataaactcccttacttcaaaccctcagtggcctcccaatgactatgggatacaaatcaaacttcttaccacgacctataagtaaagacagagaaagactgaatatcagaagaagaaagctccaggaaagaacataggaaaaacgataaattttgggttctctaaggctgctataaacaaagtaccacagactgtgtgg

SEQ ID NO: 674271 - DNA, 596 bp, Homo sapiens
agagaccagcctagtaacagcagacctctcaggtagaaagcagattggttaaatacaactatgattatacgtctatgtacaaacaaaaacaacaaaaggraaacaataagggtagatttgcatgtgtcagtcttacaaaaatatcaatgttgagaaaaatttccagaaaacatctacccagtttgcaggaatttggccaagtatacatttttttttcctgacattttaaagtagtttatctagtctacatagataaatattgtgtgctttcaaaatgcatcagggactatataaaacctatgtatcaaaacataaacttgatttcgaaatatgattaatgtaactgagaatatactctgctcttggaacaaaaaaaaccacacaagagaattgatatgatggtccatatgttctttggtagttacagaaatggaatagaaaatgaagagcagataagtttcagcttgttgtttgttttttgttttgcacattagatgtagcaattgaaaaagcatattcccagtgaagatttcagaggtgaaattctactcaccacttcattcctttgggaacctcttgtatcttcactgcgacta

SEQ ID NO: 674272 - DNA, 596 bp, Homo sapiens
agagaccagcctagtaacagcagacctctcaggtagaaagcagattggttaaatacaactatgattatacgtctatgtacaaacaaaaacaacaaaaggaaaacaataagggtagatttgcatgtgtcagtcttacaaaaatatcaatgttgagaaaaatttccagaaaacatctacccagtttgcaggaatttggccaagtatacatttttttttcctgacattttaaagtagtttatctagtctacatagataaatattgtgtgctttcaaaatgcatcagggactatataaaacctatgtatcaaaacataaacttgatttygaaatatgattaatgtaactgagaatatactctgctcttggaacaaaaaaaaccacacaagagaattgatatgatggtccatatgttctttggtagttacagaaatggaatagaaaatgaagagcagataagtttcagcttgttgtttgttttttgttttgcacattagatgtagcaattgaaaaagcatattcccagtgaagatttcagaggtgaaattctactcaccacttcattcctttgggaacctcttgtatcttcactgcgacta

SEQ ID NO: 674273 - DNA, 596 bp, Homo sapiens
agagaccagcctagtaacagcagacctctcaggtagaaagcagattggttaaatacaactatgattatacgtctatgtacaaacaaaaacaacaaaaggaaaacaataagggtagatttgcatgtgtcagtcttacaaaaatatcaatgttgagaaaaatttccagaaaacatctacccagtttgcaggaatttggccaagtatacatttttttttcctgacattttaaagtagtttatctagtctacatagataaatattgtgtgctttcaaaatgcatcagggactatataaaacctatgtatcaaaacataaacttgatttcgaaatatgattaatgtaactgagaatatactctgctcttggaacaaaaaaaaccacacaagagaattgatatgwtggtccatatgttctttggtagttacagaaatggaatagaaaatgaagagcagataagtttcagcttgttgtttgttttttgttttgcacattagatgtagcaattgaaaaagcatattcccagtgaagatttcagaggtgaaattctactcaccacttcattcctttgggaacctcttgtatcttcactgcgacta

SEQ ID NO: 674274 - DNA, 619 bp, Homo sapiens
cttaagaattataatttttgattgtcttttatgtcaattgcttagtctgtgtccaagaggctctgtatattgactatttaagccatctaaacttatttatgctcattttttgtacacccccaaaaatagtttccttattttagcaaagaaaacatgttagttaatagcaccatgttcattaatagcagtttttaaatgttctccagttggagtacccatttttcctcttcattagttcataaagtgattccattcaaagcccactttatccatgaaataatttctatattacctcaatatatttcctctttaaattgtataaacaacaacaacaacaacaacaacaaaaagaaacaaaagaaaaagaactttaatgtataaatgttaattttgatataagyatttatgtttttatttgataaaggagaaaactgaagtttagaatctgagaaaatatccccaaattatagaggtcatatgacatatacctgggattaagtttcaggtctatgcagtgcttaaacttgtttaaacattataacttctcctcaattcttttaagatgaatagtctatcattttacctaaatgtggattcttattttcctcggcatcacttc

SEQ ID NO: 674275 - DNA, 617 bp, Homo sapiens
ctctcytccctctttccttgtttttctccttttcttgctcccctctcaaattttagctttctcaagattcacaatcaaagtcatcaccaactttcgacttgatcgtggtggataagctttttaatgtgttgctgcattcagtttgccagtattttattgaagattattgcaccgatgttcaccagggatattggcctaaagttttcttttttttgttgtgtctcttcccgattttggtctcaggatgatgctggcttcataaaatgagttagggaggtctccctccttttcaattgtttggcataatttcagaaggaatgttaccagatcctctttgtacctctggtaaaattcagctgtgaatccatgaatccgtctggtcctgggcttttttttggttgggaggctattaattactgcctcaatttcagaacttgttatcggtctattcagggatttgacttcttcctggtttagtcttcggagggtgtatgtgtccaggaatttttccatttcttctagattttctagttgacttgcatacaggtgtttatagtattctctgatggtagtttgtatttttgtgggctcaggggtgatatcccctttaccatttt

SEQ ID NO: 674276 - DNA, 617 bp, Homo sapiens
ctctcttccctctttccttgtttttctccttttcttgctcccctctcaaattttagctttctcaagattcacaatcaaagtcatcaccaactttcgacttgatcgtggtggataagctttttratgtgttgctgcattcagtttgccagtattttattgaagattattgcaccgatgttcaccagggatattggcctaaagttttcttttttttgttgtgtctcttcccgattttggtctcaggatgatgctggcttcataaaatgagttagggaggtctccctccttttcaattgtttggcataatttcagaaggaatgttaccagatcctctttgtacctctggtaaaattcagctgtgaatccatgaatccgtctggtcctgggcttttttttggttgggaggctattaattactgcctcaatttcagaacttgttatcggtctattcagggatttgacttcttcctggtttagtcttcggagggtgtatgtgtccaggaatttttccatttcttctagattttctagttgacttgcatacaggtgtttatagtattctctgatggtagtttgtatttttgtgggctcaggggtgatatcccctttaccatttt

SEQ ID NO: 674277 - DNA, 617 bp, Homo sapiens
ctctcttccctctttccttgtttttctccttttcttgctcccctctcaaattttagctttctcaagattcacaatcaaagtcatcaccaactttcgacttgatcgtggtggataagctttttaatgtgttgctgcattcagtttgccagtattttattgaagattattgcaccgatgttcaccagggatattggcctaaagttttcttttttttgttgtgtctcttcccgattttggtctcaggatgatgctggcttcataaaatgagttagggaggtctccctccttttcaattgtttggcataatttcagaaggaatgttaccagatcctctttgtacctctggtaaaattcagctgtgaatccatgaatccgtctggtcctgggcttttttttggttgggaggctattaattactgcctcaatttcagaacttgttatmggtctattcagggatttgacttcttcctggtttagtcttcggagggtgtatgtgtccaggaatttttccatttcttctagattttctagttgacttgcatacaggtgtttatagtattctctgatggtagtttgtatttttgtgggctcaggggtgatatcccctttaccatttt

SEQ ID NO: 674278 - DNA, 682 bp, Homo sapiens
tttattttattgtggtaagagcgcttaatgtgagttctaccgtctgaacaaatttgtaagggtacagtaccatattgttaactacaggcacaattttatgcagccgttctctagaacttattcatcttgcatamctatgactttatacctatggaatagcaattccccaccatttctcttcccctcagccccagtaccattctactctctgattccatgagtttgactattttagacaccccatgggccagacatgatggctcacacctgtaatcccagcactttgagaggccgaagtggctggattgcttgagcccaggagttcaagaccagcctgggcaacatgacaaaaccctgtctcaaaaataaaataaataaaataaaaaacaggaaatcttgcaatatgcaacaacacggatgaatcttgaagacattatacaaagtgattatttcacttggtatgtgtgtatgtttaggtatatatacatgtaagaaatctagaatttcctaatatttcctttttacatctttattacatctttgattttcatctttaaaatgaacatgtagaggtaaaaacacaatatgcatattaatcagattgtgtattttaatgcctatgtgttatagaagccgccactgttgtgagagtgtgggcttgggacctggactgcctgggcat

SEQ ID NO: 674279 - DNA, 1833 bp, Homo sapiens
gaggctgcagtgagctgtgattgtggcactgcactccagcctgggcaacagaatgagaccatgtctcaaaacaaacaaacaaacacagggcagctggcagtcccctgccttccttcacacaaaacagatgggctgtgaggaggaggctttaaggaatgagaggagaccttcaggaatggctacactctattctccaaagaacaggccaggcatagaggatggaggccaggaaagaaagccattcaaattggaaaggaagaattaaaatgatctctgtttgcagaggacatgatcatatatgtagaaaactttaaagactcaccaaaaaaatctgttagaactaatgaatgaatttagtaaagttgcacaatacaaaatcaacataccaaaataagtggtgtttctacacaaaaaacaatgagctctccaaaaggaagtyaagaaaacaatctcatttacaatagcagcaaaaagaagaaaatacttaggaataaataaaggacagaggtcatggattctgtgtgaaggaggaacaggcaggagacagtgcatgggggtgtgaagcagctgtctttggggaacgggaagcattgtggccactccaagtttcctggctcaacctgtgctgtcccgtcaagcagaaagaagatcatccagtcatgggagaagtcaagtgctgctttcccactgcaggttccttgagacatcacacaaatcaaaggatgcaaatggacattggcaggatattctgtaagacattcatttatactttaagcaacactaatgtgaaataaaaaaggctgcaatgaaaggaagagggtctggacactgatgagcacaacaaaccagctgaggttttgctcctcttgtctcctaccctctggaacaatgggagacaagaggagcacagcacagcagaaacaggagagttcaatagaatggggtgattaatgggaaaatagaaaatgttggcataattgtagatgggacaggtgggtgtccaataagacataaaggctgggaggaacagatgaaaggatcagagagatattctatttcttctaaatgggaagggagaaaaagaaacatgtatttatttagcctttcatttagcaaattttcatgagcacccactatgtgccaggcacttttttttttttttttttttttgagacggagtctcgccctgtcgccctggctggagtgcagtggcgggatctcggctcactgcaagctccgcctcccgggtccacgccattctcctgcctcagcctcccaagtagctgggactacaggcgcccgccactacgcccggctaattttttgtatttttagtagagacggggtttcaccgttttagccgggatggtctcgatctcctgacctcgtgatccgcccgcctcggcctcccaaagtgctgggattacaggtgtgagccactgcacccgaccacaacattttcaagtcattcaagcctgtagttccttcttgttcttatttcccatcaatccatgggcatgcagcagagagagagaaaagcagtggatttttgtacctctctgccacatcaagagcttcctagtaaagtcaccaaatatcttgaagcctcaattccctcacctgtcgaactgaaaacttggggtatgcctacttcctatatttgtggtgaggcttaaataatcaccttgcagaaagtagtaagtcttttgcaaatatcaggtattatttggcaaagttattgttcatatattaaatatataggcatatataaactatataggtatatatttatcaaattataagttaaataaaaataataaaatggttatttta

SEQ ID NO: 674280 - DNA, 634 bp, Homo sapiens
tcagcaccgagaggaagtcagtgaagcaagaagcgcacactgggatcagccgtttgcagagccgaggtcctgccttgccctgcggatggctcccggccgccttggggaagatgctgagagaccgggaaaggcctggcgtccagagcgtgtgtggtgatccatcagcagggtggctgcccctcctgcacccttgcccctgttgtgagcaaatggcgtgcctgccacatttggggactgtaggattaattgtgtggggtgtgcagaaacactgctcccccttgatgtggttggggtatggacctggtgagcatcccctgaaatctgcctcagatctgagggatgagtgggagctctgggaacaggagggaggctgggtacaggcatcgggtagctgtgggaagccagagaggcctgggaggaggagagagggaagaatgaagacgtgggacaggaaaacaggctgtgtgtctagagccccctccttgtrgttctgacttctgtatgcacgggggtggggtggttataatcactgggtctgagctgaccatttgtaggtaacgtagaaaatgactttagctgcaagtagcagaagtagcaggcaggtgcctgctaggtttgaacccacagggattca

SEQ ID NO: 674281 - DNA, 634 bp, Homo sapiens
tcagcaccgagaggaagtcagtgaagcaagaagcgcacactgggatcagccgtttgcagagccgaggtcctgccttgccctgcggatggctcccggccgccttggggaagatgctgagagaccgggaaaggcctggcgtccagagcgtgtgtggtgatccatcagcagggtggctgcccctcctgcacccttgcccctgttgtgagcaaatggcgtgcctgccacatttggggactgtaggattaattgtgtggggtgtgcagaaacactgctcccccttgatgtggttggggtatggacctggtgagcatcccctgaaatctgcctcagatctgagggatgagtgggagctctgggaacaggagggaggctgggtacaggcatcgggtagctgtgggaagccagagaggcctgggaggaggagagagggaagaatgaagacgtgggacaggaaaacaggctgtgtgtctagagccccctccttgtagttctgacttctgtatgcacgggggtggggtggttataatcactgggtctgagctgaccatttgtaggtaacgtagaaaatgactttagctgcaagtagcagaagtagcaggcaggtgcctgctaggtttgaacccacaggrattca

SEQ ID NO: 674282 - DNA, 669 bp, Homo sapiens
gaagctgtggccctgagcccctgattgcactcctgctgccgtgggccctcgggagtgcctctggactcagcagctaaagggtcagcccctggccagcagggccttctggaacctgctccagcgccaaggcttgagtccactctgatcrgttggtgctgggctgttgcagttattaacgatttctgatttcactcctgactaaagatattcagattaacgtttttaaaaacatggtgctgactcattggaacacatccaagtcttgatttgtccttggttgggacctccagtgttggggtaaggggacattgatgatgggggtcttggagttccagccctcacctggccatggctagaagcacaagccctgctctttcttcccagctaggggtaggcggtcttcatgcctctcccgtattctctggtggctgtggctctaagctcctctctctggtcttcttcattaagggctacactggttgcccctggtgcttatctccccaaagttggggaccacgttttccccagatttcagttctacatcaagattctcaaaggggagcttgaccctccatcacagccctcttcttcaaccctctctctccccacccctgcacagatgcccttccctgcagcccacatggacccacctttagtcccttgaacaca

SEQ ID NO: 674283 - DNA, 1196 bp, Homo sapiens
gcacccgcccttgcgctgacaccgcgggccttcctttgctctgggaacgagcgtggggagccctgttcaccctcacaccccggctccagagcggcgcggagcactccatgtttgctaaatgaaaatgaagtctcggcgcgagcgccacccaaacggcggcgtagttgcttgagaaccgcggaggcaaccgcttgggagggcgccccgaccccgaagctgcttctccaggcgcccgaggcggagagaaggcactggggtctccgtctccaccagtgatttctggtgaaacaggaaacaaaacccgggaaacaaatgggacgaaatgttggcggttttgatgctggatgatgggaatatgggcgtgtgttttgtacctttctgttatcttcagttttctcaaaacacgaaaaacagactaagaacagcgcatagaaaacattggggcacaactaaagctcataaatgcacacgttttcataacctgaccgaggtccatgctgctgtagcgcatacccccaagaacagagggccgcgtgttcttatggccccggtgccggcccccaagcggggttcccgcaggagatagggcctggctcccgcttcagcaccgcgtggcctggagtgcagttctggcggccaagatctgagggctgtagcccgtgccctcaccaggatcccagacttagagtccctgccctccccgggatcccagggctcgatcctgtgccctccccgggatcccagggctggagcccatgccctccccaggatcccagggcgcgagctggtggcttctcaagcggagttttgcctgcttgttacattagtgaatgtaggaccacttgagtaaaggaccaaacctttattcttttgcttttctgccattgaaaccattcaacccatgctgattaatacctactgtttgccaggtaatatgccccttgcagaaagacgcaaacagctaaaccccaaatgggatgttgtacaggacaaatgaccgtgtcaattaataccaataattaagataatagtataattatgatgataatataattaattcgagcctggaggaaamaaaagaaagtggaactgaactattagagaataaatgagcttaaaagacgtcattgaatggaatgtgtggaacttacttggatcatgatagaataaactagcttaaacggggcatttgagag

SEQ ID NO: 674284 - DNA, 1051 bp, Homo sapiens
gactcctgctgaagctcttgccacactcggcacactggaagggcttttcccccgtgtggatcctctggtgggttatgaggttggcactccggctaaagctcttcccacagtctctgcatttgtagggcttctccccggtgtgagtggtttggtgtctactaaaatttgaaccatcactaaagctttttccacattcatcacatttgtagtatttctctcctgtgtgggtcctctcgtgtgtgatgaggtgggatttccggctgaaggtcttcccacactggggacattcgtagggcttctcccctaggtaggtgccctgcaggcctatgagctggccaacttccctgtcctgagaaaccacctccccgtggtcctcacctgggctgtgtccctggagcctctggatgccagcatctctctcaaagtcactttccccatcggagtgctgagcactttcaccttcaggcatttccgagaatatcttacgtgattcattctcaaacatgtcttgattacagttctccccattttcactctgtatctcaaaatctgaaacaatgaagaaaaacatacaatgtctactcaactccctgtcatgatgacaaaagaaaacgaagggggaaatttataaaaattaaacttccagtgaacacaaagaggctagaaaatcctcaaagcctttaataatcaggtttaatatacccaaaggaatataaatcattctattataaagatacatgcacacacatgttcaatgctgcactattcacaatagcraagacatagaatcaacccaaatgcccatcaatgatagattggatgaagaaaatgtagtacatatacaccatggtatactatgcagccaaaaaaaagaatgagatcatatcttttgcagggacatgaatggaattggaagccattatcctcagcaaactaacataggaacagaaaaccaaacactgcatcttttctcttataagcaggagctgaatgaagagaacacatgagcacatggagggaaataacacaccctggggcctgtgggggaggg

SEQ ID NO: 674285 - DNA, 599 bp, Homo sapiens
  misc_feature 3, 4, 5, 6, 7, 8, 9, 10, 11, 12, 13, 14, 15, 16, 17, 18,19, 20, 21, 22, 23, 24, 25, 26, 27, 28, 29, 30, 31, 32,33, 34, 35, 36, 37, 38, 39, 40, 41, 42, 43, 44, 45, 46,47, 48, 49, 50, 51, 52, 53, 54, 55, 56, 57, 58, 59, 60,61, 62: n = A,T,C or G
  misc_feature 63, 64, 65, 66, 67, 68, 69, 70, 71, 72, 73, 74, 75, 76, 77,78, 79, 80, 81, 82, 83, 84, 85, 86, 87, 88, 89, 90, 91,92, 93, 94, 95, 96, 97, 98, 99, 100, 101, 102: n = A,T,C or G
ttnnnnnnnnnnnnnnnnnnnnnnnnnnnnnnnnnnnnnnnnnnnnnnnnnnnnnnnnnnnnnnnnnnnnnnnnnnnnnnnnnnnnnnnnnnnnnnnnnnnntggacatgtctcaagttgaaacatcaggctcttgacagcctcaggcacacacactggcrgggaggggccctgaggctcaggcaggggagacactgcctaaggaagcccagtgttctgtcgggagggagggaggctctagtgaactcttaagggcaggtcaggtcaagtctcaccctgaagtttatttttggaatgaaatttatagaaagagtgtggtcagaaggacaattgggtacctggggctagaagctggctagatgtggggcccccagaaggaggacttggcaggcaggtaagtctagggagagctcacccctggcagcagctggccccaggttcctgacctcatttctcagaaagttctctgtggccacatgggtttggtccctcgtgttttctctcaccactctgctctagggcctctgctcctgccagcctccagcctctgctcatgtcttatgatgccctgccttccttgcaagtcactctgtctgtcc

SEQ ID NO: 674286 - DNA, 2165 bp, Homo sapiens
taagggaagctggttgcaccacaccaaggagaattttaattatttcaaatctctgggttctaaggccccataagaggtctggaatagaggccactccaccaacggtacactgagcatgtgttgggtgagcggtgggttgggccaggctgggggatttatggagagctgcgatgctcagtggagcccctgcttgtcttggagcagaaggatgatgtgaaagcaatgtccaagacaagacttactggaatgaagaggccagggataggaaagctacggaggaagccttcggctgatgtgtttaggtgtggcctaggggtagagctgggttaagtatttccagagatgagatgatagaatttcctgaagaaatctaaagaaggaagtaccaaagtgagtgcagaaagaaaaacggtggctggggaggagatggggagttttgggtgaggaaacatgaggaactgactctggggagtcatggggagagggtctatgggtgatcagtgacagagctcatgaagagaactggaccaggtgggtcacacgtctgggaagggacatgacttgataacacgatcactggcagtggagcagccccagggccctggcactcccaccatgggcttagtgcttctaccactaggccgcactgcctcttaacatcacctgtacagagacaaggaagcgagaggtgagcccagcagtttgcctcctctactcactctcccagatggggctttaagctcagagctcttcgctaaggcaaggtctgaaggaggatccgagctgcacttaaggggagctggttgcatcatgccaaggaggattttaattatttcaaatctctgggttctggaaggccccataagagatctgggatggaggccactccacaagcacaaatgattgattgcccacgcaggaccgctaggttaatgagtccgaggtcgctgcgggagatgggtatccatccaatcgctggatattaaaaccctcctaatcatttttgcaagctgactccctaatgtgatccagtgatgtgcctggatttaagttctcattacccatttccacccacaggtagaaggtctcgctcattcaccacgggcaatttcctgccccattacgtgtgaaaatcagagagtggccaggcccgttaggagagctaaggagtccttttcctcctctttttcaagtcacagtaaaggagccctttctgtaagactcacggttgtgactctgagtgccaggccagcatggagcccaccagtgcctgacattagatagtgcccttcagatgtgggctactgtgcttgttcaccctcccctcagtggctrggctcgggggtcaaaccgtcaggcttggaacatctcccagacatttcccttcttttaataacaacccttcacatctgagcagaaagtatggtctgcttttcagggcaacttctcccccatggcctcccagacatcctctgaaaggaatgatagcagaggtcatctgtgccctggccttggagaagcctgtgatgctgaaggttggctctcaccatacacaccttatgttaccatctccccatgtgcttttctctcctctaaatccaggttaaagagagcggagaccacatctgtatttgttagctattgctgcgtaacaaattatccctgaatgtcatagtttaaagcaacaataaacatttatatctcacacagtttctgtgggtcaggagtcctgacactctgtgttcaatggaggttggtgcatgaatgagtgcctcagtgtagagacatctgtgtgaaatgctgtgtttaacagtgtggtgtgtgtagcattttttcaatggtaaatgttgaaactgtctaatagagctaggcatgtgagttactgatgatgagttaccatcagtatagtggtattcaggaatgatttagctgggggttcttgttcaaggccctcaagaagttgcagtcatgatgtcagctgggactgcagtcatcggaaacttgactgagctggaagatttgtttccaagatggctctcttacacagcagggaagctgatgctggctgttggcaggaggcctcagttccttgtcacgtggaaccacacgccatagggctgcttgagtgtcctcacagcatggcagctaccttcccccacagtgag

SEQ ID NO: 674287 - DNA, 2165 bp, Homo sapiens
taagggaagctggttgcaccacaccaaggagaattttaattatttcaaatctctgggttctaaggccccataagaggtctggaatagaggccactccaccaacggtacactgagcatgtgttgggtgagcggtgggttgggccaggctgggggatttatggagagctgcgatgctcagtggagcccctgcttgtcttggagcagaaggatgatgtgaaagcaatgtccaagacaagacttactggaatgaagaggccagggataggaaagctacggaggaagccttcggctgatgtgtttaggtgtggcctaggggtagagctgggttaagtatttccagagatgagatgatagaatttcctgaagaaatctaaagaaggaagtaccaaagtgagtgcagaaagaaaaacggtggctggggaggagatggggagttttgggtgaggaaacatgaggaactgactctggggagtcatggggagagggtctatgggtgatcagtgacagagctcatgaagagaactggaccaggtgggtcacacgtctgggaagggacatgacttgataacacgatcactggcagtggagcagccccagggccctggcactcccaccatgggcttagtgcttctaccactaggccgcactgcctcttaacatcacctgtacagagacaaggaagcgagaggtgagcccagcagtttgcctcctctactcactctcccagatggggctttaagctcagagctcttcgctaaggcaaggtctgaaggaggatccgagctgcacttaaggggagctggttgcatcatgccaaggaggattttaattatttcaaatctctgggttctggaaggccccataagagatctgggatggaggccactccacaagcacaaatgattgattgcccacgcaggaccgctaggttaatgagtccgaggtcgctgcgggagatgggtatccatccaatcgctggatattaaaaccctcctaatcatttttgcaagctgactccctaatgtgatccagtgatgtgcctggatttaagttctcattacccatttccacccacaggtagaaggtctcgctcattcaccacgggcaatttcctgccccattacgtgtgaaaatcagagagtggccaggcccgttaggagagctaaggagtccttttcctcctctttttcaagtcacagtaaaggagccctttctgtaagactcacggttgtgactctgagtgccaggccagcatggagcccaccagtgcctgacattagatagtgcccttcagatgtgggctactgtgcttgttcaccctcccctcagtggctaggctcgggggtcaaaccgtcaggcttggaacatytcccagacatttcccttcttttaataacaacccttcacatctgagcagaaagtatggtctgcttttcagggcaacttctcccccatggcctcccagacatcctctgaaaggaatgatagcagaggtcatctgtgccctggccttggagaagcctgtgatgctgaaggttggctctcaccatacacaccttatgttaccatctccccatgtgcttttctctcctctaaatccaggttaaagagagcggagaccacatctgtatttgttagctattgctgcgtaacaaattatccctgaatgtcatagtttaaagcaacaataaacatttatatctcacacagtttctgtgggtcaggagtcctgacactctgtgttcaatggaggttggtgcatgaatgagtgcctcagtgtagagacatctgtgtgaaatgctgtgtttaacagtgtggtgtgtgtagcattttttcaatggtaaatgttgaaactgtctaatagagctaggcatgtgagttactgatgatgagttaccatcagtatagtggtattcaggaatgatttagctgggggttcttgttcaaggccctcaagaagttgcagtcatgatgtcagctgggactgcagtcatcggaaacttgactgagctggaagatttgtttccaagatggctctcttacacagcagggaagctgatgctggctgttggcaggaggcctcagttccttgtcacgtggaaccacacgccatagggctgcttgagtgtcctcacagcatggcagctaccttcccccacagtgag

SEQ ID NO: 674288 - DNA, 2165 bp, Homo sapiens
taagggaagctggttgcaccacaccaaggagaattttaattatttcaaatctctgggttctaaggccccataagaggtctggaatagaggccactccaccaacggtacactgagcatgtgttgggtgagcggtgggttgggccaggctgggggatttatggagagctgcgatgctcagtggagcccctgcttgtcttggagcagaaggatgatgtgaaagcaatgtccaagacaagacttactggaatgaagaggccagggataggaaagctacggaggaagccttcggctgatgtgtttaggtgtggcctaggggtagagctgggttaagtatttccagagatgagatgatagaatttcctgaagaaatctaaagaaggaagtaccaaagtgagtgcagaaagaaaaacggtggctggggaggagatggggagttttgggtgaggaaacatgaggaactgactctggggagtcatggggagagggtctatgggtgatcagtgacagagctcatgaagagaactggaccaggtgggtcacacgtctgggaagggacatgacttgataacacgatcactggcagtggagcagccccagggccctggcactcccaccatgggcttagtgcttctaccactaggccgcactgcctcttaacatcacctgtacagagacaaggaagcgagaggtgagcccagcagtttgcctcctctactcactctcccagatggggctttaagctcagagctcttcgctaaggcaaggtctgaaggaggatccgagctgcacttaaggggagctggttgcatcatgccaaggaggattttaattatttcaaatctctgggttctggaaggccccataagagatctgggatggaggccactccacaagcacaaatgattgattgcccacgcaggaccgctaggttaatgagtccgaggtcgctgcgggagatgggtatccatccaatcgctggatattaaaaccctcctaatcatttttgcaagctgactccctaatgtgatccagtgatgtgcctggatttaagttctcattacccatttccacccacaggtagaaggtctcgctcattcaccacgggcaatttcctgccccattacgtgtgaaaatcagagagtggccaggcccgttaggagagctaaggagtccttttcctcctctttttcaagtcacagtaaaggagccctttctgtaagactcacggttgtgactctgagtgccaggccagcatggagcccaccagtgcctgacattagatagtgcccttcagatgtgggctactgtgcttgttcaccctcccctcagtggctaggctcgggggtcaaaccgtcaggcttggaacatctcccagacatttcccytcttttaataacaacccttcacatctgagcagaaagtatggtctgcttttcagggcaacttctcccccatggcctcccagacatcctctgaaaggaatgatagcagaggtcatctgtgccctggccttggagaagcctgtgatgctgaaggttggctctcaccatacacaccttatgttaccatctccccatgtgcttttctctcctctaaatccaggttaaagagagcggagaccacatctgtatttgttagctattgctgcgtaacaaattatccctgaatgtcatagtttaaagcaacaataaacatttatatctcacacagtttctgtgggtcaggagtcctgacactctgtgttcaatggaggttggtgcatgaatgagtgcctcagtgtagagacatctgtgtgaaatgctgtgtttaacagtgtggtgtgtgtagcattttttcaatggtaaatgttgaaactgtctaatagagctaggcatgtgagttactgatgatgagttaccatcagtatagtggtattcaggaatgatttagctgggggttcttgttcaaggccctcaagaagttgcagtcatgatgtcagctgggactgcagtcatcggaaacttgactgagctggaagatttgtttccaagatggctctcttacacagcagggaagctgatgctggctgttggcaggaggcctcagttccttgtcacgtggaaccacacgccatagggctgcttgagtgtcctcacagcatggcagctaccttcccccacagtgag

SEQ ID NO: 674289 - DNA, 2165 bp, Homo sapiens
taagggaagctggttgcaccacaccaaggagaattttaattatttcaaatctctgggttctaaggccccataagaggtctggaatagaggccactccaccaacggtacactgagcatgtgttgggtgagcggtgggttgggccaggctgggggatttatggagagctgcgatgctcagtggagcccctgcttgtcttggagcagaaggatgatgtgaaagcaatgtccaagacaagacttactggaatgaagaggccagggataggaaagctacggaggaagccttcggctgatgtgtttaggtgtggcctaggggtagagctgggttaagtatttccagagatgagatgatagaatttcctgaagaaatctaaagaaggaagtaccaaagtgagtgcagaaagaaaaacggtggctggggaggagatggggagttttgggtgaggaaacatgaggaactgactctggggagtcatggggagagggtctatgggtgatcagtgacagagctcatgaagagaactggaccaggtgggtcacacgtctgggaagggacatgacttgataacacgatcactggcagtggagcagccccagggccctggcactcccaccatgggcttagtgcttctaccactaggccgcactgcctcttaacatcacctgtacagagacaaggaagcgagaggtgagcccagcagtttgcctcctctactcactctcccagatggggctttaagctcagagctcttcgctaaggcaaggtctgaaggaggatccgagctgcacttaaggggagctggttgcatcatgccaaggaggattttaattatttcaaatctctgggttctggaaggccccataagagatctgggatggaggccactccacaagcacaaatgattgattgcccacgcaggaccgctaggttaatgagtccgaggtcgctgcgggagatgggtatccatccaatcgctggatattaaaaccctcctaatcatttttgcaagctgactccctaatgtgatccagtgatgtgcctggatttaagttctcattacccatttccacccacaggtagaaggtctcgctcattcaccacgggcaatttcctgccccattacgtgtgaaaatcagagagtggccaggcccgttaggagagctaaggagtccttttcctcctctttttcaagtcacagtaaaggagccctttctgtaagactcacggttgtgactctgagtgccaggccagcatggagcccaccagtgcctgacattagatagtgcccttcagatgtgggctactgtgcttgttcaccctcccctcagtggctaggctcgggggtcaaaccgtcaggcttggaacatctcccagacatttcccttcttttaataacaacccttcacatctgagcagaaagtatggtctgcttttcagggcaacttctcccccatggcctcccagacatcctctgaaaggaatgatagcagaggtcatctgtgccctggccttggagaagcctgtgatgctgaaggttggctctcaccayacacaccttatgttaccatctccccatgtgcttttctctcctctaaatccaggttaaagagagcggagaccacatctgtatttgttagctattgctgcgtaacaaattatccctgaatgtcatagtttaaagcaacaataaacatttatatctcacacagtttctgtgggtcaggagtcctgacactctgtgttcaatggaggttggtgcatgaatgagtgcctcagtgtagagacatctgtgtgaaatgctgtgtttaacagtgtggtgtgtgtagcattttttcaatggtaaatgttgaaactgtctaatagagctaggcatgtgagttactgatgatgagttaccatcagtatagtggtattcaggaatgatttagctgggggttcttgttcaaggccctcaagaagttgcagtcatgatgtcagctgggactgcagtcatcggaaacttgactgagctggaagatttgtttccaagatggctctcttacacagcagggaagctgatgctggctgttggcaggaggcctcagttccttgtcacgtggaaccacacgccatagggctgcttgagtgtcctcacagcatggcagctaccttcccccacagtgag

SEQ ID NO: 674290 - DNA, 913 bp, Homo sapiens
gcattcagtgacttcacggcaccttgtagcagagctagaactggaactcagcactcctgtttttcagcctaaagctccgctcaccaaaaatgctgcctctcagtgaagcgatatgaggctgttttcttctaagtctctcattttatggaagaggagacggaagccaggacatcacacatcttggggcatgcagggaccctaaccaagacaccttgagtctaggactcattgagagagaaaagagttaggcagctggagaccaaagtatttccacagctcttctggaggtgactatgagctgctcttcatcagaggaatttcattttgtctggggaccaggaggggaacctagcttgtggctctcatccaaggcaccacccagcttccttgccttcctttctctggatgcagatgaagctgggtggtaactgccattcactgaatacttcccagtccacaaggcattctccacattcacaatcttgaggaggaactgcagagtggtcactctcagggccctggagataggcaccctgggcccctacttcctgtgtggcctgggaaaggtctcgccctctcaggggtctagagataaggaaacagaagctccaagagttcagtgacttcatggcacctgcagaactgtgagtgtgcctacaccatggtgkgattgtttttagggttaaatgaaatacaaatgaaaggtattcaggtggttgacacctagtaaatgcttgagttaactaatgattgcatctcatttattcttcgccacttcctgagagaagaagttgtgtatacacatgaggaggggaaccttggacacccgatatctgccagcatgtgtgggatgaggtgcctgacacacatcatctgttccacccgcacagggactcctgtcttatagctgaga

SEQ ID NO: 674291 - DNA, 1086 bp, Homo sapiens
  misc_feature 393, 394, 395, 396, 397, 398, 399, 400, 401, 402, 403, 404,405, 406, 407, 408, 409, 410, 411, 412, 413, 414, 415, 416,417, 418, 419, 420, 421, 422, 423, 424, 425, 426, 427, 428,429, 430, 431, 432, 433, 434, 435, 436, 437, 438, 439: n = A,T,C or G
  misc_feature 440, 441, 442, 443, 444, 445, 446, 447, 448, 449, 450, 451,452, 453, 454, 455, 456, 457, 458, 459, 460, 461, 462, 463,464, 465, 466, 467, 468, 469, 470, 471, 472, 473, 474, 475,476, 477, 478, 479, 480, 481, 482, 483, 484, 485, 486: n = A,T,C or G
  misc_feature 487, 488, 489, 490, 491, 492: n = A,T,C or G
gtgtaggataaagggtatcccataaatctctgtaccttcctctgaattttgttgcaaatctatagctgctctcaaaaaatagtctttaaaaaaagtcttctttctgtagtttggtaaaaacagctagatcttcaataagcctttccttttcctatatttgtggccttctaagaagtaaataaaatctataaggatcaccccttcacacacacaaaatatgtggctggtgctggaacaggaattaaaagaaattaaaaaatgtgtaagcaaaaactcagttgtatgtaagaaaaaccaattccccatgaggaaaagaaagcgccgaagtccttcaaaaattgaatgcctgtttttgggtggctagtgagccttatctctccatttcccaggcannnnnnnnnnnnnnnnnnnnnnnnnnnnnnnnnnnnnnnnnnnnnnnnnnnnnnnnnnnnnnnnnnnnnnnnnnnnnnnnnnnnnnnnnnnnnnnnnnnngaattctaaaaaggtaaacagtcataccattctgaaaatatgctccatatctttaatgaaaggcagttaattaacatcttgcttttctgtaaaactkcatctgtgttcttttctctgaaatgttcctaaaatttcagaattagaaattagagcctgtaacatttttacttctgcctctagaccattactatttctctctttctaaatattcttgtttccttaggtacagtttaacttcttcttcataatcatttccacacctctagtcactctaccttcctcactgaatattttaactcccggacagagtcatcttcactccaactcctgtcacgattataaataatttgaacattcctgtgtgcagcttcaaataggaaatgtgatttaaaagttctctttaaacatcagagttcccagcttcttcaaagggagtctttctgaacgagatcccctataggaggtgttcataaagtcataaattttacttaatattttaccaaaacttataattatgtatttatttatgtaattatttgtttaatatctccgccactagatcctagattccgtcatgtcgaagaatattgtttg

SEQ ID NO: 674292 - DNA, 1086 bp, Homo sapiens
  misc_feature 393, 394, 395, 396, 397, 398, 399, 400, 401, 402, 403, 404,405, 406, 407, 408, 409, 410, 411, 412, 413, 414, 415, 416,417, 418, 419, 420, 421, 422, 423, 424, 425, 426, 427, 428,429, 430, 431, 432, 433, 434, 435, 436, 437, 438, 439: n = A,T,C or G
  misc_feature 440, 441, 442, 443, 444, 445, 446, 447, 448, 449, 450, 451,452, 453, 454, 455, 456, 457, 458, 459, 460, 461, 462, 463,464, 465, 466, 467, 468, 469, 470, 471, 472, 473, 474, 475,476, 477, 478, 479, 480, 481, 482, 483, 484, 485, 486: n = A,T,C or G
  misc_feature 487, 488, 489, 490, 491, 492: n = A,T,C or G
gtgtaggataaagggtatcccataaatctctgtaccttcctctgaattttgttgcaaatctatagctgctctcaaaaaatagtctttaaaaaaagtcttctttctgtagtttggtaaaaacagctagatcttcaataagcctttccttttcctatatttgtggccttctaagaagtaaataaaatctataaggatcaccccttcacacacacaaaatatgtggctggtgctggaacaggaattaaaagaaattaaaaaatgtgtaagcaaaaactcagttgtatgtaagaaaaaccaattccccatgaggaaaagaaagcgccgaagtccttcaaaaattgaatgcctgtttttgggtggctagtgagccttatctctccatttcccaggcannnnnnnnnnnnnnnnnnnnnnnnnnnnnnnnnnnnnnnnnnnnnnnnnnnnnnnnnnnnnnnnnnnnnnnnnnnnnnnnnnnnnnnnnnnnnnnnnnnngaattctaaaaaggtaaacagtcataccattctgaaaatatgctccatatctttaatgaaaggcagttaattaacatcttgcttttctgtaaaactgcatctgtgttcttttctctgaaatgttcctaaaatttcagaattagaaattagagcctgtaacatttttacttctgcctctagaccattactatttctctctttctaaatattcttgtttccttaggtacagtttaacttcttcttcataatcatttccacacctctagtcactctaccttcctcactgaatattttaactcccggacagagtcatcttcactccaactcctgtcacgattataaataatttgaacattcctgtgtrcagcttcaaataggaaatgtgatttaaaagttctctttaaacatcagagttcccagcttcttcaaagggagtctttctgaacgagatcccctataggaggtgttcataaagtcataaattttacttaatattttaccaaaacttataattatgtatttatttatgtaattatttgtttaatatctccgccactagatcctagattccgtcatgtcgaagaatattgtttg

SEQ ID NO: 674293 - DNA, 645 bp, Homo sapiens
taagcttgtatagggcatctagcctatagtatcacttcacagacataacaactaaatatggtgaaagtcttcccaagttattccaagtaatataacaacagacaaaaacaatgtttatttaaatggacataatatttacatgattttgggaaaagttgagatcacttcaccttagatgataaaataaaagacaatccaaagaagtggaaatagacttaggtmttggagtatgtataaaatttaattaaggtaaagagaggaaagtggactattcagatggaagaaatgtaaggataaaagtaggttgtgagaaacttcaaggtgtttagaggatcacaaacagaccagtttaaacagaactaattttcaattcatgagaattataggaaataagcctgaaaagttatgttggcaccagattgtagaaagcattgaatgttaaataaggaatctgaaccaaagctcaagttatttagtttgttcaaaagttgagcagtgttacactgaaagcatgttcatatgttcaaaaagtgttaaacagtattcattttaaaatatgagtggcatttaaattcataatgaatgctttctgaagacattataattccattcaaatgactcgatagcatgagtctacatctataa

SEQ ID NO: 674294 - DNA, 662 bp, Homo sapiens
agataattccaccagaccaactcaaagttgtacaattttcttagtgcttatattggttagggttatatgcctatgtacagtatagcatttgcctaagtctattggcaactaattcgtttcaactagtaggttagaggcttgctaagtttgattaagctgtgataaccccagtacctttaaggcctgtctattatgttactggggtgactatttctatyttatctcttttacagcttggtctggagagctgcctttgactctccagcgaatttattcaaacagttgcctttgtgctgctgtgttttgcttatctaggagagagagtttctgtgtctgttcccagacatcttcttgcagctgcaggcattccagccccccagtacccccacccccatgtccacttctagcttccttatactgttagtctgtgctgctctgtggaaatttgtctgtgtaactgaagtgctatgcaggcctgtctgtgtgattgtcatgcaggcctgtttgtgtgattattagggagaattggcctgccacaactgagcttgtagattgttttttccgttggtattttttaaattataaattttttaatagtgataaggcaaataaaattatctatttcaaaataacgagttttgtagtttgtatttttaaaggat

SEQ ID NO: 674295 - DNA, 595 bp, Homo sapiens
tttaagctttaattagttaaggattcatgctataataccttgggtaaccattgtgaaaataattaaaaaatttataactacaaagtcaacagtgtagaaatacagaaataggattaataatttattaatcctaaaagaaaacaagaggggaaaaaaaggaaaaatggtgcaatgaaaaatagtatgatgacagatttaaactcaaatatatctgtaatcatatgtaagtagattaaattctcaaattagattttaaaactatattgcataaatttaagaacacagaaaagtggaagataatataatgaaaaacatattggatgaaaaaactaaccaaataaaagctgatattgctgtactaatattagtcacaggacactttaacataaaaaccttattaggtatgacaagaatattcattattaagtataaaagtgaataatgagaggttgctttatccacaaaggtattataatctttatgtacctaataacctaatttcagtagttaaaasagatatagggaaatccaaaatcatagggaaagattttcacacgtattctttagtatttaataaaaagaaaaaatttgttga

SEQ ID NO: 674296 - DNA, 1260 bp, Homo sapiens
caaagagtgagaaaagtgctcaccaaaatattgttttaatggtaattataagagttttctgatgtgtgacgtgtttcgttgccttttctaatgtctttttggctggaagtaaagaaaggctcagaagcagagactcccagcatctccttaattttctatctcctctgaaatatgactcctctgtatttttgtttaggaagcatttctaggaacaattttcagcaattaggaaggaagcaacccgcagagccctggcgtcaggactcagggaaaatatcctgaggtctggatgagagcaggcacctgcaactgtgtgagctgggcagcgctcgctgacacagaatctatccagaccctgttcctgaacctcactttacaaacacaaaggaatgatagaaaagccattcccagttttccgaattactgaaaacaaggcaatatcgaaatattaactacaaacagtgaagaaaacaattgtatggaaggctttctgcctgtatctacctacattcaaaagttgtttctttcacctctccctgccacatcctccccggagttctaacgttattattatggctggtccatggtaacgagctattaaaagggttaaagctttatttgtttgagtttcttttcctatatagaaaaagcaataaacattaccaggaatgtatcctgagcacacattctctctaatgcattaacaaaagcaatcaatataaatgacatttgtcaaggaacctaattctgtgaacccacgccattcaggtgctccttttccaggcaaaacctgccaccatgtggaagacggtggcattgcagccccttgtccaaaaatctcgcttccacaaggacaaagggacgttytgagccaaaacacaaagtcaaaacacagcaaagggctcctcaaaacgatgatcagcaagaaaccattctctgtctactttctcagcttgcaccatcaaagggatatcaagaattcgccgtttacttcggttgaaaaatcaagtcccgggctcagagtccccctgccctagataattcctcttgataaaagaaccatagattatcagaagggaacttacagattacccggttccttcttcttcttcttttttttttttttttaacaaacaaaagggaaaggaaaagcaacaggatggtggggatgtttaccacttcttgtgctgtgttctctctatatataagtaatagacaaaggaggtaacgtctccggagaccctatctggaaggtagcag

SEQ ID NO: 674297 - DNA, 500 bp, Homo sapiens
gactacaggacccttcctttcaatgtgaatacatgccttcaaaaatacagtttctaaataagtattccattactgtaacttgtttacatgatttatcttcacaagactgcccctatgaaaccagacagattgagggcagatttaaatgcagcaatggcattcagggcccagggaagcagagttctgcacctgtattcaactgcagaggaaggcaccgacgagacagaccaagctgctgcagggaaaactattatttttatttgaatccatactctgaggttgctgcaagtgctgtcagtcagccagcagacattctagttcccttctcctctaccgcatattaacttgactgggcttctccaaggaattctaactgctcggtgctgatttgtctcctgaccttcctaaactcagtgaaaatgtagagtccatgtaaaagtatgtagagtggccragacaggaagatacaggaatttaaatgttgcaaaggcagaggaagg

SEQ ID NO: 674298 - DNA, 630 bp, Homo sapiens
ggctctgggttgtgatctagctcagcctctgactcttgggtgacttctgattcttccttcctcaaagtcctgactttccacctataaaatgggaaggatgatgtcaacctcccagggccgctgcaagtatacaaaaaacaaagatggcaacatttgagagctctggatctgaaagagccctgggagacaattagcctaaagctttcatttcacagacagggatgctgaggcccagggagagacagggaactgcccagatcacagagcaagtcaagcacagatagcctagaacacaggccttctgattgccaggacccacgctccaagctcaaggcctggccttgaaaagaccaaggtgctgtcataggtgagttcttgctcttgcccctgaacttccatgtggatgtcrttttgaaaccaaaatactctgtaaacaacacttattaacacaagttcacatgtactctgctgtggaaggagatgcgtctttcttctttgtgaaatattagctcagataggcatacaaagaactctatgactctcagtttgcttaacatatttgatttgctttatgcctacaagttcatactaagctcttgcatatctgctggcctctttattgacactata

SEQ ID NO: 674299 - DNA, 1719 bp, Homo sapiens
taatgttaacctgtttttgtttttgtttttgagacaggatctctctctgccacccaggctggagtgcagtggcacaatcatggctcactgcagcctcaaactcctgcgctcaagtgatcctcccacatcagcctcccaagtagctgggactccaggtacgcaccaccatgcctggataattttttaaattttttgtagagacgggtctcactatattcactaggctggtctcaaactcctggcttcaaactatcctcccacctcagcctctcaaactgttgggatcacaggcatgagccgccacacccagcccagaatccttcttgccccaactcctccatgaagctttcttgattatttccctcctatcagaatttttctgtttctgttttacattaccttgactacgttacatgcacctctacttagcacctgcctcattgcaccttgtttttgaattaagaggtgatatgtctgtcttcccctcttacagaagggaagaatgaaatctaatccctccacctggcagagtgcagagtgtacctactctatgggtaggttctcaatgactactgctgaaggaattcaaactgaaatggaagaagttttctcatggatcaaaagtcttagctgaagacttcatgttttccattaactgcagtcactcacatctatttaagcttctgctatcaaaaatggaaaagcagccagtgacttctgctttaaccgaggctgtcttgtattttttgtaaacttttttctatttttaaatttttatctagagaaagggtcttgctctgtcatccaggctggagtgcagtggcacgattgtagctcattaacttcaaactcatgggctctaacaatcctcctgccctagcctctcaagtagctcagactacaagtgcaagcccagctaatttttaagattttttgtagagatggggtctcgttatgttgctaggtagctggtctcaaactcctggcctcaagcagtcctcctgctgccacctctcaaaatgttgggattacaggcagggcgcagtggctcatgcctgtaatcccagcactttgggaggcggaggcaggtagatcatttgaggtcaggagttcaagaccagcttggccaacatggggaaacccagtctctactaaaaatacaaaaattagccaggtgtggtgatgcgtgcctgtaatcccagctactcgggaggctgaggcaggagaattgcttcagcccaggaggcggacactgcagtgaaccaagatggcaccactgaatcccagcctgtgcaacagagtgagactctgtctcaaaaaaaaaaaaaaagtgttgggactacaggcatgagcacctgcacctggccagtccttttaaatactgtactaaagggaagatgctgatttgggttgcaatacgctttcacactctgccatctgtgyggggatgcactgtggagtgatgcaaagaactggcctccacatttggagagcacgtctgaggggccaggagacctctccatgcctctcatttcattctagaccatttaatctgctgcaagtgaaaactgattgactcctttacattctaactaggttttattattttttgtgaatttttttgtgtctctaggtatgagagaacagaaatagagatttgggtggctttagctgtttaaaataaggtgaccaaacctcctttctgcctgttcctgctat

SEQ ID NO: 674300 - DNA, 1463 bp, Homo sapiens
ttccataatggaaacaataatgttaaaatcaccatataattttgcagaaacctgggggtatttggtgattatcctcatttacataaaaagttaacttgcccagggtcatttagctgataaagaggctgactgtgaatccagagctctacatgccccattattctccaagttaaactttcgtggctgaaagctacttggaagaacatttattgagcagcgactgcatgtgactctctgagctgagccccaggcaggaggctcagggacttgcagaagccagagactgctctctgagagttggcagtcctattcagggacaaagagcagacccagaaagagaaaacaagtgctttcagggcagtgggagctcagaagagggagtgatgctctgggctggggcgcagatcgggggtgggaggacactgcaagaggggaaggtgtccgtgcctaccaagcctgctgcaggccataggctcctgggggccttttatttcttactttatttaatcctcccaggggctctgtgagaatggcccagcatccagttttgacaaatgctctgctgaacttgtcaaggtcacacatctcagaagtggaaggaccacgtgtgtctgacaccaagacttccacatcggtgggaggtggcagagggaaggacaagcctgccccgctgtgtcaggaggccaaggatctcctgtcaggctccactgcctgaggccagcatgggcaactggccaggaaggaggtgatggctgaaaaggcctggtggctttggcctccagcctgggagggcaccagtttgttgcttctccccagggaggatggagggaggaacggtgtctatgaagggaggggctgccgggccaygcaggggaccagctctggcctgtgatacaagagacctgggacaggttgtggctctgtttctggttttctgagacccctgaggcaggtcagctcaggacgctggtttccctcttcactcagaagggcagagcctttattgtcctgcgcatctcatgtgctaaagttaatttgtcactgttagcatcggccctgaccatctgcctaaaccatcggccagccacaggtgcccagtgtccccttaccctgctttgttttccttttcggtgcttacacaccctgatgttacattctctacctcttcatttatactactgcctttctctgccaggagactggaaaccccacagaggcagggcctggccttcgtccagggctgtgtctccagcacctgagcagtgcctggtgcgcacaagcagtgggcgcatctttacggaatgaatggtgcatgcgactagggcggcatgcctccttcatatcaccatggccctgttcctgcttctcctgccacttgtcgcagggcactgtaactgcatgtgtcgaatctgtctctgcttcacgcagtgaaatgctgaggcagagcacggagcacagcctgg

SEQ ID NO: 674301 - DNA, 1463 bp, Homo sapiens
ttccataatggaaacaataatgttaaaatcaccatataattttgcagaaacctgggggtatttggtgattatcctcatttacataaaaagttaacttgcccagggtcatttagctgataaagaggctgactgtgaatccagagctctacatgccccattattctccaagttaaactttcgtggctgaaagctacttggaagaacatttattgagcagcgactgcatgtgactctctgagctgagccccaggcaggaggctcagggacttgcagaagccagagactgctctctgagagttggcagtcctattcagggacaaagagcagacccagaaagagaaaacaagtgctttcagggcagtgggagctcagaagagggagtgatgctctgggctggggcgcagatcgggggtgggaggacactgcaagaggggaaggtgtccgtgcctaccaagcctgctgcaggccataggctcctgggggccttttatttcttactttatttaatcctcccaggggctctgtgagaatggcccagcatccagttttgacaaatgctctgctgaacttgtcaaggtcacacatctcagaagtggaaggaccacgtgtgtctgacaccaagacttccacatcggtgggaggtggcagagggaaggacaagcctgccccgctgtgtcaggaggccaaggatctcctgtcaggctccactgcctgaggccagcatgggcaactggccaggaaggaggtgatggctgaaaaggcctggtggctttggcctccagcctgggagggcaccagtttgttgcttctccccagggaggatggagggaggaacggtgtctatgaagggaggggctgccgggccatgcaggggaccagctctggcctgtgatacaagagacctgggacaggttgtggctctgtttctggttttctgagacccctgaggcaggtcagctcaggacgctggtttccctcttcactcagaagggcagagcctttattgtcctgcgcatctcatgtgctaaagttaatttgtcactgttagcatcggccctgaccatctgcctaaaccatcggccagccacaggtgcccagtgtccccttaccctgctttgttttccttttcggtgcttacacaccctgatgttacattctctacctcttcatttatactactgcctttctctgcyaggagactggaaaccccacagaggcagggcctggccttcgtccagggctgtgtctccagcacctgagcagtgcctggtgcgcacaagcagtgggcgcatctttacggaatgaatggtgcatgcgactagggcggcatgcctccttcatatcaccatggccctgttcctgcttctcctgccacttgtcgcagggcactgtaactgcatgtgtcgaatctgtctctgcttcacgcagtgaaatgctgaggcagagcacggagcacagcctgg

SEQ ID NO: 674302 - DNA, 644 bp, Homo sapiens
tgtatttatctccagtgtgccgagtgtgctcgggcccctgccagccacgtggtgggcatcgttggaaccactcgggccgctcaacacagagagcctgtctctggcatcgggagacagccagctccaaggggtagcaggaaggacgaggaraaggcataaaagggaaccagcttttaccgaaagccgggcatttgacaaatgcttttcatatgtcttcacaaaggctatgcaggatcggtgttatcaaccccattttattgcttggaagtctaaggctcaaagagatcaccttcccatggaacttcctcaaacttgcagagcttctaagggacagagctgggatctgaacacaggactgtctggccccaaagcccaggctttttcaccgtgctccttagtgtctgctgggtggtggtggtgctcggccaccatcagcccatgaagctatagcccagcaactgccagtgagcgagctggagagggaaccagtagacgccatggatgctgccatgggctctgcatttgcaaatcaccagccttgatttctggcctcttcctggcctccccgtaccctctgcctgttcttctgggtcctgtcaaatctcacccctctctgaaggagatatcatggccaggcataggcc

SEQ ID NO: 674303 - DNA, 441 bp, Homo sapiens
tgaggtcatcttccatgggagtgaacctctatgcagcaagtctttttatgaatgaggttgtttaaaaatgtgattattgccacttgcggtggctcatgcctgttaacccagcgctttgggaggctgaggtaggaggattgtttgagccaggagttcgagaacagcctaggcaacaaaggccaaccctgtctctacaaaatattttaaaaattagccagggacaggtgtggtggctcacgcctgtaatcccagcactctgggaggccaaggccagcggattgcttgaacccaggagttcgagaacagcccagrcaacatgatgaaactccatctctacaaaaaattgcctgggcatggtgatgtgcctatagtcccagctgcttaggaggctgaggtgggagggtcactgagcccagggagtcgaggctacagtgagccgtg

SEQ ID NO: 674304 - DNA, 989 bp, Homo sapiens
cattaataagcattgagtcatggccacaatctacatagcaggacaactccaaaatctgaagtcttccctgttctatccaccttcacctcttccctccccccttccctcctgactagttcagcagcctgctggccagtctcactgcctccattgtctctacctgccttctaattcatcctgtacatttttatagctctaatcattttgtagcaggatttcattttgtrcatttattctttttcctaggaaatgaacttcttgaatgaaaaagctatatattatttaccttttaatttttgttctgtataacccagggcatagagaagggcaaagttccttagagttgccagcagtaactagggagttgggacctggataaaatgctgaagagggagaaagtgagatgacagagcagggagcccagtcaggagctctgccatatgttttcagtgatttgggataaggttcccaaagccctacatcttacatcttggagcccaggatagactggacattaaaagaatttatgttaaattaatgaataagtggaggagtgatttaccaatagaaactttcctatcaggggaattagtgtcattttctaaaatgcttgcacaataaataaatgctttcaataataaaggaagtattattattgaaacgcatttcatcttagaccaaaggggcccagtgtcttcagttggcaccctgagtatgcaagccttaccaaatccttgtaaccaacgtcttgtagtttcttgaaggctacacagaaacataactatcctgtgtgtcattcatttaacagaagtcaatatatttgctgatttggtgcaaagtataagtggaaggtaattgattcatgtttatttcttctcccaaaatttgcttctcaaaagggttttagttctgtcatcatgacatggccccttcctacttggtttccatcctcatctttgctacgcccccaaatacctacatctcagcca

SEQ ID NO: 674305 - DNA, 1125 bp, Homo sapiens
cagattcagatagcggtgccactgagtatgtgggctttgcagattatatttatgttgtatatgctatagtgtttattgtgggatttatgtgttaaaagaaatttaggataaatggattaagtgatttaaaaaatggaccataggaatagtacaggtgtcttcaaacactcaaaaacattcatgagggaaacacagaaaccatataaaatgttccagaggactagaaaaattaaagaaagttataaggaagggaattgtgtaatataaatagccttcagcaattagagcaatccagtaaagaaaatcatataaaaatatttacaaaaatgaagacaaggtgatttttaagtagccagaatattatgaaagcaggaaattaacatggcttaaaaaatttcccaacatattaaaggctgtaaaatacatataaaacaccaggataaaggtgacatagtgcctaatctctacttaaaccttttagaaattaaaacagaaagttaaacatgctgtcccagatattacrttctttcaggcaagaattatttatttccagtatatagcttattacccagcagaaagcagacacatcatagatatttcaaagtctaaatctaggtaaactggtaaatgctaagggagagaaaggagttaaggaagaattaaaatctggtactacgaatgacataagtgattgttttcttacactgtagcttcccaacgtgtgctctagagagtgcttctccaattttaacgggcaagtaatcaataagattattgtcaaaaattcagattctgattcaaaggcttgaaagtatgtatatctaaaaaacacccaagtgatgctgattattctgatccttggactacgttctgagaagtaaagcttggacaactaggattcagctaggcttttttcttaaaaaggtaaagtgagtcaaccaaatcatgatatattctgatttagtgcatccaaggaggggcataaaaacctacattttaaacacaaagtgattttctatgaattctaaaactagagaagcattggctcataaaaaagggctgggaggaagctttggaaatgggtttgcaaactataaacaagcttcttcacacagagtcccagga

SEQ ID NO: 674306 - DNA, 1125 bp, Homo sapiens
cagattcagatagcggtgccactgagtatgtgggctttgcagattatatttatgttgtatatgctatagtgtttattgtgggatttatgtgttaaaagaaatttaggataaatggattaagtgatttaaaaaatggaccataggaatagtacaggtgtcttcaaacactcaaaaacattcatgagggaaacacagaaaccatataaaatgttccagaggactagaaaaattaaagaaagttataaggaagggaattgtgtaatataaatagccttcagcaattagagcaatccagtaaagaaaatcatataaaaatatttacaaaaatgaagacaaggtgatttttaagtagccagaatattatgaaagcaggaaattaacatggcttaaaaaatttcccaacatattaaaggctgtaaaatacatataaaacaccaggataaaggtgacatagtgcctaatctctacttaaaccttttagaaattaaaacagaaagttaaacatgctgtcccagatattacgttctttcaggcaagaattatttatttccagtatatagcttattacccagcagaaagcagacacatcatagatatttcaaagtctaaatctaggtaaactggtaaatgctaagggagagaaaggagttaaggaagaattaaaatctggtactacgaatgacataagtgattgttttcttacactgtagcttcccaacgtgtgctctagagagtgcttctccaattttaacgggcaagtaatcaataagattattgtcaaaaattcagattctgattcaaaggcttgaaagtmtgtatatctaaaaaacacccaagtgatgctgattattctgatccttggactacgttctgagaagtaaagcttggacaactaggattcagctaggcttttttcttaaaaaggtaaagtgagtcaaccaaatcatgatatattctgatttagtgcatccaaggaggggcataaaaacctacattttaaacacaaagtgattttctatgaattctaaaactagagaagcattggctcataaaaaagggctgggaggaagctttggaaatgggtttgcaaactataaacaagcttcttcacacagagtcccagga

SEQ ID NO: 674307 - DNA, 1125 bp, Homo sapiens
cagattcagatagcggtgccactgagtatgtgggctttgcagattatatttatgttgtatatgctatagtgtttattgtgggatttatgtgttaaaagaaatttaggataaatggattaagtgatttaaaaaatggaccataggaatagtacaggtgtcttcaaacactcaaaaacattcatgagggaaacacagaaaccatataaaatgttccagaggactagaaaaattaaagaaagttataaggaagggaattgtgtaatataaatagccttcagcaattagagcaatccagtaaagaaaatcatataaaaatatttacaaaaatgaagacaaggtgatttttaagtagccagaatattatgaaagcaggaaattaacatggcttaaaaaatttcccaacatattaaaggctgtaaaatacatataaaacaccaggataaaggtgacatagtgcctaatctctacttaaaccttttagaaattaaaacagaaagttaaacatgctgtcccagatattacgttctttcaggcaagaattatttatttccagtatatagcttattacccagcagaaagcagacacatcatagatatttcaaagtctaaatctaggtaaactggtaaatgctaagggagagaaaggagttaaggaagaattaaaatctggtactacgaatgacataagtgattgttttcttacactgtagcttcccaacgtgtgctctagagagtgcttctccaattttaacgggcaagtaatcaataagattattgtcaaaaattcagattctgattcaaaggcttgaaagtatgtatatctaaaaaacacccaagtgatgctgattattctgatccttggactacgttctgagargtaaagcttggacaactaggattcagctaggcttttttcttaaaaaggtaaagtgagtcaaccaaatcatgatatattctgatttagtgcatccaaggaggggcataaaaacctacattttaaacacaaagtgattttctatgaattctaaaactagagaagcattggctcataaaaaagggctgggaggaagctttggaaatgggtttgcaaactataaacaagcttcttcacacagagtcccagga

SEQ ID NO: 674308 - DNA, 630 bp, Homo sapiens
tggagtaaatgcaaagtacaaaacaaatatccatgattccacacagatataaataaatcattgaataactaacttccyacaccatcagtgtaggctgtgcacagtaacttccacagagagcaatagggaaggggagaaataataattttacactacagaaatctgacaaacacgatctcagccaggtgatcacagttaacatcaagagtgatgtcatgttccaataataagtaatgagactgaagccgtaataaaaagcctcctatcaaagaaaagtccaggaccaaatggcttcactgtgaattctaccaaacttttaaagaagaacaaataccaattctactccaactattccaaaaaatagaggaggtgggaacacttccaaactcattctgtgaggccagtatcaccctgatactaaaaccagactaagacacatcaaaaaaagaaagctacaggtcaatgaacaataggatgtgttttacccagttatgtgcaatactaatcctcccctttgcagtatacaaatttcaattttttaatgtgcctaactacagtaaacattgcctttctatcacataaattcttctatccgtcagagggccactcagggaagttcttcactgggct

SEQ ID NO: 674309 - DNA, 630 bp, Homo sapiens
tggagtaaatgcaaagtacaaaacaaatatccatgattccacacagatataaataaatcattgaataactaacttcctacaccatcagtgtaggctgtgcacagtaacttccacagagagcaatagggaaggggagaaataataattttacactrcagaaatctgacaaacacgatctcagccaggtgatcacagttaacatcaagagtgatgtcatgttccaataataagtaatgagactgaagccgtaataaaaagcctcctatcaaagaaaagtccaggaccaaatggcttcactgtgaattctaccaaacttttaaagaagaacaaataccaattctactccaactattccaaaaaatagaggaggtgggaacacttccaaactcattctgtgaggccagtatcaccctgatactaaaaccagactaagacacatcaaaaaaagaaagctacaggtcaatgaacaataggatgtgttttacccagttatgtgcaatactaatcctcccctttgcagtatacaaatttcaattttttaatgtgcctaactacagtaaacattgcctttctatcacataaattcttctatccgtcagagggccactcagggaagttcttcactgggct

SEQ ID NO: 674310 - DNA, 630 bp, Homo sapiens
tggagtaaatgcaaagtacaaaacaaatatccatgattccacacagatataaataaatcattgaataactaacttcctacaccatcagtgtaggctgtgcacagtaacttccacagagagcaatagggaaggggagaaataataattttacactasagaaatctgacaaacacgatctcagccaggtgatcacagttaacatcaagagtgatgtcatgttccaataataagtaatgagactgaagccgtaataaaaagcctcctatcaaagaaaagtccaggaccaaatggcttcactgtgaattctaccaaacttttaaagaagaacaaataccaattctactccaactattccaaaaaatagaggaggtgggaacacttccaaactcattctgtgaggccagtatcaccctgatactaaaaccagactaagacacatcaaaaaaagaaagctacaggtcaatgaacaataggatgtgttttacccagttatgtgcaatactaatcctcccctttgcagtatacaaatttcaattttttaatgtgcctaactacagtaaacattgcctttctatcacataaattcttctatccgtcagagggccactcagggaagttcttcactgggct

SEQ ID NO: 674311 - DNA, 669 bp, Homo sapiens
tatgtaaataaatgttgacaaactgtatgatatatttcctttctggtaaaataaatttaaatatgcatagaaagaatacggaaggttatctaccaaaattttaccactaaattgttaaattgttaattttgttttgaatcattagggtcacttgcctaagtcaataaataaatgaataaggaagtaaactaatcaaggttagatcatcaaacatttaactacctaatttttaaattgtattattctttacatgtttttccccaatagcatgagcagaaaacttcattaatgaaaactattaatggaaagaccctagcatataaaaattcttgtaatttatttcaatggtmtttacaatgaagcaaatctaaaatgaaaaaaactccctcaaaacataaaattatgtcagcctctttatgtttcccctctctgccttttacctgggacctggtgcctattttctttagccgaatggtggcagcatttgaacactgttactcatggcctgctgggcatgtgccccgattaggcaaaaccagggttagtatgatgtcctcagataggcatggctaaatgagacctctatgctgagaccatatcaagaggctccatagtgcctttgtatgaaaatacctcaaagaagaaaataatatctacctttgattgcca

SEQ ID NO: 674312 - DNA, 669 bp, Homo sapiens
tatgtaaataaatgttgacaaactgtatgatatatttcctttctggtaaaataaatttaaatatgcatagaaagaatacggaaggttatctaccaaaattttaccactaaattgttaaattgttaattttgttttgaatcattagggtcacttgcctaagtcaataaataaatgaataaggaagtaaactaatcaaggttagatcatcaaacatttaactacctaatttttaaattgtattattctttacatgtttttccccaatagcatgagcagaaaacttcattaatgaaaactattaatggaaagaccctagcatataaaaattcttgtaatttatttcaatggtctttacaatgaagcaaatctaaaatgaaaaaaactccctcaaaacataaaattatrtcagcctctttatgtttcccctctctgccttttacctgggacctggtgcctattttctttagccgaatggtggcagcatttgaacactgttactcatggcctgctgggcatgtgccccgattaggcaaaaccagggttagtatgatgtcctcagataggcatggctaaatgagacctctatgctgagaccatatcaagaggctccatagtgcctttgtatgaaaatacctcaaagaagaaaataatatctacctttgattgcca

SEQ ID NO: 674313 - DNA, 669 bp, Homo sapiens
tatgtaaataaatgttgacaaactgtatgatatatttcctttctggtaaaataaatttaaatatgcatagaaagaatacggaaggttatctaccaaaattttaccactaaattgttaaattgttaattttgttttgaatcattagggtcacttgcctaagtcaataaataaatgaataaggaagtaaactaatcaaggttagatcatcaaacatttaactacctaatttttaaattgtattattctttacatgtttttccccaatagcatgagcagaaaacttcattaatgaaaactattaatggaaagaccctagcatataaaaattcttgtaatttatttcaatggtctttacaatgaagcaaatctaaaatgaaaaaaactccctcaaaacataaaattatgtcagcctytttatgtttcccctctctgccttttacctgggacctggtgcctattttctttagccgaatggtggcagcatttgaacactgttactcatggcctgctgggcatgtgccccgattaggcaaaaccagggttagtatgatgtcctcagataggcatggctaaatgagacctctatgctgagaccatatcaagaggctccatagtgcctttgtatgaaaatacctcaaagaagaaaataatatctacctttgattgcca

SEQ ID NO: 674314 - DNA, 628 bp, Homo sapiens
aatgcattttgccaaagcatattttcaccagataaaagaagccctttgcagcccaccagctgataacaaccagattttccatgttctagaacctagagatcagttcttttggaaacgacaccaaagaaagactgcctttgaactccatcagaaggtaccacaccaagctcttttttgcagcacaacttcagggatttgagtcttggatccacatttctcaactcaagagagcccctccagacccctgggactgtacacccatcggagatctccaggtaaagcttactaggaaygttttttttccccagaagaagatggcatccttgatgtagacagctttcccaagatcatgaataaagtcttttctcctctgtcaacatgaagtcttttctccttttcctttttggcccatgtttcttttctgtctacacatggcaatataatgtgataatgaagatttcatactcaattacttctgcatggaacttaactgagtattgcatatgtcatgttaaacctaaatcctcacatgatcttagagatactctggttcaccctgtaagaaatttcactgatattccatgtgcaatatctagttctttctaaacagctagacttttagattcaa

SEQ ID NO: 674315 - DNA, 602 bp, Homo sapiens
tggtgactgccagggatttgtaataatactttccctagattaagtaaacaatttgatacctcactctctagtttttattcatatcttctacaactaattatattaagagaatcaaaactagttctcaaaattactcaggtagcaataggaacattgtcrgtgatggttttgaaatttgctctctactgataatgtggatccataatcttgtatgagtaagatcactgtggtagatgcaaagtagccacaaattatttgcagctccactcatgataaataacactcatttctctgcttcttcagttataataatttgtgatttgttttcatcaataaaatgtggtaaaagtgatgttgagtaactttcaagcctaagattgagaggccttacagtttctgctctcgccctcttagaatacagacgccaagtgaacaaactccagtttgttgaggaagcattactagaaaaccaagtgacagccagacaaccagaaaacatgagaccatcctaggccatccagcttcagtctagtcatcacgtgactaaagctacatgagtgagcccagatgtaaccaataaacctgtccatctgagtccaatc

SEQ ID NO: 674316 - DNA, 602 bp, Homo sapiens
tggtgactgccagggatttgtaataatactttccctagattaagtaaacaatttgatacctcactctctagtttttattcatatcttctacaactaattatattaagagaatcaaaactagttctcaaaattactcaggtagcaataggaacattgtcggtgatggttttgaaatttgctctctactgataatgtggatccataatcttgtatgagtaagatcactgtggtagatgcaaagtagccacaaattatttgcagctccactcatgataaataacactcatttctctgcttcttcagttataataatttgtgatttgttttcatcaataaaatgtggtaaaagtgatgttgagtaactttcaagcctaagattgagaggccttacagtttctgctctcgccctcttagaatacagacgccaagtgaacaaactccagtttgttgaggaagcattactagaaaaccaagtgacagccagacaaccagaaaacatgagaccatcctaggccatccagcttcartctagtcatcacgtgactaaagctacatgagtgagcccagatgtaaccaataaacctgtccatctgagtccaatc

SEQ ID NO: 674317 - DNA, 602 bp, Homo sapiens
cctctaatcaatactctttaaattaatctatatataaactacagaattattgacaaattgagtgtaaaagtcatttgaaaatgttcacatgtaagtaaaaccagaatgcataacttgttatgacacatggtaaaataagaaaacttcaaaattctgtctgtacaaatgcataaaaattctgaataaaatatagtcaaaaattcatttttatacctgttaatcttggaaagacaaaaggaacacaatatctaggttccagaaacagagaaaagaaccagcaaattgaaaaccagagcataagtgcaggagttagttgatgcttccgtagctttgtggtaggcagtgtaaggaaasggaaagtattgttctggcaaccagctagatttggttttaatgtctaaattgggacaagatacaaggctttgttggattgtaagagtgaagtcaaagcaaagatccctacataagccagaatatctgaagaactccacattgcatgaaatatgagtttgaaaaaataaaatatctgcaggtacagcaagttgacaaacaaattttctacttctgtctgggttttgagggaaacaaaaaaggttctccaa

SEQ ID NO: 674318 - DNA, 1067 bp, Homo sapiens
aaaaaccaactgagtgcctactttctctgaatcagggcagactagatgtactgaatgagaataaatcttccactaattcatgaaattgtgcttcttcacccataaccagcagcaaaaattggcatggttattgttgagattctgccctggggcattgatkcaggaagtctgcaggttttctgaaaggtttacaaagtttccaccaagtttactgaacttcattgaatctatgcaccctgtctagcttttcccagacagttcttggttcctcatcttcgtggcctaaggatacaccagcttctgctgcccacattaactttataacaatctatttccacagaaagtctagccagagggattaacaaggagagacaatatttattcaatttctttcaagtctgctgcctaatttcttgccaactggatggttttgggtgtttggcatgtgggttaatgtgaagggacaaagcaggaatcccaatccagtcatgtatttataattcctgagaaaagggtttcctgaccctggttgcagagaactccctaaagagttttaaaatattattgctggcaagaccccatcagccaattaagtcagaatctctgagggtgtattctgggcactgagaattcttcagttctcaagatgattctaatttgcagccaaggttgagcataatggctttagttatttaagatgattttagagaccctgcaaggccccttagagatcatctgatccaatatgtgtaacagattaaagtagctttggttaacatggagaagggggtttctgatttttgtccttgtacgtgaatcaaggggaggactattctgattattgagtgaaagtgatttaattccacatgtgttattaccaaagtgagactataaatcacaaaatgtagtgatctgtctaaagttacacagcctgtaaaagaccagtcatgcctcctgacttcagttccagtgtttcatttttacatattgctttggccatgttaaaattaatcaagtggtacttatcgcttaaaatagcttctaacattataactatgaggaatttg

SEQ ID NO: 674319 - DNA, 1067 bp, Homo sapiens
aaaaaccaactgagtgcctactttctctgaatcagggcagactagatgtactgaatgagaataaatcttccactaattcatgaaattgtgcttcttcacccataaccagcagcaaaaattggcatggttattgttgagattctgccctggggcattgatgcaggaagtctgcaggttttctgaaaggtttacaaagtttccaccaagtttactgaacttcattgaatctatgcaccctgtctarcttttcccagacagttcttggttcctcatcttcgtggcctaaggatacaccagcttctgctgcccacattaactttataacaatctatttccacagaaagtctagccagagggattaacaaggagagacaatatttattcaatttctttcaagtctgctgcctaatttcttgccaactggatggttttgggtgtttggcatgtgggttaatgtgaagggacaaagcaggaatcccaatccagtcatgtatttataattcctgagaaaagggtttcctgaccctggttgcagagaactccctaaagagttttaaaatattattgctggcaagaccccatcagccaattaagtcagaatctctgagggtgtattctgggcactgagaattcttcagttctcaagatgattctaatttgcagccaaggttgagcataatggctttagttatttaagatgattttagagaccctgcaaggccccttagagatcatctgatccaatatgtgtaacagattaaagtagctttggttaacatggagaagggggtttctgatttttgtccttgtacgtgaatcaaggggaggactattctgattattgagtgaaagtgatttaattccacatgtgttattaccaaagtgagactataaatcacaaaatgtagtgatctgtctaaagttacacagcctgtaaaagaccagtcatgcctcctgacttcagttccagtgtttcatttttacatattgctttggccatgttaaaattaatcaagtggtacttatcgcttaaaatagcttctaacattataactatgaggaatttg

SEQ ID NO: 674320 - DNA, 1067 bp, Homo sapiens
aaaaaccaactgagtgcctactttctctgaatcagggcagactagatgtactgaatgagaataaatcttccactaattcatgaaattgtgcttcttcacccataaccagcagcaaaaattggcatggttattgttgagattctgccctggggcattgatgcaggaagtctgcaggttttctgaaaggtttacaaagtttccaccaagtttactgaacttcattgaatctatgcaccctgtctagcttttcccagacagttcttggttcctcatcttcgtggcctaaggatacaccagcttctgctgcccacattaactttataacaatctatttccacagaaagtctagccagagggattaacaaggagagacaatatttaytcaatttctttcaagtctgctgcctaatttcttgccaactggatggttttgggtgtttggcatgtgggttaatgtgaagggacaaagcaggaatcccaatccagtcatgtatttataattcctgagaaaagggtttcctgaccctggttgcagagaactccctaaagagttttaaaatattattgctggcaagaccccatcagccaattaagtcagaatctctgagggtgtattctgggcactgagaattcttcagttctcaagatgattctaatttgcagccaaggttgagcataatggctttagttatttaagatgattttagagaccctgcaaggccccttagagatcatctgatccaatatgtgtaacagattaaagtagctttggttaacatggagaagggggtttctgatttttgtccttgtacgtgaatcaaggggaggactattctgattattgagtgaaagtgatttaattccacatgtgttattaccaaagtgagactataaatcacaaaatgtagtgatctgtctaaagttacacagcctgtaaaagaccagtcatgcctcctgacttcagttccagtgtttcatttttacatattgctttggccatgttaaaattaatcaagtggtacttatcgcttaaaatagcttctaacattataactatgaggaatttg

SEQ ID NO: 674321 - DNA, 1320 bp, Homo sapiens
tctttcataaagttgctttactacaagtgttgagatttatcacagtataagccaagtgaaaatagctaactaaaattagagaattgtaaagagctcaattacgttcaagtgggagatggaattatttaatccaggcccctttgctgtcattcacttcaagtctatctataccagggtctcctcatgtgctccatgtttgctgcattgaactgaattgactttatggtcttagtcccaggggcatattgagctcactacctccatctattttcttgtccctttgcagctgactgttcttaagtttataattgtacttctttagtatcatagattgctctccttgacttaactttttggttttccacttkacaaactttccttcttttttctatgcaaaaatattggagtgcataccatgtgattggagctagagatagagagttgaatgaaattacacggtctctaccttcaaagggccctttatctgttatactgtccattgcagacgctgagaaatttactactgcttatcttcattcacttgtcactttactctctggaagagttgcgtgcttctgaactgtgagattttactctgcgcttctgcttcagatcatttatgagatgttagataaaaatgaccccagaattattcatgaaaaatcccactctttgccctttgccataaatagaagtaatcgattctctctaccagcaatttgctttttaaaagacacttattatctgatcaaatgactttttcttttccccagtctctttttgactcattgtttaaaacaacctttaatggaatttagcccaaaccttttcaatctacctttattcatatgtacccaagcttagatatgccactccactctcgacagccatagggaaatatttaattttctttacaatggcaaacataatacataaaaattgtgaaaagttaggaaaataaagatttaaaatagagaactatagtaacccataaccccagatgtttattcttttatccacaatccctcaaaggactaagtggatcatcccattgtgatcttaccaaacttctatttgtttggttgcttcaagactgtttttctttgttattgatcttaccagcttgcttagtgtggaattgtaggtgagacctacagttctatggttcataaaaatccttcaggaattgttttcatgtacaacacgagaaaatattcactcttcaagtcagggaagtgagggaactttacacatttgtgcttcagaattaactgggctatatatttaaattataaagatgtttataattgatttgtgagc

SEQ ID NO: 674322 - DNA, 639 bp, Homo sapiens
acatcaaatgattgaattgggatgtagaagatctaagggtggaattatgaatcaaacgtgacaagataaattataagaattttttttctgatcataacaataataagtatttattgtaaaaaactaggagccatattaaaaaaagttatatgccaggcctaatacacataattaaataacctaacttattgttttctagtaccttgaaacaataaattttaaaactgtatgtatatatatatatatatattttctgtgtattgttatacacacactttgtaacatattagaatattattttattgcactgttttcttaattatcatctttccaggttaataaatttatgtgtcattcagcatcatggtggctacaaagtattccactaggtagatatactataattaacaatggaytctggacaaacatttagtagtttgatatgtgttatcatgatcaagaatgttttgatgatacctgtgtgtattcatctctacatacttgcctgtatatatattcagtttctagaaatggaaatgcagggtcaaatggcaaactttttcaaaatctggtatacattgctaaatcagcaagataaaatttaacgaccatacctacaaaactccgagaacaagcaaa

SEQ ID NO: 674323 - DNA, 639 bp, Homo sapiens
acatcaaatgattgaattgggatgtagaagatctaagggtggaattatgaatcaaacgtgacaagataaattataagaattttttttctgatcataacaataataagtatttattgtaaaaaactaggagccatattaaaaaaagttatatgccaggcctaatacacataattaaataacctaacttattgttttctagtaccttgaaacaataaattttaaaactgtatgtatatatatatatatatattttctgtgtattgttatacacacactttgtaacatattagaatattattttattgcactgttttcttaattatcatctttccaggttaataaatttatgtgtcattcagcatcatggtggctacaaagtattccactaggtagatatactataattaacaatggactctggacaaacatttagtagtttgatatgtgttatcatgatcaagaatgttttgatgatacctgtgtgtattcatctctacatacttgcctgtatatatattcagtttctagaaatggaaatgyagggtcaaatggcaaactttttcaaaatctggtatacattgctaaatcagcaagataaaatttaacgaccatacctacaaaactccgagaacaagcaaa

SEQ ID NO: 674324 - DNA, 512 bp, Homo sapiens
tcacagtcccagaggctgggtaattgaagatctaggagccagcagattctgttgtatggtgaggattattctctacttttaggacagtgccttgaatgttgcttcctctggagttggaggaataccatgtcctcacatggcagtaggcagaagggcaaaagtgacaaactctccattaagcctttttctaagggcacttaatcccactcacaagggagaagtcctcgtagtttaatcacctcttaaaaacccacctcttaatactattacattggcagcatctacatttaggaggggtcacattcaaacaggtcacagtgtaacctgtcctggagaaatttttgtaagtgcttgagaagaatatgtattctgctgttgttggggcrttacatgtgtatcaacaaagatcaaaaccaagagttttattttttaaacaaaggagggacagacccagaaaaataattagattgaatttcagagaaaggtactttgaaaaaaattttaaaaaagaa

SEQ ID NO: 674325 - DNA, 460 bp, Homo sapiens
ccaaaaggcaattatatgtatttatcataaagtactcagtactccccacattcatttaatgaatacttattgaacactttgaacactcacgttaagaaatatacacgtatacctacatatatacctacaatatacacaatatattgatatttacaacctacaaaacaacacacaaacatattaataagcataatttttgctcttaaagttttactactggaaaattagtaaaaattatacaaactagaagattgcctcataataaataaatattttctgttakaaaatctgaatgtaaatggagttttcagaactaaaaatatttgaatggattttattttcagatacagcacatacaagggcattacgtgataaatgctaggaaagaggtctggggaaaatggtttagtagccactgaggaggtagtagttaattcaactgagagtattcaaggaataa

SEQ ID NO: 674326 - DNA, 1702 bp, Homo sapiens
cacctgggctggagtgcagtcgcataatctcggctcactgtgacctccgcctcctgggttcaggcgattctcctgcctcagctgcccaagtagctgggattacaggtgcccgccatcacgccccactaatttttctatttttagtagagacagggttcaccatgttggctgggctggtctcaaactcctgacctcaggtgatctgcctccgtcggcctcccaaagtgctgggactgcgaggtgagccaccacgcccggcctgagctcccttttgattgcaatttggcttactgcatattactttgacagtggtaagataggttagcagaaaacagaaatgtctaacttcttatcagttttagtttttgttgcagtttgttttccaactcactattattaagatgtgtcatgccttcctgctttttggcatacacgtatatggtggtcatcactatgttataattgtaaagttacaactcaaaatccagctttacaaagccagataaaatctgggtaaaaattgggtaaagtctggctttgtaaatttggtgaatttgagtcggttctgaggaatgtgttcatttctgttgggttgatcaaatacaatctctgaccaagtgtggtcaggaaacgggagttgggtcatcagtgtaattttaccagcacaggctctggcacaattacactggatatctctcctggtgtcattcatagatatttcatcaccatcacctatcagattttatatatttatttagataaaggaaataatgtgcataaagcagttataaagtgtgaggtacctcctaggtcctcaagaacagtgattttcactttccaggttgtcattctctaaatttattcttatttgaccatgcaccccaaggtatgggtacccagaaatgacaagacacttaggtgcctggcaatcacttcttcaatctagttactatatttccgttcatgaaatatatgatcccattagtttggttggagctacattacactattgattcatactgatttcactgccagggaaaacctgcaatctctccaacacacgctattcctaagtgatccaatctttcagagagttgtctttttagatttggggtcaaaaccttacatttatcagttttaaaagcttcttactggttttggcccttcactctttgttgtccaaatattatagattatttttctgctatacaaattatatactgtgccttcctgctttttggcatacacatatgtggtgattataactactttatagttttcaagttaccactttaactagttataactacagtgcacatgaatgaatttatgttctaaaggaatgtgctagaaccctcttaggctgacaccattgtatactgtctcttacgtggttttgaatccatacattttatcataaacttctacaattatatgtcttagtcaccaggagcttatgaataatgctttcatgaaaagcaacctactacatttatttgacctatttgtctaacattcttatttagcaagaggataagctgctatgatatagtcttaaaaatgtttgcataagtctcaggaacatcataaagcctgatctcatcatgtgcccgcactctttaactgttttttttttttcaatcccatttatggaaccaccatcagaaaaaaagtgtaaaaattacaraaattcctcctcaat

SEQ ID NO: 674327 - DNA, 646 bp, Homo sapiens
tgtgataggtcaaaggcctgtggtataggacaaaaatactgtgtgctacaccaatgtattatggaagatgaggacagtgatgatgatgatgatgattgataatgatgatgatatataagagatgggggaactatatttatggaaggcttagtaactttcagaaggttagagggctagaagatagcacagcagggattcaaaacatggtttcaatttctaaggtcagtgttcctagctgtaatactacactgtttttctttttttattttgttttagtgtgtaatgtagatgaagagcgaccaaaatagcaatagagtgaagatgacactaamttctagtctaaagactatgtagctaatcactttaaactaaatgggatatatatcgataagtattaactatgatcttggctattgatatggtttggctgtgtccctacccaaatctcatcttgaatttccacatgttgtgggagggacccagtgggaggtaattgaatcatggggtgtaggtctttcccgtgctgttctcatgatagggaataagtctcacgagatctgatggcttcgtaaggcagagtttccctgcacaagtgctctttgcctgctgctttccacaaaagacctgacttgttcctctttgcctt

SEQ ID NO: 674328 - DNA, 1596 bp, Homo sapiens
tgttcaggtacagtaacaaccatttgactacctttagccaccatgctgctctttgagtgaactatgtctttgctacatgaacaactaagatctgctttaatctttacttccttaaagagacctcaaccaaaggctcaccagaatgcaggatttatatcaagcatatttaacagccaatatggcacaggcatcaaccaatcaaaacaggtgctgagctataagcaatggttcagttgaaattgtgctcaccaactgactctcagccctgctggttgggatcaggtagtctctattcatccaagagacagtatccgatatctactgcaagacaaccagatagtcctctgggcaagtggctctcagtggaggctgattttgccttccaggggacattggcaatgtctgaagacatttttggttgtggtatctgctgggtagaggccagggatcctgctaactatcctacaagtctcagagcaacaacaacaaaaaattatctgtcccaaattttcctagtagtgaggttgggaaactctccttttggtgatacccttagcatgagcaatagcttcccatgctgtgaatcacagcaaacctttacaagatagtcttcatggcagagtcctatcagtttatcatcttgggggtgggccatcagttcacaataagaagccatttataaataccactgctcctgtggcttttttccacactaaactctactagtcaaacaataaaatggctaggcaccgataaaggtgttctgctgttgttttcttatatcagcagagcatgcatcaggtgaaaattatttatggtaacaacaataatgataggtagcttttatgaagttattattattatatgccaggcacttcttaaggagctttcaggctttatctcaatttttgcggaagctcgttagatgtcccatttttctgatgaggaaactgaggcctagagagttcagtgacctgctgaaartcactctgtctctactatgtgtgttctcagccactgtattgtccacgcacccctgatagcccactcttgtaggaatgttctgtgtcaaatgcaaacggaagagacctaattccaaggctgtgagattagggtatttcaaggcaggaatgggacgtctaaggaatgggcaaactgtttagaagtccaaaatgtcttcatatataatatatacgggttatatttatgcttcatagagtcaaagcttctgaagtgttcaagtgagctgaaatctcttatgcctttttctctcttaatgcagcaagaaagccttatctgtgatgaggattttcagatgaaagaactactgtggttaggcttggcccaggatggaacatcactcatgtggcacacccttctagaaatccaaagaaggggatggcttctgtcaaatcaaatccctgcagacattagctaaaccccacaaaacacattgatcaggtgagccacctccagtgccaccgagagccctacggtttacaggcaggtgttccctggttgagagagacacatgtgttttagtggaaatggccatggaagagagtcagaaatcttagtacaggccttgctacactt

SEQ ID NO: 674329 - DNA, 1596 bp, Homo sapiens
tgttcaggtacagtaacaaccatttgactacctttagccaccatgctgctctttgagtgaactatgtctttgctacatgaacaactaagatctgctttaatctttacttccttaaagagacctcaaccaaaggctcaccagaatgcaggatttatatcaagcatatttaacagccaatatggcacaggcatcaaccaatcaaaacaggtgctgagctataagcaatggttcagttgaaattgtgctcaccaactgactctcagccctgctggttgggatcaggtagtctctattcatccaagagacagtatccgatatctactgcaagacaaccagatagtcctctgggcaagtggctctcagtggaggctgattttgccttccaggggacattggcaatgtctgaagacatttttggttgtggtatctgctgggtagaggccagggatcctgctaactatcctacaagtctcagagcaacaacaacaaaaaattatctgtcccaaattttcctagtagtgaggttgggaaactctccttttggtgatacccttagcatgagcaatagcttcccatgctgtgaatcacagcaaacctttacaagatagtcttcatggcagagtcctatcagtttatcatcttgggggtgggccatcagttcacaataagaagccatttataaataccactgctcctgtggcttttttccacactaaactctactagtcaaacaataaaatggctaggcaccgataaaggtgttctgctgttgttttcttatatcagcagagcatgcatcaggtgaaaattatttatggtaacaacaataatgataggtagcttttatgaagttattattattatatgccaggcacttcttaaggagctttcaggctttatctcaatttttgcggaagctcgttagatgtcccatttttctgatgaggaaactgaggcctagagagttcagtgacctgctgaaagtcactctgtctctactatgtgtgttctcagccactgtattgtccacgcacccctgatagcccactcttgtaggaatgttctgtgtcaaatgcaaacggaagagacctaattccaaggctgtgagattagggtatttcaaggcaggaatgggacgtctaaggaatgggcaaactgtttagaagtccaaaatgtcttcatatataatatatacgggttatatttatgcttcatagagtcaaagcttctgaagtgttcragtgagctgaaatctcttatgcctttttctctcttaatgcagcaagaaagccttatctgtgatgaggattttcagatgaaagaactactgtggttaggcttggcccaggatggaacatcactcatgtggcacacccttctagaaatccaaagaaggggatggcttctgtcaaatcaaatccctgcagacattagctaaaccccacaaaacacattgatcaggtgagccacctccagtgccaccgagagccctacggtttacaggcaggtgttccctggttgagagagacacatgtgttttagtggaaatggccatggaagagagtcagaaatcttagtacaggccttgctacactt

SEQ ID NO: 674330 - DNA, 1596 bp, Homo sapiens
tgttcaggtacagtaacaaccatttgactacctttagccaccatgctgctctttgagtgaactatgtctttgctacatgaacaactaagatctgctttaatctttacttccttaaagagacctcaaccaaaggctcaccagaatgcaggatttatatcaagcatatttaacagccaatatggcacaggcatcaaccaatcaaaacaggtgctgagctataagcaatggttcagttgaaattgtgctcaccaactgactctcagccctgctggttgggatcaggtagtctctattcatccaagagacagtatccgatatctactgcaagacaaccagatagtcctctgggcaagtggctctcagtggaggctgattttgccttccaggggacattggcaatgtctgaagacatttttggttgtggtatctgctgggtagaggccagggatcctgctaactatcctacaagtctcagagcaacaacaacaaaaaattatctgtcccaaattttcctagtagtgaggttgggaaactctccttttggtgatacccttagcatgagcaatagcttcccatgctgtgaatcacagcaaacctttacaagatagtcttcatggcagagtcctatcagtttatcatcttgggggtgggccatcagttcacaataagaagccatttataaataccactgctcctgtggcttttttccacactaaactctactagtcaaacaataaaatggctaggcaccgataaaggtgttctgctgttgttttcttatatcagcagagcatgcatcaggtgaaaattatttatggtaacaacaataatgataggtagcttttatgaagttattattattatatgccaggcacttcttaaggagctttcaggctttatctcaatttttgcggaagctcgttagatgtcccatttttctgatgaggaaactgaggcctagagagttcagtgacctgctgaaagtcactctgtctctactatgtgtgttctcagccactgtattgtccacgcacccctgatagcccactcttgtaggaatgttctgtgtcaaatgcaaacggaagagacctaattccaaggctgtgagattagggtatttcaaggcaggaatgggacgtctaaggaatgggcaaactgtttagaagtccaaaatgtcttcatatataatatatacgggttatatttatgcttcatagagtcaaagcttctgaagtgttcaagtgagctgaaatctcttatgcctttttctstcttaatgcagcaagaaagccttatctgtgatgaggattttcagatgaaagaactactgtggttaggcttggcccaggatggaacatcactcatgtggcacacccttctagaaatccaaagaaggggatggcttctgtcaaatcaaatccctgcagacattagctaaaccccacaaaacacattgatcaggtgagccacctccagtgccaccgagagccctacggtttacaggcaggtgttccctggttgagagagacacatgtgttttagtggaaatggccatggaagagagtcagaaatcttagtacaggccttgctacactt

SEQ ID NO: 674331 - DNA, 1478 bp, Homo sapiens
atattgccattacaactgagtaaagaaatacatggagctccccttgaaatacttttcctgtcaaaatttatgtcttttctaaagggtgtgagcaagggggtgtttttcttcatacacactatgtgaatgtaatgagtaaatgttagctttgtgtctttttttggcccattaagaattatgcaccatggcaatctacaaacaagagactgaccaggtaggcagtgccaaaataagtttaatgaatcacagaaaaatggcaaattatttacaaaacataatttgggagctgaagttgctatatcacactttatgagagtacaatcactccctaagaaatggccagttcaaccgcatcagctgctatctctgatgactgggagccatggattcaccatttgcaacaaagcactccaatattttccaggagcaaaagcacttttcactggccgctccagagtagctcattgaagtaggagccaagcatgtaaatgacctcctgaaagaactggcagccttgaagaacactgagccccaaagcgcatgttgtttgctaggtgttcctccagcagaagcctgaggaggggaggccagcaagcagggaggcaggcaggccggcaggcaggcggaggtgggcggctgtctgcggcagagggtgaaatgtttatacagagcaagttaaaakgtggacaagagacaaatagcagtgtggggctgctctaaaagtgaatttgggaggtacctactctagtcccaagagaaaaagacggatgctaaagccagcatcatttcaacctaaaagcacatctcccatgtggggttaaagtcttcgcttcttcgcagaggtaggcacaggctctcctgccccagattcccctgggcacaaggagtgcagaaagttttccttggtagctaagttgtttttatgtgaaaccattttggccaaggtggggatttttcacttgggtgtcagtggtgcccttctgatgtttataaaacgtagcaaatgtacaatttgaacagttattttaggtaaaaatgtcaatttcttcatggagtcgggcactctcagctctgtgtttgagacaaattcttagattttccagtgttgtgaaaactttcaccttgcttcacatggttctcaagttgaattatgatcctgacatccccctgctctctgaggtgcactgatggaagtcaattaaaaataactaggagaagaaaatattattttctagctcatagggaggaggaggggagataacacggatccttccaagatggaatttcagctggcaaatgaccttattcacttctttccttcctacacttccccatgtctaaatgacccatgaaacttggtcgccttgctaggaataccacattgggactcactgcctcaacaccctgtttgtgccttaaacctgagcttcaaagctctctacacctcagtctctacctaccaatatgcttttacaacc

SEQ ID NO: 674332 - DNA, 685 bp, Homo sapiens
cgttctcttccataatacatgtgtgtttgttataagagaaaaatgagggttgttttccaaatatttgaataacattgactcttcacgaatatgtgccgtgcttatcccagcccatggttaacatcctttgggtatgtatacaacatgagaagggtgggaatacactttcatttatatgaacttcagcccacttcctaccttcataacatctcatctctcatgacaagcagtgaagggtggttctctgaagaagtaggaagaacaaacttgtgaatataaccttgtctccaattcacggatcctctagtcccatgagggcctttgatawgatccagcagatcaactcttggaagctgactactgggcatcaggaagtattgctctgagtcataagcacccttgacaacatccagtatcataagcaagccttcatacataagcagcaaagataaaacctttaagctctgctctaaaaacatttaagatagaaggaataatggccctatctgtaggaaggaaagtataggatattaaaggagcagttttacttttcaggtagatgaaagaaagggaaagtgctagccaaggaaggctaactgcccctcaagtttaataagaaagcccatcccaatttcacctggccattccccattttaagttcaggcctaataatactgtgtcttac

SEQ ID NO: 674333 - DNA, 685 bp, Homo sapiens
cgttctcttccataatacatgtgtgtttgttataagagaaaaatgagggttgttttccaaatatttgaataacattgactcttcacgaatatgtgccgtgcttatcccagcccatggttaacatcctttgggtatgtatacaacatgagaagggtgggaatacactttcatttatatgaacttcagcccacttcctaccttcataacatctcatctctcatgacaagcagtgaagggtggttctctgaagaagtaggaagaacaaacttgtgaatataaccttgtctccaattcacggatcctctagtcccatgagggcctttgatatgatccagcagatcaactcttggaagctgactactgggcatcaggaagtattgctctgagtcataagcacccttgacaacatccagtatcataagcaagccttcatacrtaagcagcaaagataaaacctttaagctctgctctaaaaacatttaagatagaaggaataatggccctatctgtaggaaggaaagtataggatattaaaggagcagttttacttttcaggtagatgaaagaaagggaaagtgctagccaaggaaggctaactgcccctcaagtttaataagaaagcccatcccaatttcacctggccattccccattttaagttcaggcctaataatactgtgtcttac

SEQ ID NO: 674334 - DNA, 661 bp, Homo sapiens
aagtatataaatgggtgtattggtttgtagcacgtaaagatactgtacaattttagacatgaattacattttctttctgcactgctgtaaacatgaactgtaatacaaacaataaaataagtattaaagattctaaaagtctaggatctaaagattttgtctaaattattccctggttggtagttgccctcagtacctggcagaaacaaattctaggacccatgaaagactaaaccatcagggaaattgtgggaagatgagctgataatgcataacacattttaaacgaggaaagcacgaaacaaatctgtcttgtcagaacagctgaaggtcgggctgtaacacacaatacattttactgctgaaactcaagcaaacataaatgtttttgctggcacatgcatacattcatatcatacttataatattgttttcatttagataatgaatttaggtaaaacaacttacatcatattattattaaatgtgaaaattctgataatgagctttggggttccaagaaatamccatataataaacaattttgtgcacacaaacacacaacaaaatgtattagttaacatttcagcaagttttgtgtttttaaaatttatattgaaattacacaaaataatatttgtattatatagttaagatataa

SEQ ID NO: 674335 - DNA, 648 bp, Homo sapiens
catctattttgtatctgtctttgctgttcactttaatttctgtttttggtgaatactctcctgtatttcagacatcctcacaaactaccttaaaatattgctagaaggaagagaggaaaaaaaatagaataaacacaccaacatatgtatagccaaaaggactcaaattaaagggagcacttctagttaaagagacatctaaaaagtgtttttttgagggctggggctgggcttaggtacagttcagtaggggagcttgttgacctccgaagcatcttcctgaactgggattctattgactgtacttgcctgtttaccaaaagacatgcacactgtgtttcttaatcaacaaaaagtattataatagrcatcccttgagctaaggcataccttaatcaacaaaattattaattgatgcatacattattatgttaatttattataataaagaagaattggggatgggaatgacgtggtttaatacaacaacataaccatgcaaatctctgcttctggtgatcattttcaaagacatgttgcaaaaatagggccattgcctataagccaaagctgtgtttcatcatgtcccatgacttaccatgtgtgcctggaaaaatgcgggaatgaaggactggttgcataggttga

SEQ ID NO: 674336 - DNA, 637 bp, Homo sapiens
tgttggaagcaaagggacttctgcctggctttcttgttgggartctcagagcagaccacttcacagaatattctcatacctgcctggggcagctaactcaggataaaaatggtatgcttacgctgaaagggaatcagtacttgaggatctctcagttcctgtgtggctggagaaggacacaggcattacacatggatacatggcacccttcctcccactcatggttctggaaggtagttgggttgagaacagtgaacttgccatgggtctgcaacagggctgccatagcaaaaggccaggcaaccatacctcaatggctatgaagggagaagagagattagcttcacactgtccaacggaaatacaatgcaaaacacaaataggtgacattaattttaacaacatagtgcatttaacccaacatgtcagaaatattatttcaacatgtaatcaatagtattttacacttacagcacatctcagtgtgctcagtagcttcatgggggaagcacaggtctagctctagggagaatggagtcagtggaagccaagtcagtgttggctctgctggagctgaaaggacaagccatcagtgttcccacaatacctcagtggaaatgggcgccacgggtaagtg

SEQ ID NO: 674337 - DNA, 637 bp, Homo sapiens
tgttggaagcaaagggacttctgcctggctttcttgttgggaatctcagagcagaccacttcacagaatattctcatacctgcctggggcagctaactcaggataaaaatggtatgcttacgctgaaagggaatcagtacttgaggatctctcagttcctgtgtggctggagaaggacmcaggcattacacatggatacatggcacccttcctcccactcatggttctggaaggtagttgggttgagaacagtgaacttgccatgggtctgcaacagggctgccatagcaaaaggccaggcaaccatacctcaatggctatgaagggagaagagagattagcttcacactgtccaacggaaatacaatgcaaaacacaaataggtgacattaattttaacaacatagtgcatttaacccaacatgtcagaaatattatttcaacatgtaatcaatagtattttacacttacagcacatctcagtgtgctcagtagcttcatgggggaagcacaggtctagctctagggagaatggagtcagtggaagccaagtcagtgttggctctgctggagctgaaaggacaagccatcagtgttcccacaatacctcagtggaaatgggcgccacgggtaagtg

SEQ ID NO: 674338 - DNA, 637 bp, Homo sapiens
tgttggaagcaaagggacttctgcctggctttcttgttgggaatctcagagcagaccacttcacagaatattctcatacctgcctggggcagctaactcaggataaaaatggtatgcttacgctgaaagggaatcagtacttgaggatctctcagttcctgtgtggctggagaaggacacaggcattacacatggatacatggcacccttcctcccactcatggttctggaaggtagttgggttgagaacagtgaacttgccatgggtctgcaacagggctgccatagcaaaaggccaggcaaccatacctcaatggctatgaagggagaagagagattarcttcacactgtccaacggaaatacaatgcaaaacacaaataggtgacattaattttaacaacatagtgcatttaacccaacatgtcagaaatattatttcaacatgtaatcaatagtattttacacttacagcacatctcagtgtgctcagtagcttcatgggggaagcacaggtctagctctagggagaatggagtcagtggaagccaagtcagtgttggctctgctggagctgaaaggacaagccatcagtgttcccacaatacctcagtggaaatgggcgccacgggtaagtg

SEQ ID NO: 674339 - DNA, 624 bp, Homo sapiens
tctaagctgggtgcagtggtacactcctgtactcctgtagtcccagttacctggaggctagggtagaaggatcaattgagtccagggatttgagactgcagtgaactatgatcatactactgcacttcagcctgggtgacagactgagaccctgtctaaaaaaaaaaaaacccaaaaaacaaaaaaaaacaaaacaaaaaaacccatatatacccacaaacagcacaataaacaagttcagcagtgtgttaggatataagatcataatacagaaatccaaaagtatttctatatattaacaatgaaaaatgtaaaaagaaattaaaattataattccacatacaatracattaaaaataacatacccagaagtaactttaataaaaggagtaaaatatctttcatattgaaaactataaaacgttgaaagaaattaaagaagactacgtaagtggaaaggcattttacagatttgaaaagtaaatattgttaaatggaaatgctccttaaattgatctacagattcaacacaattcttatcacagtggaatttttaaattgacaggctattcctcaaatacatatggaaatgtaaaggattcagaatagcctaaacaatcttga

SEQ ID NO: 674340 - DNA, 548 bp, Homo sapiens
gctcactgccatctctgaccctttgcactaatttcctatcttcctggaactctcttcccacaattgtagtgtgatgtttatttttcatagttsaaacagctcaaaggtcacttcctgagacaggctttccctgactctcctagaacttaccatccgtgtttctcttaagcttgttacattgttttcctcataactgtactatctaacgttaaactttaacatttcttgactttttttaaatctcattctactacaatataaactgcagcacagtaggtggcagagtgtctgtctgcttcattgctgtactctcaacatctgtattagtgcctcgtacataataggtgctcaataagtatttttttaattaatgaagggacaaatgtaaggtaactggaggttaaaaaaattacagaaatccttacctgtgttactgagtagcaatactatttattatgtatgtattttaaaggcattaacattttttatttttcaggattaattggaattcttcaaaatgtcaggtaagtttttgtgaataaatttga

SEQ ID NO: 674341 - DNA, 1482 bp, Homo sapiens
ttgtattcctggttttccttcttcttttgcactgatatcccccttggtgtgtattttaaagttctgagagctaaatggagcaaaaggtgagtgtttcgatgttctcataacaatgaaaaggcttgaaaaacatagaaaatgaacaataagtaaatgtaaataactaagtcatacttttgccctttcttgttgtcaagataactgatttcctgattgatttttgtctatgctattcaagacccaaatgacggcagaagtttattcatttctttctctcttcttttatggatataaaacactggaaaattattattaggtcttatactggaccaggttgtcactagttaaagtcaatgaaagagaagcaattggatattctggcccagatggggagctgattaatttatttaattaaccaagaaaagatatacatttaaattctagwtattatcaataataattttgcaaacagactctccttcttaccccaaacccatgtcaggaacgtcttcattaaggtccagtccctttatggaatccatgaactaactgcacaggctgttctgtttaatccaacatcagcaatggaggcagttccctgctgtagagagaagtcgtcaggctctggagagagttcctccaatcacttcaatgtcttacttatcttctttgtgcttcggtagtaaagaggcacactcaaaatacctatttctcatggttgttgctttaaatgagattatgtctataaaccacttagatacaaaagtgtttgctagaataatcattgatagtatctttttgattggcccaaagtcttttttcagaaagagccatcccatttccctttatttgcagcaacagagtctatcagatataactatttctcagtttaaagggtgacttcagggtagtcttggagccaatttggtaaatctcacagagtctgtgttttcctggtctgcactttgttaattagtcattcgcgtttttagaactaccgtacaccctgtatatggagaaaccatatttaaagaattgaagtaaaataaaacattcagcactgaaactgtagtgagcacattcttttgatggctcagatgccgtttcaggattctgtggtcccttgtcctccccactcctgaatgtggtatatgattggatctctctatatataagaagtatatattatatccaattctttttctaaaataatgatgttcacagggctcatgaattcattgctgcacaggaaggatgttgcctataaactgactaaatcacttccaaccataaatgtattattatatttcaaagaagtatgtagctaatcttgtgacaaatgaaatgcaaattcatttaaaagcgctcctgaattaaacatgactccttggcattagaattcttcaaccaaaaagaacactaaattaattactgccatttttggttttgttaggtgagacaccctttctattaaacgaaggt

SEQ ID NO: 674342 - DNA, 1529 bp, Homo sapiens
gactctctggaatcctcttgtttaatttattaattgaaccaacacttattgagtctctcctcaataagtcctgtcatgtcctggggagatgagatgaatatgatatagtcctagtcattgagatattcactgttaatagtggataaggacatggaaatttttttttaaatgcaattcagtccattgactattatagcaaaaacatgcacagagaactgtgacagtgactatgcaaaggaaagaagaagggacattgaagaatgggtaggagtttgccaggcaggaattttgaacagacagagcagcgcaggcaaatgcagagaggcttgaaaatgcatgagagattcaggagaaagggaatatagttgagtttggctgaaatacagaatggagacaaagtgacagagacaaatctaaaaaggctagacagggtcaggttgtaaatggcattgtgtattgtgctaaggagtttggactctgcccagttgtcactaagatggaagggagttcacttgattttgcatcttttgtgaagaaaaacttacaagctacacagttatttactttgaactggctaataatttattcataagaacttttttacttatttatttcattaaaaattggaatttgccatttatacactttctgtttytctccatttattgtatgtgtatgtgtgtgtcacatacatatgtgtgtatgtgtgtgtcacatacatatgtgtgtatgtgtgtgtcacatacatgtgtatatgtgtgtgtcacatacatgtgtatatgtgtgtgtgtgatatacacatgtacgtatcttaatatcgtctatttccttttcttgttacatttcctgtgtgctgagctggggtatttattcttctgaatgatgcaatgggttaccaagataatatatcaggaaggaaatctttcaagatataaggacattgacactaccttttgtttcagtttgattaaacagatggaattccacgcaagtggaaagttgtgaaggcggaccctatagtatatacaacatcagtgaacaaaagcagtgggaagtcactgaaaggaaaggcagcagaacggtttctagcatctcactctttaccacggcactctgctgctttaggacttattgttcaaaatccaggttttatatcaataacaaaaagtgatgtttttacttgtgaaatgctaaaactcctaaccatcagagaaaggagtgggtgattgcctggaaaacgactcatacattcctcgaacatttttctcaaaaagtaattattttgtgaacatgtagagggcactggcaactacagtaaatgtgggagtgttttctgaataaaaactgaaatttttgataaggattattcttcattttgtatatagatgctttggagatgtcaaaaatcaaccagaattttgagcgtagtattttagaaagtttggcatgacctaattttagttaactggaaatattcctaattaaagatgaatatatttgatgtgacagaatgcctttaaggattttaa

SEQ ID NO: 674343 - DNA, 434 bp, Homo sapiens
tttttttagatggaaccttgctctgtcgcccaggctggagtgcggtggggcaatcttggctcactgcaatctctgcctcccaggttcaagcgattctcctgcttcagcctcctgagtagctgggattataggcacctgccaccacgcctgactaatttttgtaattttagtagagatggggcttcaccatgttgaccaggctggtctcgaactcctgaccttgcaatctgcctgcctcagcctcccaaagtgctaggattataggcatgagccaccacaccyggccgctaatttctactcatcctttgagactcagataaggcgtttctttggtagtagccaacctccaagatggccccagtgattcccacctcttggttttcatgctcctgtataggcccatgttgaatagggcagacttgtgtaatcagtaa

SEQ ID NO: 674344 - DNA, 637 bp, Homo sapiens
aggtagcagacataaaaaatagaagtgtaaagctcagggatgaatgaaagagttggtttaaagtatatagactatttaaatgccatattcttttatcaaactgaagaatctaggcaattacctcctcttcatctcacagagttgaggaatttttgctgaaaattttaacctgagagatctagacttataacacagaagataagaagatcaagagctaacaaaaatatgcatagtaaacagtgggggtaaccagctcccatttcacctttatgccaagagccaggtctcacctctcagaccaaagagttgataattcttctctagagagactgaccacttacaagaggatcttacagacactggatcttggaatctcccaaaagaaaagctgttcatacctgatcacccttcagagggagtcaccagagttcccttctccaatggaaaatattccaatgagctttttattgcttgacytaaatacgagtgggcaacaaggatcactagacacttaagcaaaaccttcattatgaagaaactaaaacaagcagaaaagaaagaaacataggtaagacagacaatacagaaggcagaaaaagattttagaataagcatattaatttctcagagagatata

SEQ ID NO: 674345 - DNA, 610 bp, Homo sapiens
cattaactatcacctggtacaagttatcttatctcaagattcatttctatcatctgtaagaatggtactcataatagcagcatcacacaataattaagaatgtcatctcaggagtcacagggcctttgttaaaatctcctctctaccattcaccaattcaatagctgagcaaataatgaaacctctcaaagaatcagtttcctcatctaaaatggagagaacaacagtaccgatagaaacattgggaaataaatgtaatcacagatttggctcagaataagaattcactaaacctcaggtgttaatattctattcaccaagtggatccaactctaccatgtactaacaaaaattgcattacttactgaagatactctgagaatgtaggttgatgtttcatgttacataccrcacagcaaaagctttgtcagattgcgtattttggggcttccttcttctccattaaggtcttttctctacaagctacttgtttcctctctatccctccacagaccccaaaatcatcccatgaattgattattgtaattagttcttaccctttatttcaataccctaatcagccacatacaatcccggggtcaccattgca

SEQ ID NO: 674346 - DNA, 663 bp, Homo sapiens
gccatgtgcaatacttttataccgctggcagtgcagtaggtttgtttataccagccttgccacaaacacctgagtaatatgttgtgttatgatgttacaatggctacaacttgactaggctacagacttcagctctatggtgatcttacggaactactgtaatatatgcggtctgtggttgaccaaaacgtctttatatagctcatgactgtatagtacctaggactttttcccaggcaaaacctagaatagtcttgaggcaaattgaagaacacatttgacttgctaaggccaaatgcagtgtgatcaattgttcattcaaatggttttgttactcttcctgattttgatagtactaacttgccttttttcttggtcactgtcagtgacaagaatgaaaaaaggagtgggaacaaaatggaaaagaaaagattgccccaaggcaaaagagacttgttaccagggaatatacaaatgtccattaaactcaatattagtttagatatggccataatattattttctcagcctactatccatttttctgtggttgtttgagayatacttggttttttgagctacagaaggtttcagttgttttagacaaggtaaatgcaggttgctgaggagttattgattaaaactgggcttgtgagcatcttg

SEQ ID NO: 674347 - DNA, 1201 bp, Homo sapiens
taacaccaaattttgcttataaaggcattttccaaccacttcatttccagtagtgggaatagtctgagggtgaaattagacccggggtgcatacttttctttctttctatttttttctttcctttttggtattaggaagtatttcctggaaaactaggccttgctttccaaatgctcacctgagaatgcaaccctaaatgttaccttccttagactaacccctggaagcaacaacaccaaggctctgcccctggacaagcaggcttaacacccccacccccgccccgaccaaggaatgtagtctacccttctggccatcttggccctttttgctctttctgtctgcctagacatcttgtcctccaaccaccagttagaaacacaactacttctcatcctttcgacctttttcactctcaaggcagccttccctgacccactatatcagtgttccccaaatgtggcctgtggaccacccatatcagaattacccagggcctagggacctgaattttaacaaactcccatgaaattcatatacacatgaaagttggagaacgtctgctctatactgagttcagtctcacactccacccttccatagtccctgtctaaccctgcatcatactggtaatgacctttttaatgtctatcttctacatcagaacataaactctctcagtacagggacatagttgggttttcaaagcttggcagtctctggcttacagttggtgctcaataaatatttattgacccaaattacagcaaataaattttgcagagctattttttaaaagaaatcctgtgtttcaggaactaatctcactccactttttaaagaaggcaataaagcaatcaaaagatgtttctatgaggaatttaaccaaaaactagtacccacagaatgtcacatgcctctccatattgaatctgactccatatctatttggtttgacctgtgtgatcacatcaatgttgtgaatagcaacagaggcattatcagtgattaaaattaatttcttcccagaagatgagtgttatggtgtaatgttttttgaaatgtttttaagaacaaagcttaagatgcaaagaattttcctatcaagatacagctaaagagagatagtgacrcataaggaaattccttttaagagccaactcccttcttctcatgtgtgaggagaacctagctatcagg

SEQ ID NO: 674348 - DNA, 308 bp, Homo sapiens
ttgggatgcaatctgtcagcatcttaaaaactccattagtacatatagatacatatatattttacctgactcatcatgtctaaaatgcttagagtttaagtcaggatggtgtttctccctcagctatattactaacatgtaacatttgtcttttggaaaaccccatcagccttttggggtcactgtttgacttgtattatagtgaattatttatgaatctggatcctgcaacaaattgggaagcaccaattwtctatgtttacgtttgtttacctgtttgttcttaaaaattcccatagtatgtgggg

SEQ ID NO: 674349 - DNA, 308 bp, Homo sapiens
ttgggatgcaatctgtcagcatcttaaaaactccattagtacatatagatacatatatattttacctgactcatcatgtctaaaatgcttagagtttaagtcaggatggtgtttctccctcagctatattactaacatgtaacatttgtcttttggaaaaccccatcagccttttggggtcactgtttgacttgtattatagtgaattatttatgaatctggatcctgcaacaaattgggaagcaccaattttctatgtttacgtttstttacctgtttgttcttaaaaattcccatagtatgtgggg

SEQ ID NO: 674350 - DNA, 601 bp, Homo sapiens
taataaaatttaaaatacatgtattttttaaaaagttttcaggctttggttttatgcctggaaaatgcatctcatacctccagtatgaaaatattcatgtatatggcaaaaattatcactgaaaattacagaattagtgaggatgcagagaaatgggcagtctctttttttgttggtgaagatattaaccaatgctagaggacagtttagtaatgcattttacttttgcagttccactataattaattgatcctaaggaaataatcatgtaagtgtacaaacatgtgtacatatgcatgtgcatataaagacagttattgtggcattgtttagtaagaagaaagttccaaattcccaactgtccatcaataagtgattgagtcaataaattatgcatatactgaagtgcaacgttgttgtcaaaagataatgtagatctatatttattaacatggtaaatgactattacaatgktaagtgaaaagaatagaatacaaaacagcaagtaacttctcctttcagtctggaaagagaaagacaaagagaaagaaaaagagaaagataaacaggactgtatggaaatataatatttcctaagtta

SEQ ID NO: 674351 - DNA, 605 bp, Homo sapiens
taggtccaacaagcagtttagaggaaataaaaaggcaggtaaacatgttasacaccactaatctagaatgtggaaagttctactgcacaaaagaacataagaaatgtgctagaagagaaaattattatagatgaaaacaattaaaagttttattgttatagatttaaagtgtcctaagatacttatagattaaaagtatcatattaagctaatgctatctgtggaccttgttttgatgctgatttgaacagtttttttaaatcgtgaaaaatagggaaatgcaaactgactggatattatatgatacgacagaactatagttcacttttaaggtatgatataatatgattgcttcttaaaattatctcttagatatatatagtgaactatttacgactggaattttaaaaattacagatgcaaaggccctgtttttaggaacaggaaaagaggccagtgtggagtgaatgagggacacagaggaaatgagctcagaaaggcagtgggggtgtgggataattaggggatgataggacttttaatgagataggacatcatcagagtgtcataaaaccccaaattcaggctcgtgtacccgacgtgca

SEQ ID NO: 674352 - DNA, 637 bp, Homo sapiens
tttaaaaaaagtttcaactttaattttaaattcagggttacatgtgcaggtttattacatgggtatgttgtgtgatgctgagatttcagatacatgcttaatttaactgatattcatattttattccagrgattgataaaataaatctggcccctccgtttttgtacaacctattgagagacaggactagctggatttcctaggccgactaagaatccctaagcctagctgggaagatgaccgcatccacctttaaacacggggcttgcaacttaactcacacccaaccaatcaggtagtaaagagagctcactaaaatgctaattaggcaaaaacaggaggtaaagaaatagccaatcatctattgcctgagagcacagcaggagggacaatgatagggatataaacctaggcattggagccggcaacggctaccctctttgggtcccctccctttgtatgggagctctgttttcactctattaaatcttgcagctgcacactcttctggtccgtgtttgttactcgagctgagctttcgctggccctccgccactgctgtttgctgctgtcacagacccgctgctgacttccatccctccggatccggcagggtgtctgctgtgctcctgatcca

SEQ ID NO: 674353 - DNA, 637 bp, Homo sapiens
tttaaaaaaagtttcaactttaattttaaattcagggttacatgtgcaggtttattacatgggtatgttgtgtgatgctgagatttcagatacatgcttaatttaactgatattcatattttattccagagattgayaaaataaatctggcccctccgtttttgtacaacctattgagagacaggactagctggatttcctaggccgactaagaatccctaagcctagctgggaagatgaccgcatccacctttaaacacggggcttgcaacttaactcacacccaaccaatcaggtagtaaagagagctcactaaaatgctaattaggcaaaaacaggaggtaaagaaatagccaatcatctattgcctgagagcacagcaggagggacaatgatagggatataaacctaggcattggagccggcaacggctaccctctttgggtcccctccctttgtatgggagctctgttttcactctattaaatcttgcagctgcacactcttctggtccgtgtttgttactcgagctgagctttcgctggccctccgccactgctgtttgctgctgtcacagacccgctgctgacttccatccctccggatccggcagggtgtctgctgtgctcctgatcca

SEQ ID NO: 674354 - DNA, 637 bp, Homo sapiens
tttaaaaaaagtttcaactttaattttaaattcagggttacatgtgcaggtttattacatgggtatgttgtgtgatgctgagatttcagatacatgcttaatttaactgatattcatattttattccagagattgataaaataaatctggcccctccrtttttgtacaacctattgagagacaggactagctggatttcctaggccgactaagaatccctaagcctagctgggaagatgaccgcatccacctttaaacacggggcttgcaacttaactcacacccaaccaatcaggtagtaaagagagctcactaaaatgctaattaggcaaaaacaggaggtaaagaaatagccaatcatctattgcctgagagcacagcaggagggacaatgatagggatataaacctaggcattggagccggcaacggctaccctctttgggtcccctccctttgtatgggagctctgttttcactctattaaatcttgcagctgcacactcttctggtccgtgtttgttactcgagctgagctttcgctggccctccgccactgctgtttgctgctgtcacagacccgctgctgacttccatccctccggatccggcagggtgtctgctgtgctcctgatcca

SEQ ID NO: 674355 - DNA, 637 bp, Homo sapiens
tttaaaaaaagtttcaactttaattttaaattcagggttacatgtgcaggtttattacatgggtatgttgtgtgatgctgagatttcagatacatgcttaatttaactgatattcatattttattccagagattgataaaataaatctggcccctccgtttttgtacaacctattgagagacaggactagctggatttcctaggccgactaagaatccctaagcctagctgggaagatgaccgcatccacctttaaacacggggcttgcaacttaactcacacccaaccaatcaggtagtaaagagagctcactaaaatgctaattaggcaaaaacaggaggtaaagaaatagccaatcatctattgcctgagagcacagcaggagggacaatgatagggatataaacctaggcattggagccggcaacggctaccctctttgggtcccctccctttgtatgggagctctgttttcactctattaaatcttgcagctgcacastcttctggtccgtgtttgttactcgagctgagctttcgctggccctccgccactgctgtttgctgctgtcacagacccgctgctgacttccatccctccggatccggcagggtgtctgctgtgctcctgatcca

SEQ ID NO: 674356 - DNA, 2601 bp, Homo sapiens
tgcatattttgtctaaatattgataaagctttagaatataagagctggagtgaacctaagaggttttgtagcccggcaatttccaacccaggatgtgtctcagaatcacatagagaggtttcagattcccagccaggcacagtggaatgtggctgtagtcctggtgactgggaaggctgaggcaggaggatcactggacccccagagtttgacgccagcctggggcaacatggtgagacccctgtctctaaaaaataaaaagtaagtagaaaatacaaatcacagattcctgggccttttccttcccctgccttccccaagtgattctaattctatgtcagttttggctgcttgcaaccagttatggagaccagggatcttgatcaatctcttcatctatctgatgaggaatctgagacccagagaagtaagaggtacagtgatttctctaaggttacacagtgtatgagtccatttgcacactgctgataaatacatacccaagattgggaagaaaaagaggtttaatggactcacagttccatgtggctggagaggcctcacaatcatggcagaaggcaaggaggagcaagtcacatcttacatggtggcagagaagagagagcttatgcagggaaactccccttttcaaaaccatcagatctcttgagacttattcactatcatgagaatagcacaggaaagacaagccccctgattcaattacctccctctgggtctctcccacatgtgggaattgtgggagatacaattcaagaggaggtttgggtgggggtacagccaaaccatatcccacaggaatatgttacaagtgaagatagtctatggacactgtaaaattgaccccattagctatatcccaaactagttcattattttagaatctattttgtgtgtttgcatgcatacagcaatgcttcacatatctgcacaccacttatgtggcattccaaatatggttaagaacaaacaaagtgaaaaagacctgcaagcagccaaaattggtactaaataaaccacacataatcctccaagtctttttaaaagcctcttctcttgcttctctatctagtgaggcataggtgactcaaaatctttatctccaagcccggcccttctgctgcactatagtgtcgtgtctccaaaagcctagtggaccactcacagatacccagtcggcaccttcactcagtgtgttcaaaattaaacgtgtgctttccccctcccaacccctctcctgctttgctgctctgtttatgactctactaaggttcaaaatcatagagatgtgtgtggtgtcttccctctcccttgcctccccaaatataatggattatttctccgcccacatttcataatccagtttgccatctctgttcattccctctgcccctgccctagttagtgccttcatgccctttcacctggactattgtaatagtctcctgcctgatcttgtgtcctctggtctctccctactccaatccattttactcactgttgccagattaatcttcctgaggcacagctctgattatgttactctcctactaaaaactttcaatagctccccactgtctcctgaataaagtccaaattccttgccctaataatcaagtcctttcactttctggtcccaatatacttttaccgctttatttcccactacttatcttcacacattccatgctcaagttaaactcaattacttctttgcagaatctttaccctttgattcttccatgcttttctcatgatagagtaatgttctttccttctatctctgtatgctcaaatcctgcttgtttttcaaagcccaaatccagtgtcatcttttctgatgaagccctcagttagccctcctctgagctccaagaataccttatctgtactacttttatagagcatttcacttttcactattaattctagcaaagtagacacatgtctcagctccgttgctagattaaaacttctagggcaagacatgtcttatctgtgtatcctctccagtgccaagtatacaagtgcacgactcacaatatttgtcaagtgaatgagttcatgtatgtactttacacacaatcaaaacatgtttttttgttttattgtctaaagaagattagaaataatgcatcagagaaggaatgaggatcttagagacttgcacaacagaaagtaacttaatagctaaagaagaaaaataaaaactacgaaaagaaggcatgagaactaaagatatagcagtcagagggtaaagaaacacagaagcaaataatcttatagaataaggaccaaatggttaattgagaagyttggaaaccataaaataacattcaaatatgtagcattatttttatacttccacaccctcatcaatagaaacaaatttgaattgtagttcaagataacaaccctgaatcatttagaaaagtttgaattatggtaagtatattcttttttttgagatggagtcttactctgtgaggctaggtaaataagctgcctttattaatgaagaaattcatatttttctgaatattagagaaatattaatttttcccaattaagatatgttca

SEQ ID NO: 674357 - DNA, 2601 bp, Homo sapiens
tgcatattttgtctaaatattgataaagctttagaatataagagctggagtgaacctaagaggttttgtagcccggcaatttccaacccaggatgtgtctcagaatcacatagagaggtttcagattcccagccaggcacagtggaatgtggctgtagtcctggtgactgggaaggctgaggcaggaggatcactggacccccagagtttgacgccagcctggggcaacatggtgagacccctgtctctaaaaaataaaaagtaagtagaaaatacaaatcacagattcctgggccttttccttcccctgccttccccaagtgattctaattctatgtcagttttggctgcttgcaaccagttatggagaccagggatcttgatcaatctcttcatctatctgatgaggaatctgagacccagagaagtaagaggtacagtgatttctctaaggttacacagtgtatgagtccatttgcacactgctgataaatacatacccaagattgggaagaaaaagaggtttaatggactcacagttccatgtggctggagaggcctcacaatcatggcagaaggcaaggaggagcaagtcacatcttacatggtggcagagaagagagagcttatgcagggaaactccccttttcaaaaccatcagatctcttgagacttattcactatcatgagaatagcacaggaaagacaagccccctgattcaattacctccctctgggtctctcccacatgtgggaattgtgggagatacaattcaagaggaggtttgggtgggggtacagccaaaccatatcccacaggaatatgttacaagtgaagatagtctatggacactgtaaaattgaccccattagctatatcccaaactagttcattattttagaatctattttgtgtgtttgcatgcatacagcaatgcttcacatatctgcacaccacttatgtggcattccaaatatggttaagaacaaacaaagtgaaaaagacctgcaagcagccaaaattggtactaaataaaccacacataatcctccaagtctttttaaaagcctcttctcttgcttctctatctagtgaggcataggtgactcaaaatctttatctccaagcccggcccttctgctgcactatagtgtcgtgtctccaaaagcctagtggaccactcacagatacccagtcggcaccttcactcagtgtgttcaaaattaaacgtgtgctttccccctcccaacccctctcctgctttgctgctctgtttatgactctactaaggttcaaaatcatagagatgtgtgtggtgtcttccctctcccttgcctccccaaatataatggattatttctccgcccacatttcataatccagtttgccatctctgttcattccctctgcccctgccctagttagtgccttcatgccctttcacctggactattgtaatagtctcctgcctgatcttgtgtcctctggtctctccctactccaatccattttactcactgttgccagattaatcttcctgaggcacagctctgattatgttactctcctactaaaaactttcaatagctccccactgtctcctgaataaagtccaaattccttgccctaataatcaagtcctttcactttctggtcccaatatacttttaccgctttatttcccactacttatcttcacacattccatgctcaagttaaactcaattacttctttgcagaatctttaccctttgattcttccatgcttttctcatgatagagtaatgttctttccttctatctctgtatgctcaaatcctgcttgtttttcaaagcccaaatccagtgtcatcttttctgatgaagccctcagttagccctcctctgagctccaagaataccttatctgtactacttttatagagcatttcacttttcactattaattctagcaaagtagacacatgtctcagctccgttgctagattaaaacttctagggcaagacatgtcttatctgtgtatcctctccagtgccaagtatacaagtgcacgactcacaatatttgtcaagtgaatgagttcatgtatgtactttacacacaatcaaaacatgtttttttgttttattgtctaaagaagattagaaataatgcatcagagaaggaatgaggatcttagagacttgcacaacagaaagtaacttaatagctaaagaagaaaaataaaaactacgaaaagaaggcatgagaactaaagatatagcagtcagagggtaaagaaacacagaagcaaataatcttatagaataaggaccaaatggttaattgagaagcttggaaaccataaaataacattcaaatatgtagcattatttttatacttccacaccctcatcaatagaaacaaatttgaattgtagttcaagataacaaccctgaatcatttagaaaagtttgaattatggtaagtatattcttttttttgagatggagtcttactctgtgaggctaggtaaataagctgyctttattaatgaagaaattcatatttttctgaatattagagaaatattaatttttcccaattaagatatgttca

SEQ ID NO: 674358 - DNA, 835 bp, Homo sapiens
aaaggattacgatgtccttaaaaagacctaaaataatgagtcatgagaaggtatactaggaaaccaggttagcaaactaagtattaagaataaactataacatctgatgaccattagtcatagatactggagaattctcctaacttcgagtaggccaaactcccttcttgaattctgttccccagaattctttgcttctactgccaaagtgaattaatcttcatgtgcatgttgtaaccayaaattctctttgtgaacaccgtaggctccatggaagtggtgaataccagcaatcagcgtgggctgctttgctaagctccgctttgttttcttccttgacagggtcaaagagtgttggagaaaatgtagtgtgtatcgactactggtttttgacaagggatttgacaaaggcagttataagatggaggtggaagttagaattgggtgggtttgtgatgggttaaatgactacaatccaatcaatattagcctcattgcttttttttttttttttttttttttttgagacagtctcactctgtcacccagcctggagtgcagtggtacaatcacagttcactgcagtctcaacctcccaggctcaagtaatccttccacctcaccctcctgaatagctgggaccatagatatgcacttgtatttttctttgtagaaatggagtcgtcctatgttgccgaagctggtctcaaactcctgggctaaagggatcctcctactcggcctcccaaagtgctaggattttaggcatgagccatggcacctggccctagctgcatatttttaacaactctgtctttggccttggccttggtat

SEQ ID NO: 674359 - DNA, 1968 bp, Homo sapiens
  misc_feature 446: n = A,T,C or G
tattcagggagtctagggaaggacttcgtagggacgtgtcagttaagaccactgttcttggaccaagttcagttgcatgtgttctcagaataaaaggtcctccataaatcttggtgtcctagcccctcacttgaggagatggaggctcaaaagtagcaagagcgggctgggcgcggtggctcatgcctgtaatcccagccctttgggaggccaaggcgggcagatcacaagatcaggagtttgagaccagcctggccaacatagtgaaaccctgtctctactaaaaatacaaaaatcagccaggcgtggtggtgggcccctgtactccyagctactcaggaggctgaggcaggagaatagcttgaacccaggaggcagaggttgcagtgagccgagattgtgccactgcactccagcctgggcgacagagcgagactccatctcanaaaaaaagaaagaaagaaagaaaagaaatagcaagagtgctgtccaatgtcacacaaaaagccaggcagagctgggactgcaggccaggtctgtttaccgctaagcattgcctcttctggtcatcacactgccttttgctttgcacacattgccttttgcctcttccctgatcctcagattctgaaaacagcaaagtgttatctgtaccatctttcagcccctcatttaaatgcaaaagaaggcaaacagaatctggaagttgacagcatccataaagggacacctgaagcaggataaggatcagttgttagaaaacagcttctcaatgatgcagtccctgtgtgcttcctccaccctgcagacagggctgtccctgggcacagtggctctctgcttccagcatttgtgtatgggtgaaaccctaggccagtgcatgactgagacctccttgaaggaaaagagaagcaaagtcctgaggccagggtcttgttcgtgatagtattctctgtaccagagcagagcctggtacccagcaagtatcaacacatatttgcatgaatgaatgactggctgggctggctggatcaacagatcaaaagatcagtggatcagtgaatatggctgaatggatgggtagatggatggatggacagatgaacagatgggtgggtgggtggataaatgcagggatgggtagatagatgggagaaaggaagagaagaaggcagggagagagggtaaaatgagggaggtacagttctattgcctgtgttctgctgagcatacttggaagtagggagattgctgtaccatcaatcattaaatatttattgagcagttcattatgtgccaggtactatgctaggcaatactacagtgtggaagacatgcaggtcgccgccctcataggatccaaactgtagtagagatacaggcaattacacaagtgatgatcacatggtgggataagtacaatgatgaaggacgtactaggcaccataggaaggcttcccggaggaagtgacatctaaactgaacactgcaggaagagtagctgttagctgggtgagcagggcttgggatgggggtggagtgtcccagacaaagggagcagagtgagcattagcccaggggagcaggaggcaaacaggactggggagcagctgaaaggtggaagaacatcaggtatgtcaggtatgaacatcaggagcaccagccaatggaaccacttcctcattctcctcaagggactcctcctcagtggacacctgttgtttttctctgcccagactcatccagtcttctttctttgggaatagccccctaatttattttgaggaaatcccccaaattcccctccactattctcagtacacgtggttcatgggagtttgacatcaccccacaatcctggggtgggcacgagaccctggcctggccaatccgtaaacttatgttcatctggccataggaagctcagctaggccaattagatgctaccctagggcttcactggaaaca

SEQ ID NO: 674360 - DNA, 1968 bp, Homo sapiens
  misc_feature 446: n = A,T,C or G
tattcagggagtctagggaaggacttcgtagggacgtgtcagttaagaccactgttcttggaccaagttcagttgcatgtgttctcagaataaaaggtcctccataaatcttggtgtcctagcccctcacttgaggagatggaggctcaaaagtagcaagagcgggctgggcgcggtggctcatgcctgtaatcccagccctttgggaggccaaggcgggcagatcacaagatcaggagtttgagaccagcctggccaacatagtgaaaccctgtctctactaaaaatacaaaaatcagccaggcgtggtggtgggcccctgtactcctagctactcaggaggctgaggcaggagaatagcttgaacccaggaggcagaggttgcagtgagccgagattgtgccactgcactccagcctgggcgacagagcgagactccatctcanaaaaaaagaaagaaagaaagaaaagaaatagcaagagtgctgtccaatgtcacacaaaaagccaggcagagctgggactgcaggccaggtctgtttaccgctaagcattgcctcttctggtcatcacactgccttttgctttgcacacattgccttttgcctcttccctgatcctcagattctgaaaacagcaaagtgttatctgtaccatctttcagcccctcatttaaatgcaaaagaaggcaaacagaatctggaagttgacagcatccataaagggacacctgaagcaggataaggatcagttgttagaaaacagcttctcaatgatgcagtccctgtgtgcttcctccaccctgcagacagggctgtccctgggcacagtggctctctgcttccagcatttgtgtatgggtgaaaccctaggccagtgcatgactgagacctccttgaaggaaaagagaagcaaagtcctgaggccagggtcttgttcgtgatagtattctctgtaccagagcagagcctggtacccagcaagtatcaacacatatttgcatgaatgaatgactggctgggctggctggatcaacagatcaaaagatcagtggatcartgaatatggctgaatggatgggtagatggatggatggacagatgaacagatgggtgggtgggtggataaatgcagggatgggtagatagatgggagaaaggaagagaagaaggcagggagagagggtaaaatgagggaggtacagttctattgcctgtgttctgctgagcatacttggaagtagggagattgctgtaccatcaatcattaaatatttattgagcagttcattatgtgccaggtactatgctaggcaatactacagtgtggaagacatgcaggtcgccgccctcataggatccaaactgtagtagagatacaggcaattacacaagtgatgatcacatggtgggataagtacaatgatgaaggacgtactaggcaccataggaaggcttcccggaggaagtgacatctaaactgaacactgcaggaagagtagctgttagctgggtgagcagggcttgggatgggggtggagtgtcccagacaaagggagcagagtgagcattagcccaggggagcaggaggcaaacaggactggggagcagctgaaaggtggaagaacatcaggtatgtcaggtatgaacatcaggagcaccagccaatggaaccacttcctcattctcctcaagggactcctcctcagtggacacctgttgtttttctctgcccagactcatccagtcttctttctttgggaatagccccctaatttattttgaggaaatcccccaaattcccctccactattctcagtacacgtggttcatgggagtttgacatcaccccacaatcctggggtgggcacgagaccctggcctggccaatccgtaaacttatgttcatctggccataggaagctcagctaggccaattagatgctaccctagggcttcactggaaaca

SEQ ID NO: 674361 - DNA, 1318 bp, Homo sapiens
  misc_feature 608, 609, 610, 611, 612, 613, 614, 615, 616, 617, 618, 619,620, 621, 622, 623, 624, 625, 626, 627, 628, 629, 630, 631,632, 633, 634, 635, 636, 637, 638, 639, 640, 641, 642, 643,644, 645, 646, 647, 648, 649, 650, 651, 652, 653, 654: n = A,T,C or G
  misc_feature 655, 656, 657, 658, 659, 660, 661, 662, 663, 664, 665, 666,667, 668, 669, 670, 671, 672, 673, 674, 675, 676, 677, 678,679, 680, 681, 682, 683, 684, 685, 686, 687, 688, 689, 690,691, 692, 693, 694, 695, 696, 697, 698, 699, 700, 701: n = A,T,C or G
  misc_feature 702, 703, 704, 705, 706, 707: n = A,T,C or G
agcagaatagaagaatttcttgtgaatgaattatctacaatgtcttatttggagtagggattggggtctattggacaattgaagaagagaaaatctttcaaaagagaataggtacccctccccatgtagagggctttaaaatgctcccccccacaacatgggattgaaaaccctttggctcacataaatcataggacgttggagctaacttggggaataccttgggcaatggaatgctcattgtgccttgcagagcagggaaggtttagtaccctttggtgcccctctggcaatctcaggttaaggggtggagactgttggggagaaacttcaactagagaaggtctggttgcatttgtttcacacatagatacttcatttgaaagtattgcaggtctaaaaagtaccctgtaaacctctgatttacttcaattatctctgagctcatccagccagttgcaggggtagaccaagacagacttttttaattcccaggctgtctctcctcagacagtgagatgcaccttggcttctcagcacataaaaaagaataagttgatcaacatcctctgcttccaagtattctgccttaaacagttgctttattnnnnnnnnnnnnnnnnnnnnnnnnnnnnnnnnnnnnnnnnnnnnnnnnnnnnnnnnnnnnnnnnnnnnnnnnnnnnnnnnnnnnnnnnnnnnnnnnnnnnatactgtgaggcaagtcactagaaaccctttgttcaaagactttagtcgacctcatttcatgatggcatttctttatcttgatcttgtaaatgctcaggaattgtggctactttggaatttatgacagacagctaatggaatctttaggacatatctgaacaaattttaatctaggggtggggggcggattaaggcttctgctgtacattactcattcactgctcaaatgacaccaaaaagccatttagactccaagccgacatgggtctctttgggttgcagatggtgagagccttgacaggagggactgttgatggtttctcgggctttaagcctctctgtgcccaagtctcttagatttaaatgagtgggtatttgctgagatgagatagtaaattcttgagttccttgagaaagattgggatagggtcatttcttctctggaaagagttcagatgttgtactttagttggggctcagaatttgagtctacagtataaaaagggacaaagatytagcctgaggattatctgggttatttagaaaatatacaggacagagaagactccagtgactgccatgactaaaaacacttgcttttgctcttgcc

SEQ ID NO: 674362 - DNA, 1469 bp, Homo sapiens
gctgggcacagtggctcatgcctgtaatcccagcactttgggaggtcattgcgagaggatcgcttgagctcaggagtttgagaccagcctgacctggtctctactagaaataaaaaaaaattagccaggtgtgatggcatgtgcctgtagtctcatctactcaggaggctgagatggagaactgcttgagccaggaggttgaggcttcagtgagccatggtcaygtcactgtactccagcttgggtgacagagcaagaccctgtctcaaaaacaaaaaaaaaaaaaagaaagaaagaaagaaaaaacccataaagaacagagggatgaacatgtgttcttaaatgctgaagatatttagggtggctttcatagaaaaacatcttgtattccaattcaggtatttaatccatacaaatattacaataaatttaatatgaacagataataattgtgcatgttaaaatatttgaggcctgagttaagaatatattaatttacaaagttattaatacatataagtacgccttatggtcattgaatatagcaaaagacttgtctaagaaaacaaaaaacccttagagtccttggggacaatcttattgtcccttgcctttccattttaattaccatcattagtctgtgagctcacctgactctaccaaggagactgacctgttctttcctctgtgattccatggcagtgagttgatatttgatgaacttaggacattgagtgctatttatctccacatctgtctctgccacctaagtgaaagtctttcagggcaggaacatgtcaacttcacgcttatatctccaaacttagtttctggaatttagtaggtactaaatgcatctatacagaataaatacaagcatggatacttgaatgaacagatgctcagagagttgcctaaggctggtgggcctagctctcctgatcctttcccaaacttctattaggtccatccaacattaaacaggtagggttcactctctgctccttttcaccccttgcacctgtttcctagctccatttatctccctttttccttctagcttgagttatctgggtcaatgaagaggaatgtgtcagaaaacatagaggacaaaattaaccagaaaggatgactaaaggaacaactataataaaatattacattgaacaattttaaaagaaaggtaccagagagatttcctgaaacttatgcctgcataaattatattctaataatatctctttggagccaccaatctcacacttctgaattaggtccttgagaaaatgtgacatttgtagagagcttgactccatattaacaaagagagaaaggctgaggcatctttagggtatacaaaaataagccttatgagtccaagattcccaatgaggggggcccctaattaatccctgaacccaaaaaaacatctttaaaccttctttcaacaaaaatactggttattttcc

SEQ ID NO: 674363 - DNA, 1469 bp, Homo sapiens
gctgggcacagtggctcatgcctgtaatcccagcactttgggaggtcattgcgagaggatcgcttgagctcaggagtttgagaccagcctgacctggtctctactagaaataaaaaaaaattagccaggtgtgatggcatgtgcctgtagtctcatctactcaggaggctgagatggagaactgcttgagccaggaggttgaggcttcagtgagccatggtcacgtcactgtactccagcttgggtgacagagcaagaccctgtctcaaaaacaaaaaaaaaaaaaagaaagaaagaaagaaaaaacccataaagaacagagggatgaacatgtgttcttaaatgctgaagatatttagggtggctttcatagaaaaacatcttgtattccaattcaggtatttaatccatacaaatattacaataaatttaatatgaacagataataattgtgcatgttaaaatatttgaggcctgagttaagaatatattaatttacaaagttattaatacatataagtacgccttatggtcattgaatatagcaaaagacttgtctaagaaaacaaaaaacccttagagtccttggggacaatcttattgtcccttgcctttccattttaattaccatcattagtctgtgagctcacctgactctaccaaggagactgacctgttctttcctctgtgattccatggcagtgagttgatatttgatgaacttaggacaytgagtgctatttatctccacatctgtctctgccacctaagtgaaagtctttcagggcaggaacatgtcaacttcacgcttatatctccaaacttagtttctggaatttagtaggtactaaatgcatctatacagaataaatacaagcatggatacttgaatgaacagatgctcagagagttgcctaaggctggtgggcctagctctcctgatcctttcccaaacttctattaggtccatccaacattaaacaggtagggttcactctctgctccttttcaccccttgcacctgtttcctagctccatttatctccctttttccttctagcttgagttatctgggtcaatgaagaggaatgtgtcagaaaacatagaggacaaaattaaccagaaaggatgactaaaggaacaactataataaaatattacattgaacaattttaaaagaaaggtaccagagagatttcctgaaacttatgcctgcataaattatattctaataatatctctttggagccaccaatctcacacttctgaattaggtccttgagaaaatgtgacatttgtagagagcttgactccatattaacaaagagagaaaggctgaggcatctttagggtatacaaaaataagccttatgagtccaagattcccaatgaggggggcccctaattaatccctgaacccaaaaaaacatctttaaaccttctttcaacaaaaatactggttattttcc

SEQ ID NO: 674364 - DNA, 1469 bp, Homo sapiens
gctgggcacagtggctcatgcctgtaatcccagcactttgggaggtcattgcgagaggatcgcttgagctcaggagtttgagaccagcctgacctggtctctactagaaataaaaaaaaattagccaggtgtgatggcatgtgcctgtagtctcatctactcaggaggctgagatggagaactgcttgagccaggaggttgaggcttcagtgagccatggtcacgtcactgtactccagcttgggtgacagagcaagaccctgtctcaaaaacaaaaaaaaaaaaaagaaagaaagaaagaaaaaacccataaagaacagagggatgaacatgtgttcttaaatgctgaagatatttagggtggctttcatagaaaaacatcttgtattccaattcaggtatttaatccatacaaatattacaataaatttaatatgaacagataataattgtgcatgttaaaatatttgaggcctgagttaagaatatattaatttacaaagttattaatacatataagtacgccttatggtcattgaatatagcaaaagacttgtctaagaaaacaaaaaacccttagagtccttggggacaatcttattgtcccttgcctttccattttaattaccatcattagtctgtgagctcacctgactctaccaaggagactgacctgttctttcctctgtgattccatggcagtgagttgatatttgatgaacttaggacattgagtgctatttatctccacatctgtctctgccacctaagtgaaagtctttcagggcaggaacatgtcaacttcacgcttatatctccaaacttagtttctggaatttagtaggtactaaatgcatctatacagaataaatacwagcatggatacttgaatgaacagatgctcagagagttgcctaaggctggtgggcctagctctcctgatcctttcccaaacttctattaggtccatccaacattaaacaggtagggttcactctctgctccttttcaccccttgcacctgtttcctagctccatttatctccctttttccttctagcttgagttatctgggtcaatgaagaggaatgtgtcagaaaacatagaggacaaaattaaccagaaaggatgactaaaggaacaactataataaaatattacattgaacaattttaaaagaaaggtaccagagagatttcctgaaacttatgcctgcataaattatattctaataatatctctttggagccaccaatctcacacttctgaattaggtccttgagaaaatgtgacatttgtagagagcttgactccatattaacaaagagagaaaggctgaggcatctttagggtatacaaaaataagccttatgagtccaagattcccaatgaggggggcccctaattaatccctgaacccaaaaaaacatctttaaaccttctttcaacaaaaatactggttattttcc

SEQ ID NO: 674365 - DNA, 618 bp, Homo sapiens
ccggacccttcagaacatcttaggacttaaatggaattcctagggcataaggtttcctcctgtaactgtagctggtttctgtagggttgaaactacaataatggattctcaatttgtagaaggacttccttaggttccatgccatttggcaactgtttgactcatgagacatccatctgattacagggttagagagggcttgtgcatctcaagacactgtggggtctctagtccctactcatgtataccgttctctaggcacacaactgattagaagacagtggtggcttatccttctagcaagaacccctttgatatcttattttgctcatggscacatgggcttgaaagattttttggctttaaggaagattttattaagtaacaattaatgtatttattttcattactctgtgaaaatctaattagaataacagcattaccacactgacctgacagaattctagcccaaagcaaagcaatcaatatttgagtggtctctgcctgagaacaggctgtgtagtcatttggcatttttaatttctgaaaatttaaataaaaagcttgtaggccccattcctaccatttgtaggacttaggaatccagggaactgcgtg

SEQ ID NO: 674366 - DNA, 1213 bp, Homo sapiens
cagtggtgcccacgttgaccccagggccacggctcacctgcctgccacacaggcggcaggtggcatactggttgggatggtgcccagcacgagcaggagctaggtggaaatattcccatgcctcagagaaccgggtgcccttgttgtggggcattggagtgggcatagcactcacaaaagggccaaccagttctcctgtctcactaatctcttcctcctccttcatctctaagtccccttttgccttcatcattgttccctcctcttcctcgtcttcccgcctcatcatgtcacctcttctacagcgttctttatgatgtgcttagatgtgagccaaaagcttatttgaaccacaagattaaatatatatttgggaagggcctgtggtaactcttggggattcacaataatggccaaagtctggccacacctgggtggtgtgaggtttcttcctttctgcttcactggagagtcaggggtgagtcagatacaagcaaaacagcccaagagtgcattccttccatgccccagatacttacttatcctcccttgactaggccagaaagacaaaacatatcagttcctgtagcaaaggggttctctggtccaacaattacaaagctctttgatgaactcagtgttttctgcatcaaccaccacgacaggtatttttgaatattgaaaattttaggttttcttgtttctcctcctggttgtttccactgtttctgtgcttcttatttcctataattgcattttggaggcaggagaaacagcctcagggttcaggcttttcaggaccaacagagctagggcctcactgggtcttgctcaaagtaggtaaaagcaaacacaggcagatgctggtgcaggagacactcttgcttcctaagaactgttgcaacaagcaatccagagtagacaaagcctatgaggatctggataataaagttcccaatgcaaggtcagtttgtccttagaggtgtctctcagaggccaggagtctaagaaatccaaaaagcaagctcagctgtttcagcaggaggagctgggatgcrcagaggagaaggtggagcacatcttcacaaacacagcgttgcctggctgtccttagcaagcagctcaccatactccaccttctccaccaggatcacctgcaaagccaacagccaataagaccttcctgaggcaacttactccagatgttttgctc

SEQ ID NO: 674367 - DNA, 1213 bp, Homo sapiens
cagtggtgcccacgttgaccccagggccacggctcacctgcctgccacacaggcggcaggtggcatactggttgggatggtgcccagcacgagcaggagctaggtggaaatattcccatgcctcagagaaccgggtgcccttgttgtggggcattggagtgggcatagcactcacaaaagggccaaccagttctcctgtctcactaatctcttcctcctccttcatctctaagtccccttttgccttcatcattgttccctcctcttcctcgtcttcccgcctcatcatgtcacctcttctacagcgttctttatgatgtgcttagatgtgagccaaaagcttatttgaaccacaagattaaatatatatttgggaagggcctgtggtaactcttggggattcacaataatggccaaagtctggccacacctgggtggtgtgaggtttcttcctttctgcttcactggagagtcaggggtgagtcagatacaagcaaaacagcccaagagtgcattccttccatgccccagatacttacttatcctcccttgactaggccagaaagacaaaacatatcagttcctgtagcaaaggggttctctggtccaacaattacaaagctctttgatgaactcagtgttttctgcatcaaccaccacgacaggtatttttgaatattgaaaattttaggttttcttgtttctcctcctggttgtttccactgtttctgtgcttcttatttcctataattgcattttggaggcaggagaaacagcctcagggttcaggcttttcaggaccaacagagctagggcctcactgggtcttgctcaaagtaggtaaaagcaaacacaggcagatgctggtgcaggagacactcttgcttcctaagaactgttgcaacaagcaatccagagtagacaaagcctatgaggatctggataataaagttcccaatgcaaggtcagtttgtccttagaggtgtctctcagaggccaggagtctaagaaatccaaaaagcaagctcagctgtttcagcaggaggagctgggatgcgcagaggagaaggtggagcacatcttcacaaacacagygttgcctggctgtccttagcaagcagctcaccatactccaccttctccaccaggatcacctgcaaagccaacagccaataagaccttcctgaggcaacttactccagatgttttgctc

SEQ ID NO: 674368 - DNA, 452 bp, Homo sapiens
acatggagaaaccccgtttctactaaaaataccaaattagtcgagcgtggtggcacatgcccgtaatccaagctactagggaggctaaggcaggagaattgcttgaatctgggaggcggaggttgcagtgaaccgagatcacrcccttgcactccagcctggacaaaagagtgaaactccatctcaaaaaaacaaaaataaataaaaaataaaaaaagtgaatatacatttgttacaaagaatatagatgcatattcttccttgatacctaagaattcttttttaggagaaatgcagttccttcctcagggaaatcagagctattttcttacgtacattcttcctaaaagctgtaggatacaagttttgagctgctgttgattattggattattgcgtattaatttgatcatatattacttatatttacctagaattgcaaacattatttca

SEQ ID NO: 674369 - DNA, 664 bp, Homo sapiens
gaacccagcaattggactccaaactcagtgttctcaaactctatttatgttatctcacaacaatggaatatttttgtggaaaaatgctcaaaatatgcaggtgggtgagtgagcaaaaaaaagcaggttataaaataggatgaacagtgtgaccctgttttataggaaaaaaaaaagagaatatagccataaaaagaaaccttaaaggtctatcaagatatttcaaactaataacagtagttattttggggtgacatctttacctgcttctgaaattttctttttgcttatctcttagttctaattattgttatgaagaaattatattcaaatgttaagccccttagaaatgaaacaattggaagtctgaatatgaaaaataatattataactaaattgtaacatatataacataaaatctattgctagcyatactgtggtgaaaattgtacattcccacattcctgctagcagtatacattgttacactcctctatagaaagtaatgtggcagtgtaaattaagaactatgaaaatgttcacttcctgttaccccatggtcctgcttctggaaattaccctatgatcacaactcaaaagaagaagactgctttgtccatttagcaagaaatatatgactgaaatatttaatttgtgtatttac

SEQ ID NO: 674370 - DNA, 665 bp, Homo sapiens
gtgaaggggtactagctaagacagtatcctaataatccaagagaagagagaatagtgacttggcatgaagtggcaacagtggggaaggtgagaagccgtgagatccggtatctattttaaaggtaagacaacaggatttggtggtgggttggatatggaaatgtgaggaarggatgcatttggtatgaccctaaggttttcgcttgagcatctagaagaacggcatgggagggaggtagttatcaggaacactataggcatgtaaagtttgagctgcctcaaaagatgttcaggggagacatctgggcctgagatatccattcatatattttatttaaaactatgacagtgtataagatgacctagggagccagtctagagaattaagcctttgatcatgccaatatggacagctgaacacagacatttccttatacatagatgaggagttcctgcctgagacaagaccaagaaatacccagctgtaccagtcacaggccagctccatctgaaggcacagtgacagtttgagccttagtgccttatatcccatatcccattcccatattacctttataaacttctttctttcatccatgaggtctagtgaatgttttgtctcaagaagccaattggttctgtgggtaaaagataagaggtatctc

SEQ ID NO: 674371 - DNA, 665 bp, Homo sapiens
gtgaaggggtactagctaagacagtatcctaataatccaagagaagagagaatagtgacttggcatgaagtggcaacagtggggaaggtgagaagccgtgagatccggtatctattttaaaggtaagacaacaggatttggtggtgggttggatatggaaatgtgaggaaaggatgcatttggtatgaccctaaggttttcgcttgagcatctagaagaacggcatgggagggaggtagttatcaggaacactataggcatgtaaagtttgagctgcctcaaaagatgttcaggggagacatctgggcctgagatatccattcatatattttatttaaaactatgacagtgtataagatgacctagggagccagtctagagaattaagcctttgatcatgccaatatggacagctgaacacagacatttccttatrcatagatgaggagttcctgcctgagacaagaccaagaaatacccagctgtaccagtcacaggccagctccatctgaaggcacagtgacagtttgagccttagtgccttatatcccatatcccattcccatattacctttataaacttctttctttcatccatgaggtctagtgaatgttttgtctcaagaagccaattggttctgtgggtaaaagataagaggtatctc

SEQ ID NO: 674372 - DNA, 665 bp, Homo sapiens
gtgaaggggtactagctaagacagtatcctaataatccaagagaagagagaatagtgacttggcatgaagtggcaacagtggggaaggtgagaagccgtgagatccggtatctattttaaaggtaagacaacaggatttggtggtgggttggatatggaaatgtgaggaaaggatgcatttggtatgaccctaaggttttcgcttgagcatctagaagaacggcatgggagggaggtagttatcaggaacactataggcatgtaaagtttgagctgcctcaaaagatgttcaggggagacatctgggcctgagatatccattcatatattttatttaaaactatgacagtgtataagatgacctagggagccagtctagagaattaagcctttgatcatgccaatatggacagctgaacacagacatttccttatacatagatgaggagttcctgcctgagacaagaccaagaaatacccagctgtaccagtcacaggccagctccatctgaaggcacagtgacagtttgagccttastgccttatatcccatatcccattcccatattacctttataaacttctttctttcatccatgaggtctagtgaatgttttgtctcaagaagccaattggttctgtgggtaaaagataagaggtatctc

SEQ ID NO: 674373 - DNA, 1930 bp, Homo sapiens
  misc_feature 632, 633, 634, 635, 636, 637, 638, 639, 640, 641, 642, 643,644, 645, 646, 647, 648, 649, 650, 651, 652, 653, 654, 655,656, 657, 658, 659, 660, 661, 662, 663, 664, 665, 666, 667,668, 669, 670, 671, 672, 673, 674, 675, 676, 677, 678: n = A,T,C or G
  misc_feature 679, 680, 681, 682, 683, 684, 685, 686, 687, 688, 689, 690,691, 692, 693, 694, 695, 696, 697, 698, 699, 700, 701, 702,703, 704, 705, 706, 707, 708, 709, 710, 711, 712, 713, 714,715, 716, 717, 718, 719, 720, 721, 722, 723, 724, 725: n = A,T,C or G
  misc_feature 726, 727, 728, 729, 730, 731: n = A,T,C or G
cttccagcaaaatccaaactgctgtctcttaaatctcttaaactctcttcttccattagaatgctacaagtaactcagtgaaggcccatgaaggaaattgggactagtttataggagaacgtatcaatacagtttataaagccaagaattgctatgatttaagactaagatctgtctttttggtgactaacccttcaattctttcaactcctgttaatacccataatcagtaacctatcaagaaaagcccttatttggaaagtgtgaaatttgtatttggacaagctgcctggagagacgacctgtgtcctttactgtatttcaacaggactcttttggggaatcaaaataaaattcctaatatgcatatctttcttttcttcggcctccaaatacgaaaccatactgaaatacctttcttttttaaaaaaatatttcagttgcagagaacatcctaagattgagttattatgattataatttacaaacattaaatggataacacctcttataaaagatatggtggcccaaatgttgattttatcacaaaggatcgtatacaaggttttttagtgcaaaacagcatatatattaagcagagtctaggcgtaatctataaacctggcctgggnnnnnnnnnnnnnnnnnnnnnnnnnnnnnnnnnnnnnnnnnnnnnnnnnnnnnnnnnnnnnnnnnnnnnnnnnnnnnnnnnnnnnnnnnnnnnnnnnnnnatggtagttcatctagtcaagtggacatcaaaagacaattaataaaacaagtatggcattcaaaaggatagggggagtgtgctcaatatcaccatttattcaatcaactaatataaaatgaacacatatgaacgcrtttttcatgatgatggaagaatacaaataactatttaagccaataatttagtataacttttataaaggataatttggtgttttgtattaaaatgttaaatgtatatatatctcaatgactcatcaattttaataatttattctatagaaaaactcaatgcaaccatacataaaaggatggtcaatccactgcttttataagattaaaaaaagggaataaatcagatgtacacctgcaacataattctacagccattcataagaatgagatggattgaggccagatgaggtggctcatgcctgtaatctcagcactttgggaggccgagacaggtagctcacttgaggtcaggagctcaagatcagcctggccaacatggcaaaaccccatctctactaaaaatacaaaaattagctgggcattgtggcgggcacctgtagtccaactacttgggaggctgagacagaagaatcgcttgaacccgggaggtggaggttgcagtgagccaagagcacgccactgcaccccagcctgggtgatagagcagactctgacttaaatataaaaagaaaaaaagaatgagatggatctatgtgtacagacattgataatgtccaaaatacacaggaggggaagaaaagcagccttcaaagaatctgatccaatttttatgtaattttctatgtgcctttatatacatatttctatttactcgcacagaaaaggttagacacactaaaatgttaacattttctatgaattaggatggtatttttcttaaattttattacttttgtaaacataaaaaaaaatcttaataaatcaaactttactacttacaatgagagtcctctccaaaaggtgtagcctactgaggtttttgccatgatataataatttcaattgctgtcatgtcctcaatttatacctgatattcttgattttttttcttttgtatttatacagtctgacgtgtatatgtgtgtgtataatgccacttttgcacttcttcttggtccccactcaattatggctcctccttgattcaactaagtcaatacta

SEQ ID NO: 674374 - DNA, 1930 bp, Homo sapiens
  misc_feature 632, 633, 634, 635, 636, 637, 638, 639, 640, 641, 642, 643,644, 645, 646, 647, 648, 649, 650, 651, 652, 653, 654, 655,656, 657, 658, 659, 660, 661, 662, 663, 664, 665, 666, 667,668, 669, 670, 671, 672, 673, 674, 675, 676, 677, 678: n = A,T,C or G
  misc_feature 679, 680, 681, 682, 683, 684, 685, 686, 687, 688, 689, 690,691, 692, 693, 694, 695, 696, 697, 698, 699, 700, 701, 702,703, 704, 705, 706, 707, 708, 709, 710, 711, 712, 713, 714,715, 716, 717, 718, 719, 720, 721, 722, 723, 724, 725: n = A,T,C or G
  misc_feature 726, 727, 728, 729, 730, 731: n = A,T,C or G
cttccagcaaaatccaaactgctgtctcttaaatctcttaaactctcttcttccattagaatgctacaagtaactcagtgaaggcccatgaaggaaattgggactagtttataggagaacgtatcaatacagtttataaagccaagaattgctatgatttaagactaagatctgtctttttggtgactaacccttcaattctttcaactcctgttaatacccataatcagtaacctatcaagaaaagcccttatttggaaagtgtgaaatttgtatttggacaagctgcctggagagacgacctgtgtcctttactgtatttcaacaggactcttttggggaatcaaaataaaattcctaatatgcatatctttcttttcttcggcctccaaatacgaaaccatactgaaatacctttcttttttaaaaaaatatttcagttgcagagaacatcctaagattgagttattatgattataatttacaaacattaaatggataacacctcttataaaagatatggtggcccaaatgttgattttatcacaaaggatcgtatacaaggttttttagtgcaaaacagcatatatattaagcagagtctaggcgtaatctataaacctggcctgggnnnnnnnnnnnnnnnnnnnnnnnnnnnnnnnnnnnnnnnnnnnnnnnnnnnnnnnnnnnnnnnnnnnnnnnnnnnnnnnnnnnnnnnnnnnnnnnnnnnnatggtagttcatctagtcaagtggacatcaaaagacaattaataaaacaagtatggcattcaaaaggatagggggagtgtgctcaatatcaccatttattcaatcaactaatataaaatgaacacatatgaacgcgtttttcatgatgatggaagaatacaaataactatttaagccaataatttagtataacttttataaaggataatttggtgttttgtattaaaatgttaaatgtatatatatctcaatgactcatcaattttaataatttattctatagaaaaactcaatgcaaccatacataaaaggatggtcaatccactgcttttataagattaaaaaaagggaataaatcagatgtacacctgcaacataattctacagccattcataagaatgagatggattgaggccagatgaggtggctcatgcctgtaatctcagcactttgggaggccgagacaggtagctcacttgaggtcaggagctcaagatcagcctggccaacatggcaaaaccccatctctactaaaaatacaaaaattagctgggcattgtggcgggcacctgtagtccaactacttgggaggctgagacagaagaatcgcttgaacccgggaggtggaggttgcagtgagccaagagcacgccactgcaccccagcctgggtgatagagcagactctgacttaaatataaaaagaaaaaaaraatgagatggatctatgtgtacagacattgataatgtccaaaatacacaggaggggaagaaaagcagccttcaaagaatctgatccaatttttatgtaattttctatgtgcctttatatacatatttctatttactcgcacagaaaaggttagacacactaaaatgttaacattttctatgaattaggatggtatttttcttaaattttattacttttgtaaacataaaaaaaaatcttaataaatcaaactttactacttacaatgagagtcctctccaaaaggtgtagcctactgaggtttttgccatgatataataatttcaattgctgtcatgtcctcaatttatacctgatattcttgattttttttcttttgtatttatacagtctgacgtgtatatgtgtgtgtataatgccacttttgcacttcttcttggtccccactcaattatggctcctccttgattcaactaagtcaatacta

SEQ ID NO: 674375 - DNA, 530 bp, Homo sapiens
ctgcttgaaacaataaatagaacttcttgaarggaaagattttagagcattgcattttaaccaaaacagtattctgtttgtgcattatttttacactaggtattgtcacttactaggttaattttataccctgtagtggtaatttttaaagaaacatatttggttgagattgtattttcagttactcaagaaagagttaacctctggtttgtagtttaagctctttcttgattcttatatgaaataaaatggaagaactagagcaggcttattcagagaatcaactgtcttcacttgtgatcacttgcataatggcaaaagtacttgatttgttatacaaatttactttgaaatatcttagcagcgaagacagagtcttaagttttcttgatgtctaaacctgataaatttggaaactcttagtctaaatcattttatctgttgtaatacaataaagtttacattttgcaactcattgaatcgaaaaagttaggctttgttactacattttaaaaatgagcatgttaaag

SEQ ID NO: 674376 - DNA, 530 bp, Homo sapiens
ctgcttgaaacaataaatagaacttcttgaagggaaagattttagagcattgcattttaaccaaaacagtattctgtttgtgcattatttttacactaggtattgtcacttactaggttaattttataccctgtagtggtaatttttaaagaaacatatttggttgagattgtattttcagttactcaagaaagagttaacctctggtttgtagtttaagctctttcttgattcttatatgaaataaaatggaagaactagagcaggcttattcagagaatcaactgtcttcacttgtgatcacttgcataatggcaaaagtacttgatttgttatacaaatttactttgaaatatcttagcagcgaagacagagtcttaagttttcttgatgtctaaacctgataaatttggaaactcttagtctaaatcattttatctgttgtaatacaataaagtttacattttgcaactcattgaatmgaaaaagttaggctttgttactacattttaaaaatgagcatgttaaag

SEQ ID NO: 674377 - DNA, 575 bp, Homo sapiens
ctgtagatagcagcagccttcttaagcagcctgtggccgggcacagtagctcacacctgtaatcccagcactttggaaggccgaggtgggcggatcacctgagctcaggagtttgagaccagcctgtctctactaacaatataaaaattagctgggagtcacggtgggcgcctgtaatcccagctactcgggaggctgaggcaggagaattgcttgaacccaggagacagaggttgtagtgagctgagatcgcaccactgcactctagccttggcaacagtgcaagactgtctcaaaaacagcaacagaragcaggacgtgagacttctacctgctcactcagaatcatttctgcaccaaccatggccacgtttgtggagctcagtaccaaagccaagatgcccattgtgggcctgggcacttggaaggtaaatatgcaaatctttgcacacccttcttctctggaggggcgtttgggtgttttctctttctgcattcagccaggaaagcctggaggtcgggcaggggttggagaggtaagattcagccctggagccaggacttaggttgctttc

SEQ ID NO: 674378 - DNA, 575 bp, Homo sapiens
ctgtagatagcagcagccttcttaagcagcctgtggccgggcacagtagctcacacctgtaatcccagcactttggaaggccgaggtgggcggatcacctgagctcaggagtttgagaccagcctgtctctactaacaatataaaaattagctgggagtcacggtgggcgcctgtaatcccagctactcgggaggctgaggcaggagaattgcttgaacccaggagacagaggttgtagtgagctgagatcgcaccactgcactctagccttggcaacagtgcaagactgtctcaaaaacagcaacagagagcaggacgtgagacttctacctgctcactcagaatcatttctgcaccaaccatggccacgtttgtggagctcagtaccaaagccaagatgcccattgtgggcctgggcacttggaaggtaaatatgcaratctttgcacacccttcttctctggaggggcgtttgggtgttttctctttctgcattcagccaggaaagcctggaggtcgggcaggggttggagaggtaagattcagccctggagccaggacttaggttgctttc

SEQ ID NO: 674379 - DNA, 642 bp, Homo sapiens
ttattttatagaattgtggctgtgggggctgggaagtctaacatgcatagggcaagctggaagctgcatattcaagagatatttgcactcccacatttactgctgcactattcacaatgacacaatagcccacaggtgacaataacctaaatttccaccaatggatgaatagattaaaaaaatgtggtacatacatataatggactattattcagccattaaaatgtagwttctgtcatttgctataacataagtgatccggggagacattatgttgagtaaaattagccagtcacagaaggaaatatactacttgatttatcttatatgagatatctaaaatagtcaaactcatcctcattgaagcagaaaatggactagaggttaccagtggctaaggtagggggaaatgaggggttgctattcaatgggtatagattgtgtcaggcaagatggaaaagttctagagatctgctgtgctacgttgtgcttacagttaaaaatactgtgctgttcacttaaaaatttaatagagtagatcttacatgttttttgccacaataaaaaaaaagttgatgttgtggtcttgagttcaaaggctggaaactccggcataatttctttttttttttaaattatact

SEQ ID NO: 674380 - DNA, 617 bp, Homo sapiens
aaatccgaactttattcagtcagaatatttgttcgctgttactcatttttagctgtaaatacagccttcactaattattcagtgatagttctaaaatatagaatcccctacataatgcttcactgaaaataaaaaaaaaagaaaaaccacactttctcacagtgatcaaaatggatttctttttattttatttcatttttttcacctgagagcagcatatgctttgaatttgtagaaacctgttttatttcatacctgagaaagtaacttttggtgatgcatactttatgaagcctacaaatcacccactttggatttccataagacctgtaaaaatgtaactttgttccagatatttttgtagctggcaacatgtcctttttttctctctctctttcttcagagtcagactctggggatacattaactcagtggccygttttatatgaggtgagattttggattcagtcttatttatgactttgatcttgcagattttgcattcttccttttaaaatagtccagttaatttggaatttgaatatttcagactcaggatttctaaaaataactttaattttaatttcagattgtatttgctttttgtgacataaggc

SEQ ID NO: 674381 - DNA, 1417 bp, Homo sapiens
tgcaggtgactagccagtcttttgttatatctctaaacataagacaaacaataaagtggggttttttcttaaaagaaaaaaaaacctcaatattagtcacagtaagcctcaacatatgggaataggtgcagggcgggtaagggggaggggaacccactcagtttttcaaacctttaaaactgaaaaaatatgtatccctgctttctgtatatgcacataatgtaaaatttcatcaaccacaatattttaaaagacagaaatcatgagatatatcacatctaaatggaaatatcatctaaggaagcaccatttatcaacatcactttgaaatgcagtggaggatgtgatggcattatgtagatctcaaatatctatgggtgaatgaaattgggtaaccttagcaaccccaggtacatccatgcagctataaatcaaatgtcagcactctgagctatgcacaaaataaagaaataattctttgaaatattcataacactatgcagtgtattattttgtaagtctgtccccattatgcatttttgaatctagctaaaaaaaatacacataacatttgcataatgcatcactcccattcacccacccacccaccaaccaacatccttacgagcttctggaaacaggcagacctgcactatatccactgcagaactctggttcttatgtttgagaaggagagggaattttataaacaggcagctagtctgacagccaccgaaatggtttcatattgactactccattaaaaaaataacaactaaataagatatgagaattttggaaaaagtgtcatgatataggtacatttttgtatttgtgaaagtaatatattcaatattccaatctctgaaactggaagagatttttttaaaaaataaattcttgctggcaagaaaatatactagtcttctaatcgggagtatcttgtcaatatagagttgtagcatgtaactcaaaataaagacttttatttcatttatacttcagatttttttctttgataatttagcttatttggagggtattttataaaaatacatttattagcacattttaaaaattctgtccctacacccattcctggaactgacagtgcaggtgtctgaatatcctaatgcctgtgatggattccaaattccgtgaaatgataagagctctgagatagggctcagtacaattytaaatcacacacacacacacacacacacacacacacacacacacacagaggtatatatgctgagactacataaagaagaccaaaatacccataggttgataattgctttgctgttaaagttttataagcacgttcaggttaaaatatccaacacagctaaccaattgagtcatcttgatacatttaagtggctgctgtaggaaatagtgctgcttttcg

SEQ ID NO: 674382 - DNA, 1417 bp, Homo sapiens
tgcaggtgactagccagtcttttgttatatctctaaacataagacaaacaataaagtggggttttttcttaaaagaaaaaaaaacctcaatattagtcacagtaagcctcaacatatgggaataggtgcagggcgggtaagggggaggggaacccactcagtttttcaaacctttaaaactgaaaaaatatgtatccctgctttctgtatatgcacataatgtaaaatttcatcaaccacaatattttaaaagacagaaatcatgagatatatcacatctaaatggaaatatcatctaaggaagcaccatttatcaacatcactttgaaatgcagtggaggatgtgatggcattatgtagatctcaaatatctatgggtgaatgaaattgggtaaccttagcaaccccaggtacatccatgcagctataaatcaaatgtcagcactctgagctatgcacaaaataaagaaataattctttgaaatattcataacactatgcagtgtattattttgtaagtctgtccccattatgcatttttgaatctagctaaaaaaaatacacataacatttgcataatgcatcactcccattcacccacccacccaccaaccaacatccttacgagcttctggaaacaggcagacctgcactatatccactgcagaactctggttcttatgtttgagaaggagagggaattttataaacaggcagctagtctgacagccaccgaaatggtttcatattgactactccattaaaaaaataacaactaaataagatatgagaattttggaaaaagtgtcatgatataggtacatttttgtatttgtgaaagtaatatattcaatattccaatctctgaaactggaagagatttttttaaaaaataaattcttgctggcaagaaaatatactagtcttctaatcgggagtatcttgtcaatatagagttgtagcatgtaactcaaaataaagacttttatttcatttatacttcagatttttttctttgataatttagcttatttggagggtattttataaaaatacatttattagcacattttaaaaattctgtccctacacccattcctggaactgacagtgcaggtgtctgaatatcctaatgcctgtgatggattccaaattccgtgaaatgataagagctctgagatagggctcagtacaattctaaatcacacacacacacacacacacacacacacacacacacacasagaggtatatatgctgagactacataaagaagaccaaaatacccataggttgataattgctttgctgttaaagttttataagcacgttcaggttaaaatatccaacacagctaaccaattgagtcatcttgatacatttaagtggctgctgtaggaaatagtgctgcttttcg

SEQ ID NO: 674383 - DNA, 254 bp, Homo sapiens
ttgattgtcttttcaaaaactcatctaaattatttcttccttggcatcacyacaattcagggagactcatactgtagcatcataccatggttttcgaagaaagattgagatttaagagagaccaactaaagaataaaacacacttctaattaaagatggcaggttgcacccaaatttacccctgcttctttcccaatattaactaaactgacaaagggggaaaaatattttaaagggataaaagcaaaaaaaaa

SEQ ID NO: 674384 - DNA, 520 bp, Homo sapiens
aactgactgaggaagaatacttcatgggaacactgagaactgcaaaaattgacccaaagtaaattagaaatagtagaaacaaatggaacaaaacataattgagaacagctaaaactctataaaataacatgttattgactgaaaaattgatgaaaaaataaaatattcttgacaaaatttatgtctgcaaaaatggtccaaaaattggattttgtagaattaataaacacatatataagcacaaaaactctacatgtaaaatgcagaagccrtaattgatgaaattcaatatgaacaaaagaccttgatctttcaattattcattgtacaacatacacagaaaaaaaatcattgatcacagtaaagacaattttagcaaagcaaaaatgaaaatggaaaagatggaaatgggtcaaaaggatcatatagcatattgatccaagaatgaaattggtaaatagagttttgttcagaaaatactatctttacaaaaagccaacaatgttgatacaattttgat

SEQ ID NO: 674385 - DNA, 638 bp, Homo sapiens
gttgtctgtgccaagggagaaaagaaagctattgtgacccaaggaaaggtgttggagtccaaggagggtgagaaaggcatgcctgaagaacaagggatggtagcatggctagcatgttagagtccctgcatggttaagagagcttctacatggtgacatggcccagctacacgatgaaaagtgtccctgctttatggcagcctgaaggaggtagtggtgagggatctgagctcagactaagtgaggagagagtctgcatgtgtacacacatgcacacatacgcacacacatttcataacttttrttccactgagtgaacctagaagcagccaaaactcaattgcaatgaatatgtccagtgtcagatctcagtttctaaataccaaggtctacaaacaggaaccagatatacttgaagaaattatagattccagaaccagaacaataagagcagcaaaagaccacactggtttatcttataccaaaaagtaagaaagtgttcaaaatgtaataggaacatgttgtagagtgcaaaattcaggttgacaggcccctactggccaaaatctagaacatttgaccaccataataaattattatagtgtggtgggttgaatagcatcccccttccaaactgt

SEQ ID NO: 674386 - DNA, 600 bp, Homo sapiens
ttcaggaatggaaaaccacacttcatatattctcacttacaagtgggaactaagccctgaggatgcaaaggcataagaatgatacagtggattttgaggactcgggggaaagagtgggagggggatgagggataaaatactatacatygggtacagtgtacactgctcgggtgataggtgcaccagaatctcagaaatcaccatgaaagaacttattcatgtaaccaaacaccacctgttcccccaaaaacctattgaaataataaataaataaataaataaataaataaataaatattttaaaaataaccaccattaaaataattacaacataaaaactttgtgtattgcaactttcacttgcatcattactttgcctttcatttagtcatgcctgtggcattgttggcattgttgctaatggaaatgctcacgtgtatataagatctagacaaagaagctgtctggggtttttttggatctactcatgcctttttctatataaaaatgtatttatagataagatttagaacagaagggaagtatgtaaaatcacaactcacaagcactcagcactgttgataggatattcatgtctga

SEQ ID NO: 674387 - DNA, 1948 bp, Homo sapiens
ttagaggtcaaagacaaagatcagttaatttggccattaacagaaagctagtaatgtttctgttattacttaattctgaatctgcacttacagtattttgcccaatatttgataatgctaaaaagacttttgaaaaatttcgtaaattctaaacttcttatatttccgaagcatatgaaacataatgtgtacaggtactacatagattaaaagattttattccttatcaaaaactgccagaaacttcattatttaggaactgataatgttgcaaattattttctatgtgaacatatttaaatcacaaatttctttcrtgacttgtttatccagtaattgtaaataaataaagagcactggcatcaaactgatcaaaacagtcttctaactaggaagtcttataaacacaaaattaaaaaaaatcaagggtctctattgatctgtagctaaaatataagttatgatgagcaactcaacctcttgagtggctaaggttttcaaatacgttgttcatataaattcccgggaccaagtaataatttgctcttttaaatttgaacctattttcaacagtgtgagatatacattttatcccctttaaaaaatgtttttccattgccagagttggataaattacattataattagaagtcagtttacaaaaggtttaagtcttccttcccccctaagatgaagcaatggttattctggtttctccccagtacaagtttgtgaagactgatttagaaatcttagagtgttattaatagcaggtaaaattcaactatatcatccccttttaggaaggaaaaggttcaagttctgaaattacacatgccttaggacctcatttttcattgaaagcatgactaaatatggctaatggttacatcaatatttttggagagcttgataaattagttccaatttctgaacttgagtcatgtccattaacttcaggtaacctcaatcttctcatcccttcccttctcctttcttgtgagatgcaaggcagaaaatactttagaaaatccaaggttgtaatctgctttagatcattctcatcattcttactacttattattctaacattcaacctgtataccagcagtctaactggacggaatagatctcttacaatggtcaagtgttacttaaatgttttactttttttatacgtatcaaatttcacaaataaattgttttaaaacccaactgcttattattcccacttagtttgtatgaaatgcaactgggagaaaacatttgggaacaataaaaactatagattaaattagggacatagataaatgctgcagacatcagtagtttattgtttgtttagtccaaacacattcaatatggaaactcaaagaatactttccacctgaaacaattaaactagattctactagcatataatgcttaacacattacagcaataaagatggtaatccattgtcttctatacctactaaagccaagatggtaaagccaatttggttgcaatagtgtcataaggatagaatattaccatcaaaaaataaaacaaaatcagcaaataacagtaatggtagatgaatatttttactctgtttcactgaaaagaggacaaaatgttaaaactccacagtactgcaggtgaacaatcaccatgtaaacttctccatatgatgttttaatgttttattcatggtatgtaaagactgaagctgaatggctctttgctctacttttctattattacacttaacatttgtcattacttttggtgccagaacagttttcatggatggcagggcaatatcctgaattggaaattatatatatatatatatatatggaaacagaaatacaagaaaatatgcttgggggaaaaaaaacattgacaataaaacaactgcttctttaaaagtagtattaataaaggcttcaaaactccaaagta

SEQ ID NO: 674388 - DNA, 530 bp, Homo sapiens
tttcacatttgtcctttgtggcaaataatacatcctcatattaaaagaaagctagcttactagggatacagctcatttgtccctggtctggcccttggggaaagagcttgattgtatccaaagcataagcatcgtctaaaaatccaacagactttctttccttcccatcaatgtataaattcacctgaaacactgctttagaacggtcaaaccttcagggcttccagaggactactccacccagcctcaagacagccctgtgagkgggggaaaatgaggcgcagcaaggccaaggcccactgctcatgaagctgagcttcaaacccagacctgccagacacccagtccatgcatttcccacaggcccacagggttgctcctcctaaacgggcggagaagcaaaggctgctctttccaaggctctgtgggtccagcagaacatttgcttgtcaggtcaggtgagtttattcatcttataatttaaaccagactgggccttaaagacaacacctcatgaggttgaaaagtat

SEQ ID NO: 674389 - DNA, 530 bp, Homo sapiens
tttcacatttgtcctttgtggcaaataatacatcctcatattaaaagaaagctagcttactagggatacagctcatttgtccctggtctggcccttggggaaagagcttgattgtatccaaagcataagcatcgtctaaaaatccaacagactttctttccttcccatcaatgtataaattcacctgaaacactgctttagaacggtcaaaccttcagggcttccagaggactactccacccagcctcaagacagccctgtgagggggggraaatgaggcgcagcaaggccaaggcccactgctcatgaagctgagcttcaaacccagacctgccagacacccagtccatgcatttcccacaggcccacagggttgctcctcctaaacgggcggagaagcaaaggctgctctttccaaggctctgtgggtccagcagaacatttgcttgtcaggtcaggtgagtttattcatcttataatttaaaccagactgggccttaaagacaacacctcatgaggttgaaaagtat

SEQ ID NO: 674390 - DNA, 2249 bp, Homo sapiens
tctgtgtgtgatcctgaacaagaagctgtcttactcctctaaacctcagctgcagcacccagagtttcttgtgccaggatatcaccacatccattgtgcatactcaagataaatgaatgtaggcttagtgagggtcaaaaaaaaaaagtggggggcaggtggtggttagaaaagcaagtaataccacctcaaggaggagtaggtgagatccagtctcttgtttgcttttcttttaggtaaamtgttaaagcatattcataaaggagcaaactcacatttacaacctaaaaaacatcaggctataagaatctcatcttgttttccaaatgccttgccaagtttgagaatgccaaacagaatctgtttcagatgcctttttccctcccttttctcactcctccttttagtccctttccatattccctcctcctttccctttctggacctgtcattgccccatgccaaaatcaagaagtagaatttaaaaactgtgctgttagaaggaacctctttcacatccccttgcccagaggcaaaggggataagagaaagtagttactgtctgtccagatttttttacactattgtgataatgataaatcattccccctctgcactggcaaggctttggactctgtgttctgtatacgttgcctcttcatcattttcttcaagtttttatttgctagctttttttctacctatgtgccattgcaagatacttatggagtggctggaataggacagtttctttatcagcatcatcaatgaatgttcttgaggcactgcatgtgaaatacagggctaagcaaacatgtttaagatatgcttcttttcctagaggattgcaatctacctaagaagcaggagctaaataagtaataaaatgcaattcaaagtcataaaagtggggagtgcaaagaatgaggaatgggcagttgcatatattggttattgccagaggctgaaccactggtgtatgtcctacaagagagatattagcctatcctgacaccttttgatgaaaatattgtgcccattttacagataagaacaatgaactaagagagtagagatggcctcccccgcagtgtaatttgccagatcccactacttactctgtgagggaaaaaaaataatgagtgggctaaacaataggaattcaaggtaatgtgtttgaaagccaaggcccaacagagattctcgaagtgtggtacccagacaagaagcatcagcatcacctgggaacctgtcagaaatgcatatgtttgagccgcaaccgaaacctgctcaatcagaatctaagcgtctgggcattaaggcttagcaattcgtattttaatagggccccagaggttatctggaggcaggctaaagttgagaatcattgacccaggaacaacgtatttcagctggatggggaagcaggcaatcagagacagaggcgagatggtgaggctgggttgagtggcaagcagtgataatccaaagctctgagatggcagcctgcagacctggctgggtgtgaatgggcctactatagcacccctcagtgagtagcctggtgtcctgctgaggataaaatgtgaggactgttcccagctttcttagaccacgtggtcctgctatgtcattactctgaagacagggatccctctgcctgagaatttagatagctggttgtcccttgtgagggagctcctctgcagcctcaagggaacttcaagaaaagaggtttatgaccacttaaaaatactcatggcttcatttggatgcttataaagcacttttaatcatgatgaaatgcaagtattgcctttgaatgccttgagttgaagggaaaagttaacgagtgaatgatttgaatcatttctcttcttagcctggagcaagccattaaaagaatgaaacttctagtcaagatggaaacagcctgccccaaagggatgattgaaagagtcttcaggacaggcatttgtcctttagttttattttcactttaattattataaaatctgatttaagtgttgaccatagcctccagttccagccagctgaaaagataagcacatttgtatttgtgtggacaagtctgcagacttcttattgttgtctcaagccagacaatacaacccttttaaataacagttcctcataaggtgagattaaagatatttcttcttgctgttaccaaggaaaatcatgatctagttgattatgtacatgaaaagaaagtatctcttggctat

SEQ ID NO: 674391 - DNA, 2249 bp, Homo sapiens
tctgtgtgtgatcctgaacaagaagctgtcttactcctctaaacctcagctgcagcacccagagtttcttgtgccaggatatcaccacatccattgtgcatactcaagataaatgaatgtaggcttagtgagggtcaaaaaaaaaaagtggggggcaggtggtggttagaaaagcaagtaataccacctcaaggaggagtaggtgagatccagtctcttgtttgcttttcttttaggtaaactgttaaagcatattcataaaggagcaaactcacatttacawcctaaaaaacatcaggctataagaatctcatcttgttttccaaatgccttgccaagtttgagaatgccaaacagaatctgtttcagatgcctttttccctcccttttctcactcctccttttagtccctttccatattccctcctcctttccctttctggacctgtcattgccccatgccaaaatcaagaagtagaatttaaaaactgtgctgttagaaggaacctctttcacatccccttgcccagaggcaaaggggataagagaaagtagttactgtctgtccagatttttttacactattgtgataatgataaatcattccccctctgcactggcaaggctttggactctgtgttctgtatacgttgcctcttcatcattttcttcaagtttttatttgctagctttttttctacctatgtgccattgcaagatacttatggagtggctggaataggacagtttctttatcagcatcatcaatgaatgttcttgaggcactgcatgtgaaatacagggctaagcaaacatgtttaagatatgcttcttttcctagaggattgcaatctacctaagaagcaggagctaaataagtaataaaatgcaattcaaagtcataaaagtggggagtgcaaagaatgaggaatgggcagttgcatatattggttattgccagaggctgaaccactggtgtatgtcctacaagagagatattagcctatcctgacaccttttgatgaaaatattgtgcccattttacagataagaacaatgaactaagagagtagagatggcctcccccgcagtgtaatttgccagatcccactacttactctgtgagggaaaaaaaataatgagtgggctaaacaataggaattcaaggtaatgtgtttgaaagccaaggcccaacagagattctcgaagtgtggtacccagacaagaagcatcagcatcacctgggaacctgtcagaaatgcatatgtttgagccgcaaccgaaacctgctcaatcagaatctaagcgtctgggcattaaggcttagcaattcgtattttaatagggccccagaggttatctggaggcaggctaaagttgagaatcattgacccaggaacaacgtatttcagctggatggggaagcaggcaatcagagacagaggcgagatggtgaggctgggttgagtggcaagcagtgataatccaaagctctgagatggcagcctgcagacctggctgggtgtgaatgggcctactatagcacccctcagtgagtagcctggtgtcctgctgaggataaaatgtgaggactgttcccagctttcttagaccacgtggtcctgctatgtcattactctgaagacagggatccctctgcctgagaatttagatagctggttgtcccttgtgagggagctcctctgcagcctcaagggaacttcaagaaaagaggtttatgaccacttaaaaatactcatggcttcatttggatgcttataaagcacttttaatcatgatgaaatgcaagtattgcctttgaatgccttgagttgaagggaaaagttaacgagtgaatgatttgaatcatttctcttcttagcctggagcaagccattaaaagaatgaaacttctagtcaagatggaaacagcctgccccaaagggatgattgaaagagtcttcaggacaggcatttgtcctttagttttattttcactttaattattataaaatctgatttaagtgttgaccatagcctccagttccagccagctgaaaagataagcacatttgtatttgtgtggacaagtctgcagacttcttattgttgtctcaagccagacaatacaacccttttaaataacagttcctcataaggtgagattaaagatatttcttcttgctgttaccaaggaaaatcatgatctagttgattatgtacatgaaaagaaagtatctcttggctat

SEQ ID NO: 674392 - DNA, 1469 bp, Homo sapiens
tttaaatgaatattctttttgaaaaataactttcttctagcttcaaaactgcaacccatttttcctcccaaatcagcaatttggaaaatgatttttaaaagctcaatattaaaaaatgtgtaagtccatttagtgttctaatctttaattttcttgtgtttcatttgttctatattttaaaaagacaagataaaaattgtaagtacttaacttttgttaaaaaatcagagagacaggcatacgactccatctggaattatttcaaaataagtctcatgctgtgcacacacacagccacacacacatacgcacatacacatgtacatgcacaatggaaaggaaaaagaaaggatttttactatatttctgtatggcttttgatttaccccaatgaaaactaaggaagtatgaaaaactgatcataactagaattttaaaatataatcccaaaatattcatgtgtcttttgataaattctaggtcctccatttgaaatatgattaatatgctgtgggctagaagaaggagatgtttctaaataattgcacagaaaaagcactaaggattcgcttaagtagagagagatggcaggttcttctggaaagagaagggagtacaaaaaattgatttttatgctcaccaaggggagatggaaagaactgagaaacataaaagaagatggatgctagagaacagaacaaaagcaatttcctaagagacccgggataggtgacgattggttttcaattcaggcaatgacagcctctctatattccatgatttctaccaatccagatgcaattacactgaatacaagcaattagtttgaatgacagctgccgaagactaaagaggaaaaacggactggctggccctcggcctagttagcctagaggaggttttcacgtcagaaactgcacaagcacgctcagcaggccttggcatgggtgctggcataggtgaagagagtgcaatgacagaaataagccggggcactttgaatgcagagcaggcgcagagaaaaggattaaatgcagaatgctcatttctctccaatatatgacattaggtgaaaaactgctttactatccacatcaacatgcataatgggtagtagatattatttcaataataatgtaattattgagcacctgcacagtgcctaagaccttgccatcaatytcaggaaaggaaaaaaaaaaaagcaaataaaaaataagcatggaccctcctcacaaagaaatgaaccaaagggcaattcacacaagaagtgaagtaatcatgcgctcttggttttgaacaccaaagcatttctgaatttacccttctgtcaagaaaggtaattatttaaaaagagagagaaggggtgagagaaagagattttcttttcctagtctttagaagatgatagttaaattataagggagctactgattatggatagacaaggattaacttagaccttgcaa

SEQ ID NO: 674393 - DNA, 1469 bp, Homo sapiens
tttaaatgaatattctttttgaaaaataactttcttctagcttcaaaactgcaacccatttttcctcccaaatcagcaatttggaaaatgatttttaaaagctcaatattaaaaaatgtgtaagtccatttagtgttctaatctttaattttcttgtgtttcatttgttctatattttaaaaagacaagataaaaattgtaagtacttaacttttgttaaaaaatcagagagacaggcatacgactccatctggaattatttcaaaataagtctcatgctgtgcacacacacagccacacacacatacgcacatacacatgtacatgcacaatggaaaggaaaaagaaaggatttttactatatttctgtatggcttttgatttaccccaatgaaaactaaggaagtatgaaaaactgatcataactagaattttaaaatataatcccaaaatattcatgtgtcttttgataaattctaggtcctccatttgaaatatgattaatatgctgtgggctagaagaaggagatgtttctaaataattgcacagaaaaagcactaaggattcgcttaagtagagagagatggcaggttcttctggaaagagaagggagtacaaaaaattgatttttatgctcaccaaggggagatggaaagaactgagaaacataaaagaagatggatgctagagaacagaacaaaagcaatttcctaagagacccgggataggtgacgattggttttcaattcaggcaatgacagcctctctatattccatgatttctaccaatccagatgcaattacactgaatacaagcaattagtttgaatgacagctgccgaagactaaagaggaaaaacggactggctggccctcggcctagttagcctagaggaggttttcacgtcagaaactgcacaagcacgctcagcaggccttggcatgggtgctggcataggtgaagagagtgcaatgacagaaataagccggggcactttgaatgcagagcaggcgcagagaaaaggattaaatgcagaatgctcatttctctccaatatatgacattaggtgaaaaactgctttactatccacatcaacatgcataatgggtagtagatattatttcaataataatgtaattattgagcacctgcacagtgcctaagaccttgccatcaatctcaggaaaggaaaaaaaaaaaagcaaataaaaaataagcatggaccctcctcacaaagaaatgaacyaaagggcaattcacacaagaagtgaagtaatcatgcgctcttggttttgaacaccaaagcatttctgaatttacccttctgtcaagaaaggtaattatttaaaaagagagagaaggggtgagagaaagagattttcttttcctagtctttagaagatgatagttaaattataagggagctactgattatggatagacaaggattaacttagaccttgcaa

SEQ ID NO: 674394 - DNA, 521 bp, Homo sapiens
cgtgttgctttctttgctgggggactcagatattaactccattaatagtttgaatgcagtgcaaatgcttctcmttctgtagttattgtttgtgtttagctggtctttgtctagaaatgatcattgctgcaggtgtaggaggaaggggcaccattgtgcagttctcagtctgtatcaaaggtttctgaaattgctgccctgagaagtcaggcaggttgagaggaggggagatctctttactttcctgaggctgttttctgcagtttggggttttggagaaggcatcaaggctgaaggacggtgggatctcccctagggggcctcaaggcaactgctgaagtcgtttttctcagtcctttcaaatcagatcttccttttcttttctttttcttttcgtttttttttctttttttgagacaaggtcttgctctgtcacccaagctgaagttcagtggtgtgatctcagctcactgcaacctctgcctcccaggttcgagtgatgcttgtacctcagccttctg

SEQ ID NO: 674395 - DNA, 646 bp, Homo sapiens
tagccctctctttgttttgtttttttgtttttgtttttgttttgagacagagttttgctcttgttgcctaggctggagtgcaatggcacgatctcggctcacgacaacctctgcctcctgggttcaagcgattctcctgccttagcctcccgagtagctgggattacaggcatgcgccaccatgcctggctaattttgtgtttttagtagagatggggtttcgccatgttggtcaggctggtgtcgaactcctgaccccaggtgatccrtcgtctcggcctcccaaagtgctgggattacaggcttgagtcaccacgcccggcctagccctctctttaaaggggcttgtgacccattccagggctgggtcagaggacacttgaaggatgccacagagtccaattgtatagtattctctctggcatcattcagcacatcaggcccaggtgaaggtctccccatctcctatagtagtgagaatcccccacctatccaaggctgatggcagtgcccccaagactgttcaagagagtgcgtccccaagtcctggggcctctggcatcaatctcggcctcttcactttcctcccagcagggcatgtaggctgtcttataaacagcgtcctgggtgcctgctctggcatctc

SEQ ID NO: 674396 - DNA, 498 bp, Homo sapiens
tagctggaagcttgtgccacctggagcggaggacatcaagacttcagcacacctgtaactctttttttttttttttttgagacggagtcatgctctgtcaccaggctggagtgcagtggcgtgatctcagctcactgcaacctccgcctcccgggttcaagcgattctcctgcctcaacctcccgaggagctgggactacaggtgcgtgacaccatgcccgtgctaatttttgtatttttagtagagacaaggtttcactatgttggccaggatggtcttgattgcttaacctcgtgatctgcctgcctcggcctcccaaagtgctgggattataggtgtgagccactgcgcccggccacacctgtaactcttagctgcagcatccttctagaggatctcttyataaccctttgcttacttctctcccttgtgtgttctacctctcattggattttaaacaagtccaaggctatcaggttaaaaaagataaaataaaa

SEQ ID NO: 674397 - DNA, 1764 bp, Homo sapiens
ccctattttagttctgtgccttgacttttcttctttttctttattcttttaatgataatttttgctttctaaactttttttcttttaaaatcatccagcctaaaatggcattgccttgttttgttgaaacctaccttatcttgttgaagacagtaattataggccttatgtgtgagtatacatgcacacacacacacacatatcttttgtttgtttgggtccctgactttcatgttagacactttttctcaataatttggtgatttatctggctggttattcttttttaagagtcatttattaacaagttgatggcagtctcgtagtgcatagcacgtgatgggaacgcgaggcagttgcacactcaccctgaggatcaccagctctcagcatctgtggggcttttcttttgggttgtagcttcctaacagcagtggttcagtagtggttcaaactgtgactgagttagaatctcttggagagcctgttaaaacacagaaggccaagactcaccgccaaagttggtgattgggtaggtctgggtaggcttgcatttctaacaagttcccagctgctgagcatgctgtgggcttggagagtacactttgaaaagcactgtcatggtgcaggatttcttaatgttggcactattgacattttgtgctgggtaatttgttgtgtggcgctggcctgtgtatttgtaggatgtttagcagcatccctggtgtctatccactagatggctacccccaacagcccckatccatacaccaggtgtgtgaaacaaacatgttttgagacattgtcaacatgttcccctagtggacgaaattaccctacattgataaccactgactccttaaggaattctctctcctgcccggaaaataaaagtgcagctgtaagcaatctgggagacaaaaggaaaagggacttgagactcacaattcagttggtagactctattaaattccctcactttctgtgttgcctttcaccaatgccaccccactgtccattttcagctgtaaatctctccaaaggtaaatctgttccatagaggtagaagagggccaggttcctggagaggggatctggggtgtaactgagcttcacataaactttcagtctatcctccagttggcagctttgccctgaagtcctgctatcagaggtacctactatcccgagatttaagtatttccaagattcaccagagctaagcagcttccttccctgcaagctcacagttctgttttctctggtctgccaaatcaattgctatttatccatctgctttcttgactctaaagttttgttgacatctctcatctgctgttatctgctctcccattctctttgttcttgtagatttatggcttttaagcatttattttcattttggcgtgttacagaggagcaatagtaaacatgtgtgtttaatctgctacgtgtagccagaatttccagctgcttatctgaaactaggtttggatgagagggaaggtggaaaggacgtaaaatatgtacactggagaggtgttattaatggttttggttaaagaaaaaaatggaaatttgaaggtacaaaaaacactcttttcatgtttcttttgttctgcctaaagccctgattgttatatctttatcatctgttcaataaaagcaacatttgaaactaacaatatagcccttaagaggccctgaaataaagggacctccaaaatagacacctttaagcaagacagtatttataaaaaccca

SEQ ID NO: 674398 - DNA, 1764 bp, Homo sapiens
ccctattttagttctgtgccttgacttttcttctttttctttattcttttaatgataatttttgctttctaaactttttttcttttaaaatcatccagcctaaaatggcattgccttgttttgttgaaacctaccttatcttgttgaagacagtaattataggccttatgtgtgagtatacatgcacacacacacacacatatcttttgtttgtttgggtccctgactttcatgttagacactttttctcaataatttggtgatttatctggctggttattcttttttaagagtcatttattaacaagttgatggcagtctcgtagtgcatagcacgtgatgggaacgcgaggcagttgcacactcaccctgaggatcaccagctctcagcatctgtggggcttttcttttgggttgtagcttcctaacagcagtggttcagtagtggttcaaactgtgactgagttagaatctcttggagagcctgttaaaacacagaaggccaagactcaccgccaaagttggtgattgggtaggtctgggtaggcttgcatttctaacaagttcccagctgctgagcatgctgtgggcttggagagtacactttgaaaagcactgtcatggtgcaggatttcttaatgttggcactattgacattttgtgctgggtaatttgttgtgtggcgctggcctgtgtatttgtaggatgtttagcagcatccctggtgtctatccactagatggctacccccaacagccccgatccatacaccaggtgtgtgaaacaaacatgttttgagacattgtcaacatgttcccctagtggacgaaattaccctacattgataaccactgactccttaaggaattctctctcctgcccggaaaataaaagtgcagctgtaagcaatctgggagacaaaaggaaaagggacytgagactcacaattcagttggtagactctattaaattccctcactttctgtgttgcctttcaccaatgccaccccactgtccattttcagctgtaaatctctccaaaggtaaatctgttccatagaggtagaagagggccaggttcctggagaggggatctggggtgtaactgagcttcacataaactttcagtctatcctccagttggcagctttgccctgaagtcctgctatcagaggtacctactatcccgagatttaagtatttccaagattcaccagagctaagcagcttccttccctgcaagctcacagttctgttttctctggtctgccaaatcaattgctatttatccatctgctttcttgactctaaagttttgttgacatctctcatctgctgttatctgctctcccattctctttgttcttgtagatttatggcttttaagcatttattttcattttggcgtgttacagaggagcaatagtaaacatgtgtgtttaatctgctacgtgtagccagaatttccagctgcttatctgaaactaggtttggatgagagggaaggtggaaaggacgtaaaatatgtacactggagaggtgttattaatggttttggttaaagaaaaaaatggaaatttgaaggtacaaaaaacactcttttcatgtttcttttgttctgcctaaagccctgattgttatatctttatcatctgttcaataaaagcaacatttgaaactaacaatatagcccttaagaggccctgaaataaagggacctccaaaatagacacctttaagcaagacagtatttataaaaaccca

SEQ ID NO: 674399 - DNA, 1764 bp, Homo sapiens
ccctattttagttctgtgccttgacttttcttctttttctttattcttttaatgataatttttgctttctaaactttttttcttttaaaatcatccagcctaaaatggcattgccttgttttgttgaaacctaccttatcttgttgaagacagtaattataggccttatgtgtgagtatacatgcacacacacacacacatatcttttgtttgtttgggtccctgactttcatgttagacactttttctcaataatttggtgatttatctggctggttattcttttttaagagtcatttattaacaagttgatggcagtctcgtagtgcatagcacgtgatgggaacgcgaggcagttgcacactcaccctgaggatcaccagctctcagcatctgtggggcttttcttttgggttgtagcttcctaacagcagtggttcagtagtggttcaaactgtgactgagttagaatctcttggagagcctgttaaaacacagaaggccaagactcaccgccaaagttggtgattgggtaggtctgggtaggcttgcatttctaacaagttcccagctgctgagcatgctgtgggcttggagagtacactttgaaaagcactgtcatggtgcaggatttcttaatgttggcactattgacattttgtgctgggtaatttgttgtgtggcgctggcctgtgtatttgtaggatgtttagcagcatccctggtgtctatccactagatggctacccccaacagccccgatccatacaccaggtgtgtgaaacaaacatgttttgagacattgtcaacatgttcccctagtggacgaaattaccctacattgataaccactgactccttaaggaattctctctcctgcccggaaaataaaagtgcagctgtaagcaatctgggagacaaaaggaaaagggacttgagactcacwattcagttggtagactctattaaattccctcactttctgtgttgcctttcaccaatgccaccccactgtccattttcagctgtaaatctctccaaaggtaaatctgttccatagaggtagaagagggccaggttcctggagaggggatctggggtgtaactgagcttcacataaactttcagtctatcctccagttggcagctttgccctgaagtcctgctatcagaggtacctactatcccgagatttaagtatttccaagattcaccagagctaagcagcttccttccctgcaagctcacagttctgttttctctggtctgccaaatcaattgctatttatccatctgctttcttgactctaaagttttgttgacatctctcatctgctgttatctgctctcccattctctttgttcttgtagatttatggcttttaagcatttattttcattttggcgtgttacagaggagcaatagtaaacatgtgtgtttaatctgctacgtgtagccagaatttccagctgcttatctgaaactaggtttggatgagagggaaggtggaaaggacgtaaaatatgtacactggagaggtgttattaatggttttggttaaagaaaaaaatggaaatttgaaggtacaaaaaacactcttttcatgtttcttttgttctgcctaaagccctgattgttatatctttatcatctgttcaataaaagcaacatttgaaactaacaatatagcccttaagaggccctgaaataaagggacctccaaaatagacacctttaagcaagacagtatttataaaaaccca

SEQ ID NO: 674400 - DNA, 1764 bp, Homo sapiens
ccctattttagttctgtgccttgacttttcttctttttctttattcttttaatgataatttttgctttctaaactttttttcttttaaaatcatccagcctaaaatggcattgccttgttttgttgaaacctaccttatcttgttgaagacagtaattataggccttatgtgtgagtatacatgcacacacacacacacatatcttttgtttgtttgggtccctgactttcatgttagacactttttctcaataatttggtgatttatctggctggttattcttttttaagagtcatttattaacaagttgatggcagtctcgtagtgcatagcacgtgatgggaacgcgaggcagttgcacactcaccctgaggatcaccagctctcagcatctgtggggcttttcttttgggttgtagcttcctaacagcagtggttcagtagtggttcaaactgtgactgagttagaatctcttggagagcctgttaaaacacagaaggccaagactcaccgccaaagttggtgattgggtaggtctgggtaggcttgcatttctaacaagttcccagctgctgagcatgctgtgggcttggagagtacactttgaaaagcactgtcatggtgcaggatttcttaatgttggcactattgacattttgtgctgggtaatttgttgtgtggcgctggcctgtgtatttgtaggatgtttagcagcatccctggtgtctatccactagatggctacccccaacagccccgatccatacaccaggtgtgtgaaacaaacatgttttgagacattgtcaacatgttcccctagtggacgaaattaccctacattgataaccactgactccttaaggaattctctctcctgcccggaaaataaaagtgcagctgtaagcaatctgggagacaaaaggaaaagggacttgagactcacaattcagttggtagactctattaaattccctcactttctgtgttgcctttcaccaatgccaccccactgtccattttcagctgtaaatctctccaaaggtaaatctgttccrtagaggtagaagagggccaggttcctggagaggggatctggggtgtaactgagcttcacataaactttcagtctatcctccagttggcagctttgccctgaagtcctgctatcagaggtacctactatcccgagatttaagtatttccaagattcaccagagctaagcagcttccttccctgcaagctcacagttctgttttctctggtctgccaaatcaattgctatttatccatctgctttcttgactctaaagttttgttgacatctctcatctgctgttatctgctctcccattctctttgttcttgtagatttatggcttttaagcatttattttcattttggcgtgttacagaggagcaatagtaaacatgtgtgtttaatctgctacgtgtagccagaatttccagctgcttatctgaaactaggtttggatgagagggaaggtggaaaggacgtaaaatatgtacactggagaggtgttattaatggttttggttaaagaaaaaaatggaaatttgaaggtacaaaaaacactcttttcatgtttcttttgttctgcctaaagccctgattgttatatctttatcatctgttcaataaaagcaacatttgaaactaacaatatagcccttaagaggccctgaaataaagggacctccaaaatagacacctttaagcaagacagtatttataaaaaccca

SEQ ID NO: 674401 - DNA, 1389 bp, Homo sapiens
tagagccatacgaaaggaggtttttagctctcacctgtggtctttcttcatcatgcacctcctagattcaaaagttcagcagggacatgtcaagctatataaataaaaacaaactaagaaaaaatgtaacattccataccttaaaacgcaaccttaataacgtgaaagaccctgaaggacttgagacgtgaagattttctaccacggtctttgcctgtattatttctgacagctgttcctttctactccctcttgcacacatctttagttactccctgttctccatccctctgataaaatctagagttcccccctcaaattagaaaattaaaaaaaattaaaaatctaaaattaaaatttaaaaaatttttaaaaatctagagtttaaaaaaaatgttctatctcaggcttgtgaaccatattgttagttcacaattaagaatgatgtacatctattggacaagttttaattaattctttcccttggctgattagtaaatttctgcagtgagtacaaatgtttacttggagggctgaagaatgcatttatagctttgatgatgaactagaaggtcatgcccaaaagatatttgtgtccatttttttggagaactgtaaaagagtgtattattgtgagttggataatggtgcgttccttctgtacttagtaatttcatagcaatgatacagctgtgtactataggaaaccacccaaacacttgggagaagtagaataccaatgtaccaatggttcatttctaattaaacttgtttattaattttttcccggggtgtgtatggccttatttcaggtttgagctctttcagagatacaaggactgaaagtgggcaaagaagggctatttttaatgttcaagactcattttttctgaaccatctccttccttctttttatccatcccctcataacaggcatctatttccttaacttttatccttcctgtctttcatgcaagattcatagggaataatttgatatcagatagcataaatataaatataaacatgctgcttttctcaggcatagttagaatatttaaaatctgattttgattatggattgaaaaatgatgtcacatttattgggaaattagatggtagtgagctgctaggagcaaagaagccttatagggcttctggtttaagcacaaggtgattgtaagtcatgggtttttttctgaagactaaaatagcccttccagttggcttagcaattctttgggaattatataacwtataattaataaacaaatgatcaatacaatttgttccagtttgctaaggactattccccgcctctacccccaaatcatcctaaacttaagaaggataattcaaatttcaaaacaaaaagccatcatagtacat

SEQ ID NO: 674402 - DNA, 657 bp, Homo sapiens
cagcatcttgggcaataatgtttaaattccaatgaccaaaaagctttccgaaaggtgggaaggtcaggtcagaagtcaaaatgttaaaattgtttctcccactactcagaactttaatttgaatagtatcattctggaattagtctattggaaaaatattactccaaattaattcttagtacaagtataaaatattgtcattattttagtcattctatcaccttttgtgggctattttaccttcttcctgtgaatctttatgaagttggaataaacgtgtctgttttcatagcctatatccttatgagaatgccataagtaacttacttgtttaacaggtaaagcataatgacatatttccaggctaatgttatagggtaaaattttgaaaaattaatacattttaaagttttcaaaacaatgttgcatatacaataataagctaagtattacatggccataaaataatgcattgtctctatatacatttagaaattactccttacttaattaattatgtattaagcatctactacatttatcatattatttcctactgcttgtttgtccattattactagaaaaaaygcatgcaaggtttccctgtgtccactgtactcataattctcttgtgagcacagattttcacaaaaacca

SEQ ID NO: 674403 - DNA, 1558 bp, Homo sapiens
agaggtagtttaaatcctccagaacacagtcactgcccacagtggtaaatttattaattgacaaacctgggatatatcatggagggtaaagatttaagagatccttcaggtcatggtcttttcttccaggaaattcatctcatgagaaatgaaaagaaaaaaaaaatatgccagtggcatgtacactgctggaaccttcaaaatctactgctttgacacttccacatttttcttgctattacaaacatcatctcttccttgctagagatgttaccgcctccagcaaagtctggataagctagggtggcagacacagttagtaagggacatgaagaatggggaaagaagaagatgggagcagggcctgtcttgcctgggaacgctcacatagatgcatttgtctggtggaccagctggagatggaggttttaatatggtctcacccacatctggggtcttggcaaagatggctagaaagctgggacatctctttccatgtggtttctcatcattcaggcatcaagcgcaagcttctttacatgacaatttattctaagaaggtgggaatggaggctacaaggcgtttaaggcctaggctctagaatttccaggtgtcacttcttctactttctattcatcagagcaagtcacaaaggcagctgagagtcaaaggagaagtagatgtattgcatgctaggaagatcagaacatcacattgcaaaaggctatggacacagagattcatcctgtattgagggccactattaaaacagtagccataccagaaacgtttcccttcacttggctaattcatatttgtcatatggctgtcagtttgtttgccacttccttctgggatcccgtgatctcctgggcctattcctcttttttattttttacttttgagaactagtcttgctctgtcgcccaggctggagtgcaatggtgtaatcccagctcacctcaacctccccctcccgggttcaagtgatcctcctgcctcagcctccagagtaactgggattacgggtacayaccaccatgcctggctaatttttgtaattttagtagagatggggtttcaccatgttggccatgctggtctcaaactcctcacctcaggtgatccacccacctgggcctcccaaaatgctgggattacaggcgtgagccaatgcgcctggccctattactcttatagcccttatcagagtctctgaaatcacccgtttccatgtgcgtcttctccagattgtgagtccaccattttatctctagggtatagtgcagtgcctgggacctgggaagattccactaaatattagttaaatggatgaggctcaaagagctgagaatcttatccatgattacacagaaaataaactcaggtgcacttccaggggatcttacctcaggaaaggaagacattacatcaactttttaaataatagtgattaatacaatggaatgatcgtcttactttggcttacaacaatcaggacgtaactttggcagtggtccttctcattgtcaggtttgttctggggaaaagtctgcc

SEQ ID NO: 674404 - DNA, 520 bp, Homo sapiens
cccctgaactattaatagtagtagtatttgtagggaaagtgagaaaagccagcaagccagcaattgtatggtaagaataaagctagagaaattaatgttgccagtactgtgaccctatttttaccacttctaggctgatgtgggctgggaaatgggttatgcttagaaatgtggagcctgccaagtgtggtggctcacacctgtaatcctagtactttgggaggccgaggagggcagataacctgaggtcaggagttcaagaccagcctgaccaacagggagaaaccctgtctctactaaaaatacaaaattagtctggtggtggatgcctgtaatcccagctgctcgggaggctgaggcaggagaatcgcttgaacccagaargcggaggttgtggtgagccgagatcacaccattgcactccagcttgggcaacaagagtgaaactccatctcaaaaaaaaaaaaaaaaaaaaaggaaagaaagaaatgtggagccacaagtggtaagcttgtagcgg

SEQ ID NO: 674405 - DNA, 1996 bp, Homo sapiens
ccaattgcctgagatgtgtgtggaatctaggttgaaccaaaggaggcaaaaacctaagagaaaaaaaaatgactgctatgtgcatttaggcagatagagccttcgacaatatcagaacttccctcttctcagtgtggcagaggaaaaggaagataactgactttcgttaagtgtggctcagacatagcaagagaaccactgaacccgaagtgattgtgcttactggaataaggcatatctccatggtgacccaagtggactaacagctgcagtccagatgggacaatgtcacagccattgtgaacagagatcactgtggataaggtaaggcaatggatgtcttcaaagatgcctataagggcaaaagatattgaagaccagatttgcctaccgccacctctgcccatgcagagtcaaccatatgcaaaatctgaacattaaataatttataaagacagacggtgtatctgttaagctctataaaaaactgacatgtataagtaatcaaaacctattatccagatgaataatgttcaagtgactgtttctaatgcataaacttttctttcatattgatgatcacaaatttctgtgagtgatctctttcaaaaatgaagctgatcaaaattttacaactgacaaatatgatcaatagccaacacaaacyttagagtaataaaatctgaaacagttgcacttcagcctcttaaaaacaaagacatgactgaaatatttgcaagccaacaggcaccaatggcatggcttcaaacacggttcagtaatagtgccattttcctcactcccacagcaatgagtgggtggcttaagaccagagcagagtaaatctctgggctattacgctgggagtaaattaaaaagtatttataatgtcactcatttgctacctccacacttgtgtaacattttcatcatattgcagtatgctgctttgaaatgctttgtatatttccaggagctatgcttagtgccatcagccaaagctgtttgaggacagggactgtgtcaaatccaatggaaacctcttaatttcattaaacctttctcctgtattgatattgcttccatttattcttcttagcgctctctttgcactttgctccttgactagaaacattcaataaataattattgaccacccactatgtgggatttaaggtcctaggccctgagaaaaattatgtaaagaagaaagacaaagttttggctcacattgagtctacaatccagtgcagaaatttagttttttaaaaataatatatgaattaaataagttcagattgtgatcggtgctaggaagaaagtaaaatagaatgctatactataataggataatatgtaaaggctgttttaatttagggatatcaggaaagtctcctctgaagagatgtcttgtgagcggagacttgaaggattataatgaatcatataatgatcatcttgtaatgacctgaaaaaaaagagaactgcaaatgcaaaggctcagagataggatcaatcatgctttttgtcaaggagatcagtgttgcctaatctgagtgatctagagagggagtgatagaagcgcctaggaaagcagagagggatcagcttttgttgggctttgtaggacatattgccactctccctgtgattcttctcttctctttctgaccattccatcttcatctccttcatgaactcttcctgctctgtctggctctcaaatactggtgttttccagatttcaaccttgcctctattttttccccttctggtttttctcagattatcagcactaccaaccatttgctggaaactccaaaatcattatgtccagttgtgcagtgtactaattatgactttaaaaccccaatgacggccgaagaactatacaaatgtcaatgtataagagttttctgaagccaggcatggtggttcacacctgtaatcccagagctttcagaggctgaagctaaaggatatcatgaggccagga

SEQ ID NO: 674406 - DNA, 581 bp, Homo sapiens
ttgataagtccactgttccactaagggactgaactaacagccattgttatattcaccattttcttgtcccttgaatgactgaggcagaatcatatcacaattattatatttaaaaaagagaagagcaggggtggcatttttgagagctctgtaaattaacaatgatagttattaattaaaagccataaccagaagactaagtagattgcatgtaaacatttataaatccacaaattttactcactttggagttaaasttatatgaatactaatgctatatttatgtttttataagtctagataactcttttcttgtttatcccaattcaattaaacattttaaagggaaaattcgtatctctgaggattaaatgaaaactgctcaaactaaactttaaaacagttctaggaaaggataaccatattggggtttacaaaacctctgtagtagacattggtgacggaatagttaacaaggagcctgaggaaatcttagatgaacccagacatttccttctatttttgccataagttattacattcatttttaaattttgatgttccttttgcaagcttgaaat

SEQ ID NO: 674407 - DNA, 581 bp, Homo sapiens
ttgataagtccactgttccactaagggactgaactaacagccattgttatattcaccattttcttgtcccttgaatgactgaggcagaatcatatcacaattattatatttaaaaaagagaagagcaggggtggcatttttgagagctctgtaaattaacaatgatagttattaattaaaagccataaccagaagactaagtagattgcatgtaaacatttataaatccacaaattttactcactttggagttaaacttatatgaatactaatgctatatttatgtttttataagtctagataactctyttcttgtttatcccaattcaattaaacattttaaagggaaaattcgtatctctgaggattaaatgaaaactgctcaaactaaactttaaaacagttctaggaaaggataaccatattggggtttacaaaacctctgtagtagacattggtgacggaatagttaacaaggagcctgaggaaatcttagatgaacccagacatttccttctatttttgccataagttattacattcatttttaaattttgatgttccttttgcaagcttgaaat

SEQ ID NO: 674408 - DNA, 438 bp, Homo sapiens
catggaatttttgaaatgagtacctcccataaggcctcaaatatcaccttggccatttatgactctcttggtgtgtattttatacaccatttatttaaaacagcttagagagaaggtcactcaggtatttggatgtgggttaacatctaaaatgaaccacggtttattattcttcttattgtccacttactaaggatagtatagtagatggttgaagtctatgkcctcatttaagaaagtgcaaaaacggcacttttcctctgtccatattagaatgaatatcttgatatttaaggctctaaccctttaggagtgagtggtaattttgtgcatatagtatatctgcacttcatccttctaactcttgagcataatattctaactcaggcagagaagagctgtggcaaaaggatgttagtgttggcagcaatgttccct

SEQ ID NO: 674409 - DNA, 711 bp, Homo sapiens
gggaataaattttgaaaaatatttgtgagactaaaataatgattgcaataaaaatgcaggaataaaatatagactgtgttcctgtaaactggtaaacctccttggctgagctccaggtaatgtcctttctgtgtgagcatttgttgtttaggaagatgcaatatgcacattgagatgtcaggaaaacgagcccctctagaatctgttgacagcaattcaaccctaactctgagagcacatatgcgatctgayattactcatccagaagactttttttttcatactcaggatgttttctccatttttatttttaatttatttcttactacagataatttgtattgactcattttttccctccattctccttttgttttcaatgtttatttcttttgagcatggctgtctgctttattacttagtcagctttataaatcagattcttctctggtctgacttaaatctcatgtgaatatcctgattattcttataccatcctttatcagcagaagtgatgactgccttttacaacaacacagaggatgttttgttgcaaagctacatctggaattcacacatatttaagaaacataaaaagaaaccatttatctttattggaatttgtatggagtagaaatacattgatatatatttcaactactaatttttctctggggatgccagaaaataatgcagttttaggtttcaaga

SEQ ID NO: 674410 - DNA, 625 bp, Homo sapiens
ggtgggggtggaaaaaaggctgggaactcatgggagcaccccaggtgtctgcaaggagatgaaagctgatcctccgccccactgaggtcctaaggaagaaaggccgagtcagagctgcagcaggagggattcggatcagactcaagaacacttcccagtggtgcttatttgagaactgggacggcaacactagattgtaaactctgtgagggcagggattaggtctgtgacygcctcctcacccagcgggagaccaagaatgagacttgggagtcagacacaactgggtgtgactcctgcctttgcgggttgccagcacgtgggcttgggcaggttcctttatcaccagaagctttgccgtctcctccactataaagtgggcacaataacatccacctgcatgcatattataaggattgagtgggttaaaatgtgcaaagcaagactttgtgctcagctgggcacagcggctcacacctgtaatcccagtactttgggaggctgagacagagtgcttcagcccagtagttttgagaccagcctgggaaacatagggagaccctgtctcttaaaagaaaaaaaaaattagaagactcggtgctgactctgctagaccaaaagccca

SEQ ID NO: 674411 - DNA, 625 bp, Homo sapiens
ggtgggggtggaaaaaaggctgggaactcatgggagcaccccaggtgtctgcaaggagatgaaagctgatcctccgccccactgaggtcctaaggaagaaaggccgagtcagagctgcagcaggagggattcggatcagactcaagaacacttcccagtggtgcttatttgagaactgggacggcaacactagattgtaaactctgtgagggcagggattaggtctgtgactgcctcctcacccagcgggagaccaagaatgagacttgggagtcagacacaactgggtgtractcctgcctttgcgggttgccagcacgtgggcttgggcaggttcctttatcaccagaagctttgccgtctcctccactataaagtgggcacaataacatccacctgcatgcatattataaggattgagtgggttaaaatgtgcaaagcaagactttgtgctcagctgggcacagcggctcacacctgtaatcccagtactttgggaggctgagacagagtgcttcagcccagtagttttgagaccagcctgggaaacatagggagaccctgtctcttaaaagaaaaaaaaaattagaagactcggtgctgactctgctagaccaaaagccca

SEQ ID NO: 674412 - DNA, 613 bp, Homo sapiens
tggctgccagatgtgggggagatgcagccactcactcgaggtagttggtgagctccaggttcttgtagagcaggtagcagaagtgggagacagaaaaggcgtgcatccagttgtggtaggggggatcccggtagcccttcttcaccatcaaacagaacctgggggagggaagagggcagaagaggggcctcagcctctcctcctccatcacggccccatgatggcaaactacatgtcccctccatccctgagggaccctccacagacttccttgatgactctgtcttagcaggaagttcctatgcacatctaacttaaacctctggctacacactctcggccttgcctccaggctttgccttgcctcatttcttgcctttattgacagttcagtgtctaggaattgcttctcattcatggatcctccccayccccataagactgggtctccccagtcatccttagagagatcctctccagaatgccgggggcaatggatgtgacagtagaggaaagagggaggcgaagactggggctgtctgtgggcgcacgaaccgggccagggtcgggcagtcaattttgtagttgttgatgaaattcatgtcctgcagca

SEQ ID NO: 674413 - DNA, 997 bp, Homo sapiens
tgagattctgtcatttgcaacaacatggatagaatcagaagacttcatgttaagtgaaatgagccaggtacagaaagacaaacattgtatgtcctcacatatttgagagaygtaaaactgaaaacaattgaactaattgacatagagaatagcaggctggttactagaggctgaaaagagtagtgcaggttcagaggggagatgggaatgattaatggttacaaataataacaataataataataagtggctagaaagaactaataagaactagtatttaatagtacaacaggatggctacagtcaataatagcttaattgtacatttaaaaataacaaaaagaatattattgaattgcttgtaacacaaataataatgctaaaggggatgaatacccaattttccatgatgtgattattaagcctgcatcaaaatatctcacgtacctcataaatatatacacctacttatttacccacaaactttttaaaaaaaattggtagtgaattcagcaatgagaaccaatttttagaaaataaacgtaaggagaaaggattttaatttagtccaacatatgataataatagtaattctaccaacatttattttaatgtaaaatatattagagtttatgctatagttttttatatttgcaaatatatttcatcatcacaataatgtatataggtagttaccaaccattttccccacgataaagtttgtgcaacttccccaatgctagctagccaataagtggcagaatctgaacatggacctaagactgtgcatccaaagagcttactctcaatgctctctatagggaaaaacattttagtacttatgtagaagttctgtaagagacagaagattaaagaattaaaaccaaaaatcatctaggtattagagtagggatgcatgtaaaaatttctaattttaatctagatattgcctatacacgtcaaaaaataaatttaaaagttaaaagaattcaattga

SEQ ID NO: 674414 - DNA, 997 bp, Homo sapiens
tgagattctgtcatttgcaacaacatggatagaatcagaagacttcatgttaagtgaaatgagccaggtacagaaagacaaacattgtatgtcctcacatatttgagagacgtaaaactgaaaacaattgaactaattgacatagagaatagcaggctggttactagaggctgaaaagagtagtgcaggttcagaggggagrtgggaatgattaatggttacaaataataacaataataataataagtggctagaaagaactaataagaactagtatttaatagtacaacaggatggctacagtcaataatagcttaattgtacatttaaaaataacaaaaagaatattattgaattgcttgtaacacaaataataatgctaaaggggatgaatacccaattttccatgatgtgattattaagcctgcatcaaaatatctcacgtacctcataaatatatacacctacttatttacccacaaactttttaaaaaaaattggtagtgaattcagcaatgagaaccaatttttagaaaataaacgtaaggagaaaggattttaatttagtccaacatatgataataatagtaattctaccaacatttattttaatgtaaaatatattagagtttatgctatagttttttatatttgcaaatatatttcatcatcacaataatgtatataggtagttaccaaccattttccccacgataaagtttgtgcaacttccccaatgctagctagccaataagtggcagaatctgaacatggacctaagactgtgcatccaaagagcttactctcaatgctctctatagggaaaaacattttagtacttatgtagaagttctgtaagagacagaagattaaagaattaaaaccaaaaatcatctaggtattagagtagggatgcatgtaaaaatttctaattttaatctagatattgcctatacacgtcaaaaaataaatttaaaagttaaaagaattcaattga

SEQ ID NO: 674415 - DNA, 997 bp, Homo sapiens
tgagattctgtcatttgcaacaacatggatagaatcagaagacttcatgttaagtgaaatgagccaggtacagaaagacaaacattgtatgtcctcacatatttgagagacgtaaaactgaaaacaattgaactaattgacatagagaatagcaggctggttactagaggctgaaaagagtagtgcaggttcagaggggagatgggaatgattaatggttacaaataataacaataataataataagtggctagaaagaactaataagaactagtatttaatagtacaacaggatggctacagtcaataatagcttaattgtacatttaaaaataacaaaaagaatattattgaattgcttgtaacacaaataataatgctaaaggggatgaatacccaattttccatgatgtgattattaagcctgcatcaaaatatctcacgtacctcataaatatatacacctacttatttacccacaaactttttaaaaaaaattggtagtgaattcagcaatgagaaccaatttttagaaaataaacgtaaggagaaaggattttaatttagtccaacatatgataataatagtaattctaccaacatttattttaatgtaaaatatattagagtttatgctatagttttttatatttgcaaatatatttcatcatcacaataatgtatataggtagttacyaaccattttccccacgataaagtttgtgcaacttccccaatgctagctagccaataagtggcagaatctgaacatggacctaagactgtgcatccaaagagcttactctcaatgctctctatagggaaaaacattttagtacttatgtagaagttctgtaagagacagaagattaaagaattaaaaccaaaaatcatctaggtattagagtagggatgcatgtaaaaatttctaattttaatctagatattgcctatacacgtcaaaaaataaatttaaaagttaaaagaattcaattga

SEQ ID NO: 674416 - DNA, 997 bp, Homo sapiens
tgagattctgtcatttgcaacaacatggatagaatcagaagacttcatgttaagtgaaatgagccaggtacagaaagacaaacattgtatgtcctcacatatttgagagacgtaaaactgaaaacaattgaactaattgacatagagaatagcaggctggttactagaggctgaaaagagtagtgcaggttcagaggggagatgggaatgattaatggttacaaataataacaataataataataagtggctagaaagaactaataagaactagtatttaatagtacaacaggatggctacagtcaataatagcttaattgtacatttaaaaataacaaaaagaatattattgaattgcttgtaacacaaataataatgctaaaggggatgaatacccaattttccatgatgtgattattaagcctgcatcaaaatatctcacgtacctcataaatatatacacctacttatttacccacaaactttttaaaaaaaattggtagtgaattcagcaatgagaaccaatttttagaaaataaacgtaaggagaaaggattttaatttagtccaacatatgataataatagtaattctaccaacatttattttaatgtaaaatatattagagtttatgctatagttttttatatttgcaaatatatttcatcatcacaataatgtatataggtagttaccaaccattttccccacgataaagtttgtgcaacttccccaatgctagctagccaataagtggcagaatctgaacatggacctaagactgtgcatccaaagagctkactctcaatgctctctatagggaaaaacattttagtacttatgtagaagttctgtaagagacagaagattaaagaattaaaaccaaaaatcatctaggtattagagtagggatgcatgtaaaaatttctaattttaatctagatattgcctatacacgtcaaaaaataaatttaaaagttaaaagaattcaattga

SEQ ID NO: 674417 - DNA, 997 bp, Homo sapiens
tgagattctgtcatttgcaacaacatggatagaatcagaagacttcatgttaagtgaaatgagccaggtacagaaagacaaacattgtatgtcctcacatatttgagagacgtaaaactgaaaacaattgaactaattgacatagagaatagcaggctggttactagaggctgaaaagagtagtgcaggttcagaggggagatgggaatgattaatggttacaaataataacaataataataataagtggctagaaagaactaataagaactagtatttaatagtacaacaggatggctacagtcaataatagcttaattgtacatttaaaaataacaaaaagaatattattgaattgcttgtaacacaaataataatgctaaaggggatgaatacccaattttccatgatgtgattattaagcctgcatcaaaatatctcacgtacctcataaatatatacacctacttatttacccacaaactttttaaaaaaaattggtagtgaattcagcaatgagaaccaatttttagaaaataaacgtaaggagaaaggattttaatttagtccaacatatgataataatagtaattctaccaacatttattttaatgtaaaatatattagagtttatgctatagttttttatatttgcaaatatatttcatcatcacaataatgtatataggtagttaccaaccattttccccacgataaagtttgtgcaacttccccaatgctagctagccaataagtggcagaatctgaacatggacctaagactgtgcatccaaagagcttactctcaatgctctctatagggaaaaacattttagtacttatgtagaagttctgtaagagacagaagattaaagaattaaaaccaaaaatcatctaggtattagagtagggatgcatgtaaaaatttctaattttaatctagatattgcctatacacgtcaaaaaataaatttaaaagttaaaaraattcaattga

SEQ ID NO: 674418 - DNA, 643 bp, Homo sapiens
catcacatgtacataacaattgctcttgtggtacagcacaggtatattgaggaagaaatgtaataaaataggtttttgaactttaggaataaaggcaaaaacttatttgctattaaaatgacccagtgtggagttcaagaaactctggagaattgagccaactctgcagattaaatgacaaaccaggattctgtttyctaacaggggatatgcccttggtttcagtagactatgaatgagtgtccaaatgtctgtgagagaaggaatttataaattgaaataagatatcttggcacaaggctttgcagatacatattgacgaaaaaaggatagatgctggttgggtaccaagacaccctgtgagatggcagttcccatggtgatatctacaatctgctggactgcagccctccaggctctggaacttagatttgtcaacacccctgtttgatgggatttttagatgccagttcatgctaacaaatttcatgagaccaatgtttaagactaacatgtcaaccaaaaaattcacaataaacagaaacagaactgcaaaacatgccggcatgttgcataaaagacaccaaaacattcgctctctagtggaagattacatttacaggaagatgaatggtatttggta

SEQ ID NO: 674419 - DNA, 1486 bp, Homo sapiens
tggaataaaatctgaatactttaaaaaattatttttacattattgattgacctataccatttgtccaacaatggactttacaataaaatttcaagtaagacctaaacatatcaatgcaaataaaaataaaatggtattaaaataaagagggtaaagacaataaatatacatattcacatacatacacgtgggtttatgagatcaaaaaagaaacccagtgggttatactggtctatagtaaagtatagattggtttgatcaggaacctgcaaatgaaatccccctcaatcttttctacttcaacctcattttgaaataattggcaccagacacctatcttatggacatacttacaattccttaatttaatttttttttgcttgtttgctcatataggtcctgcttctatatctttcggcttgtcctgaaacttcacatcacctagttataaatagccaaaattcctctatgattttctgtttcacctagggtaataaatataggcatgtataaacaagatatgagacatatggaattaagagcagaaaaaaagggcaatcttttcagtaaatggtgttggaatcattaggtataatataaaacaaataaaaattgattcctaccccatatcattccccaaatcaattttaggtagactgtaggtctaaatttaaaaagcaaaacaacaaaattcttttaaacaagaccacaaaaagcatgaatcataggaaaaagcagacagccttcaatgaatgaatggatgaagatagtcaattttgaatggattgactatcatgaagggcaaaacatgataacacttaaatgttaattaatttagttatgtgtttccagtaccagatataaagctgagactgtgacttttgtgttagatgttgttgctgtggttacatctccaataagctttcctgaaagggcaaagggaagaaacttactgaatgcctgagagggcaattatataagagagttgtatattggaagtgaggccataagcagggggargcagccaaatcactaaacatgggaaaaaaggacccaaatcttacttactacctatgttctgctctgctgcattctactctgctgcccctccaactggttaaacccaaccagaagttaaacagcatgggagcttttgctgtattccatagaaatcagtttctcaagacaaagagcagcatgatcaaagatagagagtggatctagaacaatacaggagtgtaaagtgacaagaatagccaatacattcatgaagaagattgaggaggaagaatttgttctatcaaatataaatatttctcataaggctacactaattaaggcaaaatggcattggcacaagttagacaactaggccaatgaaacagaataaagagactagaaacagacctatacctaagtagacacataacgatgtagatgcctttgcagaacagtaaaaatagcaatcaaaggagagacagagaaa

SEQ ID NO: 674420 - DNA, 647 bp, Homo sapiens
tctctctctctstgtcagcctttgttttggccacctgctccaactgcggcctctcagcgctggctccaccgctcctgccacccccacgcctgtagctgagttccccattgtgcttgccgcttcctgactcccctcccagccacctgcaaggtggcccagctctctcttacagagtcagcagtccagttatattgctcacagacaatagtggctcaaagccagttgatgagcccacccataatgtggttacataactgtgattatgtaatgcacaggattgtgcacctgcgctccagtcccactgtgtcatgcagcactagatgtttgcctccgccaactcttgtctgcagtgcagctatttcccttacactccatcccctaggccaagggagtcctcttagtggagaaatgtgtccatagggcagcaccctggacctataggccacagcagcagtacatatgtgccctggaggaggattccttccttggccattcccctacaaatggtcaatcacagaggctgtattagtctgttttcatgctgctgataaagacatacccgagactgggaagaaaaagaggtttaattggacttacggttccacatggctggtgaagcctcagaatcatggtaggaggtgaaaggc

SEQ ID NO: 674421 - DNA, 647 bp, Homo sapiens
tctctctctctgtgtcagcctttgttttggccacctgctccaactgcggcctctcagcgctggctccaccgctcctgccacccccacgcctgtagctgagttccccattgtgcttgccgcttcctgrctcccctcccagccacctgcaaggtggcccagctctctcttacagagtcagcagtccagttatattgctcacagacaatagtggctcaaagccagttgatgagcccacccataatgtggttacataactgtgattatgtaatgcacaggattgtgcacctgcgctccagtcccactgtgtcatgcagcactagatgtttgcctccgccaactcttgtctgcagtgcagctatttcccttacactccatcccctaggccaagggagtcctcttagtggagaaatgtgtccatagggcagcaccctggacctataggccacagcagcagtacatatgtgccctggaggaggattccttccttggccattcccctacaaatggtcaatcacagaggctgtattagtctgttttcatgctgctgataaagacatacccgagactgggaagaaaaagaggtttaattggacttacggttccacatggctggtgaagcctcagaatcatggtaggaggtgaaaggc

SEQ ID NO: 674422 - DNA, 3002 bp, Homo sapiens
gacccgagatcgcgccactgcactccagcctgggtgacagagcaaggctccgtctcaaaaaaaaaaaaaaaaaaaaaatagtaagctgtgttctagctgctacaagggttttctttttccctaacagttagacaagcactggcctcaaactcactggcccccagcccctgttccatcagccataactrcagatttaattaacacgagactgactttaataattttcacctgatagaagaccacggactatgggctagttctagctggtttacagaaattgcacacttgcgtgcctttctgccctgaaaagaccttttaatgtataggacctaattgtaatacgtttaaatattaagtctccaccacaaaataacatgggtcatatgttacatgcatatttgttgaatgcacatgggtcaggaccaccttcatgaatattcctagcccctcctgcaacctgttaaatatgtaagttcagccaacatgttgtcatattcccacaggacctccaagcacgattgataggggagaatgtgcactataattaagactgagtggtatgtgtacatcctagataattctggaaacaaatcctcagccctatgagacatgcataagcaaattaatgctatgtcttatcccacaatgtcctaagtcagtggctctcctcatggtttggatcaggcccctcttggtgaaaaaaagttgctcataattttagccatgattatagggctaggtttattctgctgctgtagactctattgcagttacacactcaccatgatgctctagcagatctcttccttaagcccatggactcacaaatattttccactccaagtggtgaggttccattccactgcaccttaactgcaccccgtttcagcaggaagtacctagatggagcacatcaccccctttccatagaaatgaaatggaacttgacagtggggagttgtaaccaagagtgtcagctttaaaatgtattttaaagccttcccactagccttaaagtgtatttaaaaggtttttttcctttttttttctctccttccccctggacactgccttataccatgaccttatgaccaacttatacatgcttatctaactgtatgcttgcttagaaattccaggggctggccgggcgcggtgactcacgcctataatcctagcactttgggaggccgaggtgggcagatcactggagatcaagaccatcctggctaacaccgtgaaaccctgtctctactaaaaatacaaaaaaaaaaaaaaattagctgggcgtggtggcgggcgcctgtagtcccagctgctctggaggctgaggcaggagaatggcatgaacccgggaggtagatcttgcagtgagccgagctgagatcgcaccactgcactccagcctgggggacagggcaaaaaaaaaaaaaaaaagaaaagaaattccaggggctaatcttgaaacagcccaggcctggagacccagctgcagattacctcaaggtggttaatctacaacctggtcacagtcgacatgggaccagctagtactccaggtggacagtaactcaagatagccatcggaacaagacatgcagacctgtactctatacgattcctgcgtgtttcccacaccaggtttcccttttataaaccccttcagtcagccttaaaatttgagttatcattttgagactcgagtccggacatgtcctcaactgctagcattttattaaaactgctttcctttcaccacacttggcatctcatgtatctggcttttcaaactgtgaatagccagacctaagttctgttataggacaatactttcacaaggaaaatgtgttccctacttttaggcaaacgagaggagagcagaggacacttcctgcatctgttgattctcagttgccttcagctcaaataatccttatgccgaagtggcatgtttttgggtggcatgacctgaaccccttcagtccttagtagtttcttagcttctcagaatcacaaatctttttttttttttcctttcctttccgaaatagcctggctcttgcaagtgaaaaccttgctttccagattattgtttctactgcactctttttttttttttttttttttttgcctttggtctactttgaaagtcaaagctaagcaaagacttctttgttctcaccattatttgtgttttccctgaagcagtcaagctataggacaagaattactgggaatgagaagtgtgttggctattatttttaagattctgtattttcacctcagaaaaaaaaattatcccacattctataaatttggatctcccagagatagaaagaccacccagagcgtagagccttccgtcatctcagggagaatccctctccattatgcattttcactcccgctttcagcaagacaaattcctctttgtttcacgcacttcaatttagcaagcaagcaacttttagcgcttgtgcaagtaacctttgtatctcaccctctaccccgggcagcttagaaaagacttttttccttaacagacagtcatcttaaaagaattctagagtcagctattagaaaaacaaacaaacttgttctccacttccttatactctacctgtctgctctcctgtttcagtgaatagaggaggcctcagagcttcatggtgctggatacaccagtacagagttgttgaaaggaaggagtcttctttacctttcttaaggtctaagtaacattgtgagtgaaaatatcatcaggcaaagaattatctgtgcattatgttaacttagtaaaatgtccttgcaggcacagaaaaacacaaaaggtctggacagctttttaaaataagtagatttgtaaatcatttaaaagaggttggaaagtgaagtctgatggggcaatggaacacacactggggcttgaggcctaggtgtacgtggtcccttctcttgcctcttaggaccggctctcagctgccagctctgcgacctttgtc

SEQ ID NO: 674423 - DNA, 3002 bp, Homo sapiens
gacccgagatcgcgccactgcactccagcctgggtgacagagcaaggctccgtctcaaaaaaaaaaaaaaaaaaaaaatagtaagctgtgttctagctgctacaagggttttctttttccctaacagttagacaagcactggcctcaaactcactggcccccagcccctgttccatcagccataactacagatttaattaacacgagactgactttaataattttcacctgatagaagaccacggactatgggctagttctagctggtttacagaaattgcacacttgcgtgcctttctgccctgaaaagaccttttaatgtataggacctaattgtaatacgtttaaatattaagtctccaccacaaaataacatgggtcatatgttacatgcatatttgttgaatgcacatgggtcaggaccaccttcatgaatattcctagcccctcctgcaacctgttaaatatgtaagttcagccaacatgttgtcatattcccacaggacctccaagcacgattgataggggagaatgtgcactataattaagactgagtggtatgtgtacatcctagataattctggaaacaaatcctcagccctatgagacatgcataagcaaattaatgctatgtcttatcccacaatgtcctaagtcagtggctctcctcatggtttggatcaggcccctcttggtgaaaaaaagttgctcataattttagccatgattatagggctaggtttattctgctgctgtagactctattgcagttacacactcaccatgatgctctagcagatctcttccttaagcccatggactcacaaatattttccactccaagtggtgaggttccattccactgcaccttaactgcaccccgtttcagcaggaagtacctagatggagcacatcaccccctttccatagaaatgaaatggaacttgacagtggggagttgtaaccaagagtgtcagctttaaaatgtattttaaagccttcccactagccttaaagtgtatttaaaaggtttttttcctttttttttctctccttccccctggacactgccttataccatgaccttatgaccaacttatacatgcttatctaactgtatgcttgcttagaaattccaggggctggccgggcgcggtgactcacgcctataatcctagcactttgggaggccgaggtgggcagatcactggagatcaagaccatcctggctaacaccgtgaaaccctgtctctactaaaaatacaaaaaaaaaaaaaaattagctgggcgtggtggcgggcgcctgtagtcccagctgctctggaggctgaggcaggagaatggcatgaacccgggaggtagatcttgcagtgagccgagctgagatcgcaccactgcactccagcctgggggacagggcaaaaaaaaaaaaaaaaagaaaagaaattccaggggctaatcttgaaacagcccaggcctggagacccagctgcagattacctcaaggtggttaatctacaacctggtcacagtcgacatgggaccagctagtactccaggtggacagtaactcaagatagccatcggaacaagacatgcagacctgtactctatacgattcctgcgtgtttcccacaccaggtttcccttttataaaccccttcagtcagccttaaaatttgagttatcattttgagactcgagtccggacatgtcctcaactgctagcattttattaaaactgctttcctttcaccacacttggcatctcatgtatctggcttttcaaactgtgaatagccagacctaagttctgttataggacaatactttcacaaggaaaatgtgttccctacttttaggcaaacgagaggagagcagaggacacttcctgcatctgttgattctcagttgccttcagctcaaataatccttatgccgaagtggcatgtttttgggtggcatgacctgaaccccttcagtccttagtagtttcttagcttctcagaatcacaaatctttttttttttttcctttcctttccgaaatagcctggctcttgcaagtgaaaaccttgctttccagattattgtttctactgcactctttttttttttttttttttttttgcctttggtctactttgaaagtcaaagctaagcaaagacttctttgttctcaccattatttgtgttttccctgaagcagtcaagctataggacaagaattactgggaatgagaagtgtgttggctattatttttaagattctgtattttcacctcagaaaaaaaaattatcccacattctataaatttggatctcccagagatagaaagaccacccagagcgtagagccttccgtcatctcagggagaatccctctccattatgcattttcactcccgctttcagcaagacaaattcctctttgtttcacgcacttcaatttagcaagcaagcaacttttagcgcttgtgcaagtaacctttgtatctcaccctctaccccgggcagcttagaaaasacttttttccttaacagacagtcatcttaaaagaattctagagtcagctattagaaaaacaaacaaacttgttctccacttccttatactctacctgtctgctctcctgtttcagtgaatagaggaggcctcagagcttcatggtgctggatacaccagtacagagttgttgaaaggaaggagtcttctttacctttcttaaggtctaagtaacattgtgagtgaaaatatcatcaggcaaagaattatctgtgcattatgttaacttagtaaaatgtccttgcaggcacagaaaaacacaaaaggtctggacagctttttaaaataagtagatttgtaaatcatttaaaagaggttggaaagtgaagtctgatggggcaatggaacacacactggggcttgaggcctaggtgtacgtggtcccttctcttgcctcttaggaccggctctcagctgccagctctgcgacctttgtc

SEQ ID NO: 674424 - DNA, 763 bp, Homo sapiens
gactatatgtatatgcgaaaaagcctttgtagtgctaaaccactaagattttggggttgtactagaaattttccagtaatttcttatggtaagatatgttgtcttgaatgtcctaggaggtcctataaatgtgccaagacagctaccacttattttagaataatataactattagttacacatttaaaataaacagctttgaaatgacgcattctgttttcctcctgccgttgtcactrtagagaaggaacaatgccaaaaatacaagatgctgtatgaacaaataacatgaaagctggagatgaaactagatttttgaacttgactacatatgcctcaaggttagatgttagtatggactatttcctttgacatattaagggtgaataattcccaggaaaatgcaaggatcgggcttgctttttctagccatggtagctcagcaaaacacatttctgattgctaggactccttagattttaccagttttaatcttggattatggttgtcatgaagagttggcgttttaaagatattctttacattgaagaatttttacttttcaagtaggataatgaaatgaaaaatatttgagatgtaataaatttggtgggatgaatctgagcagttcacaccatttagatactgagaggaacataggccccctgagactgaaaacaaataactgtgggatggtagatgacagcctttccaacatgtgcggtcatgactcaatccaaacactttttggccatccctgcca

SEQ ID NO: 674425 - DNA, 673 bp, Homo sapiens
ttgtcctttttccaaataacaaatccagactgtgttttgaggaatgactgcatgttcactgtgaacagctttgataacaatactactcaaaatgattgccttgcctctaggaaagacagggctcagtctctccaccagctgaatcagatcccttctccgggaaaccactgaagcttgagtggcttatcataaagacagaaaatgggtactactctagtgctctaacaagatgggtgacagcatttgccacctgcatcactgcagctgatatggtccttgatctactctttctgacattgttcattcttccactattcattccatttggtaagctgctccagtaactttccagtaaagtttctttattctgaaattagccagaactcatttctgttctgtaacaacacacacacacacacactctctctctctctctctctctctaattgattaaaatacctagaaaaaaattaaaattatyagagaaaatagaaaattaaagttttaaaagataagaaaaaatcaaaatgataatgacagtgaacttttatggagtctttagtgtctatgccagtcagggctgccaatacttcaaacggcttcactcattaaatcctataaaaaagaaactctaggaaggaagatacttttgtgattcccacttcacaaaagg

SEQ ID NO: 674426 - DNA, 942 bp, Homo sapiens
gcaagaacggctgttgtacctcataagttctacccaaactttgacctcaagcacaatccactaaagctgggctctcaaagcccctggttccatggtcgtgtggcaggggaggccctgcccttcctcagtttgatgtcattctttcctggatgstgaaggggtataagcaaaagatttacaaggataagctctcttttgaggagccattcaaaatactttctctctctctctctttttttttaacatatttctgctagtttctattcattaatgaaggtgccagcagatcagaaggtcgaagtcttgaagaggcagccccaaacaggctggtctgagctccaaagaagagctggacccctatatgcagcggggcccagagctgcctcccacctgggtggagggagaacccttctctgtgtgtggctcagaatttgacacctttgaagctaagagggaccatcactgagacctttggggccgagcaggtgccctgtccatctcttcacctgtcccaggtcaagtaattgctgacttaaagtgtccaaagtcgaacttgtcaagtttctgtactctaaagttactctttttcccccttttcatacgatcagcccacactgaagatgtgaggagttatgttccacctcctcaagggtggagtatctgcagaaattatttggaattcttttgcatgggaaatttgtcttttctccctcattatttatccaattacttctttatgtaagtatgtactcatggatatttaatttatactttgggttataatctaatactactttcttttgttgctcaaattgtttcagctttggcttttggaagctctttcaattggctctgttaccctttgacattcttctatcattgtgtgtgtgtgtgtgcatgtgagtgtgtgtgtgagtgtgtgcgtgcgtgtgtgtatgtgca

SEQ ID NO: 674427 - DNA, 616 bp, Homo sapiens
tttctgataaaggttctaatttacagtaaagttttcaaaaatacgtccaggtgtgtgtgtatttggtgggggtacaggggaggcagggagtgaggagctttgaataaaacgtgtaccataagtacacctggaaattcacattctaccacaggctttcatttctgcctctcagctattcctccccaagtgctaggccattgtccagcacttgtgtgtcgtgttatcatcatccccgcattataaagataagaaacttaagatttatctcagatcacagagcctagaagtagtggactgggagtggagctccaaactctgggccctattctgtgttctttcctccctccataagcaattttgcttctcagtgttaactccartcattcatttctgaataatttagaattggcttatgtttgaaatttaacatgctgatggggaagctagtgccagggtttataaaaggatggtaatcagagagcccttggcatatctagtgtgctgctgactatggattgcccaggcgtcgctggcatggcggggagggattggatgggtgcacctgtgttcttattgtacacaagactggcaagtggaatgccagtgttccaaggtg

SEQ ID NO: 674428 - DNA, 2151 bp, Homo sapiens
tgggaagagaccctcaatccatctccccaaagagttctgggctgrggcttttaaggggatcatggagggcaaggggctgggaattggggtcattgattggttagggtaagggcgatgaaatcttcaggatgtggaaactgcattctctggggagtcagctcctcgtggggtccttcaggccagctgacattgatagtttcactggtatgcagggtctgaaagactgtctcaatgggaaaacttaatattctgtaatgttcaagttgttacctatggagcagttaagggaaactgtaatctagggtcagtgtgattctaagacaataggcaccaaacaactatgaggaaatgggtcagagagcagctgatctcatgttaatgccaaatgtgctgcaagctgtgtttattttcatttctttctctctcttcttccctgatgaactttacaaagtttatagggacagtttcagaaacacatgtggaaacagtagacaacaaaagcaattaaagtaatagctgccttttattgagcctttctcaatgtcagacaccattcagagtgttcacattggaaaatcccactttgtcctcagaacaatcttatgagataagtacttctgtcagttatgatgttttaggttgtaagtaacaattttttttttttgagacagagtctcgttctgtcacccaggctggggtgcagtggtgcaatctcagctcgctgcaacctccgcctcccaggttcaagcgattctcctgcctcagcctcccaagtagctgggacaacaagcacgtgcgaccagtcccagctaatttttgtatttttagtagagacgaggttttgccatgttagccaggctggtctcaaactcctgacctcaggtgatccacctgcctcggccacccaaagtgctgggattacagatgtaagccaccacacctggccacaacaatattatttttaactacaaatggtttgaacactaatggagcctcccagccaagatgatactgtaagttcatacttcaagctctccctctgatcccaacacgtagcactcatagataaaatattaacaacaaaagctaagaagacatagccaccttcaaaagtaagataagtatttttctggactagaaatggtagaaaagaacaaagaaaaaagctgactgaattgcaggtctgctggactggggccaagatgcaggaagaggtggctggagctctatcttgtggggtggctggagctctatcctgtggggtacaaggaactaaaaatgtagggatattgatccagacttactgggcctgggataggatttccctggtcagggaaggagtttgaaaccaactgcaatgtatctggcccagggttgtggtttatatgtagctcagtgatgacgaaggtaggagtggggatgtgcagccttccagccaggacctataggcaaaccagccaagttcttggatctgcatcttcctctgtctccttaaagaaccagagccccaaccaccaacatgagaccagtccttggacagaagcctcatgactgggttggagatgaccacaaaagttgaattgggggttgagggagttgagtggattcccatagtaatcatacataattatcctacaaagctaagttctgaagcatatgaggaaatctaatgctaagaaaaacagctgacaaaaccatactcagaaggttgatgcagcccgggaaagtaaaataataaagcaatcagaaaatattttttattatttaagatccacaatggataaaggaagaaatagcatgactaataacaatgagaaattgtgaaacaaaagcaagcaaaaatataacaaggtagggtggacatttaaaaaaagaaacagatgtaaaatgctgaacacaaaataggcatttcatttacaatacttttcaatagaaggaatcaatgctagagaataaaagaaggaatcaatgctagagaataaagtcaaagagagaataagtacattggatgatggtgctaatttaatcactaagaacacagcctaaagaaataaagaaaaataggaaagagctattaaacaaaaaaaaaaaaaactctggctcaaatatgtgttgaaataatagctccagaagataatagaggggggctat

SEQ ID NO: 674429 - DNA, 1255 bp, Homo sapiens
tggggggcaaagtgtacccacttttaaagggggtggctcatggaacagggagaggccatttttcttaggattggtctgttcctggacagatgccaggatccctgtttcttcaggggtgcttgcaggtgcctggagtccagacagggatcccttggcctggctggggtagccttgttcatgggaattttttctcgatgataggagggtcctacaggggatataccatagccagtggtaagttcagggaattagagctcaggaaattcaaggcctacaactgcagtgagtgaggcacatactggatcttagcaatgtcctggaagcctggggtttgtaaccagacatgcctggctgagccctgggtttaccactcagcagctgtgtgaccttaagtaggacccttgtctcaggtgactcttgtaatcttcctaggcctcaggtgactcttgtaaagggcatggttggtcatcgtgtgcacaccttacagggtgggttggaggcctggatgagatgatgagacacctcctgcccctccagctttcgttctgctggtggctttccagacaaaccatgtggccccctgactgtgttggtgcctcccctgtgtctgctgactcctactcaattcttaggctctgctcaaatgtctccccatgccacagggaaaatggcttgtggtcttctttgtcccccacagctgagatggggcatgtaaagcacttgtcataggccctgtggcatgctgtgctcaccgcacacgtaagctctggctgtcctgcccagtggcrctggaccctggtgtagcggggtggactttggagctggccctcctggttcataccctggcaccaccacttagaggctgcatgaccttgagcaggcgatttctcaccagctccattttcttacctgtaaaatgagacagtcatagggttttggggggttaaatgagtgaattcatgccaggtgcccagaacccccacccagcacagagtaagcactgtgcatggggtagctataattggcttccctagcacaatgcataacacatgatgggtcttaatatatctatatgaataataaggccagcagagtgtgggattatagtgagagccgagctgaaatatcagactgtggagtcatcttccttttcttcccaaaaccctctcaagtttccctgaagtgctgataacttatagtggccaaagctgaacagtgtctgctaagaaagccctccctgagtagtggccaaagc

SEQ ID NO: 674430 - DNA, 1606 bp, Homo sapiens
tggaagcaacatatattaagtctgcccacaatatgcctgtgcttagaggtctgaaaatattcatgacctttgagaaagaaagattaaaattagtaggcagaaatgctgcagccagctccagttagtttgtgatgtggtcattccagagtgtctgccatgctggccacatgcttctgggacggctgcagggcasaaggctgcctgcttaattttagagttaaacaaacgtaatggcgaaagcatttatgatggatctgaatctggtgtggcatgctgtgatatttccatcactgcatttaggggtccagatcttctggacactttctctttccttgtattgttctctccaaggtttctccaccttgacacaattgacatttggggccaacacttcttttttggtggggttgtcctgtgaattgtaggattcttggtggcatccctggcttttacccactagatgccagttgcaatgcccctaattgtgacagcaaaagatactcctagacattgccgaatgtccctttgagggcaaaagtggttgcagttgagaactgctgctctagagctggccccaagacagtcacagagggactaagaagctgtccgtaatccccaccaattcagggtattgggctacacaaaggcaatcagtcattcatttccccaggaaaccattctcctggagtcccagttgtgtgcccaactagacctggagaatacaaaggggagtgaaatgagcctaattctctaagcagcttaaggaaatgggtgttgtgattggggccagaaggcttcctcttaaattatactgatcctactgcagggttgatattagggtcccaaacttcagaaaactctgggttctgatggtttcctatgtgagggcagggagctagttaatccacttggatccacaagcccggggactacagatatattagtcttaggaagggacttggaaagtgagtggcttgattaaaacttagaagggtttatttaaataacaagaaggggctgagggaaccatgggagaaaagacacacagatgagcgtgagcagaatcagagtgaatttgctaacaaagcaaatccaacctacttgggcagatcaaggaaggaaagaacactggtatgggagtaggggagtgagaaatatcaggctgagtgagggagacctggattttctgagccgtctcctggggagcatgctatctgtcttatggattcattgttatggtcaaacaagataatatcaatttaaatattgggcttcccagatgaaagtcattattaaggtcatcgtgtagacagtcttcacaagcagacattgagatttttactttacaaaatagaaaataaggaatcattgacatgagattttgagcaggggagaatattctggaaatggcatatagaattaattggatgggaaggagccaagaggaaagagcggtatagctggccaacaaccatccccaccccgcagcactagatggggaccacccaccatgcatgttttgaaaacctaggatttttactgtgaacttacagatctaagtgtatttgatgggtttcaatcagttgcacttaatgtacttgaagtt

SEQ ID NO: 674431 - DNA, 640 bp, Homo sapiens
ccatctcctccccttgtccttttttcataacctttgttaagtaaggagattaagaactgttattaacgacactgattgtttaatttctttcataacttcttcctttcaaatgagagtccagtacagaatgaaaaggaatgttatcrtatgaagtgcatttcagacgtaataaagcagaaaggagagggtggccccagtggcagttgtaagagggatgaagtgtggatctctatagctcagtggctgcaaagcagaaaatgaagattgtaaaaacgtcacataaagaaaaaatgcacagtggattcgttttgtgatgcccataattcagtaatgcctttaagtagctagaagaaatataataaatgtttttccacaacattgatcatactgtatcagaggaaatattagtgtgcagggagccatgattatactggtagtaattctcggtgcagaaaactagtagaagatgggaccctttataggccgaacttttattggctgcagttatttacctttaagaatacgcctaatacattgtcctgtagctaaatatttttgtgaaaattcaaaccagcactatcagtaaatcagaaatcctgccaccattttataggatttatatatatttttccctgcagat

SEQ ID NO: 674432 - DNA, 640 bp, Homo sapiens
ccatctcctccccttgtccttttttcataacctttgttaagtaaggagattaagaactgttattaacgacactgattgtttaatttctttcataacttcttcctttcaaatgagagtccagtacagaatgaaaaggaatgttatcatatgaagtgcatttcagacgtaataaagcagaaaggagagggtggccccagtggcagttgtaagagggatgaagtgtggatctctatagctcagtggctgcaaagcagaaaatgaagattgtaaaaacgtcacataaagaaaaaatgcacagtggattygttttgtgatgcccataattcagtaatgcctttaagtagctagaagaaatataataaatgtttttccacaacattgatcatactgtatcagaggaaatattagtgtgcagggagccatgattatactggtagtaattctcggtgcagaaaactagtagaagatgggaccctttataggccgaacttttattggctgcagttatttacctttaagaatacgcctaatacattgtcctgtagctaaatatttttgtgaaaattcaaaccagcactatcagtaaatcagaaatcctgccaccattttataggatttatatatatttttccctgcagat

SEQ ID NO: 674433 - DNA, 1419 bp, Homo sapiens
aaaaccaatcttcggcggggcgtgatggctcatgactgtaatttcagcactttgagaggcagaggcaggcagatcacttgaggtcaggagttcaagaccagcctggccaacatggtgaaaccccatctctactaaaactacaaaaaaactgttagccaggtgtggtggtgggtacccaaaatcccgactactcaggagctgaggtaggagaatcacttgaactcgggaggtggagtttgtagtgagctgagatcacaccactgcactccagcctgggaaacagagtgagactccattaaaaaaaaaaaaaaaatcagtctttgaattaaatgcgtttttttcttcccttacagatgattttttaaaaaatgaaattcttgaagagctgcaccttaaaaaataagacaaagtgaaagtattgtattatgttacaaacaatgcaggctccttcctcatttaactttacaaccttgcgaagtgggtccaggagatttggagtttgtggtaaagccagtaatgggcattgtcctgcattcccttcccttcatggtttgcctcgatcctctctaagcttctatcctggcctgaataactcaaagataattggtctcagagatcaagccatatcctcaggccttatttccatcttctcatgattctgccatcatacctttgcttctccgctaatgaaatgagctggcaagacctctgttcattgtgaagtgcttctgaaagagcctaagaaaaaaggctcatctgaaagaaatggagaactctatttcgaaccaagcctgtttgaatgtgtgttagtctgatctttgatcatgtgtttccatgtaatgggagtctcgttttttataatgtttctaacgttttattgaaaaacctatggccctccttctttctcaatagctactttcttactgctttttgaaaataatatgcaaccaaattatttcttaatgtcacataattaagtaataaaatgtcaaaagaaatgttggcaaggagaataaaaaaatttccaagaaacttagcgttatgctctccctgctttctttacctccgaagtcttatggttctgaackgctgtcctgagaaagcaactctcttagttgtgatgttatttaagtgtcagcattcaagggaatgaacagctgcttggtagagtttgatttttcacatgtgcatgaaagaaatgtccttgaggatgaagtcagaaaaggttaaaagtgtaaacgaaaatgtgcctgaagcagcactcagtccatgagagagttattttgccaaggctaaggatgtgcccgggaaaaagaaacaccagtcacaggaggacctgtcctgtgcttttcccaaagagggtttgaggaacttcggtatttaaaggggaaagagcaagcaggagcgggggataaaaag

SEQ ID NO: 674434 - DNA, 612 bp, Homo sapiens
tgtaaagcacagaggaacagccaagagatcttaccgtggtcttactaaagtacatatcctaacttggggtttaccttcagcaagttagactggccgtgcatggtggctcacgcctgtaatcccagcacctcgggaggccgaggcgtaaggactgcctgagcccagaagttctagaccagtctgggaaacgtggaaagacccccgtctcaaaaagaaaacagaaaaaaaaaagtttgtgtatttatttmtgtgacagtgaacacatttaagatgcagtgtagtttctgaaagaaattgagggcttatataaaaaggaaaactcagtgattaaccttgcacatgcccacttaacaaaagcctcaaactttaaaacatttgacttatagcattgagttcctaaatggaacaacttgtctttgtccacaaaaaagaaatgtgagaaggtagtttttaaaaggtgggtgggattatcaccaattgaaactattttcctatgaaagcaaacacttgtagaaaatgtatttttcagacaattatgtttagggtgtttgaactgatactaagcgcaactgtataaaaaaagttgaaactttttttttttttttttttttg

SEQ ID NO: 674435 - DNA, 997 bp, Homo sapiens
tcctttcaatacagttttcattctgagttcatacaggagtttggctttttctttctttcagagcagtggttctcaatccagggtgattttccccaaggggacatttggcagtatgtctggaggcatgtttggtataactgctgaggtgtggggtgctacctaggaatgcttctaaacatcctacattgcataggtcagcccccaacagcaaggaattttccaatccaaatgtcagtagtgctaaggttgagacaccctgttttagagtttgatacagtataaacattttataacaataatataagtgaccaggaatttagaatgatagagttttccaggtagagaattttagtcataaggcctaggtttaagtacattccagcaccaggaaatggtgagacgcgaggcaagaggtggctgggagagtggtatcgtggggagaacatggcttttgggggtgagctaaatatgagttcattctgattccaacacttgtgtttcagttttygtatctgaaaatggggttgatgtttagctcctggagctatgatgaggaaactgtttagcatagtgcttgacatatagaagccactgaaataggtgctactattgtttcagacacccctcctagagaggagaaaacaggcccacaaaggcaaacacatttgcctaaggtgatagaactgagcctgggcctgcatggtggctcttgcctgtaatcccagcactttggaaggccaaggcaggcagatcacgaggtcaagagttcgagaccagtttggccaatatggtgaaacctcgtctttactaaaaatacaaaaagtagctgggcgtggtggcacgtgcctataaccccagctactcgggaggctgaggcaggagaatcgcttgaacccaggaggtggaggttgcagtgagctgagatcacaccactacactccagcctgcgttgacagagcaagactccattttgaaaaaaaaaaaaaaaagagtcata

SEQ ID NO: 674436 - DNA, 997 bp, Homo sapiens
tcctttcaatacagttttcattctgagttcatacaggagtttggctttttctttctttcagagcagtggttctcaatccagggtgattttccccaaggggacatttggcagtatgtctggaggcatgtttggtataactgctgaggtgtggggtgctacctaggaatgcttctaaacatcctacattgcataggtcagcccccaacagcaaggaattttccaatccaaatgtcagtagtgctaaggttgagacaccctgttttagagtttgatacagtataaacattttataacaataatataagtgaccaggaatttagaatgatagagttttccaggtagagaattttagtcataaggcctaggtttaagtacattccagcaccaggaaatggtgagacgcgaggcaagaggtggctgggagagtggtatcgtggggagaacatggcttttgggggtgagctaaatatgagttcattctgattccaacacttgtgtttcagttttcgtatctgaaaatggggttgatgtttagctcctggagctatgatgaggaaactgtttagcatagtgcttgacatatagaagccactgaaataggtgctactattgtttcagacacccctcctagagaggagaaaacaggcccacaaaggcaaacacatttgcctaaggtgatagaactgagcctgggcctgcatggtggctcttgcctgtaatcccagcactttggaaggccaaggcaggcagatcacgaggtcaagagttcgagaccagtttggccaatatggtgaaacctcgtctttactaaaaatacaaaaagtagctgggcgtggtggcacgtgcytataaccccagctactcgggaggctgaggcaggagaatcgcttgaacccaggaggtggaggttgcagtgagctgagatcacaccactacactccagcctgcgttgacagagcaagactccattttgaaaaaaaaaaaaaaaagagtcata

SEQ ID NO: 674437 - DNA, 1296 bp, Homo sapiens
aattaatagaattattctattagaatcaattgttcatgtagaaattataatgtgcatatatcttttattgttacttactgtatgctatgtatcctttataaagtttataataaatttaggtatatatatacatgcatactatttttggagaaccagttgtttgtatttgtcaacatattaatgacaataattaaaattttctttttattatcttttttaatcctgtaacaactccttgaagtaggtatagaaaatgaggctcagaagagattggcaacagtaccaatgacaagcaaaygagagaatttagttgggatggggtctcaggtattctagtcaaagtctaagcttttttaaccataccacaatgacactgatatttactaaagaccttagttaagtcactttttctacactctggcctcagtagcctactctgtgaaatggtactatctatgcacttctcagaactgttgtgagaatcagatgtgaaaataatttgtgaaccctaagatgttaaagtaatatataatttactgaagaggtagacagttgagagagtattttgcttgaagagatttactattctgggcctggtttatgctccttgaaaataaacttttccatatactgcctgaaaaacaatatgcattacattttcccttggagataatttccattataaattgctagatattttcctgctttgagcttctttgcaaatttccaacacctttttaagcactgttaatttttccaataatagatcgatgaattcttaaagtgtttggcaactctgcatccctgagttttcatcagcctagagcatccctggaggtaacatatgaccagtggatactggggaagaagccaaaagctagaaaccaatgcataaatagaaagaataaaaaacaaatttttttgaaaaggaatcaagttgtttacatttgattatggttactaataactgaatagtttgaagttgttggagagtataagcacattttaataccctctgatacctaggtattagattgctgcatggatactaggtaattttgccctaaatctgtctcccaatgccaaagcactttcagatgatgacattttctattgcaattctgagtgcttatagaccttgattgtgctaggtaattataatatccaccatggcattaaggctcactgcatgagctaatgccttgatatggaattaatcaaatctgaaagaaaaggtcattagaaagttaaattatgtcagtgatacaggaaagcaccatataagcaggaattata

SEQ ID NO: 674438 - DNA, 1209 bp, Homo sapiens
tgatttaaaaaataataagatcggctgggcacggtggctcacacctgtaatcccagcactttgggaggcctagttgggcagatcacttgaggtcaggagttcaagaccagcctggccaacatggtgaaaccccgtctccactaaaaatacaaaaattagttgggcatggtggcgcatgcctgtagttaccgctactttggaggctgaggcaggagaattgcttgaacckgggaggcggaggttgaaatgatctgagatcaccccactgcactccagcaagggtgacagcgagagtctgtctcaaaaaataataggaagaagaagaagaagaggaggaggacgagaaggaggaagaggaagaggaagaagaagaagaagaggaagaggaagaagaagaagaagaggaagaagaagaggaagaagaaaattcagcattagcttagtttatggagtgatttctccatgtgaggcactgtgtggacctctgaagtctcagttcttccaaaagtttgagaggggtcaacatgctttacattatgggagttctttaagaggagacgaatgatgaggaaattcataggtgttttctgaaacactgcacaagttgacactaaatctcatgaaaaatgatgcttttgatgtgcaggatttaaaaagataaaaataaaagattctgaaagtggtttctcctccacacagcctttggtctggaatttgcacatttggttttcctgtagctacttctgcaaaaacaagcgcacctactcactgtcacaacacagtaggctaaattttctcaacaaatatattctttgttctcttccacagtaacaacaaagctttgagagtcagcagagggcaagggaaacacagaaagaacacagacacagggcttgatcttcaaggagttcaaatacgattcactgaataaataattactgagcatctactctctactcagctaaccgttcttttcagacacaagcaaattcatggggaaaaacaactgagagcctttccccccccaatatacaaagaatctaacccattcattcattcaacatgtgtttattgaaaacctaatacagtatgtgccaggcattgttccaagcccttgggggaaagtaaacagaataaagttcctgccctcatggatcttacacccaatgtgggagacagacaataaacaaacgcatacataacatatgc

SEQ ID NO: 674439 - DNA, 577 bp, Homo sapiens
tagtgaacggatgcagaggaaaaccagccatggggagcagcgcagaggcagggcagggtcccggggaccagccaggagctctgctggtcctctcgcagcagccatgcgggacagcacatatgggtgttgccagccagggacgctcacccccgccctggtgtccagagttttactgggtctcagtcatggagacgtgactgaccacccaggtgctgacctcaatctccagccactccaagggtcaagctgacatggtggggcccgaggtaaacagggatgctctttcaggcaggctactccaagggcttaggggtgacctcccaggagccagggtcaagggccaaaccttccaggtaagactgacgcttgacagtgtgatgatggatgctgtgatcctgacagcatggacaggacaggtaaaggggaggggaygggtggggagccgtctcctctcagcagggaagcagggctgtggcctcctccctcttgaggggctctgttccccgtacccaccctggtcctggctagctcggtcccacctctgagctgggtgggctgcaaagccggggccattcca

SEQ ID NO: 674440 - DNA, 614 bp, Homo sapiens
tttgtctagagttctgcaatttatagttagtagagaagagtaatgtagtctctggactagcagcaccagcagcacctgagaactctttataagtgcaaattcccaggccctaccctggacctggtgaatcagaaactctggagtagggmtcagcaatctttgctgcagtaatccctccagctgtttaagaacctctgccatacagcaggtagaaaaatgtgtttccttctgtaggtccaaagccagggataccatatgttctgtcttgatacgaaacaatgacatccaattaaaacatataacacataactctccttcctactcccaccctccatccaatgtgttttatttttatgagttccataagaaaacaagtggcaatcagaggtttactctaaaaagtatgtttacaagtatcagttctcatccagcctgatctcatacaaaaccatttacatcctcttactgctaaagctttaaaaaagtatcttcacaatgtaagactcaggcacactaggagttctgtaataaaacaccaagtagaatggaatgtccaaacttactagagaagaaaagtggaatcattggctgtattttcaaattgcattcaaagg

SEQ ID NO: 674441 - DNA, 620 bp, Homo sapiens
taattcatttgtacctccaaactgattaaacaaaacatrctgactacaactattaaacgaaaaaagattacagaatagtatgcttagtataaacatactattataaaatatgtctcaatatgttcatagaaaaaaattggaaagccaaaatgttgctaacagttatgtcaggatggtgtaatcacaggtgatttttattgtactttccttatctgtactgcccgaattttctgtgttgactttgtgattcggtaacaaggaaaaaaaattatcgttttaaatttacctaagcaatgaatctgttttcccttgatgtctttgctttttttaagaagcagtgtgcattcttttcctaagaaatacaaacatttctcctttctttcattttagataattagaagacagctgccaggttggagaccatttcagatgtcaatctgcaaagttgtatggaaaggcaggaaataagccatggaacattttaattgccttcataacctgggttacaggaaacaggcatctccttcatgatttctgcttctgagaggagggtgctgtggccaagggcttggatgctcacagaatctcccatccccttccatgagcattattgaagagaa

SEQ ID NO: 674442 - DNA, 620 bp, Homo sapiens
taattcatttgtacctccaaactgattaaacaaaacatgctgactacaactattaaacgaaaaaagattacagaatagtatgcttagtataaacatactattataaaatatgtctcaatatgttcatagaaaaaaattggaaagccaaaatgttgctaacagttatgtcaggatggtgtaatcacaggtgatttttattgtactttccttatctgtaytgcccgaattttctgtgttgactttgtgattcggtaacaaggaaaaaaaattatcgttttaaatttacctaagcaatgaatctgttttcccttgatgtctttgctttttttaagaagcagtgtgcattcttttcctaagaaatacaaacatttctcctttctttcattttagataattagaagacagctgccaggttggagaccatttcagatgtcaatctgcaaagttgtatggaaaggcaggaaataagccatggaacattttaattgccttcataacctgggttacaggaaacaggcatctccttcatgatttctgcttctgagaggagggtgctgtggccaagggcttggatgctcacagaatctcccatccccttccatgagcattattgaagagaa

SEQ ID NO: 674443 - DNA, 647 bp, Homo sapiens
aggcttaaagccagggtgccttgatgccagaggccaatggccaaaggctactgccccgtgagggggactaggaggcacctggggcattacagggtgagagggtgtcagatggcagtctctggtctcaaccagctcttgcctttctttctcagttcatctcaaagaaggacccagaggatgtcaaagaggtgaggctcctgggaggaagagggactgttctgcagttccagatctggaaactgtcaaggggcagctggtaactctgcttggacatcggccctccttcctccctgtccctgggcgaggggctgctgcagctgcttcctgatcctcacrccccctgggggcaggctgggcatgggggcggctgcctcccaccattgctggttctgggcaagtctcacgtccctcataggtggtggtctggaagcggtacagcgacttccgcaagctgcatggagacctggcctacacccaccgcaacctcttccgccgcctcgaggagttccctgctttcccccgggcccaggtgtttggtgagtgttagattggggcactcgggccaaagatggagggagcattgggcaaaaggggacctccgccagtgggggctggatagagagggcctgaaaccctgggcagagtca

SEQ ID NO: 674444 - DNA, 647 bp, Homo sapiens
aggcttaaagccagggtgccttgatgccagaggccaatggccaaaggctactgccccgtgagggggactaggaggcacctggggcattacagggtgagagggtgtcagatggcagtctctggtctcaaccagctcttgcctttctttctcagttcatctcaaagaaggacccagaggatgtcaaagaggtgaggctcctgggaggaagagggactgttctgcagttccagatctggaaactgtcaaggggcagctggtaactctgcttggacatcggccctccttcctccctgtccctgggcgaggggctgctgcagctgcttcctgatcctcacaccccctgggggcaggctrggcatgggggcggctgcctcccaccattgctggttctgggcaagtctcacgtccctcataggtggtggtctggaagcggtacagcgacttccgcaagctgcatggagacctggcctacacccaccgcaacctcttccgccgcctcgaggagttccctgctttcccccgggcccaggtgtttggtgagtgttagattggggcactcgggccaaagatggagggagcattgggcaaaaggggacctccgccagtgggggctggatagagagggcctgaaaccctgggcagagtca

SEQ ID NO: 674445 - DNA, 647 bp, Homo sapiens
aggcttaaagccagggtgccttgatgccagaggccaatggccaaaggctactgccccgtgagggggactaggaggcacctggggcattacagggtgagagggtgtcagatggcagtctctggtctcaaccagctcttgcctttctttctcagttcatctcaaagaaggacccagaggatgtcaaagaggtgaggctcctgggaggaagagggactgttctgcagttccagatctggaaactgtcaaggggcagctggtaactctgcttggacatcggccctccttcctccctgtccctgggcgaggggctgctgcagctgcttcctgatcctcacaccccctgggggcaggctgggcatgggggcggctgcctcccaccattgctggttctgggcaagtctcaygtccctcataggtggtggtctggaagcggtacagcgacttccgcaagctgcatggagacctggcctacacccaccgcaacctcttccgccgcctcgaggagttccctgctttcccccgggcccaggtgtttggtgagtgttagattggggcactcgggccaaagatggagggagcattgggcaaaaggggacctccgccagtgggggctggatagagagggcctgaaaccctgggcagagtca

SEQ ID NO: 674446 - DNA, 647 bp, Homo sapiens
aggcttaaagccagggtgccttgatgccagaggccaatggccaaaggctactgccccgtgagggggactaggaggcacctggggcattacagggtgagagggtgtcagatggcagtctctggtctcaaccagctcttgcctttctttctcagttcatctcaaagaaggacccagaggatgtcaaagaggtgaggctcctgggaggaagagggactgttctgcagttccagatctggaaactgtcaaggggcagctggtaactctgcttggacatcggccctccttcctccctgtccctgggcgaggggctgctgcagctgcttcctgatcctcacaccccctgggggcaggctgggcatgggggcggctgcctcccaccattgctggttctgggcaagtctcacgtmcctcataggtggtggtctggaagcggtacagcgacttccgcaagctgcatggagacctggcctacacccaccgcaacctcttccgccgcctcgaggagttccctgctttcccccgggcccaggtgtttggtgagtgttagattggggcactcgggccaaagatggagggagcattgggcaaaaggggacctccgccagtgggggctggatagagagggcctgaaaccctgggcagagtca

SEQ ID NO: 674447 - DNA, 392 bp, Homo sapiens
acaaaaaaaattagccaggtgtggtagcaggtgcctgtaagcccagctacttgggaggctgaggcaggagaatcggttgaacctgggaggcggaggttgcagtgagccgagattgcgccactgcactccagcctgggtgacagtgcgagactccatctcaaaaaaaaaaaacacagggaagctgaacaaattggtggtcactgctgactacsacttcctcattctctatagccaagcagtcacccaggtcctggcaactttatcctgctcgatgtaccatgaatctcagtcaatcaacaagaatgagtggctactaggaaaggcagaagtccctaccctcaaggtgcctgtgttcttagaggggggagagaaagacatcaaacatgcaagaa

SEQ ID NO: 674448 - DNA, 1779 bp, Homo sapiens
gaccttttgaaatctaatatcctggctaaaaaattaggatggaatatattttaggtggctgcctagagtggcaaaggcaatatgagaagaattttgatagctgggcaagaaaatgcatrccacatacacacattactcttctctgatttgctttaactttgaaatgttggaaattgcaaatctagtccctaaatttagggtaaattaacaaaagattcatgtttcagctgagcaagttattgtatgaaacttataggtaacagatgtcattagctgcaaaaaccaaaatagtatgactacattcagtaactatctagccatgcaaatgatagaccaattagattaagatcctaactggtgcatgtagaaagcatttatgcacaatgttttgaccctcccccaaacatctttttctgtctccttacagagataccaaattttcctgaatacctcaaggtgaatactgggaactgagaggctcagtgttcagagttgactactgggaacagagttaacacatttcttctatattataaagaaattttatgaatcttgctctgcctcagaaaggcttttagtaaaagattgttcatgtgtaacactctatttggattcatgaaaattttcaatattccatttaagtcagacacactgaaatgtcaaccaaatttcataaaacatatttgaatgagatcaagcctttcttagctaagaattttatttcagcagtaaatttagaggaaaataagaaatgtgtgtactttgggccaaataacagtgttggccacttgggaacaattcagacaagtgctcttcatcattactcttaaagtagcaatagcaccacatccatttcctggcaccagccggcctgcttttcactgatatgaagtgcagaaggcattgaaacagttaagaagggtgaaataaatggaatacttatatgaagtacaattgttaataaaaagtagcatttgatattgtacaactatagataagatgacaagtgtgagataatatttttactttaattgacaataactttattcacaatatttctatttcaaataatttttttgcttttcatccaatattacctgagctcaataggaatcaataaaatgaatctttatttcaccacaagaattttattcatgcatatgcttaatttgctgaaaatatgtgagccttccatgaaagatttatactttgagtgtgtcattttttgctgagaagtggctctcctgccagaaaactgctattctcaactctgctcacattgactctggtcagcatagtgatgggaagtgatgagtgaataaaaagcaaatgtgtcttccttgaatcttttttcatctattggctgaagaaacagagaatgcagatagaaattttttttaaaaatctaatctctgaataatcacaaagaagttttcttaaccagaaataaaccaaaggggatggtgatttaagcagaaaatgcattattttgctaagcctttgaaattttagagcttattagtatgacaatctgcattgctttaacaaatgtattggtctttcagttttaattcttccggatatgattcaatttcctgatgaatctgaactgagaggagaataacttatttgttaaaattaaagacgcaggaaaaaatatgttgcctaaaataagatagccaaaaagagacagacaaaacagaaagtaaaatgatgttcttcagaagcagaaaagagagaaggagaagacagtttattggatattaaattgcacttttt

SEQ ID NO: 674449 - DNA, 662 bp, Homo sapiens
ggggaaaccaaagtcatattaatacttaacaaaacaagcaacaggacaggaaaacaaaaggtaattaaggcaaagctstgatgttttgccagttgttaacataagaggccaattgtcagctgactgtgatgtaaagacgcttcctttaagagcatgtgtaatatgtatctcagaatcatcaaagggctctaagtcaccctaataatgggtctgtaccacaaacagagagaatgcaaaccacattttgtcttaaaagacacagcaaattgcactgcagctgtaacaagaatctcagagtcatttgcattaactggggatgagtgaaggggctaagtggagtgtctgtgtgcaacatggcacttcttccttgacctgtgagaaaggaacttgacagccaggctcagtggctcatgcctgtaatcccagcactctgggaggctgaggcaggtggatcacgaggtcaagagttcaagatcagcctggccaacacagtgaaaccccgtttctactaaaagtaaaagaaaaaaaaattagccgggcatggtggcggacgcctgtagttccagctacttgggaggctgaggcaggagaatggcatgaacccgggaggcagaggttgcagcgagctgagatcgtgccactgcactccagcctgggagaca

SEQ ID NO: 674450 - DNA, 607 bp, Homo sapiens
gtgccttcatttaaaaatcatgcattttcttttaagagttttataaaatctaggaggaaacttatccctttgtgtttagaacaaggcaaaagaaatttctgattggatattgttatgggcccatgacttctgttgcagagaaggtaatagaaaaaggtaaaatacttctacgctctataattcaccttgctggaaaaaaaacaactggattggcttgacaggggcttagacgggtgaccaggttactgtttggttggttgagagacggaagcagtacagaatgacaaaagtgtgtggtgggccaccggccactggttcatcatagcaggacctcaaaccaatgtctagtccatgaatgtttatatatgggttggtatatgaaggtggatatttgcaaacaaatgcttagttttagtgtcaggattttcttcctaattaatgaaaagagaytgtatgttttcaagttctgtaggcctaactagaaagaaaagagttcaggatttcagattgtgctactttcacaagatgtaggtatatctttaccaaaacacacatggctatgcacatgttcaagtatcttgttataagaagggtgtggtgtaagtgg

SEQ ID NO: 674451 - DNA, 674 bp, Homo sapiens
ttttaaatatattatgaaaacacattggaagaaatatgatgaccagagaggagaaatctttaataatatagatgaaagtacatgtgaaattaaataagagcagcaagtgtaaagataacagaggatgaaattttataaaaatccattctacatgtttctgaataaatacaactcaagtaacagaggggcctttctggggggagttggatcacgaatgatactaaatttttcagcatattgaattgaaagttttagggagcatacagcacgtgcacatgtatgcaygcacaggcatacagacacacacacacagacacagacacacacacacacacacacacacacacacccctttgcatactattgggggaaattcagccagatatctggcgaaattcacccccgatatttcatgtagattcttttctattttctctaagtgttggccggtctgaaaactaaagggacagagtacaaaagagagaaattttaaagctggctgtccgggggagacatcacatgtcagcagtttccgtgatgcccccggagctgcaaaatcagcaagtttttattagtgattttcaaaaggggagggagtatatgaataggctgtgggtcacagagatcacttgcttcacaaggtaatagaatatcacaaggcaaatgaaaggcag

SEQ ID NO: 674452 - DNA, 674 bp, Homo sapiens
ttttaaatatattatgaaaacacattggaagaaatatgatgaccagagaggagaaatctttaataatatagatgaaagtacatgtgaaattaaataagagcagcaagtgtaaagataacagaggatgaaattttataaaaatccattctacatgtttctgaataaatacaactcaagtaacagaggggcctttctggggggagttggatcacgaatgatactaaatttttcagcatattgaattgaaagttttagggagcatacagcacgtgcacatgtatgcatgcacaggcatacagacacacacacacagacacagacacasacacacacacacacacacacacacccctttgcatactattgggggaaattcagccagatatctggcgaaattcacccccgatatttcatgtagattcttttctattttctctaagtgttggccggtctgaaaactaaagggacagagtacaaaagagagaaattttaaagctggctgtccgggggagacatcacatgtcagcagtttccgtgatgcccccggagctgcaaaatcagcaagtttttattagtgattttcaaaaggggagggagtatatgaataggctgtgggtcacagagatcacttgcttcacaaggtaatagaatatcacaaggcaaatgaaaggcag

SEQ ID NO: 674453 - DNA, 621 bp, Homo sapiens
tacgattattattctgaagacagaaatccaaattattgattagtggttcttgggggagggggaagatatggttccaattaaatatgatgtttcagataaacaccagcattagaaaccactagaagtgatagggaaaatatgacattgatgtttttaaatggaagctgttctcattaggggcatgatatgcaaattgccagtaaaacatcagagataacaaacattttatttgttttctcaattacagaaggttgccttatttttctattccttaaaaatatgaataygttataatttttcatagaaattctccctaggcacatatctttctgcccagggacagctacaatggcaactctagtagttccatccttaaaccttatcttcatacctgtaatctagactggaggccactgaagtgcaggctaatgcttctggttggggacctgtaggaggcagtggttggattttaaaccagttaccaggaaatgatcttcctcatctcaaaaatcaacgattccactttgggaaagagttttgcagttttccaaaagttaaacataaaacatatgaccagcaatgctattcctaggtatctacccatgacaaatgaaaatgtgt

SEQ ID NO: 674454 - DNA, 623 bp, Homo sapiens
tgctgaatgatgtcccctgcagctgtgcaatgtggcagccctgacccccgccccatcttagcatggtcaaagaagccttcccagaagaagtgatatccaagctgaggtttgaagtaaggaaggrgagagcatccagacactctataccaggtttggaagggggagtgcacatatacagtgtaaacatggcccagcacttaaagaggaatacagactgcacatcctcaggtgagtgcatggtaaaggagcactccttctattgcagggtgagatgagggatgtgattatgttcagatacatatgggccttagatctttttggatactagctgatactttatcaacagttgtcttcctgagttcttgcatatctgctaatattggagagtttaaggagagagcagagtccaaactcagggtgtgtcttggggtgtcttaagacagattatcactgtgaacaaaacaggaataattaacgacattaaatagttcatccttccctgcctttataaagtctcaccgagcttgcatttggcagcctgacctaccagtaagattataaaacaaatgaattagtaaatatcgaaataattctgtttgccacatgtgtgaatgttaaaaaat

SEQ ID NO: 674455 - DNA, 623 bp, Homo sapiens
tgctgaatgatgtcccctgcagctgtgcaatgtggcagccctgacccccgccccatcttagcatggtcaaagaagccttcccagaagaagtgatatccaagctgaggtttgaagtaaggaagggragagcatccagacactctataccaggtttggaagggggagtgcacatatacagtgtaaacatggcccagcacttaaagaggaatacagactgcacatcctcaggtgagtgcatggtaaaggagcactccttctattgcagggtgagatgagggatgtgattatgttcagatacatatgggccttagatctttttggatactagctgatactttatcaacagttgtcttcctgagttcttgcatatctgctaatattggagagtttaaggagagagcagagtccaaactcagggtgtgtcttggggtgtcttaagacagattatcactgtgaacaaaacaggaataattaacgacattaaatagttcatccttccctgcctttataaagtctcaccgagcttgcatttggcagcctgacctaccagtaagattataaaacaaatgaattagtaaatatcgaaataattctgtttgccacatgtgtgaatgttaaaaaat

SEQ ID NO: 674456 - DNA, 623 bp, Homo sapiens
tgctgaatgatgtcccctgcagctgtgcaatgtggcagccctgacccccgccccatcttagcatggtcaaagaagccttcccagaagaagtgatatccaagctgaggtttgaagtaaggaaggggrgagcatccagacactctataccaggtttggaagggggagtgcacatatacagtgtaaacatggcccagcacttaaagaggaatacagactgcacatcctcaggtgagtgcatggtaaaggagcactccttctattgcagggtgagatgagggatgtgattatgttcagatacatatgggccttagatctttttggatactagctgatactttatcaacagttgtcttcctgagttcttgcatatctgctaatattggagagtttaaggagagagcagagtccaaactcagggtgtgtcttggggtgtcttaagacagattatcactgtgaacaaaacaggaataattaacgacattaaatagttcatccttccctgcctttataaagtctcaccgagcttgcatttggcagcctgacctaccagtaagattataaaacaaatgaattagtaaatatcgaaataattctgtttgccacatgtgtgaatgttaaaaaat

SEQ ID NO: 674457 - DNA, 623 bp, Homo sapiens
tgctgaatgatgtcccctgcagctgtgcaatgtggcagccctgacccccgccccatcttagcatggtcaaagaagccttcccagaagaagtgatatccaagctgaggtttgaagtaaggaaggggagagcatccagacactctataccaggtttggaagggggagtgcacatatacagtgtaaacatggcccagcacttaaagaggaatacagacwgcacatcctcaggtgagtgcatggtaaaggagcactccttctattgcagggtgagatgagggatgtgattatgttcagatacatatgggccttagatctttttggatactagctgatactttatcaacagttgtcttcctgagttcttgcatatctgctaatattggagagtttaaggagagagcagagtccaaactcagggtgtgtcttggggtgtcttaagacagattatcactgtgaacaaaacaggaataattaacgacattaaatagttcatccttccctgcctttataaagtctcaccgagcttgcatttggcagcctgacctaccagtaagattataaaacaaatgaattagtaaatatcgaaataattctgtttgccacatgtgtgaatgttaaaaaat

SEQ ID NO: 674458 - DNA, 1436 bp, Homo sapiens
accagagttgggctcttaggacatacacttgaaaagataaattagaaactatggaatcattttctgaactgtttgtgagataactgttgatagttccagaagcatccctaaaaaacgactatttttatgggataaattgtatccctggatgaatgcctcctctggtgtttattagaacttccatgggactgggcgaagtcagtattttaggatgatactgtcagagctatgtactttgagctcctagcagttcattttgatttcatttgtttgtctttataacactgtgaatctgaagaagaaaatctgaagtctccattcttcctctaccaccatagaagttgaatgttatgtataatgacttttcactccaaatggtgcacctaaggaagccactgtaactgcaatgacaagtgtaagagttttgtcactggccctgtggcatctaattatgaaccacacttgtctttagaatgaacacgagctcctcatgtatcgccagtcactttaccttttgcaaaaaggaactgttttaaaaccttaatcttgggcacggtggctcatgtctgtaatcccagcactttgggaggccaaggtgggcagatcacttgaagtcaggagtttgagacgagcccggccaacgtggcaaaaccccgcctctattgaaaaaaaaaaattagccgggcgtcatgctgcccactgtaatcccagctactcaggaggctgaggcaggagaatcgcttgaacctaggagccagaggttgcagtgagccaagatcgcactactgcactcccgcctgggggacagagcacgactccatctcaaaagaaaaacaaaaacaaaaaacaaaacaagcaaaaacccttaatctttgcaagatgaccttcttttcaagcagaaacatgcattatgcttacattttcatagcagacatccagatatacataaatttctactcattaataagcataaaaactagttactgtccccattttattcagatctattgatcttctcttaatttctgtgtttttaatcacagtatataatcagaggcatggaaagttaaatttttgataatgaaagccagacttgttcaataggtttgcaagataattttgttattagaaatcattgatgaaggctgtattagttcattctcccactgttataaagacacacctggccaggtgcggtggcacaygcctgtaatcccagcactttgggaggccgaggtgggtggatcacctgaggtcaagagtttgagatcagcctggccaacatggtgaaaccccatctctactaaaaatacaaaaaattagctggtgtggtggcacatgcctgtaatcccagttccttgggaggctgaggcaggagaatagcttggacccaggaggcagaagttgtagtaagcatagatcgcaccactgcactc

SEQ ID NO: 674459 - DNA, 1075 bp, Homo sapiens
tatggccagcaggagagggagagcaatgggggaaggtgccacatgcttttaaacaaccagatcctgtgagaactctatcatgagacagcactagggagatggtgctaagacactagaaaccacccccgtgagccagtcacatcccaccaggcccgatctccaacattgggaattaaaattcgacgagagatttgggtggggacacagagccattccaaaggcttatgtcagaatgtcacccttgaaaagggtcatgtttgaagaattcatgctagcactatgacaattgtgagataactatcgatgattccagaagcatccctaaagaaatgagtagatatgccatgacttaaatgagactgacagcattttataaatggaagggaccacagaaatcatcagggcacaggtgaggaaattcattcaaagaacaaaacagtactgttaaaataaatgaagcagttcttataaaaccgctagattcatatagttttctgaaatcatgcatctgaaccaaacaaatgtatttttgcatctgtgtttttttaaaaaatgatagaagtacaacatgattaagagttccacattctaagattatagcaaaagctagaaatgaatggaaatttttagcagatcagtgttcatcttaggcatctatattcctcagaagcattttctacttaactgggtccctgtatagctttctatgattgatatctttctgatatccgtataggaagtgtgagcaattattgagatttttactcaaaagtckgaatataatttttgtgtattgtagatgtgaccatatgtatgctgaaacagcgaagagatttaaattcagttagagaatagtgagttctagtctgtctttttggtatcaagagttgtaatctattgaaagaatgagttagaattcacttacacgtgcctgtgagtgcacacacgtgccaatgtacatatgcacgaaagacctaccagagacacactagcagcaaagtatcccctgcatagttcagaaaacgtgtctggcttgatatagaattttcaaggaataaaaaaatagaccttttca

SEQ ID NO: 674460 - DNA, 469 bp, Homo sapiens
accccactcggctgtcattcctgcctcagatcttctttcctcccagccscaggaaaggagtaacttctctaattggtgtctttgggagaaggaatgagcggagcagctcagcccctaccgggatgtgttctttggaatctggcaacccaaagagagggtgaactagggcctgctctttgctggatggtcagctgcccaggtaggctctgccctgttgggaagacctgaaatccatctataccagacgctggtgggaaaatctattaatggtagtggagtgttaccaagccctttggatcacagttctgaagtcatgtttccagtcccttttatcagtgacagagatgacattttcatttccatttgtttgtctcccatatcttatttaccaattgttttgaactgggaagggaatcaaggaatgctatttaattggctccaacatgtaaaaaaaagtttgagagtaaag

SEQ ID NO: 674461 - DNA, 585 bp, Homo sapiens
cattatgttgcccaggctggtcttaaactcctgggctcaaatgatcctcccacytcagtttctcaaagtgctgggattatagggtgaaccactgtgcctggctgcacccacacatctctgacataattctctttccattttgacagtctatggttttgaatatttataggaaacaaaggaacatcaagtggcataaacactaagacaagggtcatcattgtaactagaaacacctacgcgaccatttagcagaggagaaagttttctggtgttattttggtggagcaccctgactgatctggacctgaagctgttctgaatttttcatttaaatgactccactggctgggcgcagtggctcacgcctataatcccagcactttgggaggccgaggtgggtgatcgcttgaggacaggagttcaaaatcagcctggccaacacggtgaaaccccgtctccatgcaaaatacaaaaatcagtcgggcatgttggcgcatgcctgtaatcccagctactcaggaggcaggagaatcgcttgaaccctgcagggggtggaggttgcagtgagccaagattgtgccactg

SEQ ID NO: 674462 - DNA, 996 bp, Homo sapiens
caggcctgtgctgctttttaccagtggtacatccttgagtcaaattacagagtgacttctagctggctgtcactgtcctagtggagtagaaagaggcccagacattccggttatcccagcagagcccagggtagtccagcccagctaacccaccagctgactgcagctgcatgagtgagcgtaggtgagaccagcacaatccacagaattgtgggaaacaataaatcattgttttaagccactaaattttagggtggtttgttacacagagaatacataagtgagactccaaacttcccacgacctcaccactaccaccaccccacaacacacacgcacacacacgcccttgagcatctctctggcttgccagtggcaatcactgaccgctttgctgttcctgtcttcatcttacccgacattaaaactcaccctctactttggcctggcctgcaagaaccttgcagtccattaatgggtttgaaaacagactcatactttggttcatactgaggtgttagtaactgatgttagcttaatgttttacatggctttcacccaaaggactagctcccttaaatgaggaaatttaggccccaaggcaggcaaagtcctgggcagcatcctccttgtaaakggctgtatctttgacttagaggtagacctttatgtgtatggaaatgaaagaaggtgcctcctagcttcagactccttttacctgcttctaatactgcactttgttttagagaacagtggtttccaatgagggtggagacttcagggcttattttaaaagcccattcttggctctgcccacagggatgctgagattctgattcagcaggcttgggtgtggcctggttctctgtattttcaccaggtttcttagtgattctgaaaatctctctctctttctcttcctctctctctctcacacacacacacacacacacacacacacacacacacacaatccagctcaattgaacatagagt

SEQ ID NO: 674463 - DNA, 1022 bp, Homo sapiens
cccgcagtaaattcactctctccggaggaaacattgacctcactgctgctgaagcccttacttagaacttcctattcatttttgcaattagcaaagattaacctctcaataattcattcattcagggcacagatagttattggtacctttacatgccaggtactgggctttggggctacaatagtgcacagaagagtcatgctcctgtttcctgaagccgatagtctgagagggacacagatagcaacctgataattacacagatagataccaacaatccagtatcaatatgcaagaagagcacagaagagcagacaacagtgcctggagtggtctggggtgttcagggaaggtttgcctgaaatagacgggtaagtgggagttgtctggttgagatgggggtcctgaccccaagtacctagatagtgaccttatttggaaatagggttttttacagagataatcaagttaacatgaggtcattagggtaggccctaatcttgactggtattcttatcaaaaggggaaatttggacacagagacagacatgcgcacaggaagaatgtcacgtgaagatgaaagcagacatcagggggatgctggctgcttacaagccatggaatgccgaagatagtgagccgacaccaggagctaggagagaagcctagaactgacgctccctcacggcctccaaggaaccaaatctgctgacaccttgattttgaatttttagcttccagaacttgagatcacacatttctgttgtttaacccaccccagcygtggtcttttgtcaaggtagccgtagcagacaaactcagttttccagcagaggaaactgcacatgcaaaagccctggaagtgagggcaggggaggcgggtttgagaaaagaggccaccctggctgaaatgcagagtcaaaaattccttcatccagactgacagggaagcagatcagtgtgggcacctcaggcgactattaaaatagcaataaaaataactacctcgaaggtgtgtagag

SEQ ID NO: 674464 - DNA, 654 bp, Homo sapiens
gtccaatgccagatatttaccttttatatatgaagaaactgaggttcagagagcctgtcatctgcttgagttcaggaagctggtatctaacagaaccagcgtttaaactcaaatgcatgtgactcccaaagtcagtcaaggaacacacaatctccatggtgtgtggcccaataggagaacattcacacttatatattattttatatgtgtgtgtgtatatatgcacacacacacacacatatatacacacgcattcacatatatacatattatgtcaattatgtctgtatatattatgatatatatataatacccatgtatgtatgtatmatgtttattaatatttatgacatgtatatcatatgcattatgtgtgtatgcttctttattgtatgtctctcactgaaatgtgagttccatgagggcatgagctttaccttgttaactactctacccccaggtcctagagaactaggaacagtctgccgggtgctctttagagatctcctaatattctaatagtttttgaggtgttctccataactcttttaggcctttctacaaatacctgttgagtaaatgaataaatctgtaaatgaatatatccaggaatacatggataaattaaaatgaaattttgaaaattacggttgt

SEQ ID NO: 674465 - DNA, 1053 bp, Homo sapiens
acatgtaagccaaagacatggggacaaggacacagaaaccatgggagaaacaatgagcttggcagaagcagccagtttgcattgaggcaagaggccaggtagtcccaggaacagggaaagcctgtgataggtgatcaagtcagcctcaagagttggtactcccatgagacctgactgtactgtccaagtgagcccctcttcttacaaccaacgttctatttttataaacttctctgagtgcatgcctgctttttgcaacagaagatccctgtcgaagcacatgtcagtgccaaaaatgacagcttttaaaatttaactgtttccaaattctcatgatcttccagagaagccaaaggtaatagatacacaattactgcttaagggctgacatcaactraagacctatttatgagatctctctatataaacacatacgcactcatactttatgaccatacatacatatacacgcacatatatgtgtgtacacacacacacatgcacacacacacacatcatgactatggctttcttatggaagggctcaatacagatttgaaggccaatgatggttacctgcaagcacaacttaataccatcctttaatgccctgaaacccaaggagagaaatgtgtggaaaagcaaatctataatttaacctcatgaaatggcataaaagaatgtagaagtttatagaaaatctacaaattaattgagagaaatttacaattagcttccaagtaaaaggtcaaggagggtaatgtcataacattaaaataataaagcatttaataaactattaacatgccacacaatagtaattctgcatctgaactagcagacaagcggttacagggaaacgggaacttagtggttgatcccactgagtcacagctgatgtgttcctctgtgagcaagtgacagagccaggacatgagcctagtgcctctttgacccgcaggtcatggtttatttccactaaaccaggaaacagaaaacagatttgtccttacgatattgacttatccttaaggcaaacatattttgtagggc

SEQ ID NO: 674466 - DNA, 631 bp, Homo sapiens
catcagttccaggcaaagaagacaatagggtaaggctttgacaaagaaaagtcccagcaaggaatgttactgtcaagaagtcattgaggcaccagaatgtgggagaaggatcagaccttttcttcatggaacctggagatgaaaccacagtgaatgcttcaggaagctcagcttgctttcaatgctgaaaggaaattaccagaccttctgtgttcttacagacagtggatggcttctgtggtggtcagctttctagagatgaataaacataggaaataaataggcttatcagagatgcagtaggagaaatgcaatctgcaatcaaataactgcttctctttaggtcattttcaaatctgaggacctctgaactctgtgtttcaactcctgttgtcttagtttcctcatcttcaaaatgagagaagttgaattaaagcctaaataaatgtgtcaagtttcatagctacacatgtgtgtatgtgtgtcctgaaatgaagcctatatttaagtctagcttgtgaaatttccatattacactgctgcattcagtcagctcaccacatgttactgcaacaaatgatagatyatatttcctgatcagttgattaataaaaacaattaaagagaagat

SEQ ID NO: 674467 - DNA, 644 bp, Homo sapiens
ccatatcatgaaagagaacttttttttgatatttttagacattattttacttactgtatgtactggaatttaccagcgcaatggaggaagaataagaaggcagtgtgatgactaccactgtcaaaaagcccttcagatccaatacataaagtaacggcactgacctgctacagtacatggagcaggggctttggatgcagtcagactttggttcaatcttcagtctagaatttagccttggataaattacgtgatattgttagaaattaggtttatttttaaaaggaggtttgttacaaccaccttatttaatttaagctcaggtgagaaggtgtaggccagaagattctagacagggcatatgaaggagagctggcacaaagctrgacagttcttactgctgaggtattttatttagtctggactccaggttaccgaactatttggagtcacctgactagaccacggcacccctcaataaacagtcccttctgtctgcaatgcttctccctgacaggaaaatacctgtgcatccctcataccctgactgggtgaagtgtttttcctaagactattttagttgactttcgtatctcatttataagacatataactttgtataaggatacagtgcctgataccta

SEQ ID NO: 674468 - DNA, 593 bp, Homo sapiens
gaggaaataggagagagtgtttgaataaaaatcatgtgggagaatatcttctgctgcttgataaacctttgttggttttagtaacccaacattcgaatgacccctattaaaccacagcctcttcatctttccaatttcttgcctgtctgggttgtttttaaggaaaccgcttcccttccagccctctgaagatatcctcacattccctctgcactttactgtcagaaagtagggtcagttttttgttcctatgtgctacttccagactatgatttttcctaactgttctctgagactcctaacatcaggtctgttaaaaaacgatgactttagccgggcatggtggctcacacctataatcccaacactttgggaggcagaggcaggctgatcaactgaggtcaggagttcaggaccagcctggccaacacagtgaaaccccatgtctactaaaaatacaaaaattagccgggtgtggtggcatgcacctgtagtaccagctactcaggaggctgacacaggagaatygcttgaacctgggagggggaggctgcagtgagcagagatcatgccactgcacttcagcctgagca

SEQ ID NO: 674469 - DNA, 1474 bp, Homo sapiens
tagagccttacatctacagtgtcattacagccttagaaattaccgccttctttctgagtgctgaagagagaaattatcaattgtttttatatattgaattttttacaccccatctcttttaagtgttgacttatgaccatttcatcagcaattcctgtttttttttttggaatagcaacaactaaaactagaaaggaatagattaaaagtttctggtttagatttgacaacgtttttaagaaatttatttcaatacatgttcatatgtctctgattcctggaagtcattgaaaccttatccacaaaggacaaagaccaaggacacagacttcacagtgagccatttatagcagagaagtcctgcagatttagaaaaagtaagcaggctttccttttctcctgagttcctgccagtcaatgccagtgtgacttgctcactggcattgagctcagccttaaaatcaagaagcatgaggatcaaattccttaatgccaataattgggatgttttggagaacttaaaatgttaaatattagagatgaaaaaatttaatagcatttaagcattttttagctcctgtcataccactataaatctgtttatctgtactataattttaaaatggtgcttttcctaggcatgttttaaataaaatttgttaactggttgttgaacagtttgaactcagtagggcacaaacatgaaaatcaattagcatattcgaagtgactattatgtgccaagcttcataggaagcaccacaagtgatataaaaatgaattaggcatgaccccagcctcagagaatttagcttagtagaggaaataaggcatgagtagcaacaattgtgctataaaatagactgtgaaatgtcgcaagactattagaatcttacattcaagctattatatgactttaaagatcaatcaccagattctttctaaggttggacaagagaagaagcgttgttagaggttgaatttatttaaactcaaatgtcaatttgtgggcattgttatcaaatgaaaaaatatacacacatttattaaaagtagactgcttctgactggcagaatttaaaagtggcatcttaaaggagagtatagtatgggaaaataaatactagtttttgtaactaagtaaatttagatattaacttattaataatatcttttggccaaatgacctagacaaatttaattataattttttggtcatcaaaagtagtcaagagcattatatggactatccaattaataataggacaataacttttatctctaatgtggttattataaatattttartgaacatttatattttaataaaattctatatattcagactattttattttattatatgttatttcagtagtttttgggtaacaggtggtgtttggttacatggataatttctttagcagtgatttctaagatgtttgtgcacctctcaccagagcagtatacattg

SEQ ID NO: 674470 - DNA, 1617 bp, Homo sapiens
caccctggtcctgaagccacactctttcttctgtttcagtcctgtgcttctgtttaagtgttcactcatgtgagacttggatgttactgctctgaatttgttcctgatttgtatgaggcatatgaaaatttttctgactgagaaaaaacttaaccccagttattgaggtcttcatgttttgctttgaatggaagatgagctgggattgacagcaaagaagaatgacagaacttttcaaggggacagaaatgttccgtttttaattataatggttatatgtatctatttttgtcaaaatttattgagtattgaactatacagcaattagtacaatttattttatataaatgctaccttaggaatgtttatctaaaaacttttataaaggcaactgtacttaccagaaataattcccttttctctatagaacatcaaccaaatgaactggtctaaataaaaagctctcagtcactctggagaaaacaagatctgaggcttctctgtacagtggcttccaaattgagactgtgctcatgcttggggatgtgcatgataatttattggtatgaaagcaataataggagaatttctacacttacattattgtatcctattgtttgaagttttatttttgaacattttacatttatatagaatcatgatgtaattggatatgaaatgcataaagaagatacgtatgtttttggtgcatgttcaaaaaatggtttgtggttgaaataaaaaaatttaaaagctaaagatcttgagctagaacaaaatactacaatgtgatacagaaaaatatttcatatgcttctgttacacagcacatttgttttaaaataatgtggactatgaagcgtagagggaaagaggttcattaactaactgaatgaggagtcggtgtgtaagaagagagggaaacaaaaacaataaagtcccgaattaagaaatcaaagaaaatatttataatggcacatctatttaaaacatcaaaagatatgcttttcaaaatatatctaatcctaatatattaattaatagcagaggttttcaggtatggtcagaattgggaattatgaaagaagtacctaggccaggcactgtggcccacacctgtaatcccaccctttttggaggccaaagcaggtggatcacttgaggccaagagttcgagaccagcctggcaaaaccctgactctactaaaaatataaaaattagctgggcgtggtggcaggagcctgtagtcccagctacttcagaggctgaagcatgagagtcgcttgaacctgggaggtggaggttgcagtgagtccatattgtaccactgcactccagcctgggtgacagagcaagactctgtctcaaacaaaaaaaagtatcttacatcacatgtatgtacatcacacagacacaaataaatacacgcaaacacacgtatcctaaccaaaacagaagcataaaattttacatatsatacccttcttttctttttttttttttttggcacttggccatttattgaccttaatatttatcagtctttctgtgcatataaaacctgctaatagaaaagtcgggaatccctctctgcttactcttaagttgtgtacatc

SEQ ID NO: 674471 - DNA, 1617 bp, Homo sapiens
caccctggtcctgaagccacactctttcttctgtttcagtcctgtgcttctgtttaagtgttcactcatgtgagacttggatgttactgctctgaatttgttcctgatttgtatgaggcatatgaaaatttttctgactgagaaaaaacttaaccccagttattgaggtcttcatgttttgctttgaatggaagatgagctgggattgacagcaaagaagaatgacagaacttttcaaggggacagaaatgttccgtttttaattataatggttatatgtatctatttttgtcaaaatttattgagtattgaactatacagcaattagtacaatttattttatataaatgctaccttaggaatgtttatctaaaaacttttataaaggcaactgtacttaccagaaataattcccttttctctatagaacatcaaccaaatgaactggtctaaataaaaagctctcagtcactctggagaaaacaagatctgaggcttctctgtacagtggcttccaaattgagactgtgctcatgcttggggatgtgcatgataatttattggtatgaaagcaataataggagaatttctacacttacattattgtatcctattgtttgaagttttatttttgaacattttacatttatatagaatcatgatgtaattggatatgaaatgcataaagaagatacgtatgtttttggtgcatgttcaaaaaatggtttgtggttgaaataaaaaaatttaaaagctaaagatcttgagctagaacaaaatactacaatgtgatacagaaaaatatttcatatgcttctgttacacagcacatttgttttaaaataatgtggactatgaagcgtagagggaaagaggttcattaactaactgaatgaggagtcggtgtgtaagaagagagggaaacaaaaacaataaagtcccgaattaagaaatcaaagaaaatatttataatggcacatctatttaaaacatcaaaagatatgcttttcaaaatatatctaatcctaatatattaattaatagcagaggttttcaggtatggtcagaattgggaattatgaaagaagtacctaggccaggcactgtggcccacacctgtaatcccaccctttttggaggccaaagcaggtggatcacttgaggccaagagttcgagaccagcctggcaaaaccctgactctactaaaaatataaaaattagctgggcgtggtggcaggagcctgtagtcccagctacttcagaggctgaagcatgagagtcgcttgaacctgggaggtggaggttgcagtgagtccatattgtaccactgcactccagcctgggtgacagagcaagactctgtctcaaacaaaaaaaagtatcttacatcacatgtatgtacatcacacagacacaaataaatacacgcaaacacacgtatcctaaccaaaacagaagcataaaattttacatatcatacccttcttttytttttttttttttttggcacttggccatttattgaccttaatatttatcagtctttctgtgcatataaaacctgctaatagaaaagtcgggaatccctctctgcttactcttaagttgtgtacatc

SEQ ID NO: 674472 - DNA, 636 bp, Homo sapiens
gaaagtcccacaagcggtgtgctctctttccccgcaagtgcacagcttccctctccatgccacacaggatgggggagggaggagggrtgggtgtcggcaattgaacactgtctttcctaccctcttcagtgcctctttcagtgatatgaagttaaaaaatcagatgatttttgcttgttatgaaggtgctcttttgtgtggatagttgttcaatttggtgttcctgcagggaggacgattggtgtggatgcgtctatttgaccatcttactccgccgcctcctcaacaagacctggatcttttttgatgaatgagagcagtaaagaagaccgtccatgagggtagaaaacctgtgttttcctattcaaagttagatcccctgtacctctctttatatctcatatggcatagacatgaagatgtaggaatagatgaatgtataaatgccatatatatgatgcatattaatctttgggccatgagttgaaaataacctggcagttaaggctgcagagattgccttgaattgcattggtcttaatacctctgtaattctgagcagttaagctgtttgatatattatcaaaatttgagttattttgttctcttgctatattttactttattctattagag

SEQ ID NO: 674473 - DNA, 1128 bp, Homo sapiens
cattggcttgttttttttttaacacttttttagcctgaatgaaaatatacctgttctcccatttttagttgttcactgttactttccaacatgatttttttagttgcttgattagttgttatgtaattctctgatatttatacaaatgaatatatttgattgttacattttccacagcagtgattggataaattatttttggaatctaaatcaatcttaactcatggaggaggaagatttgacaattctcttgcatttctttttctctttcttttctatctttcattttttcttcatctgctgaatgtcatagccacctcattagttctggataatctcttttctttcaacaacgaaagacctgtaagctctaaatttgtcttgaaatgtctgttgcactgcagggtcatttactgtgaaccatttgtaaggaacatacaccaaatgttccaatcaatgtgtacagatagggtcaggctaatacagaagtgtattaaaatggccggatgccaatttagttcatcttttgtgaaatcctgagttattttcttgctacaaacatcaagatgaagcctttggagtttatttctttcctttctattactttcttctatatttttataaagaatattcttaaactttttaaaactctacctggccaaatagtccatatatactttattagagaaaatagctttaagccaactgtagaatgattgaaatttaattgttggtagccaagacaagtaaattgttaatcaataggtttaggggagaatattagctaaagcttcaggcagtttcttatttactataagcacaataaccataattaatcatccagtaaaaaataattctatttgatctgtaagagaaatgagagtttcatttcaagatgtaatttagcaaatgtaagaacttaagtagtagcgttaccatgatcaattaaacaatgcyttagattagaagctgaaccgttattttatttgtagtccaaggattaatacttatattaagtttagttgcaaaacttaaatgacatttactgagaaaccacatgtaggctgacattccttttttctttcataattaagttagaatagatttgaagcatggcaaggtgttgca

SEQ ID NO: 674474 - DNA, 598 bp, Homo sapiens
gcataggttcacctgtgttttgtattataggttctactctgggtaagcacgcttgcattatgtgaagcttgatatatagagaggtttatagactcattcattcattcaacaaatattttgtgagcacctaccttatgtagcatattgttctcgtgcctggggttataagtgtgaacaagataatcaaagctcctgccttcaaggagctcacatttcagggaaaatctagacaaaatgtgtaggtagaaaaatcggygattctgtcccacgctaccttcaggaaataaaacattgtagtatgagactcaataattcatacatttactctttcaacagatacttagtgtgctcctactgcgtgcaagacacagttctaggtattggatcttcccttaatcttcaaattcagaagatcttaaatgcattccagaaatttgtttcttataagtacattgtgtgagtttacaatcagaaaacttttttgaaattacctcttcaatcaatttcttttgactgtaaattatcctacctggatttgtgataagaacgatgtagcagaaaattcagaacaggaagcacactgtgatgatggctttat

SEQ ID NO: 674475 - DNA, 644 bp, Homo sapiens
ctcctttcccaggcaytgtgaagatcctgtttccctagctgtgcagctgcaaggtcactagacagataaactcaagttgtaaaaaatgtttttccttgaaaagtaaaaaatgatgtaatatatgtctcaattaattgaataaccgtctttgtttctcacttctgtaatatgcttccccctgcacagatctcccccaccccaccaaatgcttaaaaggtaacttaactctttgttcagggctcagtcctttggatattaatccacctgggctggtgcacctaaataataaagatcctcctcaatcccatcagtctctctgattccttatcaatcctgctaaccctctaaccttatttcctgtaaattagacttataggcctaatcaaattcaggtttaaccttttggcaagaacactttacagatggtactgtgtactcttattagatcacttcagaagacgcatgtttggtttgtgattactttgtaaaaacagtgtagtaggtactcactaaaggaaatttagaaaataataagcttaaggctgggcgtggtgcctcatgcttgtaatcctagcactttgggaggctgaggtgggtggatcacctgagctcaggagttctagatcatcctggacaacatggtg

SEQ ID NO: 674476 - DNA, 644 bp, Homo sapiens
ctcctttcccaggcactgtgaagatcctgtttccctagctgtgcagctgcaaggtcactagacagataaactcaagttgtaaaaaatgtttttccttgaaaagtaaaaaatgatgtaatatatgtctcaattaattgaataaccgtctttgtttctcacttctgtaatatgcttccccctgcacagatctcccccaccccaccaaatgcttaaaaggtaacttaactctttgttcagggctcagtcctttggatrttaatccacctgggctggtgcacctaaataataaagatcctcctcaatcccatcagtctctctgattccttatcaatcctgctaaccctctaaccttatttcctgtaaattagacttataggcctaatcaaattcaggtttaaccttttggcaagaacactttacagatggtactgtgtactcttattagatcacttcagaagacgcatgtttggtttgtgattactttgtaaaaacagtgtagtaggtactcactaaaggaaatttagaaaataataagcttaaggctgggcgtggtgcctcatgcttgtaatcctagcactttgggaggctgaggtgggtggatcacctgagctcaggagttctagatcatcctggacaacatggtg

SEQ ID NO: 674477 - DNA, 644 bp, Homo sapiens
ctcctttcccaggcactgtgaagatcctgtttccctagctgtgcagctgcaaggtcactagacagataaactcaagttgtaaaaaatgtttttccttgaaaagtaaaaaatgatgtaatatatgtctcaattaattgaataaccgtctttgtttctcacttctgtaatatgcttccccctgcacagatctcccccaccccaccaaatgcttaaaaggtaacttaactctttgttcagggctcagtcctttggatattaatccacctgggctggtgcacctaaataataaagatcctcctcaatcccatcagtctctctgattccttatcaatcctgctaaccctctaaccttatttcctgtaaattagacttataggcctaatcaaattcaggtttaaccttttggcaagaacactttacagatggtactgtgtactcttattakatcacttcagaagacgcatgtttggtttgtgattactttgtaaaaacagtgtagtaggtactcactaaaggaaatttagaaaataataagcttaaggctgggcgtggtgcctcatgcttgtaatcctagcactttgggaggctgaggtgggtggatcacctgagctcaggagttctagatcatcctggacaacatggtg

SEQ ID NO: 674478 - DNA, 644 bp, Homo sapiens
ctcctttcccaggcactgtgaagatcctgtttccctagctgtgcagctgcaaggtcactagacagataaactcaagttgtaaaaaatgtttttccttgaaaagtaaaaaatgatgtaatatatgtctcaattaattgaataaccgtctttgtttctcacttctgtaatatgcttccccctgcacagatctcccccaccccaccaaatgcttaaaaggtaacttaactctttgttcagggctcagtcctttggatattaatccacctgggctggtgcacctaaataataaagatcctcctcaatcccatcagtctctctgattccttatcaatcctgctaaccctctaaccttatttcctgtaaattagacttataggcctaatcaaattcaggtttaaccttttggcaagaacactttacagatggtactgtgtactcttattagatcacttcagaagacgcatgtttggtttgtgattactttgtaaaaacagtgtagtargtactcactaaaggaaatttagaaaataataagcttaaggctgggcgtggtgcctcatgcttgtaatcctagcactttgggaggctgaggtgggtggatcacctgagctcaggagttctagatcatcctggacaacatggtg

SEQ ID NO: 674479 - DNA, 593 bp, Homo sapiens
cgtgaatgagggctcacactctygtcttctggtcacctctcactgtggcccttcagctcctaactctgtgtggcctggtttcccccaaggtaatcataatagaacagagatcattatggtaatagaacaaagagtgatgctacaaactaatgattaataatagtcagatataatcctatccgtttcctatctctagtaaaacttttcttattctaattattttctttgctgtactggaacagcttgtgccttcaggctcttgcctgggcacctgggtggcttgcggcccacaagataagatatattgcgttgaactataatttatgttgattgctgaatgatttagggcgggggggtgggcaccccctgaaattctgccctggaggagtggcctcaccctaaccctggccgtggctaataataaggcccacctcttagggccgtggagtgaaataagttttccaggtaatgcgcagtagagccctcagccctccgctgaagttgcgttaggaaggaggaagggagaggtaaatgctgagcccgcaggcggcagtctgtgcctcggagagaaactttatcccaaccttgctggg

SEQ ID NO: 674480 - DNA, 593 bp, Homo sapiens
cgtgaatgagggctcacactcttgtcttctggtcacctctcactgtggcccttcagctcctaactctgtgtggcctggtttcccccaaggtaatcataatagaacagagatcattatggtaatagaacaaagagtgatgctacaaactaatgattaataatrgtcagatataatcctatccgtttcctatctctagtaaaacttttcttattctaattattttctttgctgtactggaacagcttgtgccttcaggctcttgcctgggcacctgggtggcttgcggcccacaagataagatatattgcgttgaactataatttatgttgattgctgaatgatttagggcgggggggtgggcaccccctgaaattctgccctggaggagtggcctcaccctaaccctggccgtggctaataataaggcccacctcttagggccgtggagtgaaataagttttccaggtaatgcgcagtagagccctcagccctccgctgaagttgcgttaggaaggaggaagggagaggtaaatgctgagcccgcaggcggcagtctgtgcctcggagagaaactttatcccaaccttgctggg

SEQ ID NO: 674481 - DNA, 593 bp, Homo sapiens
cgtgaatgagggctcacactcttgtcttctggtcacctctcactgtggcccttcagctcctaactctgtgtggcctggtttcccccaaggtaatcataatagaacagagatcattatggtaatagaacaaagagtgatgctacaaactaatgattaataatagtcagatataatcctatccgtttcctatctctagtaaaacttttcttattctaattattttctttgctgtactggaacagcttgtgccttcaggctcttgcctgggcasctgggtggcttgcggcccacaagataagatatattgcgttgaactataatttatgttgattgctgaatgatttagggcgggggggtgggcaccccctgaaattctgccctggaggagtggcctcaccctaaccctggccgtggctaataataaggcccacctcttagggccgtggagtgaaataagttttccaggtaatgcgcagtagagccctcagccctccgctgaagttgcgttaggaaggaggaagggagaggtaaatgctgagcccgcaggcggcagtctgtgcctcggagagaaactttatcccaaccttgctggg

SEQ ID NO: 674482 - DNA, 520 bp, Homo sapiens
  misc_feature 83: n = A,T,C or G
aagaacaataatggcaaacacacagtaattagtattgcatttgttcagatattatcactcttgttgtaatttgtattgcttangcgaaggtatattgagcatttgctatgattaggttctatgctaaatgctttatgtattttttctacaattaatcctctgcacaattctatacagtaagctggaatatgtactattattgtccttttaaaatgagaaactaaaattcataggaactaaatacttggattctctgatgtggctggcaagtagtggagccatgatttgaactaacgcctgtctgatttcagagcccttgctcttaatctacttaaaagataaatcttgtcatcactgcctcattagcataagtatcacaaccaatattattgtccagggttatcaaatgcactcactgaccttgactggttcatagtctaccaaaggtgaaaaatcatgaatatcaataaaaagctatgrcttccttgccttccatgaatattaatgagtatattgtttt

SEQ ID NO: 674483 - DNA, 520 bp, Homo sapiens
  misc_feature 83: n = A,T,C or G
aagaacaataatggcaaacacacagtaattagtattgcatttgttcagatattatcactcttgttgtaatttgtattgcttangcgaaggtatattgagcatttgctatgattaggttctatgctaaatgctttatgtattttttctacaattaatcctctgcacaattctatacagtaagctggaatatgtactattattgtccttttaaaatgagaaactaaaattcataggaactaaatacttggattctctgatgtggctggcaagtagtggagccatgatttgaactaacgcctgtctgatttcagagcccttgctcttaatctacttaaaagataaatcttgtcatcactgcctcattagcataagtatcacaaccaatattattgtccagggttatcaaatgcactcactgaccttgactggttcatagtctaccaaaggtgaaaaatcatgaatatcaataaaaagctatggcttycttgccttccatgaatattaatgagtatattgtttt

SEQ ID NO: 674484 - DNA, 1402 bp, Homo sapiens
acagtgtacctttttcttcattgctgcctgggaacagaacaatgatgcattttaaagccttgatgagaaaaggtcaggacactcctcatctagcctcacacctggtgatcctggacactaccacgggtctgccctgggccgtggcctgctacggtaccttcagaaggatgtcacccatgctctcccaggcatcctaggttcctaaaaggtcttgtctaggcagagagaacggtcaggacttcactggcttggggygggggagttcctgctgttcagccagcaccacacttggccccaggacggctgacccacaggacagaatcggcacctgagcttcagatccgctctctgtcaaatgtgagttaaaacaatctgaacaaaatgccctctagtggtgctctgtagaagagctttaaataagactacttctccttcctccagtattgtttaaaaacttaatagacactttcagggtgttgtttttgtttctgtgttttttttttctttttgagacagagtctcactctgttgcccaggctggaatgcaatggcaccatctcggctcaccgcaacctctgcctcctgggttcaagcgattctcttgcctcagcctcccaagtagctgggattacaggcgtcaaccatcatgcctggctaatttttgtattttcatagagacagggtttcaccatgttgaccaggctggtcttgaactcctgacctcaggtgatccgcctgcctcggcctccccgaggtgctgggattacaggcatgagtcaccgcacccggcctcagggtgtttaaaagcttgttcctttggtgttttcaccattcccactgtcttctaagcaaagctactgagtggtaatacactgctgaaagtaactgctcaagaaagtccagctctgcctccttgcacattaccataaaggctagtttagcaaaatcatcatggtgatgtcaagcaagaacctgaagcccaagacagatcctgggagtggggcaggtggcctcaccttcaatctggcctccacggaggccttcttccgcgcttctctcctgcgatactgctccaccttgtccagctggtccgggcgctggagcatcccagcaaccctttgcactgctgtcgcaacggcctcccggtctgtctccttcatggtgaaaaagctggtggaatcctcacactgttcatgctaggggtgttctctgtgcactgcaggagttgttaggacggtagaaatgttaggtacaaaacctcccccaaactatcaggtgatcacagtggagctacaagcagagcctctgagatcattaatccaggaaacctcaaagaaagctgaactaggatgaggaactccttgataagataaacaaaccttcgtaacacaaacatgcagaa

SEQ ID NO: 674485 - DNA, 599 bp, Homo sapiens
gggtttttgtttgtttgtttttgttttgaggtggagtcttgctgtgtcacccaggctagagtgcagtggcgctatctctgctacgtgcaacctccacctcccaggttcaagtgattctcctgcctcagcctctcgagtagctgggactacaggcgtatgccatcacacccagctaattttttgtattttttagtacagatggggtttcaccatattggccaggatggtctcaaactcctgaccttaagtgatctgctcgccttggcctccgaaagtgctgggattacaggcatgagccactgcacctggccatatagggttttaagaaagattaaatgaaatattcggtgagtgtctggaacatagtaagcagtgagtaaatggccaaatggtagttgtgttattttcattattgttgtttgcagctacaactgccaatgaaaaactaaatcacaaacttcctctagatggtcccgttcactttactcgttacattggtttcagagcatccaaagtttgagcttctttcttkgtttcttctctcactctccttctagaatgtaggttcatgaggtcagggaaccttgtttgtctggttc

SEQ ID NO: 674486 - DNA, 643 bp, Homo sapiens
tgccccctaagccctgtaaatttagaaattctgattcccaggtccctgaacctgcacatcccgctcctccctccacacccgtctgctggggaggggagaagagggtgcccacagatgcagcaggggggtcgtgacagagccgggaaccagggcgctggtggcccacttaactggacacctggagaggtggctgagcagcgggtgggggcgttcgttttcactggggtgggatgggaattgtggtgaatcgtgctgaaaaatgcagaggcagcatccgtcctcaccaaggagagaccaaggtttgatttttaaaacaaatgaacagcttgaggctatttttttaaatgaaaatgaccataaatgtgcaatgtgtgccatatgaacaagaccacctcacaaagtccagcacattccccctcccttcctgctcccctatcagggcagaatggcctccccagattccaatcccgtttagttggcaaccagattgaggcttggacctgggtataattgctgactcagaaattcakggaagaatccaagccaaagtataaaatattttattattgtctaggggaacaggggagtggagaatgtgtgtgtgtatgtgtgagtacgtgtgtatatgtgcgtgcattatatc

SEQ ID NO: 674487 - DNA, 620 bp, Homo sapiens
ccctcacccaacatctttgtgattagtgatgatttgtgtgacatttttcctccccaataggctataacctctgtgaaaacagaccttgtctccctggatcacagctatatccaccaaggcctggcacaatgcctgacattcagtaggcactgatgaatgaatgagagatggatygatgatggttggatggatggatggttggttggatggatggatggatgaatgaatggatggatggagctcagtgtattcatattgtggtcttgcattcattttccaaagaaaacatattaggagtagcatgctgacacaatgtggaattggggagaaattgcccttcctccaatttagttgaagaaagtctcacaactaatttttagacatctctaaagagtgatgaccatattttgctgattaaatttcttttctgtgagccctttatttagtgaaatttcacttctgatattttcttctgtcttatttcattctagtctttattctaagtttgatttattatttgttgtttttgttgctgtaatgtcccaaaatctgtggcaatgggctgtttataaattttacctgaagaaactgcataattgtcacacctacccaagatatca

SEQ ID NO: 674488 - DNA, 620 bp, Homo sapiens
ccctcacccaacatctttgtgattagtgatgatttgtgtgacatttttcctccccaataggctataacctctgtgaaaacagaccttgtctccctggatcacagctatatccaccaaggcctggcacaatgcctgacattcagtaggcactgatgaatgaatgagagatggattgatgatggttggatggatggatggttggwtggatggatggatggatgaatgaatggatggatggagctcagtgtattcatattgtggtcttgcattcattttccaaagaaaacatattaggagtagcatgctgacacaatgtggaattggggagaaattgcccttcctccaatttagttgaagaaagtctcacaactaatttttagacatctctaaagagtgatgaccatattttgctgattaaatttcttttctgtgagccctttatttagtgaaatttcacttctgatattttcttctgtcttatttcattctagtctttattctaagtttgatttattatttgttgtttttgttgctgtaatgtcccaaaatctgtggcaatgggctgtttataaattttacctgaagaaactgcataattgtcacacctacccaagatatca

SEQ ID NO: 674489 - DNA, 620 bp, Homo sapiens
ccctcacccaacatctttgtgattagtgatgatttgtgtgacatttttcctccccaataggctataacctctgtgaaaacagaccttgtctccctggatcacagctatatccaccaaggcctggcacaatgcctgacattcagtaggcactgatgaatgaatgagagatggattgatgatggttggatggatggatggttggttggatggatggatggatgaatgaatggatggatggagctcagtgtattcatattgtggtcttgcattcattttccaaagaaaacatattaggagtagcatgctgacacaatgtggaattggggagaaattgcccttcctcsaatttagttgaagaaagtctcacaactaatttttagacatctctaaagagtgatgaccatattttgctgattaaatttcttttctgtgagccctttatttagtgaaatttcacttctgatattttcttctgtcttatttcattctagtctttattctaagtttgatttattatttgttgtttttgttgctgtaatgtcccaaaatctgtggcaatgggctgtttataaattttacctgaagaaactgcataattgtcacacctacccaagatatca

SEQ ID NO: 674490 - DNA, 620 bp, Homo sapiens
ccctcacccaacatctttgtgattagtgatgatttgtgtgacatttttcctccccaataggctataacctctgtgaaaacagaccttgtctccctggatcacagctatatccaccaaggcctggcacaatgcctgacattcagtaggcactgatgaatgaatgagagatggattgatgatggttggatggatggatggttggttggatggatggatggatgaatgaatggatggatggagctcagtgtattcatattgtggtcttgcattcattttccaaagaaaacatattaggagtagcatgctgacacaatgtggaattggggagaaattgcccttcctccaatttagttgaagaaagtctcacaactaatttttagacatctctaaagagtgatgaccatattttgctgattaaatttcttttctgtgagccctttatttagtgaaatttcacttctgatattttcttctgtcttatttcattctagtctttattctaagtttgatttattatttgttgtttttgttgctgtaatgtcccaraatctgtggcaatgggctgtttataaattttacctgaagaaactgcataattgtcacacctacccaagatatca

SEQ ID NO: 674491 - DNA, 340 bp, Homo sapiens
atgatcattgatttctatgtagagggggtgatgtttgtgaattaattccttcaccattcactcatttacctgttacttactgagcacctattgtgtccaccctactgccaagcagcagagatctagtggtgagacagccagacacatccactcctcttgaggagttcagagtctacttatacttcatggagttggttgtcttttcattgtcagccagtgttctatttactgattcacaatttctcaaagaatctggttgaaaaatagtttgcttgggcagatttttttccctgtggttattccattgrgaaattcttttcgtagaagggcacctttgctg

SEQ ID NO: 674492 - DNA, 590 bp, Homo sapiens
tgctgcctgttgtttcccttcacctaacttccttccttcctgcagccctcagcctgtgtgggcttcatcttcctttgctctgtctccaaggcctctgagatctaaggacactctcatgcatgaccatacagcgtggcaggtagaactgaattggcttgcgattggacagtcactctcctgatcctttccctaagtcatgggccgggatgasagcactgggtaccattcagaatttatggcaatgtcagggtcctcttcaaaaagtaacgtttaaaaacatacctttaaggcagccaaccactaaagtttttcaacgcctgggtgaacagtggtctgttatgttgcaagcagacttctttttccttgaaaggatatgccattagaatccacccaaggtctcatcctggcccgcacagatcactcagtgaaggaaatcatattagtttcccattgctactgtaacaaatcaacacagactcagcagcttagagaaacatagatttattatcttatagttctggaggtcagaagcctaaaaccaaggtgctgcagggctgcactccttctgtagatgatatgaaagaaattct

SEQ ID NO: 674493 - DNA, 590 bp, Homo sapiens
tgctgcctgttgtttcccttcacctaacttccttccttcctgcagccctcagcctgtgtgggcttcatcttcctttgctctgtctccaaggcctctgagatctaaggacactctcatgcatgaccatacagcgtggcaggtagaactgaattggcttgcgattggacagtcactctcctgatcctttccctaagtcatgggccgggatgacagcactgggtaccattcagaatttatggcaatgtcagggtcctcttcaaaaagtaacgtttaaaaacatacctttaaggcagccaaccactaaagtttttcaacgcctgggtgaacagtggtctgttatgttgcaagcagacttctttttccttgaaaggatatgccattagaatccacccaaggtctcatcctggcccgcacagatcactcagtgaaggaaatcatattagtttcccattgmtactgtaacaaatcaacacagactcagcagcttagagaaacatagatttattatcttatagttctggaggtcagaagcctaaaaccaaggtgctgcagggctgcactccttctgtagatgatatgaaagaaattct

SEQ ID NO: 674494 - DNA, 1942 bp, Homo sapiens
tgggatacatgtgcagaatgtgcagatttgttacataggtaaacgtgtgtcatatcccggtagttttgcttgtttttgccattctgatgtatgtatagtagtatctcatggttttaacttgcatttccctagtagctaatgctgtcgagcatcttttcacttgcttatttaccagtgatatatcttctctggtgaactgtctgttgaatcttttgctcactgttttcatttgctcatctacaatgggtattgttaatctactatttgaagttttgttggactagttgatgaaaatgtatacattattattaatttacattttaaatgataggttagattgaaccacttttttctgtatgtctattggtcaagtgtagttcttcaggtaagagtttaccatttgagtcttctgtctttgtacgtgtagcagtggagatgggattattaaytggtggcatgttacttaattttgagtcatgtttgcatccagaaccaaaatgtttaagatgcacagaaccccagctctgtggaaagtattttaacaattttcttatgccccatccatgtcccaaatattaggatatttgcctttttattattgattcaaaagtgctcttcatatattggaaatattatccctgtgtctcttaatttgagaaggttttccttggggagactcaggactgcgctctgctgagaaagtctggtaattattgtgcttcttaatgaactgaggtgtatttctagttgggcccatggactgaatccgatcagagaagttaacttgcaaagctctctcattagcagattgctttgtagatgcatttttcctggtaacagtaaaatagcttcattcaaatggcaaaaaaaaaaaaaaatggaaatataaatgagtctaactcggattcccagttctttgtgtcataaaagaaaaagaaaacagtcaaatgaagaaaaaaatcctggatttatgctacaacttccatgtgtttttttatatcagagaaggaagtgtgaagacagaaatgggaatatatatcaataatgaaacaccaaatgtctatggtattgaaccaatctaaagctttccacataatattatcagaaattggaagtggaaagcaaaaacaagatttcatctcctctcctagccagtccaacaccatcatctgctccgtgtctgctgcctactttacacatggatcccttcaccctgcccctgcagaaaaatccgggtcctggaactttggcctcaatagcagagtggttgtaggaagaagtgttggaagatccagaggtcagagcaggtagcccagtatggtggctgagcctggtatacctggtagttagagctggtgccaggatacctgcctgggccaagtcctggttctgctatccaacaactgcaaggggaaggtcatggtcaggatgtagactgcactcacctggtgccagagactgttctatattctttactcctattcatccacataatccttgcaacaacccatgtggcagatttttatttgtattatataaatgggaaactgaggcacagaaggtcaaataacctgcctaaaattacagagctagttagtgagagagctagaattcaaactctggcggtctgtttccaaagtctatggatcataagacacgttcgatagatatcaacccaacagaccaccaaaagatatgaactgtctgtctctggccatctctgtgacattgagcaggctatataaatagacttctgaatgccagttagcaaaatttttcaaatatttttatagtgccaagaaagtgctgcttgactgggattattaggaattgccttgcgtttagaaagcatgacatatgccaccattatattcagagcaatggcaaagagtgattaaatgtaccagctcccagacatgagattcaaaataatttttagctg

SEQ ID NO: 674495 - DNA, 1942 bp, Homo sapiens
tgggatacatgtgcagaatgtgcagatttgttacataggtaaacgtgtgtcatatcccggtagttttgcttgtttttgccattctgatgtatgtatagtagtatctcatggttttaacttgcatttccctagtagctaatgctgtcgagcatcttttcacttgcttatttaccagtgatatatcttctctggtgaactgtctgttgaatcttttgctcactgttttcatttgctcatctacaatgggtattgttaatctactatttgaagttttgttggactagttgatgaaaatgtatacattattattaatttacattttaaatgataggttagattgaaccacttttttctgtatgtctattggtcaagtgtagttcttcaggtaagagtttaccatttgagtcttctgtctttgtacgtgtagcagtggagatgggattattaattggtggcatgttacttaattttgagtcatgtttgcatccagaaccaaaatgtttaagatgcrcagaaccccagctctgtggaaagtattttaacaattttcttatgccccatccatgtcccaaatattaggatatttgcctttttattattgattcaaaagtgctcttcatatattggaaatattatccctgtgtctcttaatttgagaaggttttccttggggagactcaggactgcgctctgctgagaaagtctggtaattattgtgcttcttaatgaactgaggtgtatttctagttgggcccatggactgaatccgatcagagaagttaacttgcaaagctctctcattagcagattgctttgtagatgcatttttcctggtaacagtaaaatagcttcattcaaatggcaaaaaaaaaaaaaaatggaaatataaatgagtctaactcggattcccagttctttgtgtcataaaagaaaaagaaaacagtcaaatgaagaaaaaaatcctggatttatgctacaacttccatgtgtttttttatatcagagaaggaagtgtgaagacagaaatgggaatatatatcaataatgaaacaccaaatgtctatggtattgaaccaatctaaagctttccacataatattatcagaaattggaagtggaaagcaaaaacaagatttcatctcctctcctagccagtccaacaccatcatctgctccgtgtctgctgcctactttacacatggatcccttcaccctgcccctgcagaaaaatccgggtcctggaactttggcctcaatagcagagtggttgtaggaagaagtgttggaagatccagaggtcagagcaggtagcccagtatggtggctgagcctggtatacctggtagttagagctggtgccaggatacctgcctgggccaagtcctggttctgctatccaacaactgcaaggggaaggtcatggtcaggatgtagactgcactcacctggtgccagagactgttctatattctttactcctattcatccacataatccttgcaacaacccatgtggcagatttttatttgtattatataaatgggaaactgaggcacagaaggtcaaataacctgcctaaaattacagagctagttagtgagagagctagaattcaaactctggcggtctgtttccaaagtctatggatcataagacacgttcgatagatatcaacccaacagaccaccaaaagatatgaactgtctgtctctggccatctctgtgacattgagcaggctatataaatagacttctgaatgccagttagcaaaatttttcaaatatttttatagtgccaagaaagtgctgcttgactgggattattaggaattgccttgcgtttagaaagcatgacatatgccaccattatattcagagcaatggcaaagagtgattaaatgtaccagctcccagacatgagattcaaaataatttttagctg

SEQ ID NO: 674496 - DNA, 1942 bp, Homo sapiens
tgggatacatgtgcagaatgtgcagatttgttacataggtaaacgtgtgtcatatcccggtagttttgcttgtttttgccattctgatgtatgtatagtagtatctcatggttttaacttgcatttccctagtagctaatgctgtcgagcatcttttcacttgcttatttaccagtgatatatcttctctggtgaactgtctgttgaatcttttgctcactgttttcatttgctcatctacaatgggtattgttaatctactatttgaagttttgttggactagttgatgaaaatgtatacattattattaatttacattttaaatgataggttagattgaaccacttttttctgtatgtctattggtcaagtgtagttcttcaggtaagagtttaccatttgagtcttctgtctttgtacgtgtagcagtggagatgggattattaattggtggcatgttacttaattttgagtcatgtttgcatccagaaccaaaatgtttaagatgcacagaaccccagctctgtggaaagtattttaacaattttcttatgccccatccatgtcccaaatattaggatatttgcctttttattattgattcaaaagtgctctycatatattggaaatattatccctgtgtctcttaatttgagaaggttttccttggggagactcaggactgcgctctgctgagaaagtctggtaattattgtgcttcttaatgaactgaggtgtatttctagttgggcccatggactgaatccgatcagagaagttaacttgcaaagctctctcattagcagattgctttgtagatgcatttttcctggtaacagtaaaatagcttcattcaaatggcaaaaaaaaaaaaaaatggaaatataaatgagtctaactcggattcccagttctttgtgtcataaaagaaaaagaaaacagtcaaatgaagaaaaaaatcctggatttatgctacaacttccatgtgtttttttatatcagagaaggaagtgtgaagacagaaatgggaatatatatcaataatgaaacaccaaatgtctatggtattgaaccaatctaaagctttccacataatattatcagaaattggaagtggaaagcaaaaacaagatttcatctcctctcctagccagtccaacaccatcatctgctccgtgtctgctgcctactttacacatggatcccttcaccctgcccctgcagaaaaatccgggtcctggaactttggcctcaatagcagagtggttgtaggaagaagtgttggaagatccagaggtcagagcaggtagcccagtatggtggctgagcctggtatacctggtagttagagctggtgccaggatacctgcctgggccaagtcctggttctgctatccaacaactgcaaggggaaggtcatggtcaggatgtagactgcactcacctggtgccagagactgttctatattctttactcctattcatccacataatccttgcaacaacccatgtggcagatttttatttgtattatataaatgggaaactgaggcacagaaggtcaaataacctgcctaaaattacagagctagttagtgagagagctagaattcaaactctggcggtctgtttccaaagtctatggatcataagacacgttcgatagatatcaacccaacagaccaccaaaagatatgaactgtctgtctctggccatctctgtgacattgagcaggctatataaatagacttctgaatgccagttagcaaaatttttcaaatatttttatagtgccaagaaagtgctgcttgactgggattattaggaattgccttgcgtttagaaagcatgacatatgccaccattatattcagagcaatggcaaagagtgattaaatgtaccagctcccagacatgagattcaaaataatttttagctg

SEQ ID NO: 674497 - DNA, 1755 bp, Homo sapiens
aggtcgtccccggagttgaggagggcgtggccgtggagctggtggctggggtactggggcagtggctgtagtcgtcacagcaaagcacacgcacgttgtagttgaagcacatgttgaacctgcctgtctggtcttcgttcttgcaggtcagccccgtctccaggctgcaggtcagcacctgcccgacctggtcgatgcttacctcggggtagttctccgcccggcactctatgctctttggtgcccagcacatcttgcccccagcagccctgatgttttcaaaagtttccatgtccccgcctgcaacccctgaggttgggaagtccacgtcaaaccactctgtccactcacacttcggttgacagcgggtcgtgccctggctggtggtggtgttagtcaaggggctcattgtcgtctctgtcctgggcgtgctggtctcggcctgagaggtggacagctcgctcgtgagtgttggcgccaggctcgtggtcagcggctctttggaagcggtgctggctgtgcctgtcgggcgagctctggaggttgccattgttgttggggccagcgtgggtggctgtgaggggcgccatgtgcccaagctccccgtcgtccctggaagggctgagcgtgttggaagggtggatgtggccacccctgggacagtgggttctgtggagcctgcaggcgtcgtggggcctcccgtggtggctgtaccaagggtgcttgtgtatctgggggatgtcagtccttctgagagggtggggactgctgtggtgctggccgggggagccctggtcagccccgggctactcgtaggctgcggcgttgagaacagggcctgggtggtggtggtggtggccgtctccagctctgtggtcggtggcggggttgtggcacgtcccctgcagtggtcgtcrctgcagcagaggacccggatcctgtagttgtagcacatcttgaagacgccctcctgctcccagttcctgcacaccaggccgaagtggacgtcacagtgcaccttctgccccacctgtgccagggtccagttggggaagctctcggcctggcactctatgtccttaggctgctggcataagtgccctccagcggccctgatcttatcgtaggactcaacgtcccctccaagttgttcagacttggggtagtcctcatcaaaccactctgtccactgacaccggggctggcaggtggtggtacctggggccgagggggtgaccgtcacggggcctgagctggacccagtctgcgaggtgagggccgccgtcgaccggatgctcggggtcacccatagggtggtcttttcggttgctgtggtctgggttggggtaggcacagcaggctccgtgctggcactgagggagggctgagggctggtgcctggggccggggaggggccacagggcacgtattcgcagcagagaacccgcagctcgtagtcgtgacagagcgggggactctgttggctgttggcgcacatcagcccccgcatgcggtcacagtccacctgctggcccagctcctccagcggcatgtcgggaagctgcgccgcccggcactcgatgtcagccagcacagggcatacctggtaccctctctgcctcaggttttcaaacgtctcaaagtctccgcctcccaggccgggctctgggcggtgcccattgtaccagctggaccagcggcagacctcgcggacacacacggtggagaccgggagggccgggcctgcaaggggca

SEQ ID NO: 674498 - DNA, 592 bp, Homo sapiens
ttgaggtatcttttcaagataaatccttttgctaaaaatggaatactattcagccttaagaaggggraaaatcctgtcattggcaataacatggatggatctacaggatattatgacaaatgaaataagccagacacataaaagacatttcctataacaactcactcgtgtgaaatctagaaaattggaagtcatagaaacaaaaagtagaatggggtttgctagagtctggggggtcaagggagatgggaagatgtacgtcaaagcacataaagtttccattagacaacggctggagatctattatagagcgcagtgtctacagttagtaataatgtattgtatacttgaaaattgctgacagaagatcataacttttctcaacacagaaatgatgcatatgtctgatgaaggatatgttaattagcttgatttaactattgcacaatgcatttatatataagggtatcatgttgtactctgtaaatacatgtgtttttatttgtcaaggatacctcaatacaaataaacaattaaaaaaacagaagttatggcattgtttaaaaaatcaacagtattccactgtaccaaa

SEQ ID NO: 674499 - DNA, 592 bp, Homo sapiens
ttgaggtatcttttcaagataaatccttttgctaaaaatggaatactattcagccttaagaagggggaaaatcctgtcattggcaataacatggatggatctacaggatattatgacaaatgaaataagccagacacataaaagacatttcctataacaactcactcgtgtgaaatctagaaaattggaagtcatagaaacaaaaagtagaatggggtttgctagagtctggggggtcaagggagatgggaagatgtacrtcaaagcacataaagtttccattagacaacggctggagatctattatagagcgcagtgtctacagttagtaataatgtattgtatacttgaaaattgctgacagaagatcataacttttctcaacacagaaatgatgcatatgtctgatgaaggatatgttaattagcttgatttaactattgcacaatgcatttatatataagggtatcatgttgtactctgtaaatacatgtgtttttatttgtcaaggatacctcaatacaaataaacaattaaaaaaacagaagttatggcattgtttaaaaaatcaacagtattccactgtaccaaa

SEQ ID NO: 674500 - DNA, 891 bp, Homo sapiens
tattatgtggtgaaagacatgttatcattttagcaacaaaatttttggtaaaatttgctatgaatagctactctattttcatatatgttgaactagtaagaatgtatgcattaatttctaattgtagttgccaagacaatgatacattttaactttagatgagtattctaccatcagtagagatttaacgtactgaaaaatattgttcgctggtaacactggtaatatgcatcctctttttaraaaaacaagagtaataaaataaactttgattttgatctataattatggcagttattgcatacctttagattttacaacatattgaattttaaaaagttaatattctctaatttcataaatatttcgcattcatataagaactaatattgtaaaagcaattaacaataaggattattggaaaggcaaataaataaatgttaaataagcctcctttatgtcaattttcttctatttccttattttattagaggtaccaatattggaaatgaaataggttttgtaagtcacgtaatttctgcacacagaaaggtaacactccacagaaaaatactggcactaattcttaatacattttctaacatgaagtttcctcagggaaatgtaatgtcagttgacaaaaatattcaagaaccacatacagggaatgcctgaatccatataggctaattgcaccatataatgtaatttttgaattatgttttgctgatgaagtcactgtaataattttagtttcattttatcttattttgatttatggattctgcttatatgatgcctattaccattatttcttgccagctgaggcaaaaatatgattttccattgaaattatcttctatttcacttcccagagtggaaagtagcagt

SEQ ID NO: 674501 - DNA, 891 bp, Homo sapiens
tattatgtggtgaaagacatgttatcattttagcaacaaaatttttggtaaaatttgctatgaatagctactctattttcatatatgttgaactagtaagaatgtatgcattaatttctaattgtagttgccaagacaatgatacattttaactttagatgagtattctaccatcagtagagatttaacgtactgaaaaatattgttcgctggtaacactggtaatatgcatcctctttttagaaaaacaagagtaataaaataaactttgattttgatctataattatggcagttattgcatacctttagattttacaacataytgaattttaaaaagttaatattctctaatttcataaatatttcgcattcatataagaactaatattgtaaaagcaattaacaataaggattattggaaaggcaaataaataaatgttaaataagcctcctttatgtcaattttcttctatttccttattttattagaggtaccaatattggaaatgaaataggttttgtaagtcacgtaatttctgcacacagaaaggtaacactccacagaaaaatactggcactaattcttaatacattttctaacatgaagtttcctcagggaaatgtaatgtcagttgacaaaaatattcaagaaccacatacagggaatgcctgaatccatataggctaattgcaccatataatgtaatttttgaattatgttttgctgatgaagtcactgtaataattttagtttcattttatcttattttgatttatggattctgcttatatgatgcctattaccattatttcttgccagctgaggcaaaaatatgattttccattgaaattatcttctatttcacttcccagagtggaaagtagcagt

SEQ ID NO: 674502 - DNA, 891 bp, Homo sapiens
tattatgtggtgaaagacatgttatcattttagcaacaaaatttttggtaaaatttgctatgaatagctactctattttcatatatgttgaactagtaagaatgtatgcattaatttctaattgtagttgccaagacaatgatacattttaactttagatgagtattctaccatcagtagagatttaacgtactgaaaaatattgttcgctggtaacactggtaatatgcatcctctttttagaaaaacaagagtaataaaataaactttgattttgatctataattatggcagttattgcatacctttagattttacaacatattgaattttaaaaagttaatattctctaatttcataaatatttcgcattcatataagaactaatattgyaaaagcaattaacaataaggattattggaaaggcaaataaataaatgttaaataagcctcctttatgtcaattttcttctatttccttattttattagaggtaccaatattggaaatgaaataggttttgtaagtcacgtaatttctgcacacagaaaggtaacactccacagaaaaatactggcactaattcttaatacattttctaacatgaagtttcctcagggaaatgtaatgtcagttgacaaaaatattcaagaaccacatacagggaatgcctgaatccatataggctaattgcaccatataatgtaatttttgaattatgttttgctgatgaagtcactgtaataattttagtttcattttatcttattttgatttatggattctgcttatatgatgcctattaccattatttcttgccagctgaggcaaaaatatgattttccattgaaattatcttctatttcacttcccagagtggaaagtagcagt

SEQ ID NO: 674503 - DNA, 891 bp, Homo sapiens
tattatgtggtgaaagacatgttatcattttagcaacaaaatttttggtaaaatttgctatgaatagctactctattttcatatatgttgaactagtaagaatgtatgcattaatttctaattgtagttgccaagacaatgatacattttaactttagatgagtattctaccatcagtagagatttaacgtactgaaaaatattgttcgctggtaacactggtaatatgcatcctctttttagaaaaacaagagtaataaaataaactttgattttgatctataattatggcagttattgcatacctttagattttacaacatattgaattttaaaaagttaatattctctaatttcataaatatttcgcattcatataagaactaatattgtaaaagcaattaacaataaggattattggaaaggcaaataaataaatgttaaataagcctcctttatgtcaattttcttctatttccttattttattagaggtaccaatattggaaatgaaataggttttgtaagtcacgtaatttctgcacacagaaaggtaacactccacagaaaaawactggcactaattcttaatacattttctaacatgaagtttcctcagggaaatgtaatgtcagttgacaaaaatattcaagaaccacatacagggaatgcctgaatccatataggctaattgcaccatataatgtaatttttgaattatgttttgctgatgaagtcactgtaataattttagtttcattttatcttattttgatttatggattctgcttatatgatgcctattaccattatttcttgccagctgaggcaaaaatatgattttccattgaaattatcttctatttcacttcccagagtggaaagtagcagt

SEQ ID NO: 674504 - DNA, 629 bp, Homo sapiens
tatacaatgcttctgtttaagtagactgtgaagtctatctagataacatgcctagtgtattcactttcataggtatayattaattaattgatcgattatctcaacaaatcacttgaaattagtattatgtctattagatgtttcttggtgatcggggtcacaagtttgagagagaaaaagaaaggatatggtaatgtgtgtaacaataatgaatgcattgaacattctttctctaatcactcttcatagttatttatttttaataagacaggttatataagtgcgcaatttatttggcttctttacattaaacagagttatcagaatgatttttgctctaatataaatagtatactttaaatgttttttcagatattaaatcaggattataatgaaaattttcaattctatgctgttgggtggctatatcaaaaattgaagagattgcaaaaagacttaaacagtattttaaatgcattttaaaaaatagttagagattagtaatgtttattaacacaaccattattacattagagccagaaggaaagacctcctgagtcctgccttgttcattttccttctttcagtttcctcaccaaatagacaagtaacaatagaatatggagact

SEQ ID NO: 674505 - DNA, 2486 bp, Homo sapiens
gtatttatatttatgtatgtgtgtgtttgtgtgtgtgtaatgaaactgtctctaggcaaggccaggtacaaaggtccatcatttaagtctcagagctaaataaacatgtgaggttataattattttattgagcttttttattttatgacccactaatggcttatggatcagttatattgataagcactgaaaacatacagcttcagagtttttttattttttcatttattgtttttattttaaagtgccaagaagaaaatgcccagttcccagccttatttttcatttataataaaccatagaagtacaatttatattatagggtagaaactaaagtgtatgtagggtgtatataactggcaatttgtatgcgacaataacgtactttcaatttctgatgaaaattgttgaacttcatttttgaatttaaaattaaatttatttttaaaattttttttattatgaatttggggcgtacacatgcaggtttgttacatggacatactgtgtaatggtgagatttgggcttctagtgtacccatcattcaaatagtgcatattgcacccaaaagaccatttttcaacactcacctccctcctgttctccaatttttttggagtctcctgtgtctattgtttccatctttacatccatgtccattgtttatctcccacttaaaagttagaacatgtggtatttgattttctgtttctaagttatttcacttggcattccagttccatacatacagctgcaaaatacatgattttattctttctttattgctgtgtagtattccatggcatatatataccacattttctttacccaatcattcattgatgaatacttgggttgattccatgactttgctattgtgaacagtgctgcaataaacataagagtgcaccaccaatagggtataagcattcccttttctccacacccttgacaaaattgttgaaattctgcatttgagtgtatgtcttgaaatcaactattcaatatcaggttaatgtttctttttgcactttttattatggcaaaattaaccccgttatgtcatttagcatttgtgagaagataacgtaatacaaacatagtttttaaaatttgttgttgttttgtttttacatgtactgtagattatgtatgccatattttatcaagagttgagatgctagaaattcctgtctgtgtaatttcctgtgggaactacctgtagctttctgcccaaagaaagaggggcggggcagggctatgcaggccagtttaatctttccaaatttgccagccagataaattcctttacctgctctggggcaggtgaatgaatgcatgcagtgaggtcaggagtcagctccagctgtatagaaggaaacatcaggagtgaggagtgtctcctcccctcccagtgttaacatttctaatattcatgggtagattcaattgaaaactaagtataaacattttgtttaatgtagtgcttgattatctgtcttatctattttcaagtaaaactaaaaactgagtatttagctttaaaattatttagcttctctcaaactctcagttttatcaacatcttgtcaattttaattgataacaccttyagcagagtttgtaggaatgaaatagaagcatttcccagttttgcttcaagagtctgaaatattttggttttttaagattatattgccattacaaagaaaaccatttgacttgatatatgtatatgttccccatggtcagagcctaccattaaattttctaaagattcttaggttaatttttttaactgtgtactttcagtgctaaaatatttattagaatcacactatggggaatgagaaatgttagactttatcaatatcgttgtctattggatcctctacatttacagtcaaattcttcaagtctcatcatatgtacagaaattgaagaacagttaatttctaggtgactaaatttggaaacacatgtaaagagagcagaagggcaatggaaatttacgcaagagagaactacctattttctgaatttgttaatatttaaaataggacccctacccaaactaaatgaaactaaaaattcagttcttgtttttctgctagaccttgcatttctttgtattactatttgcaccattaaaaatatatatataaatatatattttaaaaagttctctgccgggcgtggtggctcacacctgtaaacccagcactttgggaggccgaagtgggcagatcacctgcaggttgggagtttaagaccagtctgaccgatatggagaaaccccgtctctactaaaaatacaaaattagtcggatgtggtggcacatgcctgtaatcccagctacttggaaggctgaggcaggagaatcgcttgaacccaggagggggaggctgcagtgagccgagatcgtgctattgcactccagcttgggcaacaagagcgaaactccgttcaaaaaaagaaaaaaga

SEQ ID NO: 674506 - DNA, 709 bp, Homo sapiens
tgaataacctatgtctagtcttcattaaagaaagccaaaaaagaaagtttattccaacatattatcttcacaattaagagtatacagaatatgagggcaagaggactattccaatgatcactgtttgatttagtgaatctggctgctaaattgactctaagctattttctttacagtttgtcacatggtttagagtactttaagaggccagccttcccgggtgaaaagtacaatrgtttctaagacagagtattcataaggtttgtggtgttaagaaatattacttttctgcaatctttaacaaatgtggaaaaggacattctgaatttataatgtaaatggggctggaattctttcttggaaaatagaatcaataaacatattttcagaagtaaaatatattgattgagaactattgtctaaatattccccaaaccctagatgttccttgtcaaatatacacacagaagatgtactgtgctatatagatgaggattgatgataggaatatgtagatctacacgttagggataattttatttcagtttaatgacatcagaattcaaaagaaatgaaacattatacatgtaacaattattgaaatgcctcccatgtactagcagctgtactggttctgcccttgggaagtttattagcatagctgggacacaggcctataaatagataattaaagagaatattgttaaag

SEQ ID NO: 674507 - DNA, 899 bp, Homo sapiens
aagaagtaaataagaagtaaacatctacaaccaataaggtctatccgaaatgcagaaaacttcatattccataaacaaatatttatagtttttatgtccttaatttacagaaagtatttatatatttagccacaaagtacacctgaaacaaagcaaaacagacagatgtaacatattctcttatcatgatccagtgtaatttgaattaaatagcttttagaaattaacaaacactcataaagtcttctggatcaaagaagaaactgatcctcgtggaaaacaactattacaaagaaaatttatagctttgaatagttttattttttttaaccctcaaaataaatggactcagtatccacctctttagaaatttgtaaagcaaaaacagaaaaaatagaaagaaagtagaaacagggatttaaacataaagttaaatttaatatcagaagagagaagagtgaaaaaaaatatgtgaaactgaaaactaattatttaagatgagtaatacaataagtaaatcttaaaggtctgatttttaaaaagaaacaaaaratatgatatttgatatggaaaggaaataaaaaccacaacagtctattatgaacatctctatagtaattgatttgaaattttagaataaattgatggcaacataataaagcataaattataaaagcagatacaagaagaaatagaaaacaaagagtaccccataatatatccatctaatgtgtacctataaaaattttttaaaaaagaaaacaaacagatcaataccccctagaaaggtgattataaatacatcatttagatttctggttaaatgtggtaaactatgcgtacacatttatctgtgatatatcatgacattccattcacatgcttattaaggcattttt

SEQ ID NO: 674508 - DNA, 734 bp, Homo sapiens
agaaggaagaaagagggaacgagaggaggagagagagagagaagagcgtgtgatgtgtgtatagtaccaacactgaagagtcattctataatggtttagtgctgagtatggygctcaaatgatcaggctgtattccatggaaactatacaggtacctttcacaggaaaagagcctttgcacatgaaattaaggattataaaacaggcagattatcctgtattgaccaggtgggccctaaaggggcctgtctttgttaaatgtcatttttaaaaatcctgcagaagagaaggccatctgaagacagcaacagagattgaaatgatttggactcaagccaatgaaagcttaaaccaacaaaagctaagagaagtaaaaaaaaatagacttgcccctggagaccctggagcagctttgtctgatgacagcctgctcctggctgctgaaactgatgctggacttctggcctccagaactataagagaatatatttctatttctttaagctaccaaagttttggtaatttgttatagcagcccaaaaatactaatacaaatggggcttagaataaatccagcctaaaggtagtataatgattgggaatctccacgttcgattctctaatgttacacatattagaagattttatgaggaaatagcgtacaggaaaccccacggtgtatactggagcatctgttaattatataataaatgttgataattcttagtagagca

SEQ ID NO: 674509 - DNA, 734 bp, Homo sapiens
agaaggaagaaagagggaacgagaggaggagagagagagagaagagcgtgtgatgtgtgtatagtaccaacactgaagagtcattctataatggtttagtgctgagtatggtgctcaaatgatcaggctgtattccatggaaactatacaggtacctttcacaggaaaagagcctttgcacatgaaattaaggattataaaacaggcagattatcctgtattgaccaggtgggccctaaaggggcctgtctttgttaaatgtcatttttaaaaatcctgcagaagagaaggccatctgaagacagcaacagagattgaaatgatttggactcaagccaatgaaagcttaaaccamcaaaagctaagagaagtaaaaaaaaatagacttgcccctggagaccctggagcagctttgtctgatgacagcctgctcctggctgctgaaactgatgctggacttctggcctccagaactataagagaatatatttctatttctttaagctaccaaagttttggtaatttgttatagcagcccaaaaatactaatacaaatggggcttagaataaatccagcctaaaggtagtataatgattgggaatctccacgttcgattctctaatgttacacatattagaagattttatgaggaaatagcgtacaggaaaccccacggtgtatactggagcatctgttaattatataataaatgttgataattcttagtagagca

SEQ ID NO: 674510 - DNA, 896 bp, Homo sapiens
gcctgggtgacaaagtgagatgatcctgtctcaaaaataaaaataaaagatgcgcacagaaagcacagcrttatgtaactttcaaagacatctccagggccatatatcaagcacatgacagtaaaaacctatgtggaaaaattagaaaattcaagtgaggtaaaaaacggtggaaaatagagaaaaatgagaggcgatttccaatgacgaactgagatgatgaactcaattcagtgcactatttcttccactcttacactttacaggctaagaagccattcctagcatttcactggtataaactcttcaaaatgggattcttgtcctttgattattttaggttgacaaatttataccaaaatagtgggctttgtaaatcggtgtctttatgataggtttccttaaatagtatgtctttaaaatattaaatggtatcccttgtttgtcttgtcttttccacaagcagatgaaacttcctccccaacaagccgatggaagaacttatgcagtgttacttcagggaagcgacatggcagggtggaagtaaaatggacctgcacattttaaaaaatgttttgttttgtttcttgaagggccccaggggcttataaaggagaggaagggggtggagtgtgaggttggtaaaagcagcggaagctggcttggcatcctggaggagcaggaagagagttcatgttccaccttcccctcttccccgctattccacagggtctggaggagaagagcagaggggtctctggttcccaggaaagggcctgggccagactttctgatggagacagctgggtggtgagtgtccacgcagacaggactgaggcttgcctcacagaagattctcgccactcaagtgaggtgcagaagcagcagcgaggaag

SEQ ID NO: 674511 - DNA, 896 bp, Homo sapiens
gcctgggtgacaaagtgagatgatcctgtctcaaaaataaaaataaaagatgcgcacagaaagcacagcattatgtaactttcaaagacatctccagggccatatatcaagcacatgacagtaaaaacctatgtggaaaaattagaaaattcaagtgaggtaaaaaacggtggaaaatagagaaaaatgagaggcgatttccaatgacgaactgagatgatgaactcaattcagtgcactatttcttccactcttacactttacaggctaagaagccattcctagcatttcactggtataaactcttcaaaatgggattcttgtcctttgattattttaggttgacaaatttataccaaaatagtgggctttgtaaatcggtgtctttatgataggtttccttaaatagtatgtctttaaaatattaaatggtatcccttgtttgtcttgtcttttccacaagcagatgaaacttcctcccmaacaagccgatggaagaacttatgcagtgttacttcagggaagcgacatggcagggtggaagtaaaatggacctgcacattttaaaaaatgttttgttttgtttcttgaagggccccaggggcttataaaggagaggaagggggtggagtgtgaggttggtaaaagcagcggaagctggcttggcatcctggaggagcaggaagagagttcatgttccaccttcccctcttccccgctattccacagggtctggaggagaagagcagaggggtctctggttcccaggaaagggcctgggccagactttctgatggagacagctgggtggtgagtgtccacgcagacaggactgaggcttgcctcacagaagattctcgccactcaagtgaggtgcagaagcagcagcgaggaag

SEQ ID NO: 674512 - DNA, 2336 bp, Homo sapiens
acatttctagaataatatttaacaatattgttgacaatttgtatttttgctttatttggaattttaactagaatggacacaaaatttgcacataaatacacatgaattatatgccaattcttgtctgccaacagtagaaattaactctggataaataaaacaggaaaatattgtattggaaatattttgattagtttacataatcgacataaaggttgaaactatgataaaatttatattaagagcaggccgtagtcagcaaggttgctagctgcaccacatttattgcctctgaaggccagagaacagcacactctcaacatcttatataaatgctgcacttcagtcacttgatcataggagctktccttttagtatctatgtatcactctcaaattaaatgatcatgcccagggtgttatagaagggtagattatattacccagagcccaaaccagtagcctaggaatttgtgctgaatttctagtaaacactgagtttaaacgttgtaatatagacaagaaaaaatgcattcaggccctacaattctcttgaatgaaacacaactattatacattttctccgtaagttctcaaacacaatgggatacaattttatcttctggatctctactatgaatcatcatgagctcagaatgatcctaggcagaatttttcatatctctttactattagcatgagcatggagtcatttatttttctgattttgatatctggctgcttgtattgctgatctttccttctggttcaggcaagataaaagcacacaaccaatttctcattattggtctgagaaggtagcccaactgaccacactgagtaactaaataatttccctcacctactttattatttattccaatctcattttcctttttcaactttagtatgctggctttttggtagtcctcaatatttaaaaatgactcactgaatttcaggtagccttgattgtctctaagtaaaaatatctggagagtgggtgagacaaggagaggaaaaagaaatccaagaattgatatttctcataattttattatgctcagatgtttgtcccttggaaccaaaagaaaaccataacagatctttataattctcccatctcctacaacaggcaccctagaaattattataacaatttggaatattggtatttggcaaagcattcctagatattacagctgaaataaaagaatggggagatagcgccaccatcaacaaatgccaaaaagtgaataagtttatttaggggaaaggggtgagaccaaacctggggaaattttgcaggtatgcacctattgattgaaatattcttaaaggcgaactatcaaaaagagttctagtttcttccttcgctctctcattattgcctctctctgttttctaggtaatgattcacaatgtgtctgtcttcctttttaatgtcattcattaatatagtatagttttcttcatataatcaatgtgtgtgtgtgtgtgtgtgtgagtgtgtgtgtgtgtgtgtgtgtgtgtgtgtgtgtagctttcttcctagaaattttattatttcattgctcctaaaatgctgtttttatttgatgatatactatatggtatggcacagaaacactatagctatttatttttattttattttatatttattttgttactactcatattgctaaatacatttactggagatttaaaactgtttcaaaacatattcattagactttcaatttgataataagtattctataaataatagttacttaaatcttagaaatacttttcttatcttatttaattgtcaaggaatactcccagatttgttaaatagtgatattatgaatgccttattttccctcatattgataaaaattcatctagtttatttcactattaaatacaatattgttatttgtccaaaataccagttatcttagcttgcaatatgtttgcattctaacagcactcttaaagatccctttcattatccctttcattaccctccttccattattccaactactcataattgtatcaccaacttggcatattgctatgcttgttaactgactgaattaataaagaaaaagaagagataaaatctaatcaatgactatgagttgttcttggaaaggactgaccttaacagggtttgtagcttaagtatattaattagggtaaaacatcctagacattggaaattctcttacagatagtcttagttttcacaagttttatggttaatactctgcagtgttttcttaagtatttcaaaagaaagtccagtgaggacaactagctatttgccatcacaaattaaatgaa

SEQ ID NO: 674513 - DNA, 2336 bp, Homo sapiens
acatttctagaataatatttaacaatattgttgacaatttgtatttttgctttatttggaattttaactagaatggacacaaaatttgcacataaatacacatgaattatatgccaattcttgtctgccaacagtagaaattaactctggataaataaaacaggaaaatattgtattggaaatattttgattagtttacataatcgacataaaggttgaaactatgataaaatttatattaagagcaggccgtagtcagcaaggttgctagctgcaccacatttattgcctctgaaggccagagaacagcacactctcaacatcttatataaatgctgcacttcagtcacttgatcataggagctgtccttttagtatctatgtatcactctcaaattaaatgatcatgcccagggtgttatagaagggtagattatattacccagagcccaaaccagtagcctaggaatttgtgctgaatttctagtaaacactgagtttaaacgttgtaatatagacaagaaaaaatgcattcaggccctacaattctcttgaatgaaacacaactattatacattttctccgtaagttctcaaacacaatgggatacaattttatcttctggatctctactatgaatcatcatgagctcagaatgatcctaggcagaatttttcatatctctttactattagcatgagcatggagtcatttatttttctgattttgatatctggctgcttgtattgctgatctttccttctggttcaggcaagataaaagcacacaaccaatttctcattattggtctgagaaggtagcccaactgaccacactgagtaactaaataatttccctcacctactttattatttattccaatctcattttcctttttcaactttagtatgctggctttttggtagtcctcaatatttaaaaatgactcactgaatttcaggtagccttgattgtctctaagtaaaaatatctggagagtgggtgagacaaggagaggaaaaagaaatccaagaattgatatttctcataattttattatgctcagatgtttgtcccttggaaccaaaagaaaaccataacagatctttataattctcccatctcctacaacaggcaccctagaaattattataacaatttggaatattggtatttggcaaagcattcctagatattacagctgaaataaaagaatggggagatagcgccaccatcaacaaatgccaaaaagtgaataagtttatttaggggaaaggggtgagaccaaacctggggaaattttgcaggtatgcacctattgattgaaatattcttaaaggcgaactatcaaaaagagttctagtttcttccttcgctctctcattattgcctctctctgttttctaggtaatgattcacaatgtgtctgtcttcctttttaatgtcattcattaatatagtatagttttcttcatataatcaatgtgtgtgtgtgtgtgtgtgtgagtgtgtgtgtgtgtgtgtgtgtgtgtgtgtgtgtagctttcttcctagaaattttattatttcattgctcctaaaatgctgtttttatttgatgatatactatatggtatggcacagaaacactatagctatttatttttattttattttatatttattttgttactactcatattgctaaatacatttactggagatttaaaactgtttcaaaacatattcattagactttcaatttgataataagtattctataaataatagttacttaaatcttagaaatacttttcttatcttatttaattgtcaaggaatactcccagatttgttaaatagtgatattatgaatgccttattttccctcatattgataaaaattcatctagtttatttcactattaaatacaatattgttatttgtccaaaataccagttatcttagcttgcaatatgtttgcattctaacagcactcttaaagatccctttcattatccctttcattaccctccttccattattccaactactcataattgtatcaccaacttggcatattgctatgcttgttaactgactgaattaataaagaaaaagaagagataaaatctaatcaatgactatgagttrttcttggaaaggactgaccttaacagggtttgtagcttaagtatattaattagggtaaaacatcctagacattggaaattctcttacagatagtcttagttttcacaagttttatggttaatactctgcagtgttttcttaagtatttcaaaagaaagtccagtgaggacaactagctatttgccatcacaaattaaatgaa

SEQ ID NO: 674514 - DNA, 886 bp, Homo sapiens
cataccaggagacaataaacaagttgtttcagaaggattctatttctatatgttgaaatgtgctgaagatgatactaatgaagagcagacaacattcacaaacagtcaaacatcaacagaagatccaggggattccactccctttgaagactctgaagaattttgtttcagtgcagaagcaaatagttttgatggtgatgatgaatttgacacctataatgaagatgatgaagaagatgagtctgagacaggctactggattacatgctgccctacttgtgatgtggatatcaacacttgggtaccattctattcaactgagctcaacaaacccgccatgatctactgctctcatggggatgggcactgggtccatgctcagtgcatggatctggcagaacgcacactcatccatctgtcagcaggaagcaacaagtattactgcaatgagcatgtggagatagcaagagctctacacactccccaaaragtcctacccttaaaaaagcctccaatgaaatccctccgtaaaaaaggttctggaaaaatcttgactcctgccaagaaatcctttcttagaaggttgtttgattagttttgcaaaagcctttcagattcaggtgtatggaatttttgaatctatttttaaaatcataacattgattttaaaaatacatttttgtttatttaaaatgcctatgttttcttttagttacatgaattaagggccagaaaaaagtgtttataatgcaatgataaataaagtcattctagaccctatacattttgaaaatattttacccaaatactcaatttactaatttattcttcactgaggatttctgatctgattttttattcaacaaaccttaaacacccagaagca

SEQ ID NO: 674515 - DNA, 603 bp, Homo sapiens
atgactgaagggagttcaggcagaagtcttatgaagactggtaaagagaaactttttcaagtagagaaagagaagccaacaactgtgaaattaaagcagcagtgaggttccagagttgtgatggaataaaaacgatacaagtttgctattgcccccacaatccttttaaacatataaacttcatgtgaagatgtaattgtcataaaagctgatactaactcttaaaaacattaccacatttttattggattaaagaatataatgttggaccaggtaaggtggctcctgcctrtaatgtcagcactttgggaagcagaggtaggaggatcatttgaggccaagagttcaagaccagcctgggcaacacagtgagaccccatttctatttttgaaaaataagtttttttaattagtaaacagaatacaactttgtttaaggccaatacgattttctcaaaaaaaaaaaaaaaaaaaaaaaatcttccaatcacatgctagggtctgagaagtcttcagagaactgttagtgaaaaatgcttaaagaagactttcctttgtatatttgaaaattggaaatggaaataggaataggaagcaaaacaa

SEQ ID NO: 674516 - DNA, 1039 bp, Homo sapiens
tatattgtaaaagtggaggtaatggtttataacgtaaagccagaagggaacaacaaccaattccctttccttagaggtttcaaggaagtgagtgaaaaggctacatatctgaaatctcatcaatttcctagaaaacaccttcgattctcaagcttcagtactccaagagtctaagatcatcaacaacaatttcttgcaatgcttgccctcctaattgcataaaatccctggcctgtgttctaccagccctttagatatgtgtatctaattccctgtattaaatatttaccactgagagatctagagtgatttctgtgtcttccaaccaaacttgactgatgtaaaattttgtaacataaatgattccgaggtgggaaataaattggttatctaactggtttcatttsaaaacagtaataacaccactgctaatataaaagggatactagtagcctccaacatgtctgtagttgcctggaaagaaatatttcttaagggtatggcattgggaaaccatgatggttattgagatagaacttagttgaaataaggcctgtaagtactatggatggctactctgaccatagttagcttctgaaaaaagttaccaattaaaggctttaaatttttgactcaagataaagctaaaaaaacaaatgtttctacttgtgctttcaatgaatatctactcaatgttaaaaataagacaaaagctagccttttggggtccaaaattacagttagttgatattcacaaattctatagagctattatgtgaaacttagagcataaattgtggcaaaaaaagtgatacagaaatttcgaatggtgataactagtgaattctggtgattctgaatacttgggacttttgaatttcagtctttctttcctgtcagcaaaattatctgtttgagattagcttcttctcgttagaagaccctgtggtgagataattacctttaaaatggtttctgattcactcaacacccaaatttcagaacctatagactcataaacaaaagtcaaatcccagct

SEQ ID NO: 674517 - DNA, 644 bp, Homo sapiens
tgtatttgtctctcccactaagttcaagttctgtaagggaatggacctcgcttcgtcttagtactgtcttcgtgtctaaaaacagtgcttgatacacagttgggggttcatggcaacctagggcattgtgagttcaaaacagcattacaagtttgtgagcaaggagggagcagattgatatatgtctcttctaccttgcccagatgttacaggaatgcatagcattgcagtaatgccatcctggctgtaattaaaaataattgattttatttttaatggaaaataaatmttttaggaactacatttttattattagaaatcttttcaaaaagcattaataagaatgatcagtacttactttttttttcacatcatggtttgcatagaagatgagaaataattatgtgtaggattagagtaaatgggcaaggcagcatggatgtcctgaggacaaagagatcttgggcacacctaaagcccataaatatggaagactcagaatcactaagtgctgacatctttgtgccttaaatatttatctcctctttttctagtccattaacatcacccaagttaaggcttttatcatttctcacctgtaatgttgcaatcatctttttaataatattcctgcattttatatt

SEQ ID NO: 674518 - DNA, 653 bp, Homo sapiens
agataattattctgaattatttgccagacatttcataactcatcaattcttttgggactattactaaagctctatgtgttttttttggtaatgtcatatttccctaatttttcgcaatcattgattccttacattgatrtctgcacatttgaggggatggctacttcttccagcttttgcacgttagacctttactatttaacattggaacttaattattggtctccaaataaataaatatcaggtagttataagtactacaaatacaaattaaaaagtataaggggatagaaaatgtgtataagggatagaaaaagtggctagggaggatttttctgataaagtgatatttgagtgcagacaaaaattatttgaggagacaagtggttttctgagggaagagtgttctaggctaaagagatactgcatgtaaagccccaaggcgctaaaatgtgtggcatgtacaaagaaatggcaaagaagctaaagtggctgaaatgaagggagtaagaagaagtgtaataggagataagttcatcaaaatagccagggaaaaattatatggaaaactagcagaaatttagagcagagagagacatgatctgagttatttcttttttttaatttctagaaagtatatgcagaatagactg

SEQ ID NO: 674519 - DNA, 1312 bp, Homo sapiens
gctgaaggcctaaacttgctacgccttttggggtgaggaaaacccaataaaagacaactccagcaacctcccaaacgcagggattcttgtgctcccctggaaagtctcagataaagttagaccacaaaatgtgggtgtgccctgagccctcgctcaagggcaagagcaagtcactggcagacagggactggaacccggtgtcctgatccccaggtgaggccagcctcagagctggcgcaggggcagggcggggttggtcctcccaggctggggcgcagtgaggctcaccagagtgaatttggatgtttttccaggcagaaggacatgtaaaaagagactggcagtgactgacctggactggcaggtgagttttttttccccctcaacattttattttgaaatttttcggacatacagaaaagttgaaagaatggtaggcagacacccaacatatgcccacccatacgcccaccamctagattctgcagttacgttgtattgtatttgctttgtcacacatcagtccagccctctatcaactctcggtctgaaatggtttttaaattacattttaatttttaaaaaccaacctccagccgggcgcggtggctcacacctgtgatcccagcgctttaggaagctaaggcaggtggatcaactgaggtcaggagttcgagatcagcctggccaacatggtgaaaccctgtctctactaaaaatacaaaagaaattagctgggtgtggcggtgcacacctgtattcccagctactcgggaagctgaggcaggagaatcgcttgaacctgggaggcagaggttgcagtgagccaagatcataccactgcactccagccccagcaacagagtgagactccgtctcaaaaaaaaaaaaaaaaaaatccgttgaactattcagcctctacatacatcaggaactcaatcagttgtgatggtttgtcacagatgcccttgctggccttttttgccctggtccctgtgtctggagcctgtggcagggctggaggtatctgagcaaactgcatggctgttcccagctgctcagggccacagcctgcgatcagcctgacaaagcctcccaggacacacagcaaggaccccccaggacacaccgtcctctctaaagacactcacgggatgccttctgggggttcagggaagccagaaccgctgctccttgggcatggcaggaacctgtcgtcgcagtgcagggagcacagacacctccacgaaaacagcactcagaaaagcctgactcagggtcctagctcacagaggcccaccccggcgcactc

SEQ ID NO: 674520 - DNA, 1065 bp, Homo sapiens
actatactaataatctgcaaaaacgtatggtgaacatatactagctatctattagggagaggaaagacagaatgagacagaaactgaatggaggaaaatataaaataaaagcaagatgaggccttcgtgttgactactcatgacaataaactatgaaccaaggagtataattaactcaactgtctgtatctgagtttaaaaacagtaaaccgtgctcacttaggcagcacatatactaaaattagaatgatacagacaagattagcatggccgctgcacaagcataacatgcaaattcttgaagcagtccatattttttaaatttattaaaaataataaataaaaataaataaaagtaaaaatagtaaacaaaattaggccatgttttactttgccttataaagagacaatttaagtatttgcttacatgcttatacaattattctgtaggtaccatattctatcccgttccccatattcttcttctctacaccttgctctccttaaccacccttatcttccctaaaaatatgtggtatgatttatttgtctgtaccctagtgccaaaagtttttggtttaatgaaaatcgcaatacattcatggaagtacaacacaaaaacatcttctcttatgtatagcagacataagtttagcattctattargaaattatttcatacttcattttcattaaagataatttgcactgttaatcatttcacactatattataccaaataccacaagagggagctttgggtacaataaaaaactccacctattaaacattgattaagggttgcagaatataacagactctatcaaaaagaccaaaaatatatagggatattaagttctagctggatagattaagatagacaaaaatggcccataaagtatagcacaaattctgactatgtgaggaaattatggacattatgacattaaagaatgatcagtcaggtcaggattatcagaaggaaccttaaagccgaggtaaaatctgagatgagcttagaagttggaatgctgatgaaggtagaatgatcaataaaagtgaatgt

SEQ ID NO: 674521 - DNA, 640 bp, Homo sapiens
gaggccagcatggatgacccctgaaggtgagaacgggctctgacatccccaggttctcaggcctggcctgtggactgtggctgcgtcccaggggtcagcacacacttacttcgatggtgaagacccccatagcttttgttcttcagcactcagtggctggctgtggcccacagaggggctggggtgcagcctccccctctgccagcccccctgggctcaatctcccaggggaacagagggggctgctcaggaggctggcaggaggagagtccctgcggcagggcagggcagaggcacygcttgtccctgaagctgggaggtggctcagctgcacagcacccggagggcctgcaggcagctgggggtggggaccctgctgggcacggtgggggcccgcactcggggaccaggcctgtgggaggccctcgtgctcagggcaacactgtgacctcctctgactccgcccccagctaagttgtgcactgtcagaaacaggccagggaggcacagcctgtttgtgaatcggacttttccaggattccttcccagcttaggagattggagaccctggggggcccctcctgtgtgttgaagtcccatggttccggctcccctttcttcctgacctgagtggtctgaa

SEQ ID NO: 674522 - DNA, 1547 bp, Homo sapiens
taatattaaatatttgaaaactaaattcaatattcagaaattgactactcaggtagaacaataggacatgataaaccttttaattaattctagatggtttaaacacttaaatttttgtgaaaaactctacaattttagaagaaactacaaacttgttattaaatctagggaaatattttcaaagacctatacataacacaaaattaagatttttgataaatttggatatatttagctaaaaccagccaaccattgtttcagagtcggtgtccccagggattcaactgcaatacccacctgcaaattagcaacattatacacacacaaacccacaaatactatttgtgaatgaaaaccctgtagcaacacaaagcctgttaggaaaaaattctaatgcttactttgaaaaaaatctgtaagttaataaaaggacccatttagtatacaaagcatggaaagaaggctaagctatggctggataattgtgaatggctactatatacgttaatattgttcctaacctaatgtttgcgtacttacatatactcattaatagattttggcaagataaaagggaaattaaaaacactattggcctagggaatagaagaataaatgtaagcacattaaacaagactgctttgccatattagttaagaatctgatagttaaattaactactttttattgagaactttaattggttaattaattttgaatagtatagaaggcatgtttattgtatttttttgtttgtttatccctaagttccttatgagagaatattaaaggactatacctagaaattatttcaaaacatttaattcatcctcctgttcaaatgtaactaaatcatcttttcagatgagaaaaaaaaaggtctataaaggacttcaatgccattggctttcatatgacatctagttccaccttttccaagatgcatcaggaaaaggtgatgcaaatataaattgatagaatcaatggcttaatttctctttatggaaatcttccttgaattttggaaggtaattaagaataatctgaaaggttttttatttttgctttcatctgggtacgctgtgggtactaggactggctggtggtaggagcattctatagaggtttagagttgtaatagtcatagaacagcctaggagtggggwcttgtgcctctgttcagaatgcacaggagcctggagtccttcctaatcaaatccacattccatctctctgactgattggagatgcatgttgaacatcacaaaggcaaaaggcgaatgagtaaataagtggcctttgctgattagaattagtgtgcttcattgttacggttcttgattataggtcagtggtagaaaaaacacaagtatctttatctcttactgcagccagcttgatggcacagcggggagtgaggaagactcggtggacaaatctgactggaaaacaagtaggcgttgcagatggtgagttcagcactgcctctgctgtagtgagctacgcccaacctagaaatgcatcttgctggcaatgtctctccaaga

SEQ ID NO: 674523 - DNA, 622 bp, Homo sapiens
tcatagcttaaatcagttaagaatctgtaatggttaattttatgtgttagtttggctggagacatttctcagatatttggtcaaacattcttctagatgtttgtgtgagggtgtttttttggatgagattaacatttaactctgtggcctttggagcagactgccctccataaagtaaatgggcctcttccaatcagttggaggccttatgagaatgcagacttccctgtcagcagactacttttaaactcaaaagtcaactgctccctggatctccaggctgccagtctactctgaagatttggaatttaccagacctccaggcactgagacaattccttaagacaaatctctctctctgtcacacatacacccacacagaatacaaagtcaggctctttgattcattaccttgaaatcaaatgttttctatcaccaacatcctcttgtataggatatataygtgcatatggttctacatagaaatcctgattctgtggcccagcattcctgcatgatgccagtagatagtagctgaacaggtacaaagatgagcatcagttgttatctttaaaataattatgttggtgacttttaaaagtctttttctttcagttaaaaa

SEQ ID NO: 674524 - DNA, 2832 bp, Homo sapiens
acattcatagaaacttccaggaagtctacaccagcacataagggaagttaagtggagtggcttccttcttcataattcttaaggatgtacatatcttgtgctgtgtgaacagttgtctgaatatttggggttggtcagtatagtcaccctaaaatttaaagggttggagataatcatcttgaactctgaacttttagtcttactatttgtatttgaacaatcagatgaagaagtatctagcgagaaaaaaataagtgattttaacaagctgctattaaaacagacagatgaggactagagagaagccctgacttatgaactaagacacacaaccccgccaggcttttcctgcttctacctgtattgctcatttccactttcaaaataccccactagtctcttccaccttccttccttgtcatttcactgccataaattacatcacacattaaccaggttaaagtgcatgcatgtaaacacacacacacacacacacacacacacacacacacacacacacacatcatagatgccactgaattggggctgaagagaagaaactttggaacttcaaataagttctggtttcaggtggggaaaaaaacattaaaaagatgaagagcttagcccaggaacaaatgcccagtagtaacagtggggcagaaagtattaatattcacgctattcatgtgctcctctacacgtctggatgtccttgcagttggttcagacctgtaacggagctctggcctctgtaaaataggctgataagtgctatgtcacatgtccagtctgtccctcttctgtggtatttctttaacagctggaattggaggactctgagatgacagtgcaaactgtttcccctgttggagaagagctgcccaactttcacaggaccttgtgtgaacagaaataaacttgtatcttgtacttccactgagattttagcattgtttgtttcagtaggtaatgttaattactttaaaacaaaatgctttgaaaattaatgacatgttttctggagctgttggagccagagccaagtgctgaagcatacgaatctgcagcgtaaattcagaaagttcaggatgtgaggctccacaagctatatggtgggaattggaagttgacctgcttctctggtgctgtgcacacttccacataccaacacctccagctgccatcattgcatcatttacctaaacttatacacttgggtcaacaagtcccctttttagtaaaaaaagtagttatgaagaaattgttggttttctacaccatagtgagatttatttggttctgattgatttgttcttagcaaatgttctgagaaaattgaaaattgagggatgaaagagcatagatccttaaaaatagcacggtggatgacgtgcctggggatgaatgccttagggaaggataatgtgtgttggcgtggggagagtcacggagtgaaggaagagaaagcagggagagttgcagaaggatacccagctgccaatctcacagattttacatttttgcttaaggccatctctaggaaaccggaaaacccattctcccatttaactctcaaggctgcttgactcctattcccaggtggtctgacagcacacactgcagttctacttcacgaattgagtaagcttttgttggttagcctgacaccctaatgcccagtcaatacactgtctctaggaaagaacactttccaaattccagacaaacagttttagaatacaagctataaarcctattcataaaatttgaaattgtgcaagaatcaatccatatacttccttgccaacaccaagactaaatggtttgtcttcactgcacatctttttggatgaccttttaaaagcttataatattttttctttgggttagccctagatctttaattttaacctgattacatctagttgaatgcattttaaaatttaaatactaaaaaagttaaattctaaaaaggggattgtgaagaaaacgtcctgtgtcatggatcagaacattacataagtaagaaaaaataataatcaattgttgatgcctagcaaatatctgttggaggtgaaagagtttatcctttaagaggggaaaacccatgccaacatttctctaagaagagctgctaacagatgcagattatagtgaaaaggttctttgggagtttcagggaggagtgaggtaattcacatactgaagaggcaaatggataactgtgtcttgataaataagaaggctgcacactaaagcaactgaggaaagcttccttttctatggttccttcatccagaaacacgagcaagagctgctttctataactaatgtcaaattcatacaaaaagataaagaaatgttgtagaaggtggcaggttgacgtggggattccctgtttcaaagccttcaatttcatccgagtactacaaatatgtcataacagtagcaaggaccttatctccttattggcaggaactcaagtcgtgtagcggagaacacacacctctgagagatgatatcacaaatgaagtgctcacgttgtttctaaataccaggctcagatgcacaaaggcagggctggccctcagcaaagtcagtcaattctgcttttctaacaatttttaccaccatcccaacttctctgagcctgacatagcactactacttctctaacctaactgtaaagtactcagagatcccaggtcatctgggaaacatacaactgtatttgggtaaaatttgccacatgtaattaaacatgggcagtgtactgaaagagccaacctaggaaggttgtcaaagttttacaattgccctgagagtgaa

SEQ ID NO: 674525 - DNA, 1473 bp, Homo sapiens
tgatcaaggtgttaattaagtatgttatgataaaaaccggtccttttgctagagaaagtttgaggaaaatctcacaacagacggctttaagcattcctcagataagatataaggaatccaggagaaaactggatataaaaatatattgaggcagtagaaagtatcattatctgcaaatgaatatttgtggcatggagaagagccctgtaacattgggctaatagagtaaaacctaagactttccaagaagctttagaaccctctatgagaaaataagcaggccacccaggcccaggtggactaaagggatcttatttttttaaggtcaaaattaatagggaataagccaaaactattttctgagatgctagaataatattttttccatttaaagctacttctagttcattagaactcattagagaatacttgatataaagttgattatgtatcagatatataaatctcacrctgaaacataaagtttctctaatagtgtatgccaaaaagtatatatgaatatggttccttttcttctgtaagacccattattgtaattctctaattatatagtgtcagcatctactttaaagagaaacattgcccatgcatgcccagtatatttctggtagaaaatgtgataagtggacctatgctcctttataattattaatcttggggaaaaataatttaagggcttattaaaaccttataaattgaaaattttctttttcttatcagaaaaaaactataatcgctttttacaaaagtttggataattatgtgtcagtattcctaataaattactaatatgaatactagttatggccacagtaaggaaaacaatgaataaactaattgtttagtggtttgtgctgtctttactaaaaaaaaatactgatgactatgaataagtgtcaatgtgtttgcttttctgttatttttcataggctgatatatttaactctcataatgtttttaagctaacatatatccattttttatattaagcaatcagtaagtatctaaatagtttttccttccttcacaattacttattacttaattacataatcatatgctattattgttggctaggcaccttagacattaatcactttcctcaactagtgacagtactctgaacgtgggatgtatatgtgtgtttgtgcatccatatacacattgatagattctttggataatgtttatatttatgtatgttgcacatttaagtactatagacttccattcagaagctctaattcatttataaattcattcaaatatttcttaagcatctactatgaaccagtgcctgtgttcattctaacgaagacagggtccctgctcttaagaggtagttgggaaaagaaaacaaatatgttacaagggcaataaatgagttatgtacaaggtaatgagtaactctcctttctgagtacacactacaagttaagccatatcttaaaa

SEQ ID NO: 674526 - DNA, 851 bp, Homo sapiens
gggcagcactgagttccaatgcaaagtcctatatcactatggtctccctcccgcaaatgcacagattctctttctgtgacacacggctgctgccaagggatggaggaagggtggtgctggctactcaagattatctttcctaccctcttcagtgsctctttcagtgatatgaagttaaaatcaggagctgtgatcactccccggattttttgcttttatgaaggtgttttttgtgtgaatagttgttcaatttggtgttcctgtggggagagcaactgacgagggcttctagtcggccaccttgctccacttctgtattttttttctcactgttctatcccctgaatctacaacaatgcttggaatgttggaagtgctctatagatacttgttgactgaatcataaatgaatgaattttcctagatgacttttagcagtttgtagtcataatgaacatttctaattttaacatttaaacttctagggtaaattatattgtctgaaaggggttttctgtttttctgctgattgacaagtaaatgtcaaatgccaaatatagctatacacttgtattactccagtatcaaggaggtaaagccaaaagccaataaaatggtagagttacatttagaatttggttgctggtatgaaagcacagattgacagtactgaggtatctagttcatgaatgcttctgctggatttccaaaggtcaaccctactcttaaaagcttggtcttccgtcaggggctagagagcaaagagaagtgtgaagtatgcttaagatccattatatcagtagcatctcatatttacacacccagcacttcatttttcatacaataccttt

SEQ ID NO: 674527 - DNA, 851 bp, Homo sapiens
gggcagcactgagttccaatgcaaagtcctatatcactatggtctccctcccgcaaatgcacagattctctttctgtgacacacggctgctgccaagggatggaggaagggtggtgctggctactcaagattatctttcctaccctcttcagtgcctctttcagtgatatgaagttaaaatcaggagctgtgatcactccccggattttttgcttttatgaaggtgttttttgtgtgaatagttgttcaatttggtgttcctgtggggagagcaactgacgagggcttctagtcggccaccttgctccacttctgtattttttttctcactgttctatcccctgaatctacaayaatgcttggaatgttggaagtgctctatagatacttgttgactgaatcataaatgaatgaattttcctagatgacttttagcagtttgtagtcataatgaacatttctaattttaacatttaaacttctagggtaaattatattgtctgaaaggggttttctgtttttctgctgattgacaagtaaatgtcaaatgccaaatatagctatacacttgtattactccagtatcaaggaggtaaagccaaaagccaataaaatggtagagttacatttagaatttggttgctggtatgaaagcacagattgacagtactgaggtatctagttcatgaatgcttctgctggatttccaaaggtcaaccctactcttaaaagcttggtcttccgtcaggggctagagagcaaagagaagtgtgaagtatgcttaagatccattatatcagtagcatctcatatttacacacccagcacttcatttttcatacaataccttt

SEQ ID NO: 674528 - DNA, 753 bp, Homo sapiens
ttctttcaggagccaatagatctccctcactagaccccgtgcactactgctgcacagaagaagagagaagtcagggtatttcttttgagttccttctgtgcctgcattctggcaatggcctctctctagaagaacagctcttgttgagtagtttctatacagcctccagtttcagctcttaataaacttaggcaactccattacctccccttccttttcaggaatggggagacttayggcgggttaataagtaccttaacatcagctactcactcccctaaacctgtccacatctctgtaagtaggtccttaaattctaattgaaaatctggctgtttatgccttcagtgttcagtcaaaactctgactgataccacatacaatagaatcaggtcctgctactttataagagacatagaaccaatatagcaggaacaaatcaattatcaagccatctatttccttctaccacactgaagtaccctaaaaggcctgagacagttgtaaaggagaaaaaaaggacaacgagcagcagtgacaagtgttcactcatttaacaataccccagctagcgaacaaactcagacgagccagtgccttccccacactagccaaggccactttaatctttctaaaggaatgaaaaatagttgacaatgtttctccaaattattttgaaatatttccagagaaagacatagagatgcacaatggtaaggagaaacaaaaacagttttaatagagaagggttat

SEQ ID NO: 674529 - DNA, 2442 bp, Homo sapiens
atattttctgttgtcaagtcaagaattacaaagccacactttggcatggagaatactactctacagttactcatccttaatgacctgtagtacagaaaagtgaaaacattgtggaggagataaattaccaaaatagaagataagctgaaaaggcaatggaaaatatatcatacatatcaaagttgctcatttatgctattttgccataacaatgcatacaactgaagcacttcccttctccattggagttttgtctctagaggtattaaatattaatcttataaagaaaagaaagcaaaaaaaaaaaaccctgaacacatgttaataggttagggttttaagagcaaatcacaaaagcagaataagtacttggaggaaaaaaacaggaagagagagaaagagggagagagagagagaggtggggtaaattgtggaccctccttttaaagaaacaaaattttccacagagttgcattaatacttaaattggactaactccatgtgaatcctcgtaagaaatactatttcctttcaattaactcatctatcctacaattacatgtcatgaaatctaaaggcaaatatgtttacccagtaagggaataacattcgaggcaaaagtgatgtcacaaacagatgggaattccaagtaatactgagtcatggttctaggggaataaaacaattactttacagctcagtgcaatgtagtatttaaagaaaaggtatttcaatagaatagcccagacaattattcaacatttaacagagattatattagtctagatatgttaatttggattttattctgttttttatttatgttaataggtttggttactggtttaaagaaatattagaagtttatcttttatttttacaaatagattaacatttgtcttagagggagttctgcccttcatggataatacctttacctgctaaatctagatttctttttctatagtaagttttaaaccagtaattgatgtaaaaagatgcaacaaataaaattatagctactaatgggcatgtatttattatacagtaggcaatttgcagaaagttttatgtatattatttttattaatctttatgacattggaattccatcaggtaggcattttgattcccaagtaaactaaagagaagaaaactgaggcttaaagagggtaagtgatttgccaagggtcacagaacaagtaagaggtacagctggattcaaatttaagtatatcttgtcctcaagtctttcctctttatttcctactaaaactaaaaagggtaatggcacagcagctaatcatatttgatgtattaaaacataaatactggtgtcaaatataagtactaaatcaggcatcagttccttcctactaaaaacattaaaaaacaattcagcaaaaattcgtactctgcaggatcatagagtgctttgataccctcatctacagcagtgtttctcaacctttttattcattgttgctctcctaagggaccttcttagacatttttttcatacttgtctcccaagaaattttaatactatagatataccatatatctatgtaccatatgtatatctgtgctcatacataaaaagaataagtttttgctccttagaataatttttttgccctttgggagcaatgaatatgtatgatttagatattatacctctatgtttctccaaaacctttcaagtcactcttattgcttayaattgtatgggcttagagctttagatttttagcttaaagtttttcagtgtgttaaaatgcaaatatatagaaaacgttgatgaaccacaacaagccatttgtatcctggtgtaaaatagaagctcagaaagccagtttgataagggaaaggagaagaatgggaggtcactctgtattggggcagggaaggggaagagcggagagcctctggtgttgaaatgcctgcgtcacaactgtacttcagtccagtcccgttgaacatattaacacaagtatttgaagaaaagatgctagctcctattcatgatgaacaagaaaacttagtcataagccaccttagtggccatcaccctattattgtgtaaatattaggtttcctgcttgtaaagaatttgctgtttggttcctttcaggcctgtttgcgtgttcccaactgctatgtggccaagaataagtaagtttatgtaacgttccaaagaaactgctcaaaaccgtggctcattttaactaagatatgaatagaaggcagaaatgaattcacaaacacttctttcacatgcactgcaaaatataactttttactcctccaggccaaaatggtcttaaccattgaagtaattatagctcacaactataatttaaagttagatctggttgattctaaattcacacaggaaaataattcactcatcttactggaacattgacgtaaataacttta

SEQ ID NO: 674530 - DNA, 2442 bp, Homo sapiens
atattttctgttgtcaagtcaagaattacaaagccacactttggcatggagaatactactctacagttactcatccttaatgacctgtagtacagaaaagtgaaaacattgtggaggagataaattaccaaaatagaagataagctgaaaaggcaatggaaaatatatcatacatatcaaagttgctcatttatgctattttgccataacaatgcatacaactgaagcacttcccttctccattggagttttgtctctagaggtattaaatattaatcttataaagaaaagaaagcaaaaaaaaaaaaccctgaacacatgttaataggttagggttttaagagcaaatcacaaaagcagaataagtacttggaggaaaaaaacaggaagagagagaaagagggagagagagagagaggtggggtaaattgtggaccctccttttaaagaaacaaaattttccacagagttgcattaatacttaaattggactaactccatgtgaatcctcgtaagaaatactatttcctttcaattaactcatctatcctacaattacatgtcatgaaatctaaaggcaaatatgtttacccagtaagggaataacattcgaggcaaaagtgatgtcacaaacagatgggaattccaagtaatactgagtcatggttctaggggaataaaacaattactttacagctcagtgcaatgtagtatttaaagaaaaggtatttcaatagaatagcccagacaattattcaacatttaacagagattatattagtctagatatgttaatttggattttattctgttttttatttatgttaataggtttggttactggtttaaagaaatattagaagtttatcttttatttttacaaatagattaacatttgtcttagagggagttctgcccttcatggataatacctttacctgctaaatctagatttctttttctatagtaagttttaaaccagtaattgatgtaaaaagatgcaacaaataaaattatagctactaatgggcatgtatttattatacagtaggcaatttgcagaaagttttatgtatattatttttattaatctttatgacattggaattccatcaggtaggcattttgattcccaagtaaactaaagagaagaaaactgaggcttaaagagggtaagtgatttgccaagggtcacagaacaagtaagaggtacagctggattcaaatttaagtatatcttgtcctcaagtctttcctctttatttcctactaaaactaaaaagggtaatggcacagcagctaatcatatttgatgtattaaaacataaatactggtgtcaaatataagtactaaatcaggcatcagttccttcctactaaaaacattaaaaaacaattcagcaaaaattcgtactctgcaggatcatagagtgctttgataccctcatctacagcagtgtttctcaacctttttattcattgttgctctcctaagggaccttcttagacatttttttcatacttgtctcccaagaaattttaatactatagatataccatatatctatgtaccatatgtatatctgtgctcatacataaaaagaataagtttttgctccttagaataatttttttgccctttgggagcaatgaatatgtatgatttagatattatacctctatgtttctccaaaacctttcaagtcactcttattgcttacaattgtatgggcttagagctttagatttttagcttaaagtttttcagtgtgttaaaatgcaaatatatagaaaacgttgatgaaccacaacaagccatttgtatcctggtgtaaaatagaagctcagaaagccagtttgataagggaaaggagaagaatgggaggtcactctgtattggggcagggraggggaagagcggagagcctctggtgttgaaatgcctgcgtcacaactgtacttcagtccagtcccgttgaacatattaacacaagtatttgaagaaaagatgctagctcctattcatgatgaacaagaaaacttagtcataagccaccttagtggccatcaccctattattgtgtaaatattaggtttcctgcttgtaaagaatttgctgtttggttcctttcaggcctgtttgcgtgttcccaactgctatgtggccaagaataagtaagtttatgtaacgttccaaagaaactgctcaaaaccgtggctcattttaactaagatatgaatagaaggcagaaatgaattcacaaacacttctttcacatgcactgcaaaatataactttttactcctccaggccaaaatggtcttaaccattgaagtaattatagctcacaactataatttaaagttagatctggttgattctaaattcacacaggaaaataattcactcatcttactggaacattgacgtaaataacttta

SEQ ID NO: 674531 - DNA, 907 bp, Homo sapiens
ttttttttaactttctatatttgattagtttctgctgagaggagggtctacaaaaattcattgctactacctcataagctaggggaaaaaagggacaattttaattttttgtgatgtaaaggaaacatcatttttagccaaatcatagttttaattctaaagatttattaaaatgatacagtagatattgtgcagcaatggcttggagccatctgaagcactttaccctstctggggttttccaactaaaaggaaaataaagaattttgggcagttaaaaggggaaatattgatataattaaaaggctagaaaacaaaaggaaagcttaaaaagtatagtaaaaagaatatcaaggtacagcttcaagtatgtaaatggctgtatgttacaaagcatagagacaacacagaactatgaagagagcatatttatatttagttgtactactgtcaaaaaatacttgagtgtcagaagatgctttaaaggttctatctgtattaactaatatattatgattattctaattttacacatgaggaaactgaagcccagagactctaggtaacttacccaaggttacatagctaggggaagttgaggagtggggatttgaaagcaggagttctggccctgcagccggaccctttaatcacagactgtccatcctctgtaaatatcttgaacagtagttctcaaattggttacatattaaaaccatctcaggagcatttcaaagtacaccaacacataggctcgaactcccaaagattcagacttaatgggcttaggtggggcctgtcatcagcatatttaaaattcccagcatattttttaagtctccagatgattctaaagtgcaaagtgaccactaagcccagatcacctggctatttagtggcctagcca

SEQ ID NO: 674532 - DNA, 868 bp, Homo sapiens
ccaggtacarttaatagaatcattcaacttaataaaaatcaattaagtatattacaaataatttattaaaacatatatatgtatatatatcaaaggtggcatgtatttcttaggatcacctataaactttttataatagttattctcatgtttacactgcataaagttatctctcataacatgtcttagtttattttcttttgcttatagcagaatacctgaaactgagtaattatagtgaaaaggaatgcaatttttatagttatggaagctaagaatttcatcaacaaatgaccacatctggtgagactcttcttgctgatggggattcttggcacagggaccatatggcaagggagctgagtgtgctagttcatctctctcctcctcttcttacaaagcaactagttccactcacataataactcattaattcatttacccattaaataggttaattcattcataagggcaaagttctcatgactcaatgaccttttaaaggccccagtttgcaatactgccacaatgaggattaagttttcacatgagttttggagtttggaagggggcaaacattcaaaccatagaattatcttaggtctcatattcgtataataaggataataatccatagtgttatttaaaggattgaatgagttgaaatatgaaagctctcagcacatactgaccattagactgtgattcatcattgtaacttttatcactatattaactttttattattttgtataaatatttcagtaaagtttccagagtgtctgaagtttttttctattgttgttacagacatcttagtttttacattttaaatttatgagtgatgattatttttctaaagctattg

SEQ ID NO: 674533 - DNA, 868 bp, Homo sapiens
ccaggtacagttaatagaatcattcaacttaataaaaatcaattaagtatattacaaataatttattaaaacatatatatgtatatatatcaaaggtggcatgtatttcttaggatcacctataaactttttataatagttattctcatgtttacactgcataaagttatctctcataacatgtcttagtttattttcttttgcttatarcagaatacctgaaactgagtaattatagtgaaaaggaatgcaatttttatagttatggaagctaagaatttcatcaacaaatgaccacatctggtgagactcttcttgctgatggggattcttggcacagggaccatatggcaagggagctgagtgtgctagttcatctctctcctcctcttcttacaaagcaactagttccactcacataataactcattaattcatttacccattaaataggttaattcattcataagggcaaagttctcatgactcaatgaccttttaaaggccccagtttgcaatactgccacaatgaggattaagttttcacatgagttttggagtttggaagggggcaaacattcaaaccatagaattatcttaggtctcatattcgtataataaggataataatccatagtgttatttaaaggattgaatgagttgaaatatgaaagctctcagcacatactgaccattagactgtgattcatcattgtaacttttatcactatattaactttttattattttgtataaatatttcagtaaagtttccagagtgtctgaagtttttttctattgttgttacagacatcttagtttttacattttaaatttatgagtgatgattatttttctaaagctattg

SEQ ID NO: 674534 - DNA, 868 bp, Homo sapiens
ccaggtacagttaatagaatcattcaacttaataaaaatcaattaagtatattacaaataatttattaaaacatatatatgtatatatatcaaaggtggcatgtatttcttaggatcacctataaactttttataatagttattctcatgtttacactgcataaagttatctctcataacatgtcttagtttattttcttttgcttatagcagaatacctgaaactgagkaattatagtgaaaaggaatgcaatttttatagttatggaagctaagaatttcatcaacaaatgaccacatctggtgagactcttcttgctgatggggattcttggcacagggaccatatggcaagggagctgagtgtgctagttcatctctctcctcctcttcttacaaagcaactagttccactcacataataactcattaattcatttacccattaaataggttaattcattcataagggcaaagttctcatgactcaatgaccttttaaaggccccagtttgcaatactgccacaatgaggattaagttttcacatgagttttggagtttggaagggggcaaacattcaaaccatagaattatcttaggtctcatattcgtataataaggataataatccatagtgttatttaaaggattgaatgagttgaaatatgaaagctctcagcacatactgaccattagactgtgattcatcattgtaacttttatcactatattaactttttattattttgtataaatatttcagtaaagtttccagagtgtctgaagtttttttctattgttgttacagacatcttagtttttacattttaaatttatgagtgatgattatttttctaaagctattg

SEQ ID NO: 674535 - DNA, 868 bp, Homo sapiens
ccaggtacagttaatagaatcattcaacttaataaaaatcaattaagtatattacaaataatttattaaaacatatatatgtatatatatcaaaggtggcatgtatttcttaggatcacctataaactttttataatagttattctcatgtttacactgcataaagttatctctcataacatgtcttagtttattttcttttgcttatagcagaatacctgaaactgagtaattatagtgaaaaggaatgcaatttttatagttatggaagctaagaatttcatcaacaaatgaccacatctggtgagactcttcttgctgatggggattcttggcacagggaccatatggcaagggagctgagtgtgctagttcatctctctcctcctcttcttayaaagcaactagttccactcacataataactcattaattcatttacccattaaataggttaattcattcataagggcaaagttctcatgactcaatgaccttttaaaggccccagtttgcaatactgccacaatgaggattaagttttcacatgagttttggagtttggaagggggcaaacattcaaaccatagaattatcttaggtctcatattcgtataataaggataataatccatagtgttatttaaaggattgaatgagttgaaatatgaaagctctcagcacatactgaccattagactgtgattcatcattgtaacttttatcactatattaactttttattattttgtataaatatttcagtaaagtttccagagtgtctgaagtttttttctattgttgttacagacatcttagtttttacattttaaatttatgagtgatgattatttttctaaagctattg

SEQ ID NO: 674536 - DNA, 520 bp, Homo sapiens
gaaagataaatccataccacagaaagtggactggcaatggcccgggcagtggtgagaataggggctgactgacaatgggcaccatattttttgtgggggtatggaagtgatgtaaatttagagtatgaggatagcagtaaaactcaataaatttactaaaagtcattaaactgtatataattaaaatgggatcattttatggtttgcaacttacacctcagtgaagctgtaaaaatcattacagtaactctttccccctcaattttctactagaaattaattactttggtaggatcatagtctattcacttcattaatagcttgctttcttccatgatgatctctttttgtttgtatgtttctatgcactcgtgtgttaggttatggctaaagtgtacttttatacacatattcctgttttgtggtattacagagaatattggtagaggttaaatacatagaatttctgagattttaatagatmattttattatcttaatagaaagtttatagaaaataa

SEQ ID NO: 674537 - DNA, 616 bp, Homo sapiens
tgctgaggaaaacaggatgaattgaataaactaccttttgtttgtttgtttgttttctaagtcatcgtcttttttttttttttttttttttttttttgtgatgtccaaacaggagtgaggtggccacatcaggatttactgcaacctctaactcctggccttaagtgatcctcctgcctcagcctcccaaagtgctgggattgcagggagccatcatgctaaacctaaaatagctttaagtaaactgatctagttgtgctctaaattggttttgcctgtaacctgaggtcacagaatctttaaattttctttgtttaagatgttactttatcagtagataatggactaattattaagctttactcagactatttctgttcttttcatcgtgtatttgtgttgataattccatgactawtatatgtattactttaaacaaattgttcaataacatatgacttttcttttccaggaagattcaaaaattttcttcatgtcacaaaatgctacaacccagacaacagtgccattattattttttaactggggctaataaagataccttcattgatttgttttgttttgttttgtttggtttggttttcctaaatatatg

SEQ ID NO: 674538 - DNA, 656 bp, Homo sapiens
aacaatgagggtgtttcttgaggagctttaaagaatactttctcctccactctctgcttgaatttaatcttttatatttccatcagaaataatttctagtgttctttcatctgcaaataagtgctggtgttgtctttgtctgcatgtattatttatcattcaattcatggtgtgcgtttgttgatcagcctgtgggtgtatatgcctgaatttaaatgagagtttatctgtacagtcaaagaagtcctttaggaaatcaactcccagaaagaggctaggaagtcagaggcttggcttggtgctgattgaggagcaggtagcttgctttgcaggagttggatccactggsggcaggaaggcacgctcagctttaagatcaacagggaagcggatctagaagcaccgagggcatttcatagatctcatgcagctctttagcagcctcagttcagcctaattataagtttctagattacataatggcaacgatacacagtagatggctagcttgcatctcatgaagaatgagaacccattttctgctttataatttacaattttcctcaaaagtgaaaattgcaaggaagagaagctgaaatgcagttcattcattcccttctactctcaagtggttataggtgcacagaggtttttgg

SEQ ID NO: 674539 - DNA, 730 bp, Homo sapiens
acccccacagccatcctgctggatgttaacttgggagcagaaagagatttctagcttgttcaaggccattctggccaaggtgtgtagcagatctgggtcctgatctgggtccagtggtctcagacttgggatctctagagggttcatcccagggtgttgctctatgaaacctggtgtccccaccccctggctgagaccccgttgagccttctgctggaacctacagtggctagtcacagggcttcatagcatcttccctctgagcttcaagaccctggcttctgtcctcatggagcctgccagctgccccattaggacttttaatttctcctacccaagarcaatcattcatccaattaacaagcagttatttttgtttgcccttttcaggttaatgattttggtcagaaaatcgctaaattcattttttgactcctcttccataaattgtataaatttctaggtgcatacaaatttatacggccgcaatcataatttggtatcttgcttttattctcttcatcattttgttgttaatcttttctttgctttacataacctctataattttcattttttgatgtctttgtaatagcccatccagtggctgtataatatttaactattccccagttttgtgaaactggaaataaatatattatgtatttcaccttttttcatatggttttttcttttgataaacactgaagattgtatattttttgaacac

SEQ ID NO: 674540 - DNA, 609 bp, Homo sapiens
taattcaacatttcttcatgataaaaaaactcttcagtagactatgaataataggttgggatatcaaagccctatcacaaggtaattaatggcaaaatattagaagcattatcttaaaagtgaagacagcagctctcatcgctggaagaagagccattggttrtatgccaaggaaagcaatgtggctagatctctgttttgaaaggagtttcctgtaggcactgtattgtggaggggaggcttttaaaatgctgactatgcctaatgtatttgagaatatccacctatgaatttctaaaaatgcttatctagaaaacatttcttaaaggaaaaaaacctcagctttttggttttctacagaaaaccaaagctagtcaggaatgcaaaggtggcttctgaatgctacagagttgcagttgttcacccacaggcggcaattgacacaccctaaatacttttccaagaaaaaaatttatagttaccacgtaaaagttgacagtttaaaaaccacatatctagcttctctggaaaaaggacaggtgaagctaaatctggactcacgctccaataagctgagcgacaagcatagcgtgttttccagtgtgcccc

SEQ ID NO: 674541 - DNA, 1015 bp, Homo sapiens
ttcatgtttgggtttatgtagctttccaatttgtggcccagtacagggcatggaataggtgtcaataaaggttgctgaaggactaagtgactgagtgagcatagccaggaaaccaaatattgaacaccatgtgcttcaggctaaaaatcttagtgttagccactaagatcccccaagtggaaaagatacaatttcagttactttcaataaaatacagtgagtacagcaacagagaaaggcatggggtgatataaaaacctacacatataagaactcaaattggccctttgacccaacctcgtgttggaaaaggcttttcacttctcaaaatatttgcacatctattagaagtattttcagagtcatatttgaggagtagctatttagggattacaaaatatcagtcaggtgagatgtgtccccttaaacaccatataaaaatggttcaagaaacttaagaggggcaggaggataataaaacccaggcttccataaattggaaataatggagaaaacagagctcttcaaacaactgctctagagacatcccaagagatagaaatttaagacaagatttttttaaaagtctgagtgtgaggctcaatcactattactaaataagaaaataatattacttttatatatagaacatatagttcttttaaagggggccatggatggggctcattttagtctgagaccagttgagaaattttggatggctgagatgaacacctattagtcagtggtctccagtaytattatttgacctttttctatttagaactcattcaagcttatagggcatattacatttaattaattgagtgtttatgcattaaggagttatttgcttgtgactatagtgaaatttccaggatttacgacaggaacgtttcagaacagcgacatgtgtttccctccgatttgtatagcttcattcattataatttttcctgatgttttgcctaccatattattaacttccccaaagcaatgaaataccagcttgtct

SEQ ID NO: 674542 - DNA, 1025 bp, Homo sapiens
acatgtaggaaccatctccgcttttgtaatggctacttaaaaaggacctacatgactacaccatcggtctctccctgactctgctaatgacaatctgataaagctatgatgaaacagttcactagcatactattccttggaaaacctgtcagagcccattcttgttgttaagcccaaggaaaaacacacccaaatgacataaagtcccctatgttctttaaataaaacagcaaacacaccagtctcagttrtctaagtttcagtcacactgaatgcagagaagggggatgaataatactaagagctggtgaaaatgtggttcagtggaacttttcatactgtcataggaaaataaagtgtcacagcaacatagtaaaacgattgggcattattttataatgtgaagcaggcacacacaccctacagcacagccatcccactcctagaccttagaccgtggttcccaaagtggagtctggagcagcagcttcagcctcacctggaagcttatgaaaaatgcaacatctctggctccaccctagacccagtgaatcagaagtactggggatggggcgcagccatatgtgttcttcccgagcaattctgatgccacctcacacttgtgaacaattgcaccagggaacgctcacacatgtgcctctaggagacatctgccaagagtgttcactatgccattgatcacaatggcaaaaacctggaaaaaagccccagtgcccccaaaccaggagaaggaataagtaaactgtggaatattcatatgatagcatattatatagaagcaaaaataaataggttctagtttagacacaatgtagatgaatcttggaaacctaagattgagactaaaaagaaggttgcagttgaccacatgtggcatgctgcttcttttgtaatctcaaagtcaaaagtgaagcaatacattgcttagagttacctacttatgtgataaaagtataaattttgaaaaaacaaaagaatgataattacccagttcagggtagtgg

SEQ ID NO: 674543 - DNA, 1380 bp, Homo sapiens
tctactattaaaattttcttggaaaatatttcaggaagatgagaccttggaggtcaactaaccatctttcagtaaatctaaaagtttttcttttccagaattagaacagattgttgcttttcatttggatttcgagtttggggcatattttatgggtcagagaagagtgtagaggtaatgaactgttgtggtcagtgttgaaggactttaagatctgtaatttctgttaagattaaggaaacagagaatgttcatacactaccactttgaacattccagtagtatgagaatatttaaattaattttatttatttatttatttatttatttatttatttattttttgagagggagtcccattctgtcacccaggctggggtgcaatgacgtgatctcggctcactgcaacctccacctcccgggttcaagtgattctcctgcctcagcctaccaagtagctgggattacaggctcccsccaccacgcctggctaactttttatatttttagtagagacagggtttcaccatgttggccaggctggtctcaaactcctgacctcacgtaatctacccatctcgacctcccaaagtgctgggattacaggtgtgatcccaccatgcccagcctgttttaatttttgaaaagagaaagttatatacattgattgcactctaaagaattgttggcatttggagagagttatccgtatggtaatccctgtgttaattatgtctcaattctaggatcagagaaacaaaatggaagagatgattagggtgggcagaggaatgaatgcagatagatccctcaagtcagtagctaacactagaatacatgtgaagatgagaatggtagatattgcttgaggccagtgactgtaatattagtaattcctctttgtacagactttttagtttccaaagcactttgtggagctcacaaaatccatgatcattaagcccaagtagaggtctttgtctttctttttctgatgagggttcaaaagcccagtgatgagagccactcacttaacgtcatatgtcaaattcatcggacagccacagctccaagtcaggtcttctaaagattgttcccatgctttgaccgtggcaagtgactgaatgttggcatgctttggatggcaggagctcctcatcagcgccagtgtacatggctccactgtgacccatgttacctgcagagattaaagtgggcttaggcagtcaccatggcctttggataaaatcagcggttggaggggaagcacccattaaatccctgcctggcacccaggcctggtgccttagagctatacttccccatccccatcagtcacataaaatttgtcccgaggttctttctaccttcactaagtac

SEQ ID NO: 674544 - DNA, 654 bp, Homo sapiens
tcctaactaataattcttacttggatttacaaagtgcttacacccctatcattcaatttaatcctcataatgaagagaaaagggcagagtacacatatttagcagacatgaatttcagctcaatttcatgcaatatttactgaatgaaattcagtaagtcataatgatacagttacaaatcaggttctctagacttttggtcaatccaaaatattctttcattgcactctgctcacattaaaaagccttaggacccttaactctaataatgtrtctaccgacattaacctctacccaaatcctaatgaggagtctaacatttattgagttcttactacactaccccatcaaatcaaagatgctactgattataaaatacaccattagctattacaaaaccggaaacaaaaattactaccatttaaattataacatagggctttgtcgttagaatatatattacatgtttgttgaaataaatggcttaaaattatccatagtttttttatcatatgtcacccctctacatacataaaaagcaaaatataagtgcaacaaatgaaagcattccaaaaatttctttacgtttaaatttcaaccctttgaattacttttcaagtcaaaatcatggaagttctatgttttcctcattat

SEQ ID NO: 674545 - DNA, 891 bp, Homo sapiens
ttgcatttcatrtcaattagaaattctggggaatacctgtagacttaggccagaaagtttgatttaaggggacagtcctgtggctttagagtcagaggtagggtcaggtaacttttaccacttataagcagtgaaaccctgaaaaagtcatttaactgctttgatgaagccttttaagaaatactaataaaatggagataatgattacaaccaacctctgttataaagaccaaaaagataatggataatactttagaaactgtggtgccattataaacacactgataaggtttggctgtgtccccatccaaatctcatctttaattcccatgtgttgtgggaaggacttggtgggaggtaactgaatcatgggggcaggcctttcccgtgctgttctcatgatagtaaataagtctcgtgagatcccatggttttgaaaatgggagttttcctgcacaagctctcttctcttgtctgttgccatgtgagatgtgcttttcaccttctgccatgactgtgagacctccccagccatgtggaaccataagtccattgaaacttctttattttgtaaattgtccagtctcaggtatgtctttatcagcagcgtgaaaacggactaatatacacaacaaactatttcaagatagagttgaagcttctagaaataaaacgattgtttctacccttgcccgtctatcatgagttcatgctttcaaacatagtttaagtttctactgttttatgatatcttccccaaattcccaaaagccaggccatctctactctccaactcttctctgcctcattatcttatctcatatacagcatgagttacacaaaggagtatttgctgctttctatgtccatctccactaacagactaagggt

SEQ ID NO: 674546 - DNA, 606 bp, Homo sapiens
ctgtaataagtgcaaaccttactaaattgatcatgttctacaaaagctgcttatggaagactttattctgctgttaaatagaagatggaggcagatgcgaccttcgctgaaactgactggcattgtggcaggcaccgacagagcacagaggggttttttttttttgatgatcatgccttcatttcggggctatcatctccagtgtcagagtctatgatatatatggctttgggcataaactgttctaattcctagtccaaaggactccctgctgctcagtaatctgaatttacagtggcccccagcagtttttaaggactttgtatgatgtggaaaagtcttctcaaagctgacagttccyatctgtgtcaactcattcacagcccatgatgttcaaacagatctgtacagattcccttcagtctgtgattaacttgcttactccttgaaggtgatgccttttagcagggtaaattgtagccagtgttaaataggtgactccttcagggatttttgtaattaccgaaagaggaaagatgtcaggtctcttacagagtcattgggaatggttgttcctaaaagaaatgaaacagatggaacccattt

SEQ ID NO: 674547 - DNA, 606 bp, Homo sapiens
ctgtaataagtgcaaaccttactaaattgatcatgttctacaaaagctgcttatggaagactttattctgctgttaaatagaagatggaggcagatgcgaccttcgctgaaactgactggcattgtggcaggcaccgacagagcacagaggggttttttttttttgatgatcatgccttcatttcggggctatcatctccagtgtcagagtctatgatatatatggctttgggcataaactgttctaattcctagtccaaaggactccctgctgctcagtaatctgaatttacagtggcccccagcagtttttaaggactttgtatgatgtggaaaagtcttctcaaagctgacagttcccatctgtgtcaactcattcacagcccatgatgttcaaacagatctgtacagattcccttcagtctgtgattaacttgcttactccttgaagktgatgccttttagcagggtaaattgtagccagtgttaaataggtgactccttcagggatttttgtaattaccgaaagaggaaagatgtcaggtctcttacagagtcattgggaatggttgttcctaaaagaaatgaaacagatggaacccattt

SEQ ID NO: 674548 - DNA, 634 bp, Homo sapiens
ataacaacttaaaagttttaaaaagtgmaaaaccaagtttcctgtctattcctgacacttagctatctacttccccaccttagatcaatcactgttactggtttcttgtatccatgtgtacatgtatatttgttcattgatttctttaaaagtctgtcttttttttttttttttttaaaggttctcactccgttgcctaggctagagtgcagtggtgcaatcatagcttactacagcttcaaactcctgggctcaagtgatcctcccaccttggtctcccaaagtgctggatcacaggcatgagctaccatgcccaacctgtcctccttttttatttttatttattttttatttttattttttgagatagagtcttgttgcccaggctagagtgcaatggcacaatcttggctcactgcaacctctgcctcctgggttcaagcgattctcctgcctcagcctcccgagtagctggaattacagtcacctgccaccacgcttggctaacttttgtgtttttagtagagatggggtttcatcatgttggctaggctagtctcgaactcctgaccttaagtgatccgcccacctcagcctcccaaagtgctgggattacaggtgtgagccactgcac

SEQ ID NO: 674549 - DNA, 634 bp, Homo sapiens
ataacaacttaaaagttttaaaaagtgaaaaaccaagtttcctgtctattcctgacacttagctatctacttccccaccttagatcaatcactgttactggtttcttgtatccatgtgtacatgtatatttgttcattgatttctttaaaagtctgtcttttttttttttttttttaaaggttctcactccgttgcctargctagagtgcagtggtgcaatcatagcttactacagcttcaaactcctgggctcaagtgatcctcccaccttggtctcccaaagtgctggatcacaggcatgagctaccatgcccaacctgtcctccttttttatttttatttattttttatttttattttttgagatagagtcttgttgcccaggctagagtgcaatggcacaatcttggctcactgcaacctctgcctcctgggttcaagcgattctcctgcctcagcctcccgagtagctggaattacagtcacctgccaccacgcttggctaacttttgtgtttttagtagagatggggtttcatcatgttggctaggctagtctcgaactcctgaccttaagtgatccgcccacctcagcctcccaaagtgctgggattacaggtgtgagccactgcac

SEQ ID NO: 674550 - DNA, 634 bp, Homo sapiens
ataacaacttaaaagttttaaaaagtgaaaaaccaagtttcctgtctattcctgacacttagctatctacttccccaccttagatcaatcactgttactggtttcttgtatccatgtgtacatgtatatttgttcattgatttctttaaaagtctgtcttttttttttttttttttaaaggttctcactccgttgcctaggctagagtgcagtggtgcaatcatagcttactacagcttcaaactcctgggctcaagtgatcctcccaccttggyctcccaaagtgctggatcacaggcatgagctaccatgcccaacctgtcctccttttttatttttatttattttttatttttattttttgagatagagtcttgttgcccaggctagagtgcaatggcacaatcttggctcactgcaacctctgcctcctgggttcaagcgattctcctgcctcagcctcccgagtagctggaattacagtcacctgccaccacgcttggctaacttttgtgtttttagtagagatggggtttcatcatgttggctaggctagtctcgaactcctgaccttaagtgatccgcccacctcagcctcccaaagtgctgggattacaggtgtgagccactgcac

SEQ ID NO: 674551 - DNA, 1094 bp, Homo sapiens
agcaatcagtgagactacatgggtgcaggaccgtctgagccatgcgcgggatataatctcctggtgtgccgttttttaagcccattggaaaagcacagtattagggtgggagtgacccgattttccaggtaccgtctgtcacccctttctttgactaggaaagggaactccctgaccccttgcacttcccgagtgaggcaatgcctcaccctgctttggctagcgcacagtgcactgcacccactgtcctgcgcccactgtctggcactccmtagtgagatgaacctggtacctcagatggaaatgcagaaatcacccgtcttcttcgtcactcaggctgggagctgtagaccggagctgttcctatttggccatcttggctccatcttgtcccctcttgaacaccgcaacctatgtgcaagatggaagctaaggaaagaacagaattacaacagtgaagtgaagtcttcctagtgtcttagcacaattattacttcatgcattttgcaaatgggcataattttttttttgagatggagtctcactctgtcgcccagactggagtgcagtggtgtgatctcagctcaacctccgcctcccaggttcaagggattctcctgcctcatcttcctgagtagctgggactacaggtacgtgccaccacgcccagctaattttttgtatttttagtagagatggggtttcactgtgttagccagatctcctgacctcgtgatccacttgccttggcctcccaaagtgttgggattacaggcgtgagccactgcacctggccacgtgggcataattaaaaaaaaacaaacctccaggtgctacattctttgtgagtttcacatattaatatccctaaagataacatgggaccattcagggaaaaaacaaacttagcatgatactagctcttacccagagcaatcccatgaagtgctggtaggatggctttgtactgtctgggctttttcagctcatcagagtctgccctgcactgacattatgctcctctcatcactcttaggagccaggtcagcatctgtgtctgccttcatatggtggatgggaagtatctggacttc

SEQ ID NO: 674552 - DNA, 805 bp, Homo sapiens
taccctgcaaggaaaaagccagactgctacaggtggtttgttttttttttccatgtcttgaacacaaaccattctcttcttctctttctctctccctctctcaacccacagtcattcatttccttctttgaactggawatgtgcttacctcctttccaatttctattattttgagacacattttatgttagcaggcatacacaattttaaaatcagacacacactgatttctcatatctggcaagtcaggtaaaaatttggaaaccaaatgtttataaattgcaaagttacttttaagactctaattattatcaatcaccatattgccataactattttgtatgttcccccaaatagcattgcttttgatgaatgcagtgtgattcagagtactcccaatacacagtcatttgaccgttttttttaacactggcaagcatgtagcagattttaagatatattaaaagatgtttgtcatatctagtatctaatagatgtaatcaaacaaaggcttttttttaagcccattcagaagattcattttataggcacaagattatggtaatttataattcatgttattctctggatggtgtggttttggttcaggcaaagatttgcatgtccctgtccctgctcagtgttcatctactagctagcatcctacctaagattaaatttatacatttggttttggttcaaggtttcttgttcccgctggcaaacacagacgctccttaactcctctccacctgaatgtgcacagaatataattatgacaggagctaacattatctaaaatgca

SEQ ID NO: 674553 - DNA, 1211 bp, Homo sapiens
tgcctgtaatcctagcactttgggaggccaaggcaggtggatgatgaggtcaggcgttcaagaccagcctgaccaacatggtgaaaccctgtctctactacaaatacaaaaattaggcgggagtggtggtgcatgcctataatcccagctactcaggaggttggggcaggagaatcacttgaaccctggaggcggaggttgcagtgagccgagatatcacgccaccgccctccagcctgggtgacagagtgagactccgtctcaaaaaaaaaaaaaaaaaaaaaaaaaaaaagagcataatagctttcatggcacatcaagttctgggacaaaaattacactgccagctctatgtgttataaatcaaaacctactacttatcagccaaataccactttaattacagtgttctcgtattagagaaagaagattaggaagggtaggagctcaaacggtgcagaatgggaagagcttcatgctgctatcatcaaatgagcacctggccagaaaatcagagtctgaactccaccatctagtagcctaaagactggggtttgtcactttacctgtgagcttccgtgtcctcatcctcaacatgaagatgaagataacaacactgaacttggagtgtggttgtgaagctcgaatgatatcatggaaatgaaaatgacctgtgcatataaatgtataaataaaatcagtatttaaaaagtaaattaagaaataccctcacagcaaattagaaaactgtctgcctatttaatctgccctctgcaatagatttataaagtcaatcgattagacggaaaataaataaggatcaataaccaactcaagtagaaatatttaagaaagaatgcaggacccaaggaacctcaaacagcagatttcaattaggatcctccacatcaaaattataagtgcttttgttgttgtcacagatagtgcaagtctgttctcacctcatgagactctgaacccctatgggtttttatttgaggggaagttggcagcattggcactgggaagataaaccayaccaacaacagaaatacaggctgccctcgcagttactacttctggcccatctcatccagcaaaagctggtagaggaactttggtgtttttccatttccctagtattgtagtgagataattttacacatttgcaaaccttaaataatcctacacaactcctttgtgtttaaatt

SEQ ID NO: 674554 - DNA, 1211 bp, Homo sapiens
tgcctgtaatcctagcactttgggaggccaaggcaggtggatgatgaggtcaggcgttcaagaccagcctgaccaacatggtgaaaccctgtctctactacaaatacaaaaattaggcgggagtggtggtgcatgcctataatcccagctactcaggaggttggggcaggagaatcacttgaaccctggaggcggaggttgcagtgagccgagatatcacgccaccgccctccagcctgggtgacagagtgagactccgtctcaaaaaaaaaaaaaaaaaaaaaaaaaaaaagagcataatagctttcatggcacatcaagttctgggacaaaaattacactgccagctctatgtgttataaatcaaaacctactacttatcagccaaataccactttaattacagtgttctcgtattagagaaagaagattaggaagggtaggagctcaaacggtgcagaatgggaagagcttcatgctgctatcatcaaatgagcacctggccagaaaatcagagtctgaactccaccatctagtagcctaaagactggggtttgtcactttacctgtgagcttccgtgtcctcatcctcaacatgaagatgaagataacaacactgaacttggagtgtggttgtgaagctcgaatgatatcatggaaatgaaaatgacctgtgcatataaatgtataaataaaatcagtatttaaaaagtaaattaagaaataccctcacagcaaattagaaaactgtctgcctatttaatctgccctctgcaatagatttataaagtcaatcgattagacggaaaataaataaggatcaataaccaactcaagtagaaatatttaagaaagaatgcaggacccaaggaacctcaaacagcagatttcaattaggatcctccacatcaaaattataagtgcttttgttgttgtcacagatagtgcaagtctgttctcacctcatgagactctgaacccctatgggtttttatttgaggggaagttggcagcattggcactgggaagataaaccacaccaacaacagaaatacaggctgccctcgcagttactacttctggcccatctcatccagcaaaagctggyagaggaactttggtgtttttccatttccctagtattgtagtgagataattttacacatttgcaaaccttaaataatcctacacaactcctttgtgtttaaatt

SEQ ID NO: 674555 - DNA, 1211 bp, Homo sapiens
tgcctgtaatcctagcactttgggaggccaaggcaggtggatgatgaggtcaggcgttcaagaccagcctgaccaacatggtgaaaccctgtctctactacaaatacaaaaattaggcgggagtggtggtgcatgcctataatcccagctactcaggaggttggggcaggagaatcacttgaaccctggaggcggaggttgcagtgagccgagatatcacgccaccgccctccagcctgggtgacagagtgagactccgtctcaaaaaaaaaaaaaaaaaaaaaaaaaaaaagagcataatagctttcatggcacatcaagttctgggacaaaaattacactgccagctctatgtgttataaatcaaaacctactacttatcagccaaataccactttaattacagtgttctcgtattagagaaagaagattaggaagggtaggagctcaaacggtgcagaatgggaagagcttcatgctgctatcatcaaatgagcacctggccagaaaatcagagtctgaactccaccatctagtagcctaaagactggggtttgtcactttacctgtgagcttccgtgtcctcatcctcaacatgaagatgaagataacaacactgaacttggagtgtggttgtgaagctcgaatgatatcatggaaatgaaaatgacctgtgcatataaatgtataaataaaatcagtatttaaaaagtaaattaagaaataccctcacagcaaattagaaaactgtctgcctatttaatctgccctctgcaatagatttataaagtcaatcgattagacggaaaataaataaggatcaataaccaactcaagtagaaatatttaagaaagaatgcaggacccaaggaacctcaaacagcagatttcaattaggatcctccacatcaaaattataagtgcttttgttgttgtcacagatagtgcaagtctgttctcacctcatgagactctgaacccctatgggtttttatttgaggggaagttggcagcattggcactgggaagataaaccacaccaacaacagaaatacaggctgccctcgcagttactacttctggcccatctcatccagcaaaagctggtagaggaactttggtgtttttccatttccctrgtattgtagtgagataattttacacatttgcaaaccttaaataatcctacacaactcctttgtgtttaaatt

SEQ ID NO: 674556 - DNA, 459 bp, Homo sapiens
tgacggaagcattctttatcaagtggctcctcacttttttgaagggctatcatttcatgaaactagggcctattttctaaaagtaccacatcacctgctttgtaatacaaaatgaattaaaattatagataaatttgtaatagtccttgagataacttggaacaaatgagatgttttaagcccagaattatatatactgaggaacaaagtttataaatttagtccctgcagagaaaaatgtgttttatataaagaagcacagatgtgtatagataaaaatgtgttcctgactatctctttcattaaatcttaataccacaatgaaataaaygtttagtcagacataactgtgctctattttcaggacacaaatttctattttattttatctaaagcagttggatattggcaatttcatatatttaacctaaaacttagcacaacttcaggtacaaagta

SEQ ID NO: 674557 - DNA, 591 bp, Homo sapiens
ggaaatggtgtgggcaaactgagaaagtataaaacagctcatgtgtgaaagtgttagtgagttagcctggagtctgaagtgcaagtcagggcagagcgagttgggcttatgagctttgcatcgtgagctgctaacagattttattctataggtgatgtggctccactgattcccaagacacctggttggatctggatttagagaaatcattagcaatgtaaaatgatagattggaatctaaggagttcaaaatgccagcagtaaggctaaacatgctgatgctttagctgagaaaattcttgtggaaagagttccatgtgccaaaagaaaaaaaaaaaaaacacttgacaaaactcttaggaatttcgtcttttgagaacaaagtcataaaagaaatacactttttaatcaaacttatcatagtgccaggtagtataagagaaatatatatatatayacacacacacatacacatatatctttatataaaacataaagatacatatatctttatataaaacaaatatatatatctttatatatatatatataacaaaaatatgtatagcataaaccacctttgaaggagac

SEQ ID NO: 674558 - DNA, 602 bp, Homo sapiens
agaggcaacgctatgtgaggtgctataaaagtcatgttacaggccgggcacagtggctcacgcctgtaatcccagcactttgggaggccaaggcaggcggatcacctgaggtcaggagttcaagaccagcctggccaacatggcraaactccatctctactaaaaatacaaaaattagctggacattgtggtgcatggctgtaatcccagctacttgggaggctgaggcaggagaatctctttcttgaatccaggaggcagaggttgcagtaagcaagactctatctcaaaaaaacagttatgttacagttgcttaagagacacattcatattcaactgagccttaagtgtaaatgccatggtacagcagaaactaactcttgagttttaggtggtagtgaaggcaaagaaaagtgttctaaaaacttccagaaagaagggctcgatgtaaaaggaaagacccaggtaagcattcatgtctgggtggtagctatgttggtgagttagtaataaaggaaaaagcagaacgtacataggcagatgtagaaattgaggtttacctggggccaaactgcaccatgaaacacagcatcaatttcttc

SEQ ID NO: 674559 - DNA, 602 bp, Homo sapiens
agaggcaacgctatgtgaggtgctataaaagtcatgttacaggccgggcacagtggctcacgcctgtaatcccagcactttgggaggccaaggcaggcggatcacctgaggtcaggagttcaagaccagcctggccaacatggcgaaactccatctctactaaaaatacaaaaattagctggacattgtggtgcatggctgtaatcccagctacttgggaggctgaggcaggrgaatctctttcttgaatccaggaggcagaggttgcagtaagcaagactctatctcaaaaaaacagttatgttacagttgcttaagagacacattcatattcaactgagccttaagtgtaaatgccatggtacagcagaaactaactcttgagttttaggtggtagtgaaggcaaagaaaagtgttctaaaaacttccagaaagaagggctcgatgtaaaaggaaagacccaggtaagcattcatgtctgggtggtagctatgttggtgagttagtaataaaggaaaaagcagaacgtacataggcagatgtagaaattgaggtttacctggggccaaactgcaccatgaaacacagcatcaatttcttc

SEQ ID NO: 674560 - DNA, 1616 bp, Homo sapiens
cttttcgcagtcacctctattatttgaaggaatggtccaaccaacctcaaagctctggaaatttgccccaaaataattttaccctgaagccattgaagcttaagtttcagaccccagtttcacattcctgtgagttctgcaagtcactgggagctatagagtcttctacgtagatttgggaaacaaggtgaaaatacctcaagaaatctcagaagccaggggcctgcatctccaagcctctggcaattttcttgtggtttctatcctcactctagatatttgcttttgagactgattttgaattcagaattttatattctctcaaaaagagaattctccaaattctataagcttcaggctctacaaaacttgtctattctgcctaactagatttatcatagcacgtaccaaagatggccctgcctcatgaggacttttcatatcagacccttagataataatattccctcatgtaagtaataatatttccgcatgtagttatgtatgaataattttcatkcatctatatcatgttggccatagtcagtgtccatgtccaatttattttttgtgtccttggtgctcagaaagttaccagatgttcagtcagaattttatttaaaatattttgatgaactagatttaaagatagattaaattaattcctacacatgatttaatttaatggataaaataagggactgagcattagcctgaactgtgtacttgcattagccctgatgttccccagagggaataatatgtgaagaatactgcataggctgaaaaacaagagttcccagcagaccaatattctttctttctgcaagctgtgagacacctggggaaagttctccacatttggtttttcagctactccacccatgactagaaggaagattttattttattattttattttattgtattttttaacagtaaaagaaaaattattgttattttaatgaaaaagaaccacctggaaagtctagtgacatttttgaaggcagggaccactttttccagggatttgtttccctatgctagtgctccattcacccttgcaccacttcagcaaagcacatagtaggtgtagcagggagatgttaagatggaaacttggccctgaccataggccaagccagggtgtctagtcgggatttatccataaacatcaatatttatcactagatgatatattgatttcttatctgcctcctatacctattgatctatttttcacagcttatagtggggagggtcatgttcagttattatccttaaaccaaaacaatctcttcttgaaaaataggatgctatgctctgatgtttgcagaggccaggaaattcttgctctgagagttccagaaaaaaagatttgtccagatttgaactaatttcagaaaaacaaaacaaaaacaaaaaaccatccaaggttaagaggtgacttctgactcacagaatgaacaagaaggcaggggaaaaaataagtcccccaagattcaggtcaaaggaaatgaacagaaggatgatggagtggcccagaggaggatcacgtgacagaaaagtcaagataaattagtggcaggacagaggaaaagaactaaagacctgca

SEQ ID NO: 674561 - DNA, 1616 bp, Homo sapiens
cttttcgcagtcacctctattatttgaaggaatggtccaaccaacctcaaagctctggaaatttgccccaaaataattttaccctgaagccattgaagcttaagtttcagaccccagtttcacattcctgtgagttctgcaagtcactgggagctatagagtcttctacgtagatttgggaaacaaggtgaaaatacctcaagaaatctcagaagccaggggcctgcatctccaagcctctggcaattttcttgtggtttctatcctcactctagatatttgcttttgagactgattttgaattcagaattttatattctctcaaaaagagaattctccaaattctataagcttcaggctctacaaaacttgtctattctgcctaactagatttatcatagcacgtaccaaagatggccctgcctcatgaggacttttcatatcagacccttagataataatattccctcatgtaagtaataatatttccgcatgtagttatgtatgaataattttcattcatctatatcatgttggccatagtcagtgtccatgtccaatttattttttgtgtccttggtgctcagaaagttaccagatgttcagtcagaattttatttaaaatattttgatgaactagatttaaagatagattaaattaattcctacacatgatttaatttaatggataaaataagggactgagcattagcctgaactgtgtacttgcattagccctgatgttccccagagggaataatatgtgaagaatactgcataggctgaaaaacaagagttcccarcagaccaatattctttctttctgcaagctgtgagacacctggggaaagttctccacatttggtttttcagctactccacccatgactagaaggaagattttattttattattttattttattgtattttttaacagtaaaagaaaaattattgttattttaatgaaaaagaaccacctggaaagtctagtgacatttttgaaggcagggaccactttttccagggatttgtttccctatgctagtgctccattcacccttgcaccacttcagcaaagcacatagtaggtgtagcagggagatgttaagatggaaacttggccctgaccataggccaagccagggtgtctagtcgggatttatccataaacatcaatatttatcactagatgatatattgatttcttatctgcctcctatacctattgatctatttttcacagcttatagtggggagggtcatgttcagttattatccttaaaccaaaacaatctcttcttgaaaaataggatgctatgctctgatgtttgcagaggccaggaaattcttgctctgagagttccagaaaaaaagatttgtccagatttgaactaatttcagaaaaacaaaacaaaaacaaaaaaccatccaaggttaagaggtgacttctgactcacagaatgaacaagaaggcaggggaaaaaataagtcccccaagattcaggtcaaaggaaatgaacagaaggatgatggagtggcccagaggaggatcacgtgacagaaaagtcaagataaattagtggcaggacagaggaaaagaactaaagacctgca

SEQ ID NO: 674562 - DNA, 645 bp, Homo sapiens
actcttcgacctgccctcagttgtcagtttacgcaccccaaaagaaatcattttagtcttttctctggggtccctgacacatttccagttctactggcaccgttgtgtactctggtagggagggataccgaataagtcttggcaatttgttactatttattaaggagtccagctccaggtcaaaatcctatgtgtgatctttcaggcctgatcataagcaattactgggctttgcctggcaggcctgattgaggagaagctgcctccccataccacacttgcactggcagtgcgttgtacttttctgaagggagttgcagtcaagaactcggcccttcttctccctaccccaaccagccatgcatattcayaatcctggccctggtcccttcattcactggcctccttactgggggccttgctgaggcacttcttttttccactttgactcagtacctttctactcctagaccttcccactctctctctctccccctgtctctcaggtctataaagaggcaggagtcttttgttctgggctctttaacagtgagacgattccctccatgtgtacagcactcatctgaaaagttttcaaagtacgtacattaacaacctaaatgctcagcaataaggattgtgcaa

SEQ ID NO: 674563 - DNA, 571 bp, Homo sapiens
  misc_feature 416: n = A,T,C or G
accaaaattggggcttagtctgggaggattcttggcttcactcaggaaacaattcaagagtgagtcagtggtggaagaaagcatgtccattgaagcagcagcagcgtacagcagagtgactacttcttgcagagcagggctaacccataggcagtgtgcccaaagtataggctgtgtataggctgttggccaacaataattatacccatttttaattctgtgcaaattaagggatgggttattcagaattctctagaaaagaaacagcaacttccaggtgttgccgtggcatttgtaaactstcatggtgctggtggaagtgtcttatgctgatacacatcagggaaactagaaattgctttcagagcaatttgccacttctggctgttttctcattttatcctggcaggaccaanaaagaagccctactaatctacctcattcacccctcagagatatacactcctccttaagtttaagggagttgcaaagggcagaggtctctcttctgttactgtttcctgctgatcttatgggcatggactctgcttagtgttggaagagcaaacat

SEQ ID NO: 674564 - DNA, 2756 bp, Homo sapiens
  misc_feature 313, 1215, 1229, 1235, 1236, 1237, 1238, 1239, 1240, 1241,1242, 1243, 1244, 1245, 1246, 1247, 1248, 1249, 1250, 1251,1252, 1253, 1254, 1255, 1256, 1257, 1258, 1259, 1260, 1261,1262, 1263, 1264, 1265, 1266, 1267, 1268, 1269, 1270: n = A,T,C or G
  misc_feature 1271, 1272, 1273, 1274, 1275, 1276, 1277, 1278, 1279, 1280,1281, 1282, 1283, 1284, 1285, 1286, 1287, 1288, 1289, 1290,1291, 1292, 1293, 1294, 1295, 1296, 1297, 1298, 1299, 1300,1301, 1302, 1303, 1304, 1305, 1306, 1307, 1308, 1309: n = A,T,C or G
  misc_feature 1310, 1311, 1312, 1313, 1314, 1315, 1316, 1317, 1318, 1319,1320, 1321, 1322, 1323, 1324, 1325, 1326, 1327, 1328, 1329,1330, 1331, 1332, 1333, 1334: n = A,T,C or G
gaacacattcagtctagatcttattgctgatacgttcgtgtttaacttgttggagtgttataccccacaaggagttccacaaaaattacggaggttataaaggtaaataaatagttttgtaactgttctaacacaacttgagttcactgttatttaattattctattatttcagtacccatcagaataataagctgttggtcatctcatcaaggtcaagggtagcagtaagatggaaactttagattttaaaacactcttaactgagggttccttaaaagagtaataattccaaccccttgagtattaaacanatagtaacatatatatggccgaatccttctctttatccaattcttacatatatatatatatatatataatagatccatataaaaaaacatatagtcacagactcacaccataagctggcatcaatgaatacatatctttaacattcagaaagaattcactttcctataatctgggcaaaggaaaagtgaacccctagagttatgaccacaaaagtatctaagaaatgagccaaaaatattaccaacatctaatgtcaacacaaagatagccaaaatactaatggaagttacattttctccttagcatattcagtgctttaagacatgtctagggtattcatagtaaatcaaacaaaaacaatttcaaggcaatagagatagtatgtgcacagactgagctgggaaatagtgacggatgctcaatgaggtcacagaacaaatcaacacagctgccctactgactgttcactagccaccctggaagagccagaggtgccccacctagcacagctgccaaaccaaacttcagctgtgctgaagttcaagagcacagtcatacaatcaaaaaattttagctggaaaggcctaggaggtcatagagttcagtgtatacagatccataggttgctgctgcatttcaatggctgtatgaacatcctgaaattatatacaaagttttctgtatgcatgcataagaactactgatctaatyctgtcattcatttaatggatggggaaacagttccactgaaattgaattacagctcaatagtactaaattagaagtagaatcttttgagtctcagctatttttttcatttttgctatcacaccaagaagtctattaagtactaaaaattttaactgcaacagaaaaagacatacagctggattgcagtatncccctgtgaaaatnctgagnnnnnnnnnnnnnnnnnnnnnnnnnnnnnnnnnnnnnnnnnnnnnnnnnnnnnnnnnnnnnnnnnnnnnnnnnnnnnnnnnnnnnnnnnnnnnnnnnnnngcttcgagtattcatcatatatgcctaaatttgcaagtcaggtaggtataaataatatgactatgggaaaatgctctaattagaagttcagtgcctaatgtttagatataattgaaaaaaattatattgaaaaaatttgtttattttataaacaaaaagtctatatctacttttaaactgctgcgtattaaaaattaaatatgttatgcaaataaatccaatattgattttaaagatatgaactattatttaaaattacttaaaatatgtatatatgtacacattatatttccaattttattaaatgtaaaacataataaaaattttaataacatgaaatgtcataactcatgtccaaccagaatatctattatcatctctgaagatgtagctaaaatattgaattgtgtcataacctctccctgatatggattatttctgctatgtctctcttgcattctagaatgagaacctaagacattatgtgcatagtagtatgataagcccaatttttcaatttaaaaattagatgactattgaaatggccacaacagtttcagcatctttgatatatacttatccaagcagaatttaaagttggaaaaaaaatctatcatcaataaaacataccttttgttttgtggttttcttaaaaaagttaatcatggaccactcaaatgctacaacagactccccaaacaccagcgatttgaaaagaaaaaataaacagaacttttagaaataaaaaaaaaaaattgaaaatgaaacaagaggaaaacttttaaaaacagattaaacagaactgaagaaagaatcagtgaagagaaacagagtgaagaaattaagtagttggagcacagatcataaacaagatagaaaaataagggaaaaaattaaagacataaaatatggaatgagggaagctaagataattttaaacagagaacgagaagtggagtgtgaaaaaaaggaaaaacagtctatatatgaagagaaatgactaaaaaatgtccaactggtgaaagcaattaaaagaatacatgcttaggcacatcatggtaaaactgcagataaccaggtaaaaagaggaggtgaaaagcagcttagaggaaaaaagccagatcctctacaaataaagcctcacctcactggtaacaaaccccttcacatcagtaatagaactcagaaaactacaaaatattgtcctcaaagtgctgaaaaattgtgtctgaataaactgtatttctagaatgaaagttaaatctacaaaaatatctgtatttaataataataatttctaaatggtagggattttattgaaaaatgaaaattaaaaaattaagtcacaagagtgataagatccaagtgttctaagatcctagtactacagtttaactttagacttcaactatatatgataca

SEQ ID NO: 674565 - DNA, 1286 bp, Homo sapiens
agacaaattattaatatccttaataaatacaaggagttattacttagaaataagaaaaagaggcccacactaataaaaaaataagaaaaagatataaccaagatattcacaaaagaagtgcaatggctactaaaaatttcaaaatgtattcaacgtcaataaataaaacaatgctgacataccaaatttcacacacctagttacttgtaagagtgtgataaaggtgcactttcaaatactgctgatagaagagtaaacttacatctttctagcaaggattttgtaataaatatcaaatgtctaaaattttatcatttttaattttaaaatttattctataatcagatagacattaaaagccatttcagaattatttatatggtgaaaaactagatattctaaatgtttaacaatatcagatgccacagacagcatttttaatgcaaagccgttaaaaatgaagacatagaccggaggtagtggttcacgcctgtaatcctagcactttgggaggcggaggcaggtggattatttgaggtcaggagtttgagaccagcctggccaacatggttaaaccctgtctcttctaaaaatacaaaaattaggcgggtatggtggtgggtgcctgtaatcccagccactcgggaggctgagacaggagaatcacttgagcctgggaggtggaggttgcagtgagccaagatcacaccactgcactccagcctgggaaatagaatgagaccctgtgtcaaaaaaaaaaaaaaagatataaaccaataaaaaatgacatagaaagatgtacgaagcaagttgctagataaaatatgattatatcttcagagtaaacttattgaaaaaaatctatcatcctactcatctcaatgatgatctcatctcctcccctctctaaacacacatacgtgcacacacatagacacacacakgcttgcacacgcagagatacacccagggtctggaaagtatacactaaaagaccaatacaagttatccatgagtggtaaaattaggaaaagtttcattttcctctttgtagttgtctatattatctaaattatttacgtgtaataaaaaagatttttacagaccatttgtaagttcaaatttcaaattgggcaagagaaagtaatttggaaattttctagaaattaaaaaatgagctgtagctggtcatcataatcaaagtttacataaagtacaatctatgatgattttttaaagtgtcagaataaaatactagaaaaatgccttgagttctttcccacatg

SEQ ID NO: 674566 - DNA, 588 bp, Homo sapiens
aatgctgtcacagaaatagaaaaaaaaacaaaggtagaaagtaacatgtacatgtataacttccaagttctctgtaacaatgtttgtctctaattgcttcagattatttttcagcatacaaataaattttccctggttgtttctagttggacttatactataaaaagtccatctctcttctacttctgtttaatgatttgtcttatttctctcctcctctctaacccacaattactgccagagtacaggtccttattctcatctaacccaaaaattacctggtagccaattttattaataatcaatgtttttgtaaatacatctttaagagctaactttcaatcttgatcttcaaatakcagtgtgatatttgttttgtttgctttttatttatttttgtttgtttgtttttgttttgagacagagtgtcgctctgtagccaggctgaagtgcaatggcacaatcttggctcattgcaacctacacctcctgggttcaagtaattctcctgcctcagcctcccaagtagctgggactacaggtgcacaccaccacacctggctaattttagtatttttagtagagaca

SEQ ID NO: 674567 - DNA, 648 bp, Homo sapiens
cagagtctcactctgccgccattctggagtgcagtggtgtaatctcagctgattgcaacgtccacctcccgggttcaagcaattctcctgcctcagcctcctgagtagctgggattacaggcgtgcaccaccacacctggctaatttttgtatttttagtagagacagggtttcactatgttagccaggatggtctcgatttttgacctcatgatccacccgcctcagcctcccaaagtgctgggatcacaggcgtgaagaacaacaatgttaaaaggcttttagtttgccaaactcttacrcactcatgaacttatttgatcctcacagttacatcatcaggtggtcaaggaagagattattatcctgactggaagctaaggaaacagactcagagtggtgaagttatttgtgccagccaacactggagccaggcattgttttctcaacttcctaaataagcctatttccctgtctactcttgccaggatccctaggctccttgttccatagcacactatgagactctgcatcccttaagggacgggtaaccttatagccctaatgcctgagtagtgcagacttgatatatattttaaaatgaatgcaaaaggaaaaaaattaattgtggacagttgggagttagga

SEQ ID NO: 674568 - DNA, 978 bp, Homo sapiens
ccctaaaacttacttaaagaagtataataataataaaatttttaaaaaaagaaatgaagctgattttggtcactatatgtgggtctgccctgtaggactcgattggatttggaagcaaaataaaaggttgtccttctctgcattcccaaaaccacaatcacccattagcccatctatgtaaacaatgtgccagacacccrttcagtggcctctctcaggtccccaacacatgcacataacgcacacaatacattacgatcaaactaaagcctgtatctcttttgttttccctccctcctcagaagtaatcagtatgacgaggttagtatgtctttgtcccaagtgagcttgagaccaggtttatagttggttagaagatttcttttcccttttataattacatgttaacacctttattaaatttgtttcttaaattcatattcattgactttctacaaactgaaatttctctatatcgagtttgccagtggaactaactagtggaagattcattgacctgacttggagttaatgatgactgctgaagtttgagaaatcataggattaatgatcagaagatctgagtcaaaagttgctgtatgactatgaacaggtcagattctcattcagtttcctcatctgtaaaatgggaactcatgtatccaaatgcaacatttggtttgtatgagaaccaaataatcatgtatatgaaaatactttaaataacataaagtactagtcattagtgatgccactagtttttcaaataaattaatatatctaggaaaaatagtaggtactatactattcattataggtgactattaagttttagaaatgctatgtatgaaattgagtaatcataatttgagaaaaaagtattactctgctataacacatggtttactagcagaatattccaagacctggtgagtagtatatgggatttatatataccatgagaataccatgtgagtt

SEQ ID NO: 674569 - DNA, 1418 bp, Homo sapiens
cacctatctctacaaaaaatgaaagaaaaaaacaattagccgggcatcgtggcacatgcctgtaatcccagctactggtgaggttgaggttggattgctcgaggtcaggaggtggaggatgcagtgagccgagatcgcactactgcactccaggctgggtgacacagcaaggccctgtctcaaaaaaaagaaaacaaaaaaacactcaaatcccaaatttagcatagaatgcctggaaaataaagagaatatatcattattcagtaaattatatgccactagttaaaaaaaaaaacaaaaaatatatatatacatatatatgtatatatatatatatatagcttcagaaaccttaaatgatctgtagaaataacctgataaactagctacagaggctaaataggtagtacagtttacacaattaacagtgtgtatttacagcccccttgcatctaaaggaatcaaagaacattcactatataattacctggtatcccaccaccaccttcttctcttgttaaagattctgacttttaccattcattccatgtacttgttattcaacagaattctgactgacatttttaatatgcacgaatatattgtttctgtttatacataagtctgaaagcattcataccaaactgttaaaaaaccattaccccagcaaaccatgaggagcagacacagatgatgggggcctgcttgtttaactccatttaatttagtaatttaaatcttatttctgaatatacaataatttttcaataaaaagattaayaaccacatacaatattgtaagccacaacatttccttctagatgacacaaagggatctaaattcatcccctgaataggtttcctacgttaaatatactagcataggccatagatccagacaccaaactccagataccacgtatcatttctaaacactgaactgctaacacatgcagggctgacccttgcccagagtggaccattggtcatggcagctgctacccatcaccactaccatcccaactcttccaactcgattgtcaactatggcttctagcaaatgtcttcacataaccccacagttctctccattcacttacatactaatcatcaggtcagaaaaggaaccaaaaagcccatttcagctttcaaactttattttcccctacaagaaaagaccacctactttttacttttcttccttcaaagtgttgtcacaacggttgtaatagttagaaactaaatgctcattagtagggaatatagttaaatcaattataattgaaatacaatctatagctgtagctatctataatatactctgaggctgaaattgtttttttaagaatgaagtggttctttatctcctcatagagatatatggttatgtgaaaatccaagtgaaaaaaacagcagtg

SEQ ID NO: 674570 - DNA, 1418 bp, Homo sapiens
cacctatctctacaaaaaatgaaagaaaaaaacaattagccgggcatcgtggcacatgcctgtaatcccagctactggtgaggttgaggttggattgctcgaggtcaggaggtggaggatgcagtgagccgagatcgcactactgcactccaggctgggtgacacagcaaggccctgtctcaaaaaaaagaaaacaaaaaaacactcaaatcccaaatttagcatagaatgcctggaaaataaagagaatatatcattattcagtaaattatatgccactagttaaaaaaaaaaacaaaaaatatatatatacatatatatgtatatatatatatatatagcttcagaaaccttaaatgatctgtagaaataacctgataaactagctacagaggctaaataggtagtacagtttacacaattaacagtgtgtatttacagcccccttgcatctaaaggaatcaaagaacattcactatataattacctggtatcccaccaccaccttcttctcttgttaaagattctgacttttaccattcattccatgtacttgttattcaacagaattctgactgacatttttaatatgcacgaatatattgtttctgtttatacataagtctgaaagcattcataccaaactgttaaaaaaccattaccccagcaaaccatgaggagcagacacagatgatgggggcctgcttgtttaactccatttaatttagtaatttaaatcttatttctgaatatacaataatttttcaataaaaagattaataaccacatacaatattgtaagccacaacatttccttctagatgacacaaagggatctaaattcatcccctgaataggtttcctacgttaaatatactagcataggccatagatccagacaccaaactccagataccacgtatcatttctaaacactgaactgctaacacaygcagggctgacccttgcccagagtggaccattggtcatggcagctgctacccatcaccactaccatcccaactcttccaactcgattgtcaactatggcttctagcaaatgtcttcacataaccccacagttctctccattcacttacatactaatcatcaggtcagaaaaggaaccaaaaagcccatttcagctttcaaactttattttcccctacaagaaaagaccacctactttttacttttcttccttcaaagtgttgtcacaacggttgtaatagttagaaactaaatgctcattagtagggaatatagttaaatcaattataattgaaatacaatctatagctgtagctatctataatatactctgaggctgaaattgtttttttaagaatgaagtggttctttatctcctcatagagatatatggttatgtgaaaatccaagtgaaaaaaacagcagtg

SEQ ID NO: 674571 - DNA, 613 bp, Homo sapiens
ctctgggctttccctaacacacctggattgtagtcgcctatttacctgtatcacccccagggtgtgtgctccaagagatcaggagccatgtcagaaatgttcaccattgtaatctgagcactggcacagttactagcctgtaatatccatcaaaagactggattaaaaaatgctataagggtatctcattatgaataggatccagcatatcattggtattcaaatgctgctaatagcacatacactttcgcagcagcaacgcccaacaagatgttcttgatgttacgtagtttattccatttatagactgggtaaaaatgaagtttgggaaaactaaaggatttatgaatgaatgtttgttaaatgggaaaggttaaaagatagcaggcaaaccaaattaggttgtctagcaatacgagattattatgtatttatacaaatccattttagggawgtatacgtatgttacctcagagttactctaagcacagagttcataggagaaagtgatggcaagagctcagattttgagcacccttctattcataccacaccaaagactttccatttttttacagccagtggcaaaaggcattctgcaggcactcagtga

SEQ ID NO: 674572 - DNA, 586 bp, Homo sapiens
attttcagacattgtcatcctcttgcaatgacggttgcaragattcttcacttagtacactcattgctgctctcctattttttatttccttgactatatcttctgtctttaaaaaaatctacgtaagcctaaatttcctattccattgagcataggcagtctcgtgagtccctactctataaaaggatgacattcacttccacactttctctttacctcttcttcctggcccaccttccaatctatgcaagtgctcaaggtcgatgtcatttttattatttataataaaattataattataattaaattataagtgttcttcaacctgggactttatgaatatagacaatacaaaggatttaatgataaagcttactatggaatgagaatcatagtttgcagtttaagtagcatgattttatgcaacaattatgcctaacatatattaatatgcttaaatggtattcttagattagctttcactctttcttcatttaaaactgataaaaactttagccagctagctttatctattgtatatttccctcttttcttgttgcttgagttccatcaaccctgtgcagtt

SEQ ID NO: 674573 - DNA, 728 bp, Homo sapiens
tttttccatttattaaaagctttaagtattccactatatgacaatcataatttcttatattttctaaaaaaaaaatttactgtcttggttgaaagtggaaataactacatattatgaatatagaaataagaaataaaaataatccaaaattatattaactagactaaaaatgggttgtgaatcctcatrtttgcaaacctgcagtatcttggcattttgttctatacagcatatcattggtttcctctgcattccatagttatttaaatcagaatatatgagattgaaaaaaagtttattgaaattgactgatcttacatgatgaaataatacttgtcaaatagtgcaagacatttatatctgtgctagagagaccacctgactctcataagtaatattttgttattttcaatgagcagaagaaaaataattacccctttgatatgtattctaaaaaagactttccgaccattttttctgtaagctataaatacattaatacattgctcagaccaatatgccgctgaaactctcagctatctcagcaaataaaaaattgagatttcacagacgtcatttcatctaattttctaagggaatcagtgcttatgtacccagggatccatgcaaatgatccatagagatgatatttctaataccttagaagtctgctactataagcctttttctccctattagtcatcttattgtcaccaagtcctagactt

SEQ ID NO: 674574 - DNA, 200 bp, Homo sapiens
ctaacggatcccttatgcgggktccaaaaaggagggaaaggaagaatatatgagacaggaatagtgctagagtagaaaaatacgatttcctgactatgtgttatctgccaggcactctgttacctgctttacatgtgtaacgtcacttaaccttcacagcctcaggaactgctattcatctaacagcagaggcaggaaaa

SEQ ID NO: 674575 - DNA, 1163 bp, Homo sapiens
ttatttatgccacaggatactcaggctacagacatttcaaaaaactgtcagtttaggatcatgcatctaaaggatatatttgtactttaataaaaggaaatacattattggaaatatactgctttgtattagcaatggactaaaacaagaccaggaaaatatatcctcattttgtgtataaagtagctttataaactgtccccattgattaatttatgatagatcttatagcagaacatcatgtagccattaaagagaatgaagtaaatccataattattagtatggaaagagatgcaagctatacagttatgtgaaaatggccaggtatacaagtgtacgcatgctatataatttttttcagaaaactgtaaatttgaacgactttcaaactgaaagataaaaaatagagagagagtatagatagatgatggcartcattattatattattactggcatcattaggcatcacacacacaaaactgttagtagcagttacctctacagagggtacagtagcaagatatttataatttattttgtacttatgtacaatttaaaatttctaattatatacatgtgttactttaaaaaaattatcagccaatatatgagcattgacattatatccactactgttttcctacatctctggaaacaaaaaaaaacactgtattaaaagcaaaaaccatagtatgtgttatgtttaaacgacttttagtattaccgatgaaaggtttaactggaccatcattttcgcagccagattcacattgccaatggctggattttttttttttttttttttttttgagacggagtctccctctgtcgcccaggctggactgcagtggtgctatctcggctcactgcaacatccacctcccaggttcaagagattctgctgtctcagccttcccagtagctgggactataggcatgtgccaccacgcgccacggatttttgtatttttagtagagacggggtttcactatgttggccaggatggtcttgatctcgtgatccgcccacctcagcctcccaaagtgctgggattacaggcatgagccactgcgcccggcccggcttggatttctaaatagatgtcttaaaaaaaaaatagagcaattctggtttgggcacgtaacttgatcaaagaaa

SEQ ID NO: 674576 - DNA, 647 bp, Homo sapiens
caagcagcaactctaataaaaattaactcaaaagcttgaaagtgaagctttgggcaaaagaattacaggcaaatggaaatttttttaaaaaagcaaagatcacaatatttagaacaaacaggttttattcatgrttggtaaaaaaatacgaagtaggacaaaggcactttgtatcaataaagaggtcaatataaataagtaactgtcataaatatttattaaatatgtatgcaaaattcagaaagcacaaaacttcagaagcattttttaaaagacaatttataatgctatttttcagctgatgggagatcaagtgaaaaaacataagtgagatttaggaggacataagcaattaatggaggataactaatatgtccatatttattcaaatactcatggaataatagccaaagtggacaaagtattgggcctcaatgaaaaccttagcatactccaacaagtaaaaatagtgtataatttagtccgtgatgacaatgtaataaaactggaaattatttctgggaagtgatattgcctgcaattgttaatttctacatttaaaaaaataattattctattattttgttcagtaaacattgtacttttttatagttaaaatatgaaaatacccaaatatatataaaaag

SEQ ID NO: 674577 - DNA, 647 bp, Homo sapiens
caagcagcaactctaataaaaattaactcaaaagcttgaaagtgaagctttgggcaaaagaattacaggcaaatggaaatttttttaaaaaagcaaagatcacaatatttagaacaaacaggttttattcatgattggtaaaaaaatacgaagtaggacaaaggcactttgtatcaataaagaggtcaatataaataagtaactgtcataaatatttattaaatatgtatgcaaaattcagaaagcacaaaacttcagaagcattttttaaaagacaatttataatgctatttttcagctgatgggagatcaagtgaaaaaacataagtgagatttaggargacataagcaattaatggaggataactaatatgtccatatttattcaaatactcatggaataatagccaaagtggacaaagtattgggcctcaatgaaaaccttagcatactccaacaagtaaaaatagtgtataatttagtccgtgatgacaatgtaataaaactggaaattatttctgggaagtgatattgcctgcaattgttaatttctacatttaaaaaaataattattctattattttgttcagtaaacattgtacttttttatagttaaaatatgaaaatacccaaatatatataaaaag

SEQ ID NO: 674578 - DNA, 647 bp, Homo sapiens
caagcagcaactctaataaaaattaactcaaaagcttgaaagtgaagctttgggcaaaagaattacaggcaaatggaaatttttttaaaaaagcaaagatcacaatatttagaacaaacaggttttattcatgattggtaaaaaaatacgaagtaggacaaaggcactttgtatcaataaagaggtcaatataaataagtaactgtcataaatatttattaaatatgtatgcaaaattcagaaagcacaaaacttcagaagcattttttaaaagacaatttataatgctatttttcagctgatgggagatcaagtgaaaaaacataagtgagatttaggaggacataagcaattaatggaggataactaatatgtccatatttattcaaatactcatggaataatagccaaagtggacaaagtattgggcctcaatgaaaaccttagcatactccaacaagtaaaaatagtgtataatttagtccgtgatgacaatgtaataaaactggaaattatttctgggaagtgatattgcctgcaattgttaatttctacatttwaaaaaataattattctattattttgttcagtaaacattgtacttttttatagttaaaatatgaaaatacccaaatatatataaaaag

SEQ ID NO: 674579 - DNA, 598 bp, Homo sapiens
taaaaatctagatttctttttccatactgatacaggattctatactgttatattggactatctatgcttgtgatatttacctttcttcattactattgtttatgttatagccttgatatctgggactgtaagtactttgttcttttttgagatgttagctgttcttagcattttgcattgtcatctaarttctagaatctacatgtcaatggataaagaagcctcttggaactgtgattgatactgtaatcaacagatgaatttaggaaaatggacatatttataaatttaagttttcaatttatgaacacattctatctctttatttatttaagtttcattcaatattacctaataaagttatatagttctatggagattttgcatatatttgattaaacttatctaaagtatttgatgttttggtgctattcaaaggggtatcttttttatattttaatcttctatttattgtataaagaaatacaattttaaaaatattggccttatatcagaaatcaaacaaaactgttatattaattctaataattaagtagaaaattatcttggacatttcataaacagaaatgcatagtgt

SEQ ID NO: 674580 - DNA, 598 bp, Homo sapiens
taaaaatctagatttctttttccatactgatacaggattctatactgttatattggactatctatgcttgtgatatttacctttcttcattactattgtttatgttatagccttgatatctgggactgtaagtactttgttcttttttgagatgttagctgttcttagcattttgcattgtcatctaagttctagaatctacatgtcaatrgataaagaagcctcttggaactgtgattgatactgtaatcaacagatgaatttaggaaaatggacatatttataaatttaagttttcaatttatgaacacattctatctctttatttatttaagtttcattcaatattacctaataaagttatatagttctatggagattttgcatatatttgattaaacttatctaaagtatttgatgttttggtgctattcaaaggggtatcttttttatattttaatcttctatttattgtataaagaaatacaattttaaaaatattggccttatatcagaaatcaaacaaaactgttatattaattctaataattaagtagaaaattatcttggacatttcataaacagaaatgcatagtgt

SEQ ID NO: 674581 - DNA, 635 bp, Homo sapiens
gaaaggggatcttcctcacctgaacatcgggccactgcttctgcttattccccgtcctcagcgaggggctcctcccacaactcagtcagcgccggcctcctgagtcaagtggggccagattcctccagggcgtccgctggacaygctcaatgcgttatgaaaatgcccctttcttaaggagagcactgagcaggctggctgaggctccacatagacagtggtttgcaagtgctgcccagagtcaagagcaacatctaagcccttagacacagaggtctcatcatccctgggaggagcctgggctggcgtccatctgtccccatggctggtgcccactcacagatggatgtaaagccagctccggtacccagatccccatgactcatatgggcgtccacaccccacagccggtctccctgtcaggccctgctgagctagcaaggaagtccagcactttggagggtcgcagaggacaaatctttgtcttcagaaagtttatcagggaaaacactgcatttgggaatagaggtgggacccagggagggtaacagaggaggaaccggaccctgcgccagccccgaagtggcaatggggagggcagtagggagcagaggagctcagctacatgcagcaca

SEQ ID NO: 674582 - DNA, 1965 bp, Homo sapiens
aaattaactgaaaatctttggccttggttatcatatccacaaaatggtctgcatcatgccaatctctcagggttattgcaaaatgaagaagcgacactatgcacatctcctctctcaaaaatgcaaaagtcatgcataacaaagacaggcccttaatgtcgtcattgttttaaaaaagcaaataacctatagaggaattaacacttaaatccattatgcacccttcgtcagctgacatagcagacacaaatggctgatgaaaacagagcctggccagtgctggtgggaggagtgtgattcagatagccccaggaaggacagacagacaggagagcctcctgaccagggaaggacagacagacaggagaccctcctgtccccaagaaggatagacagacagctgctcagggaaggacagacagacaggagaccctcctgcctctgagaaggatagacagacagctgctcagggaaggagagacagacagacaggagagcctcctgcccccggaaaggaaaggcagacagctgctcagagaagaacagacagacagacagacagacaggagatcatcctgcccccgggaaggacagacagacagacacacaggagaccctcctgcccccggaaaggacaggcagacagctgctcagagaagaacagacagacagacagacaggagatcatcctgcccccgggaaggacagacagacagacagacacacaggagacccccctgcctgtttgctcccatctgctctgcctccccccccagacccacacgcttcgccacacctttgccaacagtacaaagagcatgcacagcacrttcattcaaagaaaatgagacaaaaggaatcaaagggcacttttgcaaatacaccagaggaaagacgcgcttcagatgaaagagcaaaagtcctccaagtcagggacgacagaggctggctctaaaacgtcggtgcttctaaggctctggtttgattaggaatcacctgggggaggaaccaatgtaataatttctatgttaggaagtcaggcagaggcggcaaggagagcaatggagtggggctcagtggcattagtctgggcaggctggaagcccgtctagtggaactagcacagcacacagacccagcccctgtctttgggcttgtcccttgctgaccagaggatttttggtcaccttgtccttgagcctgaaatttaaaagaaagatgaagtcttcccacgtgcccctcccaaactcgctcctcatcccattaaaaaatacccgctgaaagggctgcgggcattccagggtgctgtgatgtgtggcagctccagagcaaggggagacggtggctcttctcttctcggaatggatggggccacccctcggtcattagcccccattctgggtaccacactcaggagatgaacatacctgagctggtgcaaggactgctctgagaggtctccacaccctgccatgagaggagagatccagggaactgagcatcctgttcctggaataaagacttctttttttggaagggtggtggggtgaaactcattgcatttaagataccaggtgggagaagaacaaaagtttttttagttcactgccctgaacccattttccagaccggaggactcttgatgctgtctgccctgcttgcttcgtggggtgaccacatctcaaaggcagttctggatacataagcaccatgagctgccaagtactatgcagacataaaggacattcccatccaaaatgtgagcatccacaggtcagctggccgagcagcaccagcctgcgtggttctgagcagtgtggagcatcccgctttgtatcattcacaaaattacaagaagaaagtagggaggaaggctgtcacttgaaacaagtaaatccttagaagatgctggagatgtacagattttgtctatcccacagggctgaaatcatccattaattttca

SEQ ID NO: 674583 - DNA, 1965 bp, Homo sapiens
aaattaactgaaaatctttggccttggttatcatatccacaaaatggtctgcatcatgccaatctctcagggttattgcaaaatgaagaagcgacactatgcacatctcctctctcaaaaatgcaaaagtcatgcataacaaagacaggcccttaatgtcgtcattgttttaaaaaagcaaataacctatagaggaattaacacttaaatccattatgcacccttcgtcagctgacatagcagacacaaatggctgatgaaaacagagcctggccagtgctggtgggaggagtgtgattcagatagccccaggaaggacagacagacaggagagcctcctgaccagggaaggacagacagacaggagaccctcctgtccccaagaaggatagacagacagctgctcagggaaggacagacagacaggagaccctcctgcctctgagaaggatagacagacagctgctcagggaaggagagacagacagacaggagagcctcctgcccccggaaaggaaaggcagacagctgctcagagaagaacagacagacagacagacagacaggagatcatcctgcccccgggaaggacagacagacagacacacaggagaccctcctgcccccggaaaggacaggcagacagctgctcagagaagaacagacagacagacagacaggagatcatcctgcccccgggaaggacagacagacagacagacacacaggagacccccctgcctgtttgctcccatctgctctgcctccccccccagacccacacgcttcgccacacctttgccaacagtacaaagagcatgcacagcacattcattcaaagaaaatgagacaaaaggaatcaaagggcacttttgcaaatacaccagaggaaagacgcgcttcagatgaaagagcaaaagtcckccaagtcagggacgacagaggctggctctaaaacgtcggtgcttctaaggctctggtttgattaggaatcacctgggggaggaaccaatgtaataatttctatgttaggaagtcaggcagaggcggcaaggagagcaatggagtggggctcagtggcattagtctgggcaggctggaagcccgtctagtggaactagcacagcacacagacccagcccctgtctttgggcttgtcccttgctgaccagaggatttttggtcaccttgtccttgagcctgaaatttaaaagaaagatgaagtcttcccacgtgcccctcccaaactcgctcctcatcccattaaaaaatacccgctgaaagggctgcgggcattccagggtgctgtgatgtgtggcagctccagagcaaggggagacggtggctcttctcttctcggaatggatggggccacccctcggtcattagcccccattctgggtaccacactcaggagatgaacatacctgagctggtgcaaggactgctctgagaggtctccacaccctgccatgagaggagagatccagggaactgagcatcctgttcctggaataaagacttctttttttggaagggtggtggggtgaaactcattgcatttaagataccaggtgggagaagaacaaaagtttttttagttcactgccctgaacccattttccagaccggaggactcttgatgctgtctgccctgcttgcttcgtggggtgaccacatctcaaaggcagttctggatacataagcaccatgagctgccaagtactatgcagacataaaggacattcccatccaaaatgtgagcatccacaggtcagctggccgagcagcaccagcctgcgtggttctgagcagtgtggagcatcccgctttgtatcattcacaaaattacaagaagaaagtagggaggaaggctgtcacttgaaacaagtaaatccttagaagatgctggagatgtacagattttgtctatcccacagggctgaaatcatccattaattttca

SEQ ID NO: 674584 - DNA, 587 bp, Homo sapiens
acatggagataattgttcaagctgaacatactcagcttcattattccttactcttttgtccccatttttctctgtttttcggagaccagggccgtagtggccaggctgtgttaggaccccagtcctgctgctttcaatagccaaacctcacctctgctgcctgtcaggtggaaaaggatcaacgctacctcgtcagggcgtttacaactgatacggctcgatgtaacagccttcacaaggagttggcacttattaacaagaaactgggtcttatcctaagtagataagtaatcaaggtggaatttcaggcaatgtggcaagccaggaggcatcagtactttgggaccttttagacaggatactctgtgtgcatgctccttgccacgttcctgaatggcaagatgcccgtgaacgctgagctcctgggccggagtccgagactcagcaccgttcctttgcaatccatgggaaggaggctacagacgcggcacctgctctgggaaacgactccccygagatccagctctaagctctccaaatctatcacctttgtttatggttgaaagactttcaattctggttaataa

SEQ ID NO: 674585 - DNA, 598 bp, Homo sapiens
taggtctttagataataacacttacaaccaattgccaatgaaaaaatctttgaatccgtctctaacctggaagtccctgtgtcagatgtcctgcctttctggactgaaccaatgttcaatgtacatgtattgattgatgtcttttgtctccctaaaatgtataaaactgagctgtagcctgaccaccttgggcaygtgtcttcaggacttcctgaggctatgtcatgggcatgtgcttaaccttggccaaataaacttctaaattgattgagacttgtctcttcaagtacattaaagatggtctgctgtttgctgtctccatcatctctggtgagaagtctgccatcctttatattcttgtttctctttcttctcctcctggatttttttccctaactttttattttgaaatcattaatacttacagaagagttacaaaatactaaagagagttttcttatgtccttcacccagcttcccctaacgttcacatcttacatttctacatcataattatcaaacacaggaaattaacatcgatataatactatcaattcatctagctacagaatttgaattttaccattttttttcccat

SEQ ID NO: 674586 - DNA, 620 bp, Homo sapiens
tccctctcactacagtcagccttagtccatttgtttcgttttgatccttattgtatatgtgtgtttagaacctccagcggtgggaagcattcattcaaaataaattattgagtgcacagcagtaggtacttcaggatataaaaacaaagtcatctgtggtctctccctctatgagtttatactctacttgagggaaaaaatatataagtggagctgaactatattaaaagacaaaataatcgaaatgacactaggcagtatatgtctaaggagcargggagaggtgtgggaccaggacactaggagctcagaggaggaggggtggtcagggagggctttaaggaggagaggtggcaagctctgatggaatatcaatagacaagaactcagggagcggggctccagtaaggaggcacagggtgccttcatctttgccgacataaccacagttcctgccttttagaatttgggcaaaaagaagtaaagaagaataaaagaagagtgagaaaaagaactggagaatgggatgtgaggcaaggaaaagggaaaaaagacaaggtggagcggggagcacccattcactgtggagggacatgtacccgttcagaggtagagaagca

SEQ ID NO: 674587 - DNA, 3215 bp, Homo sapiens
ctcaaagcaaaaatcttagagtcaatcctacttattttctttgtcaagaattgcacatcccacctttcagcgagtctttctgcttgctctacattcagaatctatccaaagttagtcactctcttagtctctcccagaaacagatcccagtaaaaacattcaatcagaagtaatttgggatgtagagaaaaactatattctttttcttccctcagccttttgatgtgtttatttcaatgctatttttacaatgttacttactgaatacattaattaaaattgtaatctgccactattactgtgtatcctgccttactttattttcttcacaaaatatataacttttcaacacctgtctatattttatttcttttgtgtcatcctacatctcactgtaatctttacaaaggcaaggatttttttctttaatatcctaaatgtagatgtttgtctctagtagattcaatggtgcctcccaaaatatgataaatatgcacatatctttccatatgctagcccacagaaactgtagatgtgacctaatttttttgtatatattaataaggatcttgagatgacgtcatactggatgatcctagtgcaccctaaatccaataagtgttcttatgaaagacagaagaggagaagatacaggaaatagaagaaggctacttgaggatggaagcagagattggagttatgcagctacaaaccaaagaatgccttgagccaccagcagctgaaagaggtaaagtaggatccacccataaacacttgagaaggaaagtgggcctatctatacctttatttcagatttctgccctacagaactgtaagagaatatatttcttttgctttaaacatttaggtttgtggtaatttgtcataacagatccagcaaactcatatactggcactgagcagatattcaataagaattgattatgaattatagtcattatgatagtgcggcattgactcagagatgaacaatttgttcactggactatagcaggaaattcaaaaattcatggtagactttcgatattttacatatgaattgtcgtatcacccagaaaaatgaataactattcataaaatagcwgtgatacatttgattaacatatagaaaaattgtaaattgtattctatcatcacattaacttcaaatgtgaaagacatcttgtatcacttttaaagaaaatataaaatatattttatttagtaaaattgaatttgtagaacgatgactttttttttactttactgcttaatacttgagaaattctcctctttgatgaggctattagaaaacaggaactctaacaattatatagtgggaagataaattcatacaacgactttggaaagctacttgacaatgtaaggatgaaagtgcccaaagttgtaaaatttccctgctctatgtgtatcctatgaaaattctaatatatataaacaacaaaacaataagtatttattgtagctttgtttttaacatttacaatggtaaatataaaaatgccaatatttcctgatatgaaaattgatagctttatattatatatataatgaaatcccatatagaaattaaacaaaaacagatacccaagtatcagctggaatggttctcaaaaatatcatagtgagattataaagcatgtgttgaaataatacagagaaaacaataacatcttatttaaatttgaagatacaaacactactgtatgcggtataaaatattctatacacagacctgtacttaaaaatagagaaatatacaaggggatgctaaacaattttagcctgtagttatcccttgtagaatttcttataatcttgtttctggttatgttgctgtatcaattatttttcagttttgggtatgtgtgaaatatttcataaaaggaagttggacgttttaataatacattgactttaagaggaggaagaataggtgattggggtattttgttatataccaacacatgactgaaataatcatctattctaattctgttcagttcagtggaaagtctttgaagcttttttaacagagttgcactttgtcatatctttgagaacattgtgttagattaagtggaacaggaatgcttagagggaaggagattaaaataatgtgttgtatggatatttgaggtgacatacaatagaactggaaaataaagaaacttcatgaaaaatagtataaaaagagacataaatgacttaccaattgactgctgtgtttgatagatgggaattgtagtcgtaacattggatgaaataggaaagacagactagtagagctctttggaggcaaattctataagttctttttacattttgagtgaaagttttcacttttaaatgaaatgcatatggataaaaaataaaggtaaatatagttattatgaaattgtcaagataaaatgagagttgatgcataaaaatgaatagactggaaaaagggaactttttaaatataaaaaaaattgcctcttttctgacagtattctttcttcttaaacttcatgattgttcctggaaattaaagtgaaaaaaaactatcataaaactatgactctatcatactgtaacacttcagggcccatattattatacctcctctgtccatctcgcatgactgtttaaaatggttctgtttgatacactgacactcaatttctttttatatggaatgtaatttgggagattctctaaacaatctgtataatggcagacatggagtacaactgaaattagaaatattctgttgtagtttccattctttcttaaaggttttaacattttgttatgaacatgacaagccttatttttttttccacacatagaaggaacacgaattataaatagaacaaaacactgtgaaatactgcaaatgtggaataattatttgatctcatgcacacacctcggtaatttaaattaaattctataagtaaatgactaaatattttaaaattaactactttaaattaagatgtatttagaaataattttaatgttattgaaatttttttaaaaaaactattgtaatataagaaatcatgacataatgcaaatactacatattttcagaaaatttggtaataaatatcatctcccaaaaaaccatcttagtcattgcataaaattctacaaatgatatctgattttaatttagaggaaagtacatgaactgaaagtcccga

SEQ ID NO: 674588 - DNA, 1457 bp, Homo sapiens
cctcacagggacgctgaagatttgttatacacatgcagggacattaatagcatttccttagaaagaggtatgatataagatagcttgatgcctgtagcaccctgagacatgattgctcatattgcagccaagaaaaataggaaaggctgaagcagcaaagggcaaaggggcaaaaggccaaagccatgcaggccaagtttgtgcttttttaaaggctttcttaggaacctatcttatgatatccatttcaatgtcacaaaattcacatggccacaccaagaaacatggatattttactttccaaataaaaaactaggcaagagaagtttacatttgcatagcctatcaatagtgtctgccaagatatttccattttttagtgtatcagaaaattgggcacacatgactaacgtacttttttcattttaaatagaaacaaatgtgtgtgcatatatatatataaaatatacatatttatatgtgtgtaaatatatgtgcatgtgtgtgtgtgtgtgtrtgtaaaaccaatcaacttctgctgaaaaacttctgtaaaactcatttttttttttccagtatgtttcctctgaagacaatcttcacatctagggaatattaatggtaataataacagcattgatttattgagagttttcctatgtaacaattactatacaagtatgccatttaatctatttctctagtttcaatattaatattggtacttaataaacgagtaaactgaaaataataagtttaaaatcttttttcacagctagtcagcaatacaactgggatttgatatcagattcatacgattccgaagaccctgaccaccaaatgcaaaaggtacatggcaacagctgattgcaatgagagaaaaacaactaataaggcaacaagcaggatactaagatattttccaaaatgaatagcactgattctgtgaggaatgaacattgccaaacaagtgttttgttttgtttttcaactcctctaaaaaaattcacatatatgcatgccactttcctgaaaaatatctgcctcataattgccataagaaacggtatggacaactcttaaacattctgaaagtagtcagggatgggggaaagcatttgctgttttagtctgttcctggtcttataacaaataccacaaactgggtaatttatgattacagaaatgtatttctgaaagttcaggagttgggaagttcaagattatggcaccaacatattcattgtctgatgagggcctgtttcacagatgtcattttgcatgacttaatcacatggtaggaaaagcaaagggacaaaatggacaaatgccatgttgtcacatggcagaagaaatggaagagccaggaagctctcagaagcttccttaattaggatattaatctcattcatgagtgcatagccatcatgacttaattgcctccaaaggccccactt

SEQ ID NO: 674589 - DNA, 1457 bp, Homo sapiens
cctcacagggacgctgaagatttgttatacacatgcagggacattaatagcatttccttagaaagaggtatgatataagatagcttgatgcctgtagcaccctgagacatgattgctcatattgcagccaagaaaaataggaaaggctgaagcagcaaagggcaaaggggcaaaaggccaaagccatgcaggccaagtttgtgcttttttaaaggctttcttaggaacctatcttatgatatccatttcaatgtcacaaaattcacatggccacaccaagaaacatggatattttactttccaaataaaaaactaggcaagagaagtttacatttgcatagcctatcaatagtgtctgccaagatatttccattttttagtgtatcagaaaattgggcacacatgactaacgtacttttttcattttaaatagaaacaaatgtgtgtgcatatatatatataaaatatacatatttatatgtgtgtaaatatatgtgcatgtgtgtgtgtgtgtgtatgtaaaaccaatcaacttctgctgaaaaacttctgtaaaactcatttttttttttccagtatgtttcctctgaagacaatcttcacatctagggaatattaatggtaataataacagcattgatttattgagagttttcctatgtaacarttactatacaagtatgccatttaatctatttctctagtttcaatattaatattggtacttaataaacgagtaaactgaaaataataagtttaaaatcttttttcacagctagtcagcaatacaactgggatttgatatcagattcatacgattccgaagaccctgaccaccaaatgcaaaaggtacatggcaacagctgattgcaatgagagaaaaacaactaataaggcaacaagcaggatactaagatattttccaaaatgaatagcactgattctgtgaggaatgaacattgccaaacaagtgttttgttttgtttttcaactcctctaaaaaaattcacatatatgcatgccactttcctgaaaaatatctgcctcataattgccataagaaacggtatggacaactcttaaacattctgaaagtagtcagggatgggggaaagcatttgctgttttagtctgttcctggtcttataacaaataccacaaactgggtaatttatgattacagaaatgtatttctgaaagttcaggagttgggaagttcaagattatggcaccaacatattcattgtctgatgagggcctgtttcacagatgtcattttgcatgacttaatcacatggtaggaaaagcaaagggacaaaatggacaaatgccatgttgtcacatggcagaagaaatggaagagccaggaagctctcagaagcttccttaattaggatattaatctcattcatgagtgcatagccatcatgacttaattgcctccaaaggccccactt

SEQ ID NO: 674590 - DNA, 1118 bp, Homo sapiens
agattagttgaagaggtaaattgaacatggactatatgtcagacttttttttccaaattatattcttaaatatatagtaaaacatatgctagagacagttttttaataacaaacaatatttgaattgagatcctgaagaaaaataaattaactgtgtaaaaatgtattactaaatatctgcattttctagagatgtatccttaagtatgtaggtataaaattacactctgagatatatttttaaaataatttggcaagaagagaacagggataccttaagcagaaacaacaaaattatgataattgttgaatatgtgtgatggttgtatgttaatgtattgattattttgtgtgggtatgaaaacatgataataaaatcaaattacaaaaaaataaaaaatacctcttgcttttttagcagcttattacattgtttataacagtgtctacagcgctatgattggtcagagccagagactataacatttaataaaacgagtcctctagaagctcatgggagttcatttacggcagcaaagacctatattaaatggactgaatatttaaggagtaattatgttgagtaatgtgtttatttatagttttaattatacattatcttttttggttatctttaaaatatattaagcttatgcaaataggatatgcrtcataacccaggatctattatctgaattgcttatatacttataataacataactttaaaagaaagaatcaaaccatattgctagcttacaggttggatctttctagacaatagttatttacctgaatgtttatttttgttttgcatcttcatcagttaaaaccaacagttacaatacaaatgaaagttaaaaaataataatattattaatgtgaaatttcaatgtgcttagcaataaataatgggaataagaattatccaggatgtactaaatgctacaagaattatataagtctaatgaacatgatgcttttgaacttaagtaaattctatgtgcttaactatttttattgtttatagatttaggacttctgaatgcattcttttttgctgttatgggatattatgaattcaccttagtagacttttgcttacaggacataaaatta

SEQ ID NO: 674591 - DNA, 1118 bp, Homo sapiens
agattagttgaagaggtaaattgaacatggactatatgtcagacttttttttccaaattatattcttaaatatatagtaaaacatatgctagagacagttttttaataacaaacaatatttgaattgagatcctgaagaaaaataaattaactgtgtaaaaatgtattactaaatatctgcattttctagagatgtatccttaagtatgtaggtataaaattacactctgagatatatttttaaaataatttggcaagaagagaacagggataccttaagcagaaacaacaaaattatgataattgttgaatatgtgtgatggttgtatgttaatgtattgattattttgtgtgggtatgaaaacatgataataaaatcaaattacaaaaaaataaaaaatacctcttgcttttttagcagcttattacattgtttataacagtgtctacagcgctatgattggtcagagccagagactataacatttaataaaacgagtcctctagaagctcatgggagttcatttacggcagcaaagacctatattaaatggactgaatatttaaggagtaattatgttgagtaatgtgtttatttatagttttaattatacattatcttttttggttatctttaaaatatattaagcttatgcaaataggatatgcatcataacccaggatctattatctgaattgcttatatacttataataacataactttaaaagaaagaatcaaaccatattgctagcttacaggttggatctttctagacaatagttatttacctgaatgtttatttttgttttgcatcttcatcagttaaaaccaacagttacaatacaaatgaaagttaaaaaataataatattattaatgtgaaatttcaatgtgcttagcaataaataatgggaataagaattatccaggatgtactaaatgctacaagaattatataagtctaatgaacatgatgcttttgaacttaagtaaattctatgtgcttaactatttttattgtttatagatttaggacttctgaatgcattmttttttgctgttatgggatattatgaattcaccttagtagacttttgcttacaggacataaaatta

SEQ ID NO: 674592 - DNA, 1363 bp, Homo sapiens
ccacaagaacagcatgggataaaccttccccatgattaaattctctctacctgaccccattcttcacatggaattattacaattcaaggtgagatttgggtggggatacagccaaatcacatcatttgtggagagctgtgattctgcctaccacaagtaagatgtacaaagcatggaaggagctacagccagaaacaattataccattgggaatttctagcagaataaatagcagttattaactgataagttaatagattaagtaaacctaaataattgccttcattagcagcgaggcttttgatggtccatgtatcacagatatttaaacacaaatacatttttctcatttattccaataacaaagtgttttttggtttgttttgttttgtttttgaaagtttggtatgagagagaaagagatgagctgatttgactactccaggctagaggatatgtagctgagagtctatggctgagtggaggaaaaaaaaaaatcacaagccctgtccaggataacagagagagaaagctgtttctgttgagatttgatggcccccatcacaccaaatttgggcttctagctagcctcagttcttcagataactgaccttccttctttcctccctcttgtaatagtctttgtgtattagaagtaccttgaaatgctgggtcagaaaatgtggcacgaaagagaaaagctggctcactccacatcttgacctgatcatttcctgaacatgattgaggtggatgactctttgctcctctttggctgacctgcaggaataacattgggaataagcaaatctcctttggactccagagggtggtggtcaggaagtgggccattgagaacctaggtggaaatgcaggccagattattggagtagtttgctttataatgttaaaatatttatacacatgttatgtgggcctctatttccactcttatcttagagcccacacrtattatggagggtctagcagtgtttgtggagtttttggtactatacctttttcaagataaagtaaaaaacatttatggataatttaattgttccctatgtagattccagtgccaaattcctctcttagacactgtttctagtataacatgttaatatgtgacccctgtttcacttacagatttttagagatctatcccaggttacttaattcaactccaagacatacttttcttttaaatgcagggaataaagggtcagttacttagttactccggttttatttaatcctactgtcatctgacaatatggtactgatactatttcctatttctagatggttgctagaaatatactgtaatatttattcttgatatatgtttgttactttaacg

SEQ ID NO: 674593 - DNA, 1363 bp, Homo sapiens
ccacaagaacagcatgggataaaccttccccatgattaaattctctctacctgaccccattcttcacatggaattattacaattcaaggtgagatttgggtggggatacagccaaatcacatcatttgtggagagctgtgattctgcctaccacaagtaagatgtacaaagcatggaaggagctacagccagaaacaattataccattgggaatttctagcagaataaatagcagttattaactgataagttaatagattaagtaaacctaaataattgccttcattagcagcgaggcttttgatggtccatgtatcacagatatttaaacacaaatacatttttctcatttattccaataacaaagtgttttttggtttgttttgttttgtttttgaaagtttggtatgagagagaaagagatgagctgatttgactactccaggctagaggatatgtagctgagagtctatggctgagtggaggaaaaaaaaaaatcacaagccctgtccaggataacagagagagaaagctgtttctgttgagatttgatggcccccatcacaccaaatttgggcttctagctagcctcagttcttcagataactgaccttccttctttcctccctcttgtaatagtctttgtgtattagaagtaccttgaaatgctgggtcagaaaatgtggcacgaaagagaaaagctggctcactccacatcttgacctgatcatttcctgaacatgattgaggtggatgactctttgctcctctttggctgacctgcaggaataacattgggaataagcaaatctcctttggactccagagggtggtggtcaggaagtgggccattgagaacctaggtggaaatgcaggccagattattggagtagtttgctttataatgttaaaatatttatacacatgttatgtgggcctctatttccactcttatcttagagcccacacgtattatggagggtctagcagtgtttgtggagtttttggtactatacctttttcaagataaagtaaaaaacatttatggataatttaattgttccctatgtagattccagtgccaaattcctctcttagacactgtttctagtataacatgttaatatgtgacccctgtttcacttacagatttttagagatctatcccaggttacttaattcaactccaagacatacttttcttttaaatgcagggaataaagggtcagttacttagttactccggttttatttaatcctactgtcatctgacaatatggtactgatactatttcctayttctagatggttgctagaaatatactgtaatatttattcttgatatatgtttgttactttaacg

SEQ ID NO: 674594 - DNA, 1637 bp, Homo sapiens
gaaagaaaagaaaggggacatgacagcccagcagtagggtgaagagggcctctccgtgggtgccgctggcttgagctgctgtaagtggctgtgccgggaacagaggatctgtataggagaatggggaagggagtgctggaaccgggggtgggcaggagcagcagtctggagaccagaatgacctagggtttcctctcatgctcccattcccagtgtttcacgtgtgtaaagtagcaagcatgcatatactgcttagaggcatctacacttaacatactacactcgtatacaacacttgcatcgtacaaagtacacatagtaggtgtggcatgtaataagttaccctcctatattttcttctaaaagatttttaaatatttgcatctcaaatttaagtcctttgtccatttagatctggcctttgtgtgatagcgatccatttttgggatagagatccattctgatattttcccatatggataccaactgctcataccatggattatatagaccctttctgactgttctgtaatgttagccagggcatacatcaagatttcacacaagcatacactttcacaatagcaattcctgctgtggtaattataacttcacagtaaatctggtacgtgatagactcacataagctccacctcccaccttcacacactttagtcttctatgggattgtcttagttatactgggcccttttatcttccgtataagctttggaagcagtttagtgacaatggtactcttgtctttttcttgattttaaaaggagtgatttcgatatttttaatcacaaaacatgataggtgctgtaggttatttgttgactccttttatcaggttaaggaaattaccctttattcataggtggaaatatcatgaattatttaatttttgtaaaataattttataggccttttgagacaatcatataacttttgtctttaattcattgataaggagatgatttcagtagattttctaacattggactaaatttgtattactaaccgagcttgttcatggtttttatactttgctaggtatacttcctagtattttgtttacaatatttgtctctgtgtgcatggatgaggtacacaatagcaaggttaccctagtctcaaatgaattgaaraatggcctcttttttctcccctcgcaaataattagtgtaacattggaactacttgtgacatcatctgggcatcctgttttctttgtagaattattaattatcaactcaattactttaatggtatgatttccatccagattttctaattatttgagtcaactttaataagttaaatgtatccaaaaatttgttaatctcacttatttacaaatgcatatatttaattgtcttattacttaatgaaatagatcataaatataaaagtgtgtatgtacagcttaagaagaatataaaatgagcatatgtgtccttccttcaggttatgaaatagaatatttccagtatcttagaaactcccattgcccttctacaatgccactcactccttccacaagaggtaaccactatccctaacttcctgttaatcattccattgcttgtcattacagacttgtatattgtttagttttgcacatttgacttttt

SEQ ID NO: 674595 - DNA, 2096 bp, Homo sapiens
ttttaggaaaaagtaaaatgtaaattaactggtaaagatgagcttttcaatctataaggcatagacacttttccttggtggatttgaaaaggttcttagaaatctgaaaataagatagtttttctataataaatggtaaaaaacactttcacatcttaaccttatcatagtatcacaatgctggaatgtttttactgggaaataagtaagctaattcaattataaattgcagtagaggaaaggatgaaggttaaaaaacactatctattcaaatccttagtcatgaggttgaattcattgaatcagagtgtgaatatatatctatatttgagacagaatgtgtatgtatgtgtgtgagtgtgagtgtgtgtgtacagtcattagacatttgcctcatggacagtggaggaaaacatttgctgagctgctttcctaccttaaagatttacaactgcactgttttcaagatatactttttatatctcaaataatgtaatatattatgtttagttgttgatataacaagatatctgaataccccataattgaaattatacctggaaataaatacttgaaatacttgcttcagtgacatttgtggaagtatacttatttaagttcaaattataggtatattgaacaaaatgatattggattcttcactggctgcatacttctgaaacttgtaaataatttgaaattagtttccaagaacagaaagacaaatattagataggaaataccaaattcttaagattcatacatataaaagtgaaataaaaatcaaacttaatcttatcatgaattttctactgtggcttaattttagaacttgttataaaaatagaaatgctattaatttaattacatttattaaaatctaaaaataggtgattatagctaggacattgacaagtgtaactatacatgagtaaatataactgaggatagcaacacatgaaatatatcataaaattgaattattctataaatagtattaagtctgtattacttggaacttgattccacttagaatgtccctgcttttatttatttatttatttttgtaaacaaaatgagcaagaggttattacacttcattcactgcgaaaaggtaacactacatcaaagataactcacatacttgcagaaatatggaaggtagttctttcttttttttgttaagaaatagggtctcactatgttgcccaggttgtagtgcagtgactattcaaaggggtcatcccactactgataagcagaggagttttattctgctcaatttttgagttgaccactccttaggcaacctggtggtcctctgctccctggaagctaacatattgatgccaaacttagtgcagacacttcctcagcatagtgcatacaacccagaamtcctgggctcaagtgttcctcccgcctcagcatcctgagtagctgggacaacaggtgtgtgtcacctggctgaaaggtatttttaaatacaaatgttgtccaggagtgacagaagctggagaattggactacttgatggaggctttgtacaagctttgaacaataataacaacaaaattgaaatgccaaaaatattgtttagcagttaaccaccaataaaaggaagccagccatttcacacagaggattttgttaattgattgcgtgattcaaggaaataatattattaggtgtgtattagtccattattgcattgctataaagaaatacctgagattgggtaatttataaagaaaagaggtttaactgactcacagttctgcatgctgtacagaaagaatgttgcatctgctgggcatgtggggaggcctcatgaaatgtataaccatggtgggaaaatgaagagggagccggtgcttcatatagctgggagcaggaagaaaagtgagaggtgaggaggtgctacacccttttaacaaccagatttcataataactcactcactcactatcataagaatagcaccaaggaaatggtattaaaccattaaaaagaaaccactccacaatccaataacctcccatcaggccccacctccaacactgggtatttcaatttgacatgagatttggttgggg

SEQ ID NO: 674596 - DNA, 2096 bp, Homo sapiens
ttttaggaaaaagtaaaatgtaaattaactggtaaagatgagcttttcaatctataaggcatagacacttttccttggtggatttgaaaaggttcttagaaatctgaaaataagatagtttttctataataaatggtaaaaaacactttcacatcttaaccttatcatagtatcacaatgctggaatgtttttactgggaaataagtaagctaattcaattataaattgcagtagaggaaaggatgaaggttaaaaaacactatctattcaaatccttagtcatgaggttgaattcattgaatcagagtgtgaatatatatctatatttgagacagaatgtgtatgtatgtgtgtgagtgtgagtgtgtgtgtacagtcattagacatttgcctcatggacagtggaggaaaacatttgctgagctgctttcctaccttaaagatttacaactgcactgttttcaagatatactttttatatctcaaataatgtaatatattatgtttagttgttgatataacaagatatctgaataccccataattgaaattatacctggaaataaatacttgaaatacttgcttcagtgacatttgtggaagtatacttatttaagttcaaattataggtatattgaacaaaatgatattggattcttcactggctgcatacttctgaaacttgtaaataatttgaaattagtttccaagaacagaaagacaaatattagataggaaataccaaattcttaagattcatacatataaaagtgaaataaaaatcaaacttaatcttatcatgaattttctactgtggcttaattttagaacttgttataaaaatagaaatgctattaatttaattacatttattaaaatctaaaaataggtgattatagctaggacattgacaagtgtaactatacatgagtaaatataactgaggatagcaacacatgaaatatatcataaaattgaattattctataaatagtattaagtctgtattacttggaacttgattccacttagaatgtccctgcttttatttatttatttatttttgtaaacaaaatgagcaagaggttattacacttcattcactgcgaaaaggtaacactacatcaaagataactcacatacttgcagaaatatggaaggtagttctttcttttttttgttaagaaatagggtctcactatgttgcccaggttgtagtgcagtgactattcaaaggggtcatcccactactgataagcagaggagttttattctgctcaatttttgagttgaccactccttaggcaacctggtggtcctctgctccctggaagctaacatattgatgccaaacttagtgcagacacttcctcagcatagtgcatacaacccagaaatcctgggctcaagtgttcctcccgcctcagcatcctgagtagctgggacaacaggtgtgtgtcacctggctgaaaggtatttttaaatacaaatgttgtccaggagtgacagaagctggagaattggactacttgatggaggctttgtacaagctttgaacaataataacaacaaaattgaaatgccaaaaatattgtttagcagttaaccaccaataaaaggaagccagycatttcacacagaggattttgttaattgattgcgtgattcaaggaaataatattattaggtgtgtattagtccattattgcattgctataaagaaatacctgagattgggtaatttataaagaaaagaggtttaactgactcacagttctgcatgctgtacagaaagaatgttgcatctgctgggcatgtggggaggcctcatgaaatgtataaccatggtgggaaaatgaagagggagccggtgcttcatatagctgggagcaggaagaaaagtgagaggtgaggaggtgctacacccttttaacaaccagatttcataataactcactcactcactatcataagaatagcaccaaggaaatggtattaaaccattaaaaagaaaccactccacaatccaataacctcccatcaggccccacctccaacactgggtatttcaatttgacatgagatttggttgggg

SEQ ID NO: 674597 - DNA, 628 bp, Homo sapiens
attcagacaggcaaataaactaagctccctttgatgaaaacgacatgcagtaacgcttccctactgagaatcatcttagtttgtgaaatcataatctggaatggctatatctgcaaaatacattaaaagaaagaaaatatgaaaaacataatctacaatacttttatgtatatctaatcattttatatttcttttttattatactacttgaaatacatacataaaggataaagagtttcaacaaatctcaaaaaggaaacctaattatgtataatattctgactgattttgtttgctyaccaaattgaaattgaaaagaaaaaatacagcactctataaaaaaataaaatgatttcaaaatataattattttctccctttgaaaatataaatgtttaaataatggtgaaatagagaacataaacattcacaaatattacatatccattcaacattttcaggtattattttgttttgttcaaacctccccttctgtcatttttctctcctttctttatctttagcataactgagctgctttccaaacatctatagttataccggacatagcattttccaacatcaaacatggtttttcttaaacaccagttccaaatattaattcccag

SEQ ID NO: 674598 - DNA, 628 bp, Homo sapiens
attcagacaggcaaataaactaagctccctttgatgaaaacgacatgcagtaacgcttccctactgagaatcatcttagtttgtgaaatcataatctggaatggctatatctgcaaaatacattaaaagaaagaaaatatgaaaaacataatctacaatacttttatgtatatctaatcattttatatttcttttttattatactacttgaaatacatacataaaggataaagagtttcaacaaatctcaaaaaggaaacctaattatgtataatattctgactgattttgtttgcttaccaaattgaaattgaaaagaaaaaatacagcactctatwaaaaaataaaatgatttcaaaatataattattttctccctttgaaaatataaatgtttaaataatggtgaaatagagaacataaacattcacaaatattacatatccattcaacattttcaggtattattttgttttgttcaaacctccccttctgtcatttttctctcctttctttatctttagcataactgagctgctttccaaacatctatagttataccggacatagcattttccaacatcaaacatggtttttcttaaacaccagttccaaatattaattcccag

SEQ ID NO: 674599 - DNA, 628 bp, Homo sapiens
attcagacaggcaaataaactaagctccctttgatgaaaacgacatgcagtaacgcttccctactgagaatcatcttagtttgtgaaatcataatctggaatggctatatctgcaaaatacattaaaagaaagaaaatatgaaaaacataatctacaatacttttatgtatatctaatcattttatatttcttttttattatactacttgaaatacatacataaaggataaagagtttcaacaaatctcaaaaaggaaacctaattatgtataatattctgactgattttgtttgcttaccaaattgaaattgaaaagaaaaaatacagcactctataaaaaaataaaatgatttcaaaatataattattktctccctttgaaaatataaatgtttaaataatggtgaaatagagaacataaacattcacaaatattacatatccattcaacattttcaggtattattttgttttgttcaaacctccccttctgtcatttttctctcctttctttatctttagcataactgagctgctttccaaacatctatagttataccggacatagcattttccaacatcaaacatggtttttcttaaacaccagttccaaatattaattcccag

SEQ ID NO: 674600 - DNA, 628 bp, Homo sapiens
attcagacaggcaaataaactaagctccctttgatgaaaacgacatgcagtaacgcttccctactgagaatcatcttagtttgtgaaatcataatctggaatggctatatctgcaaaatacattaaaagaaagaaaatatgaaaaacataatctacaatacttttatgtatatctaatcattttatatttcttttttattatactacttgaaatacatacataaaggataaagagtttcaacaaatctcaaaaaggaaacctaattatgtataatattctgactgattttgtttgcttaccaaattgaaattgaaaagaaaaaatacagcactctataaaaaaataaaatgatttcaaaatataattattttctccctttgaaaatataaatgtttaaataatggtgaaatagagaayataaacattcacaaatattacatatccattcaacattttcaggtattattttgttttgttcaaacctccccttctgtcatttttctctcctttctttatctttagcataactgagctgctttccaaacatctatagttataccggacatagcattttccaacatcaaacatggtttttcttaaacaccagttccaaatattaattcccag

SEQ ID NO: 674601 - DNA, 628 bp, Homo sapiens
attcagacaggcaaataaactaagctccctttgatgaaaacgacatgcagtaacgcttccctactgagaatcatcttagtttgtgaaatcataatctggaatggctatatctgcaaaatacattaaaagaaagaaaatatgaaaaacataatctacaatacttttatgtatatctaatcattttatatttcttttttattatactacttgaaatacatacataaaggataaagagtttcaacaaatctcaaaaaggaaacctaattatgtataatattctgactgattttgtttgcttaccaaattgaaattgaaaagaaaaaatacagcactctataaaaaaataaaatgatttcaaaatataattattttctccctttgaaaatataaatgtttaaataatggtgaaatagagaacataaacattcacaaatattacatatccattcaacattttcaggtattattttgttttgttcaaacctccccttctgtcatttttctctcctttctttatctttagcataactgagctgctttccaaacatctatagttataccrgacatagcattttccaacatcaaacatggtttttcttaaacaccagttccaaatattaattcccag

SEQ ID NO: 674602 - DNA, 628 bp, Homo sapiens
attcagacaggcaaataaactaagctccctttgatgaaaacgacatgcagtaacgcttccctactgagaatcatcttagtttgtgaaatcataatctggaatggctatatctgcaaaatacattaaaagaaagaaaatatgaaaaacataatctacaatacttttatgtatatctaatcattttatatttcttttttattatactacttgaaatacatacataaaggataaagagtttcaacaaatctcaaaaaggaaacctaattatgtataatattctgactgattttgtttgcttaccaaattgaaattgaaaagaaaaaatacagcactctataaaaaaataaaatgatttcaaaatataattattttctccctttgaaaatataaatgtttaaataatggtgaaatagagaacataaacattcacaaatattacatatccattcaacattttcaggtattattttgttttgttcaaacctccccttctgtcatttttctctcctttctttatctttagcataactgagctgctttccaaacatctatagttataccggacatagcattttccaacatcaaacatggtttttcttaaacaccagytccaaatattaattcccag

SEQ ID NO: 674603 - DNA, 1559 bp, Homo sapiens
cattctttttaaataggtaaatgttacagtgattattactcaagtgtatatcctgagaatttttacaataatttgttacatagattaacttttttttcttcaaaatacaactaatttactgattatactttttgggtcttctattaacattattagcaaaatttagaaaatttattcatttatatacaaaattaatagatacattaaatactctgtgccacccaatgcccaattcactgagagcattttactgaataaacaaaaaattttgacccttgattaccttattgttggaggtaacaaaccatagaagatagacaatagtcaatgtaaaaataaataagtggttttgacaatggacaataagcaaaaatacctgttcacttgttgtattggtccgttctcacactgctataaagagctgctagatgctggttaatatataaaggaaagaggcttaattgactcagaattctgcaggtctggggaagcctcagaaaacttacaatcatgccagaaggggaagcaaaccatgtccttctgcacattgtggcaggaaggaaaagtgcagagtgaagggggtaaaagctttttataaaaccaccaaatctcatgagaactcactcactatcacgagaacaacatgggagaaccaccccatgatctaatcacctcccggagatccctcccccaacacatggggattataaatctgattataattcaagatgagattttgtgtgggaatggagccaaattatatcactagaatagataatatatataatacataagtaaattttatagtatactagcagatggttaattctactaacaaatacagaaaggtaaaggatgaaagggatctcttgcttaagaaagggatacacatttatatgtgttgattttaaggaatcaacaaggaatgattagcaagacttgaagagaaaggagaagccatgtgagtctctggggtggaatgttacaggcaaagataaaagccaggaaaaagcagacacttcctatattcctgtattcatccatttttatgctactgataaagatataccccagcctgggaaatttacaaaagaaagaggtttaatggacttatgtttccacatggctgggaaaacctcacaatcatggcagatggccaggaagagcaagtcacatcttacatggatggcggcaggcaaagagagagcttgttcaraaaaactccctcttctttaaccataagatcttgtgggacttattcactatcatgaggatgggatggcctgccaccatgattcaattatctcccacctggtccctcccacaacacatgggaattcaagatgagatgtgggtggggacaaagccataccatatcaccatctctgtgcaaatgctctctctcttctatttacctctgcaattctagctaaattttcctttctaagccccaatcttcaatttctcaatatacagggagagttatcctttctttggattatcctttcactgtgttttctggaaactgagagaaagcttgggataagtcagattttatt

SEQ ID NO: 674604 - DNA, 2595 bp, Homo sapiens
attcagcgtaattacttgtgcttaaaactgttttcaagataaatttgaactatgtcattgttcatataaaagaaagatgcttcttttcaattaatttgtattagttaataattctacaaattgtgtttatttcaatggagattaaagaatataaaaagaataatgtttctgttttagactatactttattagtaaaccatttggggggtggggcaatgaggataaactccatcaaaggaacataagttagaaaagctgtaacataaacttaggttataagtctgaattaccctagacagttagtctatggaatatgagactgtatgcagcctcagctggaagcactgcccttaagcaaagaccatgaaagagatgctgaaataattattcaggcagaaatttagtataatatttctttgggaatgttctccaatagttggaagtcaaaataacaagtaattctcacttccattctttgtcttctcaatatacatccctatatcttgcaaggcatttagcaaattaaagtacatttaccagcctctttgcactttgatgagtcaatgtaactaatttttggacgataacgtgtgaacagaagcaatatttgcagcatctaaaagaaatgtgtgtgaccttttacccctgttaccatgctttagaattcatagctgttttcagctattttgtatataaaataagcatataaaagcgacaaaataaatcaacatcgtagagctatcgtgacatcactggacttctcctaaaacttttacatgaaaaatatgtgaattatttcaagctgctctacttgtttttcatagactctgtcattaattaattttttatgtaccactaaaaagcattttaaaatgcctctaaactatggcacactgctaaatattttctagatgcctcaaaaaagtttttatatgcagtaattttgttttacatacacatgcacacttaactgatttcaagttttttcaactttcatatgaaattgaaagttgaaaaggcacatgaaatgtctttttgaaattcctaactcaatttaatttttttttacatttaggtttaccatactgttttaacaaaatgctccgtatttattctaatatttttaaaactttaggaataaattaatattttggattgttctacagtattgtatcctgaactggaacttttattactgatttattaattgaaatatgaaatatgatatgcacatgtgaaagacacagatcttgagcatatagcattaaacatttttagaacgtaaaatactaatgtcatcacaacctacatgaatatgaattgagtattactagaatccaggagtctctattgtgaacctccaatcattactataggcaaccactgttcttacttttatctttataaattacatttgcttgacattraacttcatagaaattgaaccatacaatagatattaatttcaatctggttcaaaaaaacacaaccaacagcgtgggtgtcagtgtgatattctgtgctgcttctcagctgaatcaatggtgctgacagctgcaatagcaacagcagtgtcttcagaagttttactgagagtttggagtccagagtttctgcctaatggcagctgcgctcaaatagggccaatggtcagtctggaatcatgggacccagaatgcaccaccttcccctactcatttttcacagttaaggatggaagtggcttccttcatttgctcatcatctggagtagcaggccccttttgctctttcagtgtttctaacattgttgtaaccacgcccccaacccctgtattatattgtctatgctttaaaaactatattgtggacttgaataaaatttattttcccattcccggtaaaaaataattgggtcattctttactcatgtatcaattcaaatttctaagactctatttatctcttctcctcaataatgtttcttttttcttttgcttttttttagacagggtcttgtgctctcacccaggctggagtgcagtggctggaacacagctcactacagccttgacctcttgaattcaagtgatcctcacacttcagcctccagagtagctttgatgacaggtgtgtgccaccaggcccagctacttttctttactttttgtagagacatggtcttgccatattacccaggctagtctcagatccctgggctcaagtatcctcctgcctccaactcccaaagtgctgggattataggcataagccaccatgcccagctaatgttttctatttaccatagcttttcacatatatatgttattatatatgtaatatacatatataatatagtatggatgtgtatatactatattattaacaattagatctaaaatatagaaagaattttaatacctttattttctgtaccttcatagttaatctcatattttccaaatctgttaatgtggcactggtcagttatagctccaaagaatgagcatccacttaatctcataaccaggacccaacctgcaacattagtattacaaattaattcctaattccagtctcactctttcatcaccagttctatctttgcacacttac

SEQ ID NO: 674605 - DNA, 2595 bp, Homo sapiens
attcagcgtaattacttgtgcttaaaactgttttcaagataaatttgaactatgtcattgttcatataaaagaaagatgcttcttttcaattaatttgtattagttaataattctacaaattgtgtttatttcaatggagattaaagaatataaaaagaataatgtttctgttttagactatactttattagtaaaccatttggggggtggggcaatgaggataaactccatcaaaggaacataagttagaaaagctgtaacataaacttaggttataagtctgaattaccctagacagttagtctatggaatatgagactgtatgcagcctcagctggaagcactgcccttaagcaaagaccatgaaagagatgctgaaataattattcaggcagaaatttagtataatatttctttgggaatgttctccaatagttggaagtcaaaataacaagtaattctcacttccattctttgtcttctcaatatacatccctatatcttgcaaggcatttagcaaattaaagtacatttaccagcctctttgcactttgatgagtcaatgtaactaatttttggacgataacgtgtgaacagaagcaatatttgcagcatctaaaagaaatgtgtgtgaccttttacccctgttaccatgctttagaattcatagctgttttcagctattttgtatataaaataagcatataaaagcgacaaaataaatcaacatcgtagagctatcgtgacatcactggacttctcctaaaacttttacatgaaaaatatgtgaattatttcaagctgctctacttgtttttcatagactctgtcattaattaattttttatgtaccactaaaaagcattttaaaatgcctctaaactatggcacactgctaaatattttctagatgcctcaaaaaagtttttatatgcagtaattttgttttacatacacatgcacacttaactgatttcaagttttttcaactttcatatgaaattgaaagttgaaaaggcacatgaaatgtctttttgaaattcctaactcaatttaatttttttttacatttaggtttaccatactgttttaacaaaatgctccgtatttattctaatatttttaaaactttaggaataaattaatattttggattgttctacagtattgtatcctgaactggaacttttattactgatttattaattgaaatatgaaatatgatatgcacatgtgaaagacacagatcttgagcatatagcattaaacatttttagaacgtaaaatactaatgtcatcacaacctacatgaatatgaattgagtattactagaatccaggagtctctattgtgaacctccaatcattactataggcaaccactgttcttacttttatctttataaattacatttgcttgacattgaacttcatagaaattgaaccatacaatagatattaatttcaatctggttcaaaaaaacacaaccaacagcgtgggtgtcagtgtgatattctgtgctgcttctcagctgaatcaatggtgctgacagctgcaatagcaacagcagtgtcttcagaagttttactgagagtttggagtccagagtttctgcctaayggcagctgcgctcaaatagggccaatggtcagtctggaatcatgggacccagaatgcaccaccttcccctactcatttttcacagttaaggatggaagtggcttccttcatttgctcatcatctggagtagcaggccccttttgctctttcagtgtttctaacattgttgtaaccacgcccccaacccctgtattatattgtctatgctttaaaaactatattgtggacttgaataaaatttattttcccattcccggtaaaaaataattgggtcattctttactcatgtatcaattcaaatttctaagactctatttatctcttctcctcaataatgtttcttttttcttttgcttttttttagacagggtcttgtgctctcacccaggctggagtgcagtggctggaacacagctcactacagccttgacctcttgaattcaagtgatcctcacacttcagcctccagagtagctttgatgacaggtgtgtgccaccaggcccagctacttttctttactttttgtagagacatggtcttgccatattacccaggctagtctcagatccctgggctcaagtatcctcctgcctccaactcccaaagtgctgggattataggcataagccaccatgcccagctaatgttttctatttaccatagcttttcacatatatatgttattatatatgtaatatacatatataatatagtatggatgtgtatatactatattattaacaattagatctaaaatatagaaagaattttaatacctttattttctgtaccttcatagttaatctcatattttccaaatctgttaatgtggcactggtcagttatagctccaaagaatgagcatccacttaatctcataaccaggacccaacctgcaacattagtattacaaattaattcctaattccagtctcactctttcatcaccagttctatctttgcacacttac

SEQ ID NO: 674606 - DNA, 2595 bp, Homo sapiens
attcagcgtaattacttgtgcttaaaactgttttcaagataaatttgaactatgtcattgttcatataaaagaaagatgcttcttttcaattaatttgtattagttaataattctacaaattgtgtttatttcaatggagattaaagaatataaaaagaataatgtttctgttttagactatactttattagtaaaccatttggggggtggggcaatgaggataaactccatcaaaggaacataagttagaaaagctgtaacataaacttaggttataagtctgaattaccctagacagttagtctatggaatatgagactgtatgcagcctcagctggaagcactgcccttaagcaaagaccatgaaagagatgctgaaataattattcaggcagaaatttagtataatatttctttgggaatgttctccaatagttggaagtcaaaataacaagtaattctcacttccattctttgtcttctcaatatacatccctatatcttgcaaggcatttagcaaattaaagtacatttaccagcctctttgcactttgatgagtcaatgtaactaatttttggacgataacgtgtgaacagaagcaatatttgcagcatctaaaagaaatgtgtgtgaccttttacccctgttaccatgctttagaattcatagctgttttcagctattttgtatataaaataagcatataaaagcgacaaaataaatcaacatcgtagagctatcgtgacatcactggacttctcctaaaacttttacatgaaaaatatgtgaattatttcaagctgctctacttgtttttcatagactctgtcattaattaattttttatgtaccactaaaaagcattttaaaatgcctctaaactatggcacactgctaaatattttctagatgcctcaaaaaagtttttatatgcagtaattttgttttacatacacatgcacacttaactgatttcaagttttttcaactttcatatgaaattgaaagttgaaaaggcacatgaaatgtctttttgaaattcctaactcaatttaatttttttttacatttaggtttaccatactgttttaacaaaatgctccgtatttattctaatatttttaaaactttaggaataaattaatattttggattgttctacagtattgtatcctgaactggaacttttattactgatttattaattgaaatatgaaatatgatatgcacatgtgaaagacacagatcttgagcatatagcattaaacatttttagaacgtaaaatactaatgtcatcacaacctacatgaatatgaattgagtattactagaatccaggagtctctattgtgaacctccaatcattactataggcaaccactgttcttacttttatctttataaattacatttgcttgacattgaacttcatagaaattgaaccatacaatagatattaatttcaatctggttcaaaaaaacacaaccaacagcgtgggtgtcagtgtgatattctgtgctgcttctcagctgaatcaatggtgctgacagctgcaatagcaacagcagtgtcttcagaagttttactgagagtttggagtccagagtttctgcctaatggcagctgcgctcaaatagggccaatggtcagtctggaatcatgggacccagaatgcaccaccttcycctactcatttttcacagttaaggatggaagtggcttccttcatttgctcatcatctggagtagcaggccccttttgctctttcagtgtttctaacattgttgtaaccacgcccccaacccctgtattatattgtctatgctttaaaaactatattgtggacttgaataaaatttattttcccattcccggtaaaaaataattgggtcattctttactcatgtatcaattcaaatttctaagactctatttatctcttctcctcaataatgtttcttttttcttttgcttttttttagacagggtcttgtgctctcacccaggctggagtgcagtggctggaacacagctcactacagccttgacctcttgaattcaagtgatcctcacacttcagcctccagagtagctttgatgacaggtgtgtgccaccaggcccagctacttttctttactttttgtagagacatggtcttgccatattacccaggctagtctcagatccctgggctcaagtatcctcctgcctccaactcccaaagtgctgggattataggcataagccaccatgcccagctaatgttttctatttaccatagcttttcacatatatatgttattatatatgtaatatacatatataatatagtatggatgtgtatatactatattattaacaattagatctaaaatatagaaagaattttaatacctttattttctgtaccttcatagttaatctcatattttccaaatctgttaatgtggcactggtcagttatagctccaaagaatgagcatccacttaatctcataaccaggacccaacctgcaacattagtattacaaattaattcctaattccagtctcactctttcatcaccagttctatctttgcacacttac

SEQ ID NO: 674607 - DNA, 2595 bp, Homo sapiens
attcagcgtaattacttgtgcttaaaactgttttcaagataaatttgaactatgtcattgttcatataaaagaaagatgcttcttttcaattaatttgtattagttaataattctacaaattgtgtttatttcaatggagattaaagaatataaaaagaataatgtttctgttttagactatactttattagtaaaccatttggggggtggggcaatgaggataaactccatcaaaggaacataagttagaaaagctgtaacataaacttaggttataagtctgaattaccctagacagttagtctatggaatatgagactgtatgcagcctcagctggaagcactgcccttaagcaaagaccatgaaagagatgctgaaataattattcaggcagaaatttagtataatatttctttgggaatgttctccaatagttggaagtcaaaataacaagtaattctcacttccattctttgtcttctcaatatacatccctatatcttgcaaggcatttagcaaattaaagtacatttaccagcctctttgcactttgatgagtcaatgtaactaatttttggacgataacgtgtgaacagaagcaatatttgcagcatctaaaagaaatgtgtgtgaccttttacccctgttaccatgctttagaattcatagctgttttcagctattttgtatataaaataagcatataaaagcgacaaaataaatcaacatcgtagagctatcgtgacatcactggacttctcctaaaacttttacatgaaaaatatgtgaattatttcaagctgctctacttgtttttcatagactctgtcattaattaattttttatgtaccactaaaaagcattttaaaatgcctctaaactatggcacactgctaaatattttctagatgcctcaaaaaagtttttatatgcagtaattttgttttacatacacatgcacacttaactgatttcaagttttttcaactttcatatgaaattgaaagttgaaaaggcacatgaaatgtctttttgaaattcctaactcaatttaatttttttttacatttaggtttaccatactgttttaacaaaatgctccgtatttattctaatatttttaaaactttaggaataaattaatattttggattgttctacagtattgtatcctgaactggaacttttattactgatttattaattgaaatatgaaatatgatatgcacatgtgaaagacacagatcttgagcatatagcattaaacatttttagaacgtaaaatactaatgtcatcacaacctacatgaatatgaattgagtattactagaatccaggagtctctattgtgaacctccaatcattactataggcaaccactgttcttacttttatctttataaattacatttgcttgacattgaacttcatagaaattgaaccatacaatagatattaatttcaatctggttcaaaaaaacacaaccaacagcgtgggtgtcagtgtgatattctgtgctgcttctcagctgaatcaatggtgctgacagctgcaatagcaacagcagtgtcttcagaagttttactgagagtttggagtccagagtttctgcctaatggcagctgcgctcaaatagggccaatggtcagtctggaatcatgggacccagaatgcaccaccttcccctactcatttttcacagttaaggatggaagtggcttccttcatttgctcatcatctggagtagcaggccccttttgctctttcagtgtttctaacattgttgtaaccacgcccscaacccctgtattatattgtctatgctttaaaaactatattgtggacttgaataaaatttattttcccattcccggtaaaaaataattgggtcattctttactcatgtatcaattcaaatttctaagactctatttatctcttctcctcaataatgtttcttttttcttttgcttttttttagacagggtcttgtgctctcacccaggctggagtgcagtggctggaacacagctcactacagccttgacctcttgaattcaagtgatcctcacacttcagcctccagagtagctttgatgacaggtgtgtgccaccaggcccagctacttttctttactttttgtagagacatggtcttgccatattacccaggctagtctcagatccctgggctcaagtatcctcctgcctccaactcccaaagtgctgggattataggcataagccaccatgcccagctaatgttttctatttaccatagcttttcacatatatatgttattatatatgtaatatacatatataatatagtatggatgtgtatatactatattattaacaattagatctaaaatatagaaagaattttaatacctttattttctgtaccttcatagttaatctcatattttccaaatctgttaatgtggcactggtcagttatagctccaaagaatgagcatccacttaatctcataaccaggacccaacctgcaacattagtattacaaattaattcctaattccagtctcactctttcatcaccagttctatctttgcacacttac

SEQ ID NO: 674608 - DNA, 2595 bp, Homo sapiens
attcagcgtaattacttgtgcttaaaactgttttcaagataaatttgaactatgtcattgttcatataaaagaaagatgcttcttttcaattaatttgtattagttaataattctacaaattgtgtttatttcaatggagattaaagaatataaaaagaataatgtttctgttttagactatactttattagtaaaccatttggggggtggggcaatgaggataaactccatcaaaggaacataagttagaaaagctgtaacataaacttaggttataagtctgaattaccctagacagttagtctatggaatatgagactgtatgcagcctcagctggaagcactgcccttaagcaaagaccatgaaagagatgctgaaataattattcaggcagaaatttagtataatatttctttgggaatgttctccaatagttggaagtcaaaataacaagtaattctcacttccattctttgtcttctcaatatacatccctatatcttgcaaggcatttagcaaattaaagtacatttaccagcctctttgcactttgatgagtcaatgtaactaatttttggacgataacgtgtgaacagaagcaatatttgcagcatctaaaagaaatgtgtgtgaccttttacccctgttaccatgctttagaattcatagctgttttcagctattttgtatataaaataagcatataaaagcgacaaaataaatcaacatcgtagagctatcgtgacatcactggacttctcctaaaacttttacatgaaaaatatgtgaattatttcaagctgctctacttgtttttcatagactctgtcattaattaattttttatgtaccactaaaaagcattttaaaatgcctctaaactatggcacactgctaaatattttctagatgcctcaaaaaagtttttatatgcagtaattttgttttacatacacatgcacacttaactgatttcaagttttttcaactttcatatgaaattgaaagttgaaaaggcacatgaaatgtctttttgaaattcctaactcaatttaatttttttttacatttaggtttaccatactgttttaacaaaatgctccgtatttattctaatatttttaaaactttaggaataaattaatattttggattgttctacagtattgtatcctgaactggaacttttattactgatttattaattgaaatatgaaatatgatatgcacatgtgaaagacacagatcttgagcatatagcattaaacatttttagaacgtaaaatactaatgtcatcacaacctacatgaatatgaattgagtattactagaatccaggagtctctattgtgaacctccaatcattactataggcaaccactgttcttacttttatctttataaattacatttgcttgacattgaacttcatagaaattgaaccatacaatagatattaatttcaatctggttcaaaaaaacacaaccaacagcgtgggtgtcagtgtgatattctgtgctgcttctcagctgaatcaatggtgctgacagctgcaatagcaacagcagtgtcttcagaagttttactgagagtttggagtccagagtttctgcctaatggcagctgcgctcaaatagggccaatggtcagtctggaatcatgggacccagaatgcaccaccttcccctactcatttttcacagttaaggatggaagtggcttccttcatttgctcatcatctggagtagcaggccccttttgctctttcagtgtttctaacattgttgtaaccacgcccccaacccctgtattatattgtctatgctttaaaaactatattgtggacttgaataaaatttattttcccattcccggtaaaaaataattgggtcattctttactcatgtatcaattcaaatttctaagactctatttatctcttctcctcaataatgtttcttttttcttttgcttttttttagacagggtcttgtgctctcacccaggctggagtgcagtggctggaacacagctcactacagccttgacctcttgaattcaagtgatcctcacacttcagcctccagagtagctttgatgacaggtgtgtgccaccaggcccagctacttttctttactttttgtagagacatggtcttgccatattacccaggctagtctcagatccctgggctcaagtatcctcctgcctccamctcccaaagtgctgggattataggcataagccaccatgcccagctaatgttttctatttaccatagcttttcacatatatatgttattatatatgtaatatacatatataatatagtatggatgtgtatatactatattattaacaattagatctaaaatatagaaagaattttaatacctttattttctgtaccttcatagttaatctcatattttccaaatctgttaatgtggcactggtcagttatagctccaaagaatgagcatccacttaatctcataaccaggacccaacctgcaacattagtattacaaattaattcctaattccagtctcactctttcatcaccagttctatctttgcacacttac

SEQ ID NO: 674609 - DNA, 2408 bp, Homo sapiens
gtggtttcctgcttccctcagagtaaaagtcaaagcccttacagtggtgctgggccctgtgcggctgcagcccaccccggtacacrctcggcatgactgcccaggcctggccccactgcaaccacccagcctcccccagacaccctagccttccacccagcaagccccccgccatcccttggccaagactggctacgtaattcacggggccccatgcaaaatgaaaacacaggcccttcttccaaatgaccgagcatttcaggacagcaactggacagaatgaacccaaatgcaggaaacttgaggccggggcctgctgtgctgcctgcacaggtcacacactgtgaagcggcccctggagcagcccagtgaagcaagcgacacagagctttttgtcattttcctaagtcaagatcaggaaacaggctcagagagggccaggactgcccagggtcacacagctggaaagcagagggctcctgctggactccagacctcagcaacagggtctgaactctcctccatgcctccatgcccacctccttcccctccatgccctccatgcccacctccttcccctccatgccctccatgcccacctccttccccccctccaatgcctccatgcccacctccttcccctccatgcccacctccttcccccgctccaatgcctggatccgcctgagaggagaaagatcctgagttcccctcttcactgcccatggacactcctacccagcgcacccctgtcctccagtgtgagggcatcagaagtccagtcccacctgccaggccctccatggcctgccctgtgtcatggtcaaagcccctccttactgggaattagggctttatttgagctgggaatgaggccaaggaagatggtgaaacagggagaaaagcagcacccagtgggagaatgtcgcttccgaggacaggaatcaagggacacgaggctgacggaggaaatctgcacaggaaggggtggaaggtactgaacagtgtaaaccagaagcccccgcccagccctggaagcccgagacagcactgcttgactccagggccaagcccagcaggccgggccaggggaggtctccccgaggaccacagcctggggcagagacacgggagccctaattaggggcttgcaaagggcttagcctcgggactacacaaagccccggagctgggccgcgggagccccagcctgtgtcgggacagacttaacggcctgggctggagtcgccagcaacataaagtattcttgttcccagcgattttaacaaggcatttatggacccgagacaacctcaggacagcacttggttgaaggagctggctgcccagacaatcagggcacagagtcaggtcagcacaagggcccagtgatcaaggccagaaaggcaggagaactgagggccattcaccccatggtgcagggatggcccctccccaaccctgttaaaacgcagccagttgggcttaaccctggggggccttcaccttcatagaggtggggagggggcggagacacactggaaccagattcccaggcctgggacacccaccaccaacaccaacatcaatttcaaacatagccacagtagacactaaagcactgggggccaggtccctgagtcactgcccccagtagcaccaagcaccctgggaatatcttgggctccccaagactgccccgctgttcccatcagcctgtgcacttcatcacagagcaattaatctgttgtcctggtttttgctcatcaaagtggccataaccagggtccagtgtagcgagatgagccctcctgttgatgcagttccaacccagttatgttgcccagggtggtctcaaactcctgggctcaagcagtcctcctgctttggcctcccaaagtgctgggattacaggcatgagcctgccctattgttattaataacagtgacagctactacatatccaacatttattaagtggtttagagaattatgtttttccctcacaaataacctatgagagaagaatgttgatatctatagaaagctgagacacagggaggttaagaaacttactgacggtgcaaccttaggcagatagtggcaccaggtctaaaacatgggcctcattggcagcagtgaccacatgcctggtcactgggcaggagcctgtcgacgagggtgggtttgtgtgagctggcagaaacagctttggacttggaatagggacaccctagttccactgagctctgacactcactttacaacctctggacatctccatgaaatggggacgcagaccctttccctccacttcccagggcagtgagggggattggagaggctgagccaggggaagggctttgctggcagtggtatccaaataatgcccccaaaaatgcccagtc

SEQ ID NO: 674610 - DNA, 645 bp, Homo sapiens
cagaatattttttattaaatgatggttaacaatacttcagagctattctagatatgaagcaagatttgtatgtgtaagcaaaattttagttatcttattcgtcataaaaagtttgtttttgaaatcatttctcatttgactaaaaagtaagtattgacaggtttttgaatcaaaccaagtgggtgttgttttcttcctaggcaagaacctagaaaacatttcattttattctaccataacacwctgtgagaatgaaataaacacatggcccttgacaagtaggctcaactgccactgcattatactgggtaaaatgcttatactaggttattgctgcatgttaattgcttccccttaacaattttcctctgtactgctcatcgcatctatactttcttgtctctaaaatccatcagtggattttaagctttttgaagtcaaggaactcaactgatttgttcagaactgtagaatagcacctggcataaagtaaatgcaaaataattggatgggaactaatgaatgaataaataacatttttgaagcttcacttgtagtttatttgatttaaatgcaagaattttgctttctgttttaacatgcggacttcaaaatgcaattccatgtttgttgtttaagtgacgc

SEQ ID NO: 674611 - DNA, 645 bp, Homo sapiens
cagaatattttttattaaatgatggttaacaatacttcagagctattctagatatgaagcaagatttgtatgtgtaagcaaaattttagttatcttattcgtcataaaaagtttgtttttgaaatcatttctcatttgactaaaaagtaagtattgacaggtttttgaatcaaaccaagtgggtgttgttttcttcctaggcaagaacctagaaaacatttcattttattctaccataacacactgtgagaatgaaataaacacatggcccttgacaagtaggctcaactgccactgcattatactgggtaaaatgcttatactaggttattgctgcatgttaattgcttccccttaacaattttcctctgtactgctcatcgcatctatactttcttgtctctaaaatccatcagtggattttaarctttttgaagtcaaggaactcaactgatttgttcagaactgtagaatagcacctggcataaagtaaatgcaaaataattggatgggaactaatgaatgaataaataacatttttgaagcttcacttgtagtttatttgatttaaatgcaagaattttgctttctgttttaacatgcggacttcaaaatgcaattccatgtttgttgtttaagtgacgc

SEQ ID NO: 674612 - DNA, 605 bp, Homo sapiens
cttagcattggaagtggtagcgaaggaggtaaggtatggttagattaggcaggatttgctgggagattgttgtacaggattagtagtttgtagatagtcatctgctctttagataatgaaatgttgtatctatatagattttgctttgctcaatatactgtaatacaaaaaaataaaagaatatttcctcattgtttacataatgcatggctacggtaaacatttttaamataactgtctttaactttatttaaatgttactgaaataattggacttttccctatcgtgttacagatattttacaactgcacttgtgtgggaattgcagcttctaaatccggaaattcctcaggcatagtgggaagatgtcagaaagacaatggatgtccccaaatgtttctgtatttccttgtaatttcagtcatcacatcctatactttatccctaggtggcatacctggatacatattacttctgaggtgagtactgattctccctattctaattttaacacaagacacaatcatctcgagcaatgatttaaatttttttctgtggagtctatgattcctcttagttttttcaagaaacttgtcccacatcc

SEQ ID NO: 674613 - DNA, 1083 bp, Homo sapiens
tcctgtcctgccagctccattcatggtgagggacagatacaggtgtaccattttttgtcttttataccatacttttatggcatcttttctgtttagatacacaaatatgtaccatgtgtcacaattgcctacaatattcagtatagtaacatgctgtacaggtttgtagcttaggagcaataggctgtaccatatagcctaggtgtgtagtaggctgcaccatctaggttggtggaagcacactctatgatgttcacacaactaaaaaatcacctaatgatgcagttataaaaaaaccctgtcatgaagcaatgtatgactatataaatacacagacttaaaaaatataatattagataacatttctaatataatgtataaaatatataggatatataggacatgattataatataataattcacctcagcctccagtgatttccaaccataggaaccacagccacagacaaaagacaggaaaaaaagaatatgttttcatgtctaaaacagggaattgagaagtatttccctatcaaaaattggcatacagtggtcagatatattcagaatggttcggctaacacaatatttttaaaacataataagttaaaagacccttcagagctgatcagggagtttcaccacaattcatagcactatttcaaagagaaaatgagttctaaaatcccaataatagattttccaaaataactctttcatacacaattcaattacaggtttaaattgcctgaagtgtagtctcagtttcacaaaaatccaaatatatatgtaggtgtgtattttgaatacctgtctgttttatataaatttctgtaaaatataggtgtgagtgaactttttacatttatgaatgtatataaatgttggcaaacataagcagttacaattcaaagacattaagattaatattttaactaagattacatattttgattgtaktttcaatcttatctgtaatatgaaatcaaattagatttttaaaaattatatcattcatgaagataaaagataatttatcactttacatcaggatatcataaccattgttttcaaaatatag

SEQ ID NO: 674614 - DNA, 649 bp, Homo sapiens
aaccaaaaattgaggagaagagagggaagatttaatatattttataggatcttgacctcctttttatgtatatgcttgctcttcttagttctaaaacatatgtgatgctttctttgaaacataataaaactatgacaaacaatataacctgtattattttttagtttatatgcatatgtataaactaaatttttaggtatgtgcttgttcttcgttctaaaacatatgtgatactttctttgaaacataataaaactatgataaacaatatatcttttattattttttagyttatactccttgaattccattaaaataaaaatttatattaagcaccagttacctggcaatagtattagttactggaaatttagctcttaataccacaaaccagttacacacaaggttgtgtgggagcaaatagcaaatacatctaacctgctctagaggtttgaggacatactcttggagaaaataatgttttagctgagacttgaagcactaataaactttaatcaggcaaactggagaaggagaattggacgtatttgagtgaaaaccaaaagaggatgtgaactatgtgattcctagttgtgcacatagtacagcacatgctgtgttctgatgttcacagatgattgtgccttat

SEQ ID NO: 674615 - DNA, 603 bp, Homo sapiens
attgagataaaactcaccgtggcctatagatctaagactggtctctgttaacaaatgcacctcagcaaactcaggacttgagaagccttagccttggggctgcccagggctctgccacagctcagatggatacttactcaaccagcaacttaactctgtcattggyaagtatcaaggtcacaagacttctggagtgtatcctatcaaaggtacaaaatggagcctttttttcatccaaagaggtttaggcttgaattttgaaatcttatttctgggatgtgttgtattcaactgattataaaattgtatctttgttttactgtggttcccactgctgtaagcaaatgggacctctgggataaccactgtcacctaaaaattaattcacattaaatataattttaaggtattgttaggtacatcataataaacataagcactacttacccaataatccaaccaccagtgatcaatctatcttcaaacagatggtgtcatgacaaattagacaaaatgtggaaatcatggcaagatcctaggaaatgtaaacagatgtttacagcacaatgatcatgatcacgttcaatttatgcattcatagag

SEQ ID NO: 674616 - DNA, 603 bp, Homo sapiens
attgagataaaactcaccgtggcctatagatctaagactggtctctgttaacaaatgcacctcagcaaactcaggacttgagaagccttagccttggggctgcccagggctctgccacagctcagatggatacttactcaaccagcaacttaactctgtcattggcaagtatcaaggtcacaagacttctggagtgtatcctatcaaaggtacaaaatggagcctttttttcatccaaagaggtttaggcttgaattttgaaatcttatttctgggatgtgttgtattcaactgattataaaattgtatctttgttttactgtggttcccactgctgtaagcaaatgggacctctgggataaccactgtcacctaaaaattaattcacrttaaatataattttaaggtattgttaggtacatcataataaacataagcactacttacccaataatccaaccaccagtgatcaatctatcttcaaacagatggtgtcatgacaaattagacaaaatgtggaaatcatggcaagatcctaggaaatgtaaacagatgtttacagcacaatgatcatgatcacgttcaatttatgcattcatagag

SEQ ID NO: 674617 - DNA, 2853 bp, Homo sapiens
agcagtgcccgaagcaattctcaaacttttcagtaacatgagccagtaaatgtccttaatcacttgagctggtttgaatggtatttctatccttttaaactaaccttgagagtccacactaatattgcaaggacttccacatttcacattttcttttttttttttcacttggagatagggtctcactctgttgctcaggctggagtgtagtggtgtgatcatggttcactgcagcctcaatgacctgggctcaagcaatgctcccacttgagcctccaaagaagctgggactacaggtgcttgccactatgcctggttaatttttaaattttttgtagagatagcatctcgtcattttgtccatgctggtctcaaacttctggcctcaagcaatcctcctgccttggcctcccaaactgctaggattacaggtgtgggctactgtgctctgcccactaccacattttcttattcaagttgatagactaattatcatagtgccatacagtagaagttcaacaaatacttttcaaataaatgataaccttggtttaggttattgctttcattttaccatccaaacattttccttaatcatamagtgttgttgttgtggggtgtttttgtttgttttttgagaagcagtcttactccatcatccagattggagtgcagtgttataattatagctcactacaacctcgaactcccaggctcaagcaattctcttcctgcttcagcctcctgagtagctgggattgcaggcattgcaccactatgcccagctaatttttttattttttgtagagagttggggggtctcactgtcttgtccaggctagtcttgaactactggtctcaggtgatcctcccaccttggattcccaaagtgttaggattacaggcatgagcccctgcacccaggcttgttgctgctttttaaaaacaaagtctgaatttatttgcctgggcacacaaaaaacaaatatattattaaaagaaatataaacatgtagaataatgaaaccagaggtcaaattgtatatctgtattgctttctggagaatagctttgttgacctaaaggaaaaaactgtggccaaattaacataagtagagggtttatttgggccaagtttgaggactgcaaccaaggagcacagattcaagttgcctgaatatatgctccaattagcagtagttacaagtgggtttttaaaggaaaagagaagaggcagtttgtaagttgtttatcaagaatttacactaaggtaacataaggtattgattggctaaacattgttctttcttttctcatttcccccttttgatcaaaatttttctcttctgaaggcatcgatgaccaaaattttagatgtttgtctcatgtcattgggaaggctcattcccaggtaatctcatcccatgtctgagggaaagaggacaggtacttatggcttaagaatttagtgatggccaggcactgtggctcacacctgtaatcccagcactttgggaggccgaggtgggaggatcacttgagctcaggagttcaagactagcttgggcaacatagcaagacccccatctctacacaaaaatataaaataaaaaaatttgaaattttaaacttaagaatttagagaggtctcaaggctgaattgactggcaacataaagggacagagcaacaagatctaggccatccacttacagaggagccacagcatgttggatcatttctttcttgatgttaagacatctagaaatacaaagcataatcaacttaagaaccaaaaatattgagatgggatttttcccctgactttgaccctctttgtggacaggaactagagtggctcatttcactcagcctgcagtccatggatggctaagtgtaacagctcagtgaaggctcagggtgacagcctcctacacctgccttttttgacacctgagttcttgttcagtgtccaggaacaatcaggtcacacaaactatttgaaggatagtgtatttggaatatttattgggcgataaaagtggctctcagtaggatggggaatttgaaaggggatggtgtgggaagaaggtgatgtttccctgaagctgcactgtctgaagttagcagcgtctattcgtaatttctgacactcagctgcatggatccctgatgctcagctgcacatatctccaatgttcagcagcttgcatccccaaccacttgtataagccgcttgtgttgctcttccagctgaagtctttttatgggcacaggataggggaatggcaggcaaaaaaggcaatcacttgggcagaaaaatagggccagctgtttttacttagggctgagggttcaggcttgagggtggtgtttagctgggagcccagctgttctgtatcaatatgatgcaaataaggacaattattaacaaacaatttgaaatctagatctgaaaggtgtttttatttcttaaggtaaccaatcaagtaaatcatgtaaggggtttggtctttctaatgtcttgtagccatttagtcttttgggtgattctttctaactgaatttctacttttcatcctggtctgtagaacagggtgactagctgcaggtcagctccagttggagatcttctccagtgatggaagatgtctgctcaggtagggctaactttttaaaatgagaaatgtgaattcatgagtagatggccttgagtttggctgcacaaggattggttaacaatatctgatatagtcccttccaatggggttggagagaagcttttatttgatgtcatttccagtaaacaaaatctccgggttgtaggccatgatctctgatgtcttcctctccc

SEQ ID NO: 674618 - DNA, 2853 bp, Homo sapiens
agcagtgcccgaagcaattctcaaacttttcagtaacatgagccagtaaatgtccttaatcacttgagctggtttgaatggtatttctatccttttaaactaaccttgagagtccacactaatattgcaaggacttccacatttcacattttcttttttttttttcacttggagatagggtctcactctgttgctcaggctggagtgtagtggtgtgatcatggttcactgcagcctcaatgacctgggctcaagcaatgctcccacttgagcctccaaagaagctgggactacaggtgcttgccactatgcctggttaatttttaaattttttgtagagatagcatctcgtcattttgtccatgctggtctcaaacttctggcctcaagcaatcctcctgccttggcctcccaaactgctaggattacaggtgtgggctactgtgctctgcccactaccacattttcttattcaagttgatagactaattatcatagtgccatacagtagaagttcaacaaatacttttcaaataaatgataaccttggtttaggttattgctttcattttaccatccaaacattttccttaatcatacagtgttgttgttgtggggtgyttttgtttgttttttgagaagcagtcttactccatcatccagattggagtgcagtgttataattatagctcactacaacctcgaactcccaggctcaagcaattctcttcctgcttcagcctcctgagtagctgggattgcaggcattgcaccactatgcccagctaatttttttattttttgtagagagttggggggtctcactgtcttgtccaggctagtcttgaactactggtctcaggtgatcctcccaccttggattcccaaagtgttaggattacaggcatgagcccctgcacccaggcttgttgctgctttttaaaaacaaagtctgaatttatttgcctgggcacacaaaaaacaaatatattattaaaagaaatataaacatgtagaataatgaaaccagaggtcaaattgtatatctgtattgctttctggagaatagctttgttgacctaaaggaaaaaactgtggccaaattaacataagtagagggtttatttgggccaagtttgaggactgcaaccaaggagcacagattcaagttgcctgaatatatgctccaattagcagtagttacaagtgggtttttaaaggaaaagagaagaggcagtttgtaagttgtttatcaagaatttacactaaggtaacataaggtattgattggctaaacattgttctttcttttctcatttcccccttttgatcaaaatttttctcttctgaaggcatcgatgaccaaaattttagatgtttgtctcatgtcattgggaaggctcattcccaggtaatctcatcccatgtctgagggaaagaggacaggtacttatggcttaagaatttagtgatggccaggcactgtggctcacacctgtaatcccagcactttgggaggccgaggtgggaggatcacttgagctcaggagttcaagactagcttgggcaacatagcaagacccccatctctacacaaaaatataaaataaaaaaatttgaaattttaaacttaagaatttagagaggtctcaaggctgaattgactggcaacataaagggacagagcaacaagatctaggccatccacttacagaggagccacagcatgttggatcatttctttcttgatgttaagacatctagaaatacaaagcataatcaacttaagaaccaaaaatattgagatgggatttttcccctgactttgaccctctttgtggacaggaactagagtggctcatttcactcagcctgcagtccatggatggctaagtgtaacagctcagtgaaggctcagggtgacagcctcctacacctgccttttttgacacctgagttcttgttcagtgtccaggaacaatcaggtcacacaaactatttgaaggatagtgtatttggaatatttattgggcgataaaagtggctctcagtaggatggggaatttgaaaggggatggtgtgggaagaaggtgatgtttccctgaagctgcactgtctgaagttagcagcgtctattcgtaatttctgacactcagctgcatggatccctgatgctcagctgcacatatctccaatgttcagcagcttgcatccccaaccacttgtataagccgcttgtgttgctcttccagctgaagtctttttatgggcacaggataggggaatggcaggcaaaaaaggcaatcacttgggcagaaaaatagggccagctgtttttacttagggctgagggttcaggcttgagggtggtgtttagctgggagcccagctgttctgtatcaatatgatgcaaataaggacaattattaacaaacaatttgaaatctagatctgaaaggtgtttttatttcttaaggtaaccaatcaagtaaatcatgtaaggggtttggtctttctaatgtcttgtagccatttagtcttttgggtgattctttctaactgaatttctacttttcatcctggtctgtagaacagggtgactagctgcaggtcagctccagttggagatcttctccagtgatggaagatgtctgctcaggtagggctaactttttaaaatgagaaatgtgaattcatgagtagatggccttgagtttggctgcacaaggattggttaacaatatctgatatagtcccttccaatggggttggagagaagcttttatttgatgtcatttccagtaaacaaaatctccgggttgtaggccatgatctctgatgtcttcctctccc

SEQ ID NO: 674619 - DNA, 2853 bp, Homo sapiens
agcagtgcccgaagcaattctcaaacttttcagtaacatgagccagtaaatgtccttaatcacttgagctggtttgaatggtatttctatccttttaaactaaccttgagagtccacactaatattgcaaggacttccacatttcacattttcttttttttttttcacttggagatagggtctcactctgttgctcaggctggagtgtagtggtgtgatcatggttcactgcagcctcaatgacctgggctcaagcaatgctcccacttgagcctccaaagaagctgggactacaggtgcttgccactatgcctggttaatttttaaattttttgtagagatagcatctcgtcattttgtccatgctggtctcaaacttctggcctcaagcaatcctcctgccttggcctcccaaactgctaggattacaggtgtgggctactgtgctctgcccactaccacattttcttattcaagttgatagactaattatcatagtgccatacagtagaagttcaacaaatacttttcaaataaatgataaccttggtttaggttattgctttcattttaccatccaaacattttccttaatcatacagtgttgttgttgtggggtgtttttgtttgttttttgagaagcagtctyactccatcatccagattggagtgcagtgttataattatagctcactacaacctcgaactcccaggctcaagcaattctcttcctgcttcagcctcctgagtagctgggattgcaggcattgcaccactatgcccagctaatttttttattttttgtagagagttggggggtctcactgtcttgtccaggctagtcttgaactactggtctcaggtgatcctcccaccttggattcccaaagtgttaggattacaggcatgagcccctgcacccaggcttgttgctgctttttaaaaacaaagtctgaatttatttgcctgggcacacaaaaaacaaatatattattaaaagaaatataaacatgtagaataatgaaaccagaggtcaaattgtatatctgtattgctttctggagaatagctttgttgacctaaaggaaaaaactgtggccaaattaacataagtagagggtttatttgggccaagtttgaggactgcaaccaaggagcacagattcaagttgcctgaatatatgctccaattagcagtagttacaagtgggtttttaaaggaaaagagaagaggcagtttgtaagttgtttatcaagaatttacactaaggtaacataaggtattgattggctaaacattgttctttcttttctcatttcccccttttgatcaaaatttttctcttctgaaggcatcgatgaccaaaattttagatgtttgtctcatgtcattgggaaggctcattcccaggtaatctcatcccatgtctgagggaaagaggacaggtacttatggcttaagaatttagtgatggccaggcactgtggctcacacctgtaatcccagcactttgggaggccgaggtgggaggatcacttgagctcaggagttcaagactagcttgggcaacatagcaagacccccatctctacacaaaaatataaaataaaaaaatttgaaattttaaacttaagaatttagagaggtctcaaggctgaattgactggcaacataaagggacagagcaacaagatctaggccatccacttacagaggagccacagcatgttggatcatttctttcttgatgttaagacatctagaaatacaaagcataatcaacttaagaaccaaaaatattgagatgggatttttcccctgactttgaccctctttgtggacaggaactagagtggctcatttcactcagcctgcagtccatggatggctaagtgtaacagctcagtgaaggctcagggtgacagcctcctacacctgccttttttgacacctgagttcttgttcagtgtccaggaacaatcaggtcacacaaactatttgaaggatagtgtatttggaatatttattgggcgataaaagtggctctcagtaggatggggaatttgaaaggggatggtgtgggaagaaggtgatgtttccctgaagctgcactgtctgaagttagcagcgtctattcgtaatttctgacactcagctgcatggatccctgatgctcagctgcacatatctccaatgttcagcagcttgcatccccaaccacttgtataagccgcttgtgttgctcttccagctgaagtctttttatgggcacaggataggggaatggcaggcaaaaaaggcaatcacttgggcagaaaaatagggccagctgtttttacttagggctgagggttcaggcttgagggtggtgtttagctgggagcccagctgttctgtatcaatatgatgcaaataaggacaattattaacaaacaatttgaaatctagatctgaaaggtgtttttatttcttaaggtaaccaatcaagtaaatcatgtaaggggtttggtctttctaatgtcttgtagccatttagtcttttgggtgattctttctaactgaatttctacttttcatcctggtctgtagaacagggtgactagctgcaggtcagctccagttggagatcttctccagtgatggaagatgtctgctcaggtagggctaactttttaaaatgagaaatgtgaattcatgagtagatggccttgagtttggctgcacaaggattggttaacaatatctgatatagtcccttccaatggggttggagagaagcttttatttgatgtcatttccagtaaacaaaatctccgggttgtaggccatgatctctgatgtcttcctctccc

SEQ ID NO: 674620 - DNA, 2853 bp, Homo sapiens
agcagtgcccgaagcaattctcaaacttttcagtaacatgagccagtaaatgtccttaatcacttgagctggtttgaatggtatttctatccttttaaactaaccttgagagtccacactaatattgcaaggacttccacatttcacattttcttttttttttttcacttggagatagggtctcactctgttgctcaggctggagtgtagtggtgtgatcatggttcactgcagcctcaatgacctgggctcaagcaatgctcccacttgagcctccaaagaagctgggactacaggtgcttgccactatgcctggttaatttttaaattttttgtagagatagcatctcgtcattttgtccatgctggtctcaaacttctggcctcaagcaatcctcctgccttggcctcccaaactgctaggattacaggtgtgggctactgtgctctgcccactaccacattttcttattcaagttgatagactaattatcatagtgccatacagtagaagttcaacaaatacttttcaaataaatgataaccttggtttaggttattgctttcattttaccatccaaacattttccttaatcatacagtgttgttgttgtggggtgtttttgtttgttttttgagaagcagtcttactccatcatccagattggagtgcagtgttataattatagctcactacaacctcgaactcccaggctcaagcaattctcttcctgcttcagcctcctgagtagctgggattgcaggcattgcaccactatgcccagctaatttttttattttttgtagagagttggggggtctcactgtcttgtccaggctagtcttgaactactggtctcaggtgatcctcccaccttggmttcccaaagtgttaggattacaggcatgagcccctgcacccaggcttgttgctgctttttaaaaacaaagtctgaatttatttgcctgggcacacaaaaaacaaatatattattaaaagaaatataaacatgtagaataatgaaaccagaggtcaaattgtatatctgtattgctttctggagaatagctttgttgacctaaaggaaaaaactgtggccaaattaacataagtagagggtttatttgggccaagtttgaggactgcaaccaaggagcacagattcaagttgcctgaatatatgctccaattagcagtagttacaagtgggtttttaaaggaaaagagaagaggcagtttgtaagttgtttatcaagaatttacactaaggtaacataaggtattgattggctaaacattgttctttcttttctcatttcccccttttgatcaaaatttttctcttctgaaggcatcgatgaccaaaattttagatgtttgtctcatgtcattgggaaggctcattcccaggtaatctcatcccatgtctgagggaaagaggacaggtacttatggcttaagaatttagtgatggccaggcactgtggctcacacctgtaatcccagcactttgggaggccgaggtgggaggatcacttgagctcaggagttcaagactagcttgggcaacatagcaagacccccatctctacacaaaaatataaaataaaaaaatttgaaattttaaacttaagaatttagagaggtctcaaggctgaattgactggcaacataaagggacagagcaacaagatctaggccatccacttacagaggagccacagcatgttggatcatttctttcttgatgttaagacatctagaaatacaaagcataatcaacttaagaaccaaaaatattgagatgggatttttcccctgactttgaccctctttgtggacaggaactagagtggctcatttcactcagcctgcagtccatggatggctaagtgtaacagctcagtgaaggctcagggtgacagcctcctacacctgccttttttgacacctgagttcttgttcagtgtccaggaacaatcaggtcacacaaactatttgaaggatagtgtatttggaatatttattgggcgataaaagtggctctcagtaggatggggaatttgaaaggggatggtgtgggaagaaggtgatgtttccctgaagctgcactgtctgaagttagcagcgtctattcgtaatttctgacactcagctgcatggatccctgatgctcagctgcacatatctccaatgttcagcagcttgcatccccaaccacttgtataagccgcttgtgttgctcttccagctgaagtctttttatgggcacaggataggggaatggcaggcaaaaaaggcaatcacttgggcagaaaaatagggccagctgtttttacttagggctgagggttcaggcttgagggtggtgtttagctgggagcccagctgttctgtatcaatatgatgcaaataaggacaattattaacaaacaatttgaaatctagatctgaaaggtgtttttatttcttaaggtaaccaatcaagtaaatcatgtaaggggtttggtctttctaatgtcttgtagccatttagtcttttgggtgattctttctaactgaatttctacttttcatcctggtctgtagaacagggtgactagctgcaggtcagctccagttggagatcttctccagtgatggaagatgtctgctcaggtagggctaactttttaaaatgagaaatgtgaattcatgagtagatggccttgagtttggctgcacaaggattggttaacaatatctgatatagtcccttccaatggggttggagagaagcttttatttgatgtcatttccagtaaacaaaatctccgggttgtaggccatgatctctgatgtcttcctctccc

SEQ ID NO: 674621 - DNA, 2853 bp, Homo sapiens
agcagtgcccgaagcaattctcaaacttttcagtaacatgagccagtaaatgtccttaatcacttgagctggtttgaatggtatttctatccttttaaactaaccttgagagtccacactaatattgcaaggacttccacatttcacattttcttttttttttttcacttggagatagggtctcactctgttgctcaggctggagtgtagtggtgtgatcatggttcactgcagcctcaatgacctgggctcaagcaatgctcccacttgagcctccaaagaagctgggactacaggtgcttgccactatgcctggttaatttttaaattttttgtagagatagcatctcgtcattttgtccatgctggtctcaaacttctggcctcaagcaatcctcctgccttggcctcccaaactgctaggattacaggtgtgggctactgtgctctgcccactaccacattttcttattcaagttgatagactaattatcatagtgccatacagtagaagttcaacaaatacttttcaaataaatgataaccttggtttaggttattgctttcattttaccatccaaacattttccttaatcatacagtgttgttgttgtggggtgtttttgtttgttttttgagaagcagtcttactccatcatccagattggagtgcagtgttataattatagctcactacaacctcgaactcccaggctcaagcaattctcttcctgcttcagcctcctgagtagctgggattgcaggcattgcaccactatgcccagctaatttttttattttttgtagagagttggggggtctcactgtcttgtccaggctagtcttgaactactggtctcaggtgatcctcccaccttggattcccaaagtgttaggattacaggcaygagcccctgcacccaggcttgttgctgctttttaaaaacaaagtctgaatttatttgcctgggcacacaaaaaacaaatatattattaaaagaaatataaacatgtagaataatgaaaccagaggtcaaattgtatatctgtattgctttctggagaatagctttgttgacctaaaggaaaaaactgtggccaaattaacataagtagagggtttatttgggccaagtttgaggactgcaaccaaggagcacagattcaagttgcctgaatatatgctccaattagcagtagttacaagtgggtttttaaaggaaaagagaagaggcagtttgtaagttgtttatcaagaatttacactaaggtaacataaggtattgattggctaaacattgttctttcttttctcatttcccccttttgatcaaaatttttctcttctgaaggcatcgatgaccaaaattttagatgtttgtctcatgtcattgggaaggctcattcccaggtaatctcatcccatgtctgagggaaagaggacaggtacttatggcttaagaatttagtgatggccaggcactgtggctcacacctgtaatcccagcactttgggaggccgaggtgggaggatcacttgagctcaggagttcaagactagcttgggcaacatagcaagacccccatctctacacaaaaatataaaataaaaaaatttgaaattttaaacttaagaatttagagaggtctcaaggctgaattgactggcaacataaagggacagagcaacaagatctaggccatccacttacagaggagccacagcatgttggatcatttctttcttgatgttaagacatctagaaatacaaagcataatcaacttaagaaccaaaaatattgagatgggatttttcccctgactttgaccctctttgtggacaggaactagagtggctcatttcactcagcctgcagtccatggatggctaagtgtaacagctcagtgaaggctcagggtgacagcctcctacacctgccttttttgacacctgagttcttgttcagtgtccaggaacaatcaggtcacacaaactatttgaaggatagtgtatttggaatatttattgggcgataaaagtggctctcagtaggatggggaatttgaaaggggatggtgtgggaagaaggtgatgtttccctgaagctgcactgtctgaagttagcagcgtctattcgtaatttctgacactcagctgcatggatccctgatgctcagctgcacatatctccaatgttcagcagcttgcatccccaaccacttgtataagccgcttgtgttgctcttccagctgaagtctttttatgggcacaggataggggaatggcaggcaaaaaaggcaatcacttgggcagaaaaatagggccagctgtttttacttagggctgagggttcaggcttgagggtggtgtttagctgggagcccagctgttctgtatcaatatgatgcaaataaggacaattattaacaaacaatttgaaatctagatctgaaaggtgtttttatttcttaaggtaaccaatcaagtaaatcatgtaaggggtttggtctttctaatgtcttgtagccatttagtcttttgggtgattctttctaactgaatttctacttttcatcctggtctgtagaacagggtgactagctgcaggtcagctccagttggagatcttctccagtgatggaagatgtctgctcaggtagggctaactttttaaaatgagaaatgtgaattcatgagtagatggccttgagtttggctgcacaaggattggttaacaatatctgatatagtcccttccaatggggttggagagaagcttttatttgatgtcatttccagtaaacaaaatctccgggttgtaggccatgatctctgatgtcttcctctccc

SEQ ID NO: 674622 - DNA, 2853 bp, Homo sapiens
agcagtgcccgaagcaattctcaaacttttcagtaacatgagccagtaaatgtccttaatcacttgagctggtttgaatggtatttctatccttttaaactaaccttgagagtccacactaatattgcaaggacttccacatttcacattttcttttttttttttcacttggagatagggtctcactctgttgctcaggctggagtgtagtggtgtgatcatggttcactgcagcctcaatgacctgggctcaagcaatgctcccacttgagcctccaaagaagctgggactacaggtgcttgccactatgcctggttaatttttaaattttttgtagagatagcatctcgtcattttgtccatgctggtctcaaacttctggcctcaagcaatcctcctgccttggcctcccaaactgctaggattacaggtgtgggctactgtgctctgcccactaccacattttcttattcaagttgatagactaattatcatagtgccatacagtagaagttcaacaaatacttttcaaataaatgataaccttggtttaggttattgctttcattttaccatccaaacattttccttaatcatacagtgttgttgttgtggggtgtttttgtttgttttttgagaagcagtcttactccatcatccagattggagtgcagtgttataattatagctcactacaacctcgaactcccaggctcaagcaattctcttcctgcttcagcctcctgagtagctgggattgcaggcattgcaccactatgcccagctaatttttttattttttgtagagagttggggggtctcactgtcttgtccaggctagtcttgaactactggtctcaggtgatcctcccaccttggattcccaaagtgttaggattacaggcatgagcccctgcacccaggcttgttgctgctttttaaaaasaaagtctgaatttatttgcctgggcacacaaaaaacaaatatattattaaaagaaatataaacatgtagaataatgaaaccagaggtcaaattgtatatctgtattgctttctggagaatagctttgttgacctaaaggaaaaaactgtggccaaattaacataagtagagggtttatttgggccaagtttgaggactgcaaccaaggagcacagattcaagttgcctgaatatatgctccaattagcagtagttacaagtgggtttttaaaggaaaagagaagaggcagtttgtaagttgtttatcaagaatttacactaaggtaacataaggtattgattggctaaacattgttctttcttttctcatttcccccttttgatcaaaatttttctcttctgaaggcatcgatgaccaaaattttagatgtttgtctcatgtcattgggaaggctcattcccaggtaatctcatcccatgtctgagggaaagaggacaggtacttatggcttaagaatttagtgatggccaggcactgtggctcacacctgtaatcccagcactttgggaggccgaggtgggaggatcacttgagctcaggagttcaagactagcttgggcaacatagcaagacccccatctctacacaaaaatataaaataaaaaaatttgaaattttaaacttaagaatttagagaggtctcaaggctgaattgactggcaacataaagggacagagcaacaagatctaggccatccacttacagaggagccacagcatgttggatcatttctttcttgatgttaagacatctagaaatacaaagcataatcaacttaagaaccaaaaatattgagatgggatttttcccctgactttgaccctctttgtggacaggaactagagtggctcatttcactcagcctgcagtccatggatggctaagtgtaacagctcagtgaaggctcagggtgacagcctcctacacctgccttttttgacacctgagttcttgttcagtgtccaggaacaatcaggtcacacaaactatttgaaggatagtgtatttggaatatttattgggcgataaaagtggctctcagtaggatggggaatttgaaaggggatggtgtgggaagaaggtgatgtttccctgaagctgcactgtctgaagttagcagcgtctattcgtaatttctgacactcagctgcatggatccctgatgctcagctgcacatatctccaatgttcagcagcttgcatccccaaccacttgtataagccgcttgtgttgctcttccagctgaagtctttttatgggcacaggataggggaatggcaggcaaaaaaggcaatcacttgggcagaaaaatagggccagctgtttttacttagggctgagggttcaggcttgagggtggtgtttagctgggagcccagctgttctgtatcaatatgatgcaaataaggacaattattaacaaacaatttgaaatctagatctgaaaggtgtttttatttcttaaggtaaccaatcaagtaaatcatgtaaggggtttggtctttctaatgtcttgtagccatttagtcttttgggtgattctttctaactgaatttctacttttcatcctggtctgtagaacagggtgactagctgcaggtcagctccagttggagatcttctccagtgatggaagatgtctgctcaggtagggctaactttttaaaatgagaaatgtgaattcatgagtagatggccttgagtttggctgcacaaggattggttaacaatatctgatatagtcccttccaatggggttggagagaagcttttatttgatgtcatttccagtaaacaaaatctccgggttgtaggccatgatctctgatgtcttcctctccc

SEQ ID NO: 674623 - DNA, 1179 bp, Homo sapiens
ttataattgctggctctacccaaattcttccagttgcattccctgcttccagtctctaccttacctctttctccacctctcatccctctaggcaagctgtatcaacaagggtctcaacaagaaacagaattcacaagatagttcacatgaaaatactttaatgaaaggacaagttacagaggggtgagcgggtattaagggaacaaacgagatgatgaggcactcagagactagctacagaggaggtgttcaagagataaaaggagaacataaaatcaccagacagcccggggaaaactagagccatggtgaaagagccatctggcaggtactgtagtcatgaaggaatgaagctattgctggacatctgacactcaaagaaggaaggagcaaggaagagatgccccaatttccctttctacccaccttctgatatccttgccttggccttctttatgtccaaccacaaagcagtccttaaagaaactgaggtcaaccctcagaggcatagagcttagcaaagaagggcaggaaatgaatctggggggcaaagaaaataaccagcacattagtctttctccggactactttgaaaggccagtcatctaaaatgcaaaccttctcataccttgcaccctcttaaaatctaccagtggattcacatcatctgtaggactaaatctaaactgggatgtgcgactttgcccctgcttatggcttcattccccagttcctgtcttagcctacggccattgtgaattatttccaaattcaccagcattctatgctctcacacctctgtcctttgtccatattcttttctyttcccaaggcacctttctgcatcttctctgcttggctaacttcttctactcaacctttgagaatcaaagacttagctctagaatcacctccttccaaaagtttcctgaaaagtttttccaggtgtttctatgacttccttatataattccatcattatacagatgctccttgagttatgtcctgataaacccattttaagtcaaaaatatatgttgaaaatgcattttactctaataagcccattgtaatgagaaaaaaatcataagttaaaccatcagtcaggaaccatccattcttagttgagcgagtgtcctttctcccttgagaagaaggatgtgcatttttgtgcatttt

SEQ ID NO: 674624 - DNA, 513 bp, Homo sapiens
aattttagtattttgtttaatccaacatatacaaaatcttaattcaacatgttatcaatattaaaattattaactttctcacagaatatttcacattctttatttcattctagctcttcaaaatccaatgtgaattttatacttagagaatgtctcaattcaggctagccacatttcaagggccgactagacatgtggctggtgtttactgaactgggcagcgtagttctagacaacttttcacataaatgacaatagtagggtacaagtatgatttgcctccgttccatttacaaaccccatcacagcaaccaatagaagsagtatgaaacctaacccagtggccaataggaaagcttggaaagctggaatctgagtgtccagaattgtcagtgaaacttcaaagacagtcaggaggaagctgacctagctccacaacccccatgcaaacagaactgagaggaatcattacctctatttaccaaaccataagtatgctcattcgccaatctt

SEQ ID NO: 674625 - DNA, 1295 bp, Homo sapiens
cccattgtggtggaaggtgccctggcttttctgtccctaactcctggatttgacactgctttgtcacaatttagatgagagtgaggtggagcctttctgcttcctgtctgtcaaagaggaataataaggcctcttgtgagggttggagatgaarataagataaagtaaggagcaccttgtggaaggcctggcatatgggagatacctcaaaccattaaagtcacataaaagcttctgagtcaaggatttcagatcttagtgcttttaggaaatacactcagcttagtaccttttccatgaagaggtgagtaagacttgcttctatttaaaacttggaaaaccaagacagcagagaagataaatgtcttcaataaacatttgatgagtaggatgctaaccttagcactagaatattaaagaattgacagtgaaccatcatagtgttggctaaacagccaactcatacttctgatagcaccttaatgtctgtcaagtctttctacctagaatttccgaaacttttgagaacttgaaatttctcctcttcattagagtaatgggcgcactgtttgcatacaaagctgctcagaaatggagatatcaaaatgtcttagtgactactgctattccataccattacccaaaatttgaaccataattccattttacttatttaaaaatacttctactccacaccattttgcctttgcaaccattgcattaaacactggatacaaagaaaatgaaagaaacaaaccattctgtagcacagccagggttccgtctgaaaaatatttaaaaagagagcagagggacaggaacaagttacacctggaaaatttctatgcctaattcaaatacttttactggcagtggaaatgttatttaatcaccaaattctgcagtttcagcaatatccccagcagtgcattgacagataaaactgagataataaacttgtcttttctgagacaaggaaagagtgcagttttgacaaaacatcaaatatcagactgttttccaaaagctattggtaggagtgtcccacttagtaaaggaaacattctcactatggttagcattatggtttatgaactgctactagttatgcccaaattcaattcaagacctcaagcaggaagctacacatctgcaatttagctgtgtgaacaaggtagacacacagagggtggtctccgggaaattatcagatagacactgcttcctgcttataaataaatatttttctctctttaggttatccctgagaacatgccaatatgttacctggcaga

SEQ ID NO: 674626 - DNA, 642 bp, Homo sapiens
aatcagagatatgtctgagatcacagcagaaagagaggaagtagaaacgggattccgctgtgggccttctgccccagctgactgaatttccacacactccatatatgaagatttcttttcctaaagcatggtagaatgaatgctgctgggccccaccctatcccctttaccatctgagtgttggctgttaacactcacagctgtctgctctctctggagaactggactgtaaccacccacctcctccacagcagacctgggtcaatgactaactggcagaggggtatgaagagctggtgcctttgccttgaggtgggactaatgttggtgcagtttatgctacagagcttctcatggaattagacttaaggtaatttccagctgagaccatgttcttcctctgctctttccagcaaccctcactcctctttcccaagagtgctcctgcaataaatcacttgaacaagaatccccatttcaggagacgtttctagggatcccaatctataacacatcttaaaagcatcccatagtttctgatatttgtatgtcagtgtgtattgtgtgtgtgtctttgcatgtttgtgtgaytgtgacgatgatgaagaaaaaatatgtaaaatgagaaaaaaataaaaatta

SEQ ID NO: 674627 - DNA, 1195 bp, Homo sapiens
tggactatgccagctatgattgggaaaactagtttttcatacmgcattatctgtagacttgtattagcagcacactggtcataagcgttttgctttcctcaaatatgatgaggtgagctaattcaaagtgtgttggggctttctgccgcgtggctcctggaggtgttgagtcccaatttagccaattaatttggatttagttttgatatggataagggagaccagcttcattcatggtgtacacacagttttgccaataaggagaaaaaaaaagccacctgaatgttcctactcagagctcctaccccacccccaccaaggcccgggccattaaaaagactcaatgcagcctttctgtatctcatactgtattctgcaaggtactcctgtgaaagaaagttgtgctgcatcagccatctccctcctgaagatccctgcggatgaggatttgtgttttgaaggttctgagaattcctgcaacaacaattctcaaacttatttgtccaggggatcttttcttccactgaatgtagttggggagacatggccttaagccttgagcagagaaagagataactgttggctcacttacaaccaagtgttgtgtttatgttttaggtttttatgaaactgaggtgctgtttgaggttctaaatgaaattgggtggttgaagagaggctggtgtccctgtagacttagccagccatgagtagttgccttttgttgaaggaggtgttttacaaagggaaatagggtgtctcctgggcatcgcattagcacttaaatacatgtatcactgaaatgaaatgaaatgatgaaatgatgaaatgatgacatgaaatggtgaaatgaaatgaaataatgaagtgaaatgatgaaatgaaatgatgaaatgatgaaatgaaatgaaaagatgaaatgatgaattgaggaaatgatatgaaatgatgaaatgaaatgatgaaatgaaatgaaaaggtgtaatgaaacgaaatgattaaatgaaatgagattaaaagatgaaatgatgagatgaaatgaaatcatgagatgaaatgatgagatgaagtgaaatgatgaaatgtaatgaaatgatgaaatggaatgatgaaatgatgaaatggtgaaatgaaatgaggaaatgaaatgatgaaatgatgaagtgaaatgaaatgagaagatcaaatggtgaaa

SEQ ID NO: 674628 - DNA, 1195 bp, Homo sapiens
tggactatgccagctatgattgggaaaactagtttttcataccgcattatctgtagacttgtattagcagcacactggtcataagcgttttgctttcctcaaatatgatgaggtragctaattcaaagtgtgttggggctttctgccgcgtggctcctggaggtgttgagtcccaatttagccaattaatttggatttagttttgatatggataagggagaccagcttcattcatggtgtacacacagttttgccaataaggagaaaaaaaaagccacctgaatgttcctactcagagctcctaccccacccccaccaaggcccgggccattaaaaagactcaatgcagcctttctgtatctcatactgtattctgcaaggtactcctgtgaaagaaagttgtgctgcatcagccatctccctcctgaagatccctgcggatgaggatttgtgttttgaaggttctgagaattcctgcaacaacaattctcaaacttatttgtccaggggatcttttcttccactgaatgtagttggggagacatggccttaagccttgagcagagaaagagataactgttggctcacttacaaccaagtgttgtgtttatgttttaggtttttatgaaactgaggtgctgtttgaggttctaaatgaaattgggtggttgaagagaggctggtgtccctgtagacttagccagccatgagtagttgccttttgttgaaggaggtgttttacaaagggaaatagggtgtctcctgggcatcgcattagcacttaaatacatgtatcactgaaatgaaatgaaatgatgaaatgatgaaatgatgacatgaaatggtgaaatgaaatgaaataatgaagtgaaatgatgaaatgaaatgatgaaatgatgaaatgaaatgaaaagatgaaatgatgaattgaggaaatgatatgaaatgatgaaatgaaatgatgaaatgaaatgaaaaggtgtaatgaaacgaaatgattaaatgaaatgagattaaaagatgaaatgatgagatgaaatgaaatcatgagatgaaatgatgagatgaagtgaaatgatgaaatgtaatgaaatgatgaaatggaatgatgaaatgatgaaatggtgaaatgaaatgaggaaatgaaatgatgaaatgatgaagtgaaatgaaatgagaagatcaaatggtgaaa

SEQ ID NO: 674629 - DNA, 1195 bp, Homo sapiens
tggactatgccagctatgattgggaaaactagtttttcataccgcattatctgtagacttgtattagcagcacactggtcataagcgttttgctttcctcaaatatgatgaggtgagctaattcaaagtgtgttggggctttctgccgcgtggctcctggaggtgttgagtcccaatttagccaattaatttggrtttagttttgatatggataagggagaccagcttcattcatggtgtacacacagttttgccaataaggagaaaaaaaaagccacctgaatgttcctactcagagctcctaccccacccccaccaaggcccgggccattaaaaagactcaatgcagcctttctgtatctcatactgtattctgcaaggtactcctgtgaaagaaagttgtgctgcatcagccatctccctcctgaagatccctgcggatgaggatttgtgttttgaaggttctgagaattcctgcaacaacaattctcaaacttatttgtccaggggatcttttcttccactgaatgtagttggggagacatggccttaagccttgagcagagaaagagataactgttggctcacttacaaccaagtgttgtgtttatgttttaggtttttatgaaactgaggtgctgtttgaggttctaaatgaaattgggtggttgaagagaggctggtgtccctgtagacttagccagccatgagtagttgccttttgttgaaggaggtgttttacaaagggaaatagggtgtctcctgggcatcgcattagcacttaaatacatgtatcactgaaatgaaatgaaatgatgaaatgatgaaatgatgacatgaaatggtgaaatgaaatgaaataatgaagtgaaatgatgaaatgaaatgatgaaatgatgaaatgaaatgaaaagatgaaatgatgaattgaggaaatgatatgaaatgatgaaatgaaatgatgaaatgaaatgaaaaggtgtaatgaaacgaaatgattaaatgaaatgagattaaaagatgaaatgatgagatgaaatgaaatcatgagatgaaatgatgagatgaagtgaaatgatgaaatgtaatgaaatgatgaaatggaatgatgaaatgatgaaatggtgaaatgaaatgaggaaatgaaatgatgaaatgatgaagtgaaatgaaatgagaagatcaaatggtgaaa

SEQ ID NO: 674630 - DNA, 1317 bp, Homo sapiens
gggacaacggacagggaaactggagtgatggaggtaggggccatgctgctaggaatgtgggaacatcagaaagatggaatgctcgatattggattctctctcttgaagcctagactgaatagagccctattactccttgattttacttcattgagacttctgacctccagaaatgtaaggtaatacagttgtattatgtgtagctgtaaggttgtggtaatttgttacagcagcaacaggaaaccaatgcaaggggaaggggtgtgttttacttccctagtgtatcactgtcctctgttctcccaaatagttctgtgtttttgtgtttgctgtcaatttcaagaagagacagaaaacatttttctatgaggagagctaacaccacaattcttcttacgtagaaagtgtcttgagtaattctctaggttaggtcttgtataatcttggtatctgagagcctggaggtcatccctcacagcacatgagaagaggaaggggatgcrggtttgctgttttaacatttgtggggcaaattagatgtacaagactcattcttttattattattattattattgttctttaagttctagggtacatgtgcacaacgtgcaggtttgttacatacgtatacatgtgccatgttggtgtgctgcacccattaactcgtcatttacattaggtatacctcctaatgctatccctcccccctccccccaccccacaacaggccctggtgtgtgatgttccccttcctgtgtccatatgttctcattgttcaattcccacctgtgagtgagaacatgcagtgattggtttttttgtccttgcgatagtttgctgagaatgatggtttccagcttcatccatgtccctacaaaggacatgaactcatccttttttatggctgcaagcgaggactgagtcagagagatggggatggcagaggagacaaaatgtggtcagggccgtgtaagatgtgaccctgctgccatatctgaaagaaaggctgttggtgtttgtaaaggctttgggcaaattgtgctttgtagacaaaactgtagaagggtctgggtttaagcttagtgtcagcgtgatgaggactagaggtcgcagtgagcttgtgttaagaaatccaccctgcacttctggctttgtctctttcctggttttataggtggtgggttcctctatggaatgaacgtggctctgtggaaggaacatagttaaggtcagacagacctagattccaagttcagcttcaacaactgctgaccaagtgacttttacgcaaatcagccatgtgctgtcatgaaca

SEQ ID NO: 674631 - DNA, 696 bp, Homo sapiens
agctggatgagagacaaagctaaacttagagcagcagcaggagctgccagggagacagaaaggaaggacagactcctaaattccaggatgtctcctttaagtctgtaagaagctcagccaccgtctccttacctgactcctctgggaaagagtttccctaggttaagccatacagggatagggtaggagatgccatttggatctaggagcagagggcagagactcagcaggaagagtgtctctttgagaaggagacacagtggagtaggtgtgtaggttcacagggccagctatgggtagartcgggtgtacatttttagaagccacaattccccaaaatctcctgactataacatcagtgcacagagccagtgaaatggaggaggagtgggttcaggcaattcaggaagaaggaaagtaacaaatgagtggttgcaggaggacactttttctgtcgaggtcactaaacaaaacattgtctcctccccttaacttcggaaacaagcaatggagggtaaaagtgttgcctggcgcctgggggcaaaggcagtagataacttctctgtcgcgttctccagaagggcccattccagcctcacaggctgagaagtctgttcggttcccaagtactagagatgctgctataagggactcccgaatttccttcctgaaccagaggctgcccagccttttctt

SEQ ID NO: 674632 - DNA, 696 bp, Homo sapiens
agctggatgagagacaaagctaaacttagagcagcagcaggagctgccagggagacagaaaggaaggacagactcctaaattccaggatgtctcctttaagtctgtaagaagctcagccaccgtctccttacctgactcctctgggaaagagtttccctaggttaagccatacagggatagggtaggagatgccatttggatctaggagcagagggcagagactcagcaggaagagtgtctctttgagaaggagacacagtggagtaggtgtgtaggttcacagggccagctatgggtagagtcgggtgtacatttttagaagccacaattcccmaaaatctcctgactataacatcagtgcacagagccagtgaaatggaggaggagtgggttcaggcaattcaggaagaaggaaagtaacaaatgagtggttgcaggaggacactttttctgtcgaggtcactaaacaaaacattgtctcctccccttaacttcggaaacaagcaatggagggtaaaagtgttgcctggcgcctgggggcaaaggcagtagataacttctctgtcgcgttctccagaagggcccattccagcctcacaggctgagaagtctgttcggttcccaagtactagagatgctgctataagggactcccgaatttccttcctgaaccagaggctgcccagccttttctt

SEQ ID NO: 674633 - DNA, 696 bp, Homo sapiens
agctggatgagagacaaagctaaacttagagcagcagcaggagctgccagggagacagaaaggaaggacagactcctaaattccaggatgtctcctttaagtctgtaagaagctcagccaccgtctccttacctgactcctctgggaaagagtttccctaggttaagccatacagggatagggtaggagatgccatttggatctaggagcagagggcagagactcagcaggaagagtgtctctttgagaaggagacacagtggagtaggtgtgtaggttcacagggccagctatgggtagagtcgggtgtacatttttagaagccacaattccccaaaatctcctgactataacatcagtgcacagagccagtgaaatggaggaggagtgggtycaggcaattcaggaagaaggaaagtaacaaatgagtggttgcaggaggacactttttctgtcgaggtcactaaacaaaacattgtctcctccccttaacttcggaaacaagcaatggagggtaaaagtgttgcctggcgcctgggggcaaaggcagtagataacttctctgtcgcgttctccagaagggcccattccagcctcacaggctgagaagtctgttcggttcccaagtactagagatgctgctataagggactcccgaatttccttcctgaaccagaggctgcccagccttttctt

SEQ ID NO: 674634 - DNA, 696 bp, Homo sapiens
agctggatgagagacaaagctaaacttagagcagcagcaggagctgccagggagacagaaaggaaggacagactcctaaattccaggatgtctcctttaagtctgtaagaagctcagccaccgtctccttacctgactcctctgggaaagagtttccctaggttaagccatacagggatagggtaggagatgccatttggatctaggagcagagggcagagactcagcaggaagagtgtctctttgagaaggagacacagtggagtaggtgtgtaggttcacagggccagctatgggtagagtcgggtgtacatttttagaagccacaattccccaaaatctcctgactataacatcagtgcacagagccagtgaaatggaggaggagtgggttcaggcaattcaggaagaaggaaagtaacaaatgagtggttgcaggaggacactttttctgtcgaggtcactaaacaaaacattgtctcctccccttarcttcggaaacaagcaatggagggtaaaagtgttgcctggcgcctgggggcaaaggcagtagataacttctctgtcgcgttctccagaagggcccattccagcctcacaggctgagaagtctgttcggttcccaagtactagagatgctgctataagggactcccgaatttccttcctgaaccagaggctgcccagccttttctt

SEQ ID NO: 674635 - DNA, 696 bp, Homo sapiens
agctggatgagagacaaagctaaacttagagcagcagcaggagctgccagggagacagaaaggaaggacagactcctaaattccaggatgtctcctttaagtctgtaagaagctcagccaccgtctccttacctgactcctctgggaaagagtttccctaggttaagccatacagggatagggtaggagatgccatttggatctaggagcagagggcagagactcagcaggaagagtgtctctttgagaaggagacacagtggagtaggtgtgtaggttcacagggccagctatgggtagagtcgggtgtacatttttagaagccacaattccccaaaatctcctgactataacatcagtgcacagagccagtgaaatggaggaggagtgggttcaggcaattcaggaagaaggaaagtaacaaatgagtggttgcaggaggacactttttctgtcgaggtcactaaacaaaacattgtctcctccccttaacttcggaaacaagcaatggagggtaaaagtgttgcctggcgcctgggggcaaaggcagtagataacttctctgtcrcgttctccagaagggcccattccagcctcacaggctgagaagtctgttcggttcccaagtactagagatgctgctataagggactcccgaatttccttcctgaaccagaggctgcccagccttttctt

SEQ ID NO: 674636 - DNA, 696 bp, Homo sapiens
agctggatgagagacaaagctaaacttagagcagcagcaggagctgccagggagacagaaaggaaggacagactcctaaattccaggatgtctcctttaagtctgtaagaagctcagccaccgtctccttacctgactcctctgggaaagagtttccctaggttaagccatacagggatagggtaggagatgccatttggatctaggagcagagggcagagactcagcaggaagagtgtctctttgagaaggagacacagtggagtaggtgtgtaggttcacagggccagctatgggtagagtcgggtgtacatttttagaagccacaattccccaaaatctcctgactataacatcagtgcacagagccagtgaaatggaggaggagtgggttcaggcaattcaggaagaaggaaagtaacaaatgagtggttgcaggaggacactttttctgtcgaggtcactaaacaaaacattgtctcctccccttaacttcggaaacaagcaatggagggtaaaagtgttgcctggcgcctgggggcaaaggcagtagataacttctctgtcgcgttctccagaagggcccattccagcctcacaggcygagaagtctgttcggttcccaagtactagagatgctgctataagggactcccgaatttccttcctgaaccagaggctgcccagccttttctt

SEQ ID NO: 674637 - DNA, 1587 bp, Homo sapiens
caattttcctcctgagggattcctgctgagggaatcccagtgttcgatactgaaatctatacgttcctaatgggtggttaaaaaaaaaaacctcagcaagagaagcagaaaatgtttcctcttcctgaaaaactgtagaaaggcaggcaccattctgggtgggacatggtccttgcaaaagtctttatggtttttttttttattttgagatgaagttttgctcttgttgcccagactggagtgcagtggcataatctctgctcactgcaacctctgcctcctgggttcaagcaattctcctacctcagcctcccgagtagctggaattacaggcacctgccaccatacctggctaattttttgtatttttagtagagatggagttttgccatgttggccatgttggcctcgaactcctgacctcaagtgagccacccgcttctgcctcccaaagtgctgggattacaggcgtgagtcactgtgcccggccaagattctgttttgatagaacacttgagtctctctcaccttgtatttagagaagttagaaagtaaaagataatgtatatagaaagctttttgaaaactcttaagaacttcataaatatggggcactatgactaygcatatgaaaatatttcctatcagttggcagttaccacctcttatagtggcatggaacctcttgagttaaaccaagactcagtgagattgggtgatttaggtagtgtcattttatgaacaaggggtaccctactcagttcttttattttattatacttctctttgacattcactccagtgaaagaactctttcaaaagacatcatgcctggtctcacagagattcaaaggtgtttgagtccttccttattatgcccttggaagatgctttgaggaccccagtgatgaatcccaagaactctgtctccattatccctggaatagggcacctcatcactctggtgttaaccctgaagggccttcataataatgtgcttaaaagagtcccctattatgtccttcaggatggagcttgacttgcccaaattgctatgtacatgttaaagagaggctggaactgaagttggtcatttctcactggatcagtcaacaaggtttgactttctgtgtgctctgcatcattctgagtacagaataaggcatggctcctgccttcaaggagtatggaatttaatagacgatgacaacatacatgattgtaaatctatctacatgagagtgaataattgtgagattcctaataaacggcaagatatgttctgaaaatgtgaaacataaatgaggttgaagaaattgtgaaaggtttagcagaggaggaataattcgtcaggttctttaaatacaagtaaaggggaaaggaaggaccatttttaagtttagatattccaagggttagtggtgaggtggattatggtatgtcttctcgttgatgagggtggagactggcgaatagtggaaaataaagttaaatagttagggctggggccaattatgggttttataaaagcagacatagaaatttagattggggtgtagacaatgaaggcttaaacgtttttaagcc

SEQ ID NO: 674638 - DNA, 3256 bp, Homo sapiens
taacaggatatatacatatatatatacacacacacatacatatatatatgcacacacacacacacatatatatatttatttataaaggggagtttattaacttacaggatcataagttacacaatgggctgtctgcaaactgatgagaaaggagagccatggagtccaatgtttgagggcaggaagaaaccagcatgggagaaagatgtaggctgggaggctaggccagtctctccttttcaaatttttctgcctgatttatatttgctggcagcagattagattgtgcccaccagattaagggtgggtctgccttccccagcccactgactcaaatgttaatctctttcggcaacactctcacagacacaccctggatcaatacttcatatctctcaatcctatcaagttgacactcattattaaccatgtcactccctttcatatatatatgtatatagtcctttaattctgtcactctagagaaccctgactaatacatctacacttctgatgatctatttcttttattttaggtcatttatttcccctgggttgcctacactcgcttcttcccactcccctatgaaggacaatataagcctctggacctcactaggtcagggcatgtccctgcttgcactatccatgacactttcctcttttactctttagcaatgaggtaatgtcatccttacccagatgccagccaactgtctcacatccaggacagagagtctccatctcctctccagcaaataaccatgtatgtgtgcatggtggcatgcccctgtgatcccagctacaccataggcttaggggggagaatcacttgtgcttcagaattcaaggttgcaatgagccatgatcacaccactgcatttcatgctgggtaacagagagaccctgtgatttttcccctacattttacagaatttttttttgcctctttcttctattaatttatgttttgtccattcattttctgcaaacatttagagggcaaataggaagtttccctttataacgtggtggctcacgcctgtaatcccagcactttgggaggccgaggtgagccgatcacctgaggttgggagtttgagactagcctgaccaacatagagaaacctcgcctccactaaaaaaaatacaaaattagcagggtgtggtggtgtgcacctgtgatcccagctactcaggaggctgaggcaagagaattgcttggacctgggaggcggaggttgcagtgagcccagattttgccactacactccagcctgggtgacaagagcgaaactccatctcaaaaaaacaaaacgaaacaaaaacaaacaaaaaaacacctactgcctcactgaattaaaggcgtgttcagcagtttctttgttatttcaaagagtggcatctgcttcagcagggtcagtttttaatgtgtttgttttgtttcttttttctctgtctggtgttcttttctattttattataattttttaaatttgagggatgaggttttcatagtactgaatatcaaacaatgaatccgcatgaatgattcacctaatttccgtggttttagtcctctatacaggttttatatagcaaaagaaccatttaaagacttgggttacaaatgcattttattttacctctggcatgccttgggctgagaaagcattatatggtggcacaatatttgtaacattctcatagccatctggtggtggttcgaggtatgacgttttgaaaatctagcaagaattaaaaatatgtcaagttagagagaataattccagattattattaagatataattcattttgccccaagtatatacttcagattaagcatcctggaactaggttctataattaaatagataaattacactgacaacaatgagaaagggccttatcattattattgtcttcctaataatagaaacttttataaatgcatgcaatcccaggtaaccaaaactttccttataaagtgtaacagcagagcttcaaaggtggcactttggcaatcctctttttttgactatgccttttcagcttcgtttgtgggctccttttctttcatctttatttaaataatatttccctatgttttatccccagcccattgcttgcctctgtactgcctccctgcgagacttcattaagtatcagaattttaccaatagctcatatgcttatgatgcttaccttttcagattcgtatatttaaatgttttgtggttatttcatcctggatgtccaaactcaacatgttaaaattcaaatttatcatctctcaccccgggcctgcttttggtctgcattacctacctctattaatagcttcagtcattagycaccgacaccagacagtctcggagtcatcctgaactctatcttcccctccttccccaagtcaatcactaatcaagtcctgctaatacatttccttactatttctgaaatccatccgtcttcctcattcctactaacatcctaatttaaaactttattatcttttacctggactattgtcttaagacaacaactttaacccgttgcttagcctaggtgtaatccacagaggatcttgtctgtctaaaatgcccctctagccacatccttcccctgctcagatcttgtcattggctcccatgaactgaagttgaagtttaagctccttaggacagcatacacgcccttctatgatatgttcccagaacatatttactggtttatctcataccatggcccactttgtattttacacttttgaaatacagaaagtcattacattctaccaataatactaagatagtatatgcctaaaagcctttggcaatattttgtcttttgttgagaattctcttagcttattttgtcacgtgtttaactccttatgtcctttcatgactcacatgtcaagacttcaggaaaccttctctaactcccaggctgggctgagtgacccttttctgggtaagtaatgaactctaatcatactcttcatagcacttaccatactaatttgaagtctgaagtattccattgtctgcctcactttacttagacaaaggaaccatgtcctagtctcattctggcctcaggacttcagcctgggcgacagtgggagactgtgtgtcaaaaaaaattgctaatgattgaagcctaatactgaagattctggtttattaataattagtctgggtgttaattgagctccccaagtgattactcatgtaggacttcaaaccaat

SEQ ID NO: 674639 - DNA, 3256 bp, Homo sapiens
taacaggatatatacatatatatatacacacacacatacatatatatatgcacacacacacacacatatatatatttatttataaaggggagtttattaacttacaggatcataagttacacaatgggctgtctgcaaactgatgagaaaggagagccatggagtccaatgtttgagggcaggaagaaaccagcatgggagaaagatgtaggctgggaggctaggccagtctctccttttcaaatttttctgcctgatttatatttgctggcagcagattagattgtgcccaccagattaagggtgggtctgccttccccagcccactgactcaaatgttaatctctttcggcaacactctcacagacacaccctggatcaatacttcatatctctcaatcctatcaagttgacactcattattaaccatgtcactccctttcatatatatatgtatatagtcctttaattctgtcactctagagaaccctgactaatacatctacacttctgatgatctatttcttttattttaggtcatttatttcccctgggttgcctacactcgcttcttcccactcccctatgaaggacaatataagcctctggacctcactaggtcagggcatgtccctgcttgcactatccatgacactttcctcttttactctttagcaatgaggtaatgtcatccttacccagatgccagccaactgtctcacatccaggacagagagtctccatctcctctccagcaaataaccatgtatgtgtgcatggtggcatgcccctgtgatcccagctacaccataggcttaggggggagaatcacttgtgcttcagaattcaaggttgcaatgagccatgatcacaccactgcatttcatgctgggtaacagagagaccctgtgatttttcccctacattttacagaatttttttttgcctctttcttctattaatttatgttttgtccattcattttctgcaaacatttagagggcaaataggaagtttccctttataacgtggtggctcacgcctgtaatcccagcactttgggaggccgaggtgagccgatcacctgaggttgggagtttgagactagcctgaccaacatagagaaacctcgcctccactaaaaaaaatacaaaattagcagggtgtggtggtgtgcacctgtgatcccagctactcaggaggctgaggcaagagaattgcttggacctgggaggcggaggttgcagtgagcccagattttgccactacactccagcctgggtgacaagagcgaaactccatctcaaaaaaacaaaacgaaacaaaaacaaacaaaaaaacacctactgcctcactgaattaaaggcgtgttcagcagtttctttgttatttcaaagagtggcatctgcttcagcagggtcagtttttaatgtgtttgttttgtttcttttttctctgtctggtgttcttttctattttattataattttttaaatttgagggatgaggttttcatagtactgaatatcaaacaatgaatccgcatgaatgattcacctaatttccgtggttttagtcctctatacaggttttatatagcaaaagaaccatttaaagacttgggttacaaatgcattttattttacctctggcatgccttgggctgagaaagcattatatggtggcacaatatttgtaacattctcatagccatctggtggtggttcgaggtatgacgttttgaaaatctagcaagaattaaaaatatgtcaagttagagagaataattccagattattattaagatataattcattttgccccaagtatatacttcagattaagcatcctggaactaggttctataattaaatagataaattacactgacaacaatgagaaagggccttatcattattattgtcttcctaataatagaaacttttataaatgcatgcaatcccaggtaaccaaaactttccttataaagtgtaacagcagagcttcaaaggtggcactttggcaatcctctttttttgactatgccttttcagcttcgtttgtgggctccttttctttcatctttatttaaataatatttccctatgttttatccccagcccattgcttgcctctgtactgcctccctgcgagacttcattaagtatcagaattttaccaatagctcatatgcttatgatgcttaccttttcagattcgtatatttaaatgttttgtggttatttcatcctggatgtccaaactcaacatgttaaaattcaaatttatcatctctcaccccgggcctgcttttggtctgcattacctacctctattaatagcttcagtcattagccaccgacaccagacagtctcggagtcatcctgaactctatcttcccctccttccccaagtcaatcactaatcaagtcctgctaatacatttccttactatttctgaaatccatccstcttcctcattcctactaacatcctaatttaaaactttattatcttttacctggactattgtcttaagacaacaactttaacccgttgcttagcctaggtgtaatccacagaggatcttgtctgtctaaaatgcccctctagccacatccttcccctgctcagatcttgtcattggctcccatgaactgaagttgaagtttaagctccttaggacagcatacacgcccttctatgatatgttcccagaacatatttactggtttatctcataccatggcccactttgtattttacacttttgaaatacagaaagtcattacattctaccaataatactaagatagtatatgcctaaaagcctttggcaatattttgtcttttgttgagaattctcttagcttattttgtcacgtgtttaactccttatgtcctttcatgactcacatgtcaagacttcaggaaaccttctctaactcccaggctgggctgagtgacccttttctgggtaagtaatgaactctaatcatactcttcatagcacttaccatactaatttgaagtctgaagtattccattgtctgcctcactttacttagacaaaggaaccatgtcctagtctcattctggcctcaggacttcagcctgggcgacagtgggagactgtgtgtcaaaaaaaattgctaatgattgaagcctaatactgaagattctggtttattaataattagtctgggtgttaattgagctccccaagtgattactcatgtaggacttcaaaccaat

SEQ ID NO: 674640 - DNA, 634 bp, Homo sapiens
  misc_feature 604: n = A,T,C or G
gtgctagagcctgcagcccactggcttgcctcactgtggttggtggtggcagtaacagagactgcagcacaaccagagtggtaggacaggggctatccagggctgcacctttcgcagtgtggggtgggttgggggcgctatccagggtgtcattgcctgcattaggggtactggttggtagcactccacagggctgcactacccacggcagggagggtgkgttatgggtgctttctggggctgcagtgcccatggaggaggacaggttagggcactatcgggtatacgctactggcggcattgggggacggaggtggggggcgctattgagggcaggactagccgtggagggcgggcgagttcgatgctatcaggggctgcactgctggcggcggtcaacagagttggcatccaaggaaggagtggttctcctctccctgactccacactccagagggcaacccactcttggtcatactggagtgtggcagggcacgcagcgtttgcatgggaatcctgagcatggcagagcccccacacccaccgtggttcctgggcctatgcactctgggtctgtgcctcagaggctgccaggcacccctgnggacaacaacggggacagggccctgtgcgt

SEQ ID NO: 674641 - DNA, 680 bp, Homo sapiens
ttacccacagaccatttaatctatatcctcattaatgacattttctcagcttgacatactcttggctttgacaattaacaaaaacagaagaaatrgaagaaaaaaaccaatatggtatgcagtactcataattacattttcatttgtgttgctatccttgattactatacatataagaaattatctctcaaggaaataaatgatccttgtattgcttctggagatgaaaatcaatgagtttaccttttgctacaaatatagccactctttttttttcttgtagacattaaacaccaatttgtggagacagttttgcatatacaaaggaatctgagcagcatacctgactcaatattaataaatgaagttgaaataggacctgtgattggtctgtgatgacagaaagcaaatagcttttcctcctgatacaactaaaagattattttgctaagcatttatttcaaggattggcaaagaatgtgttataacacacgtctgtaggcataatggaagaaatgccttgagcgtcattcaaaggaaggatagagaaaaaatatatatagaatcaatgtattttaacggtaacagtcttttaatgtttattaaaaataaaatattttaattttaaaaaatcaatcttttaattttttattaaaatagaaattataagtcaaaagtag

SEQ ID NO: 674642 - DNA, 599 bp, Homo sapiens
cagctggacgtaaggaaggaaaggtgcctaattgggaatgatcattctaaagaacaacagttttcttgttgcacatcattggaatgcttattgtgaggacgatagtaattatttctgaatctggcatcaaaatactagagatgcttctaaaaaatacaagtttccagtttcaaaacaaaatcagagtcactagaagtagggcctaggaatcagtattttaaaaaattctctgagygattctgatgcaaagccaggtttgaggagcaccaacttaaaagaaaatcaaggctgaaattaaaaagaaaaaaacaaaaaacaacaaactcttcaatatgagggatacacagcatttaaaatcacaaactacatataatttttatgaaactgattttggataaaatatttgaattacagaagagctgaaagatcataaatatatggttacaaaaataacctgaagctttggatggcttggaaagataattactgggatttgcctcccaattctgcaagcaaaataccacctactttttacaaacataactagcaaggtatgtatgggttatattggcagaagtcacaaaacatacttcaatggc

SEQ ID NO: 674643 - DNA, 993 bp, Homo sapiens
taatacttgctgattaataatattggaaccttaatatctgattgataactaaaactttggcctccaccatctaaaagaaattattaggtaaatatatttaatattggctctatattccattaaactctgaaagtctatgatttcttaaatagtcacatggaatgcaatttcatttgcagaggtcttgtgtatattttacatttttaaaaatcgactacactattaaccaaaaaagtcacatatgaaaaaggttaattataaaattaaattgaacttggctaaacatcaacattattctgaaatttcaagaatgaagaaactataagtgaattttaaaaatcactaatgttttcagggggttaagatctaaattccacatttgcattttcctaagtgtttagtggtttcaagactgtttggaagcctagcattagaaatttctatcatcaagtcattaacctccagaataaaaacactggcaatcctctttcttagccaagtttttctagagaaaatctccatggtaatgcttattaaaatagaaccttttatttagtgttctttgtaaagtcttagtagaaacttaaacatacacttttcaaaaatgatatatgtgtcttatggcaatataatttcaagcttggtacaatgcaagggctttaaaatctctctgtgaagtgtattttatgtgaccctcagttgttatggtttgctttaatttatgtaattatgtatgaggtcaatatggaaaactagccctcactcattactggcaaacattcctgaacaatgtgtgtgccttcasgaatcaaactaacaggctcacagtctataataaggtcaaatgaaagcaagcaattgtgcaaacactaaacagttgtgattgtttactgtattacaatcgtactttagagatgacttaacaggcattaaattatatccagaatgctctcagatgacaatcaactgagcacacaaggcaaacagagctcc

SEQ ID NO: 674644 - DNA, 1169 bp, Homo sapiens
tttttttttttttttttttgaaatggagtctcattctcttgcccaggctggagtgcagtggtgctatctcagctcactgcaacctctgccctctgggttcaagcaattctcctgcctcagcctctcaagtagctgggattacaggtgcacgccaccatgccygcctaacttttgtatttttggtagaaatggagttttgccatgttgaccatgctggtctcgaactcctgacctcaagtgatttgcccgcctcagcttcccaaagtgctgagattacaggcgtgaaccaccacgcccggcctttctttgaaaaacttttgactaatgttgggccttctcagttgggacccttatttcctttctcctactctcctcccttactgtttcctattcttcttccttctctcttcctcctcccctccccatgcattcagctaattccgtctctgattacccaacatcactctgggctctgctggaagactcagagcctataaagcttcagaggggcctcagtgttattttagtcaggcaaactccacaggtaggagttacttctccacacctctgacagtgtcacttgcatacctgcaggaataggaaactcgcttcctttcatggtagtcctttccatcactgggcagctccatctaagaggcactttctcttgtgattaatcagacaacatttacacccccagtcatttctactcttccccatgcagagttcttgcagaatagctgtccctgataaggacagcccttccgaggcccaggaagaagtctcaaggcttctcaggctcattcaagtcgcaagacacacacacacccaatggaggattctggcaacgtaccatgtggtagaaatgtcagtccacatctcaggtgcatgggaaatatcactctctttattcattcacttcacactatggttgggatgtttgtctcctccaaatctcatgttgaaatgtgattcccaatgttaaaggtggtgcctagtgggaaatgggggcagatccctcatgaatgtcttggtgccctcctggtggtaatgagtgagttctcattctattcatgtgagatctggccgttaaaaatttagagcctgggaaagatggtgaccagaggctgcgaagggtagtggggggtgccggttggtggcggggagga

SEQ ID NO: 674645 - DNA, 603 bp, Homo sapiens
atagccgggattacagggatgcgccaccatgcccagctaatttttgtctttttagtggagaggggggttcaccacattagccaggctggtctcaaactcctgacctcaggtgatccacctgcctcagcctcccaaaatgttgggattacaggcatgaaccaccacgcccagacaattactgaatttttctgaaccctcctgagtccttcaccacgtccacattgctcttacacgcctgggactcctgcactgctccacaccagcttgtgcatggagagctctggaagcctctcccagctacattagtctaggcaccgcccctaccttcacaggtccaccttcctctcctgattggcttcagcctgggtggggaagacccgggaccctttcccagggacccttcagcatctcattctctttgctgctcttcaaatccctggcatggggcagggcagtgctggctgccttacgtgcctgggtctcattgctcctttccacgaccccagtatgttgggttmcatttgggtttcctttttaatagatggcggaactgagggccagagaggcaatgggcatagcagagccaggagtgaaacccaggtg

SEQ ID NO: 674646 - DNA, 603 bp, Homo sapiens
atagccgggattacagggatgcgccaccatgcccagctaatttttgtctttttagtggagaggggggttcaccacattagccaggctggtctcaaactcctgacctcaggtgatccacctgcctcagcctcccaaaatgttgggattacaggcatgaaccaccacgcccagacaattactgaatttttctgaaccctcctgagtccttcaccacgtccacattgctcttacacgcctgggactcctgcactgctccacaccagcttgtgcatggagagctctggaagcctctcccagctacattagtctaggcaccgcccctaccttcacaggtccaccttcctctcctgattggcttcagcctgggtggggaagacccgggaccctttcccagggacccttcagcatctcattctctttgctgctcttcaaatccctggcatggggcagggcagtgctggctgccttacgtgcctgggtctcattgctcctttccacgaccccagtatgttgggttccatttgggtttcctttttaatagatggcggaactgagggccagagaggcratgggcatagcagagccaggagtgaaacccaggtg

SEQ ID NO: 674647 - DNA, 664 bp, Homo sapiens
acaaagctgcatgaggaggcctgaacagaaggaggggtgcattcctggtggcactcagccctcggaaagactcaccaccattcagccaccccagcctcctccaagatcctgctcccctgactccttaccctactcaagtgggttaactctgtgacttcatcttcagctgaagtttaaagttaaagatgaagaacctgtccatgacattctggaatggccgtgttttatgaccaaataacatagacgacagatatgcctctgatttaccccatccctaaattgaacctcatacacacactcagagaacaggtcccaagggatgcagagaagtgtcttttatatatgttatgtgcaactaaaacaagttaaatcctaagagcctccactgcgataataaataaataaaaagttgaagctttcatagtctgtttgggggaattttcygagaaatcctcaggagaaatgtcatatgaaggagacacttaaaggaatgttcatttcaaggaagatagccattaatagaatgggtaaattatgacatccatccatagaatatgctacagtagtgaaaatgaacttgaactacacatataagcacaagtgtgtatcacaaatataacatagaacataaattataggaggatagataaaggacgccatttat

SEQ ID NO: 674648 - DNA, 651 bp, Homo sapiens
tataaattattcgtgtaattactttttaataggacaaaaaaaaaacacaatacatcaacaaagtccagaggatygagcaacaaagcacttggaggacattttagcagaaggagcatttgaacttggtcctaaaagtagagatgtttgctaagtagcaaacatagggtggaagggtgctctgagtcactacaagtgaccatatgtacaaagtgaaaggacttgggttattcaagaaagagtaagttcagtggtgattatggggtacatggcctgaggtgcgcctagaaaataaagttttaatttctattttctatagagtgccagatgatgagctaaactgatttccttatcatactttcttaattacctactcctatcattcattttgttccatgactcattatttgtactggaaaataaagcttagcacattacaacctgctagaaatttcatgttctttctgaattaagaattatctgtttgcttccaaactcattatgcatatattacacaagcagtataatgagtcatatgttacgctttttaaaactggatcattaagaaatcgtaagaacagatgtataacagttcaaaatctcaagaagcagagactatgggatggcactggtgatccccaaaactaggttgct

SEQ ID NO: 674649 - DNA, 651 bp, Homo sapiens
tataaattattcgtgtaattactttttaataggacaaaaaaaaaacacaatacatcaacaaagtccagaggattgagcaacaaagcacttggaggacattttagcagaaggagcatttgaacttggtcctaaaagtagagatgtttgctaagtagcaaacatagggtggaagggtsctctgagtcactacaagtgaccatatgtacaaagtgaaaggacttgggttattcaagaaagagtaagttcagtggtgattatggggtacatggcctgaggtgcgcctagaaaataaagttttaatttctattttctatagagtgccagatgatgagctaaactgatttccttatcatactttcttaattacctactcctatcattcattttgttccatgactcattatttgtactggaaaataaagcttagcacattacaacctgctagaaatttcatgttctttctgaattaagaattatctgtttgcttccaaactcattatgcatatattacacaagcagtataatgagtcatatgttacgctttttaaaactggatcattaagaaatcgtaagaacagatgtataacagttcaaaatctcaagaagcagagactatgggatggcactggtgatccccaaaactaggttgct

SEQ ID NO: 674650 - DNA, 611 bp, Homo sapiens
aggggcctctagggaacgacttattctactctaggcttctgcaaacgtttacctttacccttaggcccttcatgctcaaagagaatcctcatgtggctctcaaaaagacagagggataggaaagtacaagttgcacagtccttctcattctctaacccccaattccagaacgcatgaacatgtctaataagatattttatctaagatattactcttctttcatctaattctatgcagttataatgtgggaattaaaacatataatctgtttacctcagatcttwcttatcaggaatcacagtatgaatatttttaaatatactaaaatagcttaccaaatcaaaatgatgctactttaatttaaatacacatagggcactgtagtcctttaaatctttacagtcatcagcaatctcctgctcctctgaaaactaattatgtctctaatgaggcttcaatattaaatgtcagacaaatagttaactggtttaaaccagtttcaaatggtcgtagtttcagggaactgatttcttaagcatctcatttatttagtatatctgatgttctcaagtcgctgttacagagatggatctatatgccactgcttactc

SEQ ID NO: 674651 - DNA, 2558 bp, Homo sapiens
tcactacaggaagtaatgaaacactttggggtagaggaaaacttcactgtaggctctatagggcagaaccaagtctgtcttgctcactactggattcccttttctcagcagaatggatgcctgataaatatttgttgaagattgactgttgatgaaagataaaagtggtgctcagggaatgcttyttctaaaggatatgaaaggcaattgcctaggagcaggaaaatcaattaggattgaaaagtgcaaggatataatggtacttacaaagtacaaggataacagcaatgtaaaattcctaaaagaagggactccagaattcctaaaaggaagcccagaaagaagaaaacaggtaaatttgaagagatttctacagagccacataagataaccacttttgaagctcaaagaggcaaactgccacttaagaaaataaagtttattatactaggttagtgcaaaagtaattgcggtttttgccattactttcaatggcaaaaattgaaattgcttttgcaccaatctaataataaatcttttagaggaaaaagaaataccactgactattttcttatcaccttaaaatcatacaatttaatcacaaaggagccaaaataaatggacattgtttaggccacacaagcactttggagacatgaactcacaaaatgcacttctatgtaccaggctatgtaagaaacagctcattacacaactacacacaagagacacactcacactatggcactccaggccagctctagtcccagtgtcaagcctctatctgcctgtgtacccttcattaactcagggtttgtttatttgctcctagatgtcactaatgactgttagctattttacctgaccatctctaattaaattgtattttctcttcagtcttgtaaaatcagctggtttgaacacttctgactcattaacatgatcaactggtttttaataaatgtaagctttgtctttcactgtgggaaggaattattattaggtaaactctgaaatactttattttcaatctgtgtgacttttggggctttcacttgctacactatggtctgaggcagcataatagtatcacagtgtttggtcctaatatgctctggaagtaggacttcaaccaaaacacctgtactcatttcttctatttagtggaaagctgtcacagcatagaagagaaacctctgaaaaaaaattgcagatggggctgggtccagtacaacaatatctccttcatcttttacctctttgcacttcagtgtccttctctatgaaaaaggagaagagttattgacacatgttgtcagtatttgagaatttcagtaaaccaatccctcattccaaggaagaactggaaaatgagggaaatagaatcttttgtgagttttaagttgaaatataagatcaacatttaatagtagttatagtgatttttgaaacaggtttcccaccagaatcacctgtggagctttttaaaaatttagatacttagattttactctggaacagtgctgcccaataagactttcttcgatgatgcaatgttctagaagtatgctgtccaacacagtatccactaaccacgtgtaattattaagcacttgaaatgtgactaatgtgactgaggaacagatttttaattgtatttaactttaattaatttaaagtaaccacatgtggctagtggatttcaaatcagacagcatacttctagacaaattgctttcagtgtgtgctcctcaaacgcacagcaccagaaacaagcacagacttttccttgtcttcaaaatctatgctatgaaaaaaaggcctgctgaaatttcttcatattccaactaaaggagaaaataatggaagtaattcaaagcaatttgtctaaaaccaggagttcacttatacatacagcctttgaggtagagtggataacaaatccctatgtatcaggaaaattacctgattttattataaacccaaagcagaggattacattaaaataagccacaagtattacctaaatatttccattgcaaaagtcatggttatgcctaccaagctctatattttaatctattgagtttggcctaaatctcaaatgagactacaatggaaaaatggatacatattctggtccttcttatgctccttagcacaaaatatatttacactcataatgtacttagagaaaatagatggaaattttaactgctagtgtatgggctctaaacggctggcaaaggagcgtcttctaaggaaagaactttgtcccaggttctacttctggatataacagtggtatccctgatgcaccaacaggagggcgcccatttagaaatgccttccttggcgtgaattaggtcatgaacagtttgctgcactctccctacattatcttgatacacatttgtagggccttggctctaattctgggggctgtctacagacctgacaaagatgataatttattttggtactaagttcactggcccagataggcatcattaagaccatcatttgatatgtagaactaatcagccaaagtgatttta

SEQ ID NO: 674652 - DNA, 2385 bp, Homo sapiens
cctaggtttagtcattcattcagcaaatacttagcaacaccaactctgaactagttactgtataagtaggtaggaataaaatggtgagcaagacggacatggtccatactcttttgggtttagagtctagctcagtccttttcaaactttaatgtgcctacgaatcactgagatgttgttaaaaatgcatcttctgatctaggaagtctgaagtgagtccgagattctgcatttctaacaaattctcaggatgctactgattgtaatccacaggtcacactttgagtaacaaagaactagtttattgactctaagttgctgtggtatgatacattcctatactgtgagtacttcctctgacatttttgaatcaatgaatattgccaatataatggaaaatacatgtttttaccatgatgcctgctggatggaattttgagctgagagagcaatgattataggaatatgatttactgagagcaaaaagtaagaggcgaggcatcgaatgacatcatgatggcaccaaagaatcgtggagttcctagggacaggtaagaagatggcctctgcgattataaaaagtcgagaaacaacagatgctggcaaggctgtggggaaataggaatgcttttacactgttggtgggaatacaaattagtacaaccattgtggaagacagtgtggtgattcctcaaaggcctagaaccagaaataccatttgacccagcaatcccattaccagtatatacccaaaggaatataaatcattctgttataaagatacatgcacatgtatgtttattgcagcactattcacaatagcaaagacatggaatcaacccaaatgtccatcagtgatagactggataaagaaaatgtgatacatatacaccatggaatactatgcagccataaaaaggaatgaggtcatgtcctttgcagggacatagatggagctggaagccattatcctcagcaaactaacacaggaacagaaaaccaaacaccacatgttctcacttataagctggagctgagcaatgagaacacatggacacagggaggggaaaaacacacactggggcctgtcatggggccagggggagggagagaatcaggataaatagctaatgcatatggggttgaatacccaggtgatgggttgacaggtgccataaaccaccatggcacatgtttacttatgtaacaaacctgcacatcctgcacacatatcccagaactttaaattttatttaattttaaaaaaagaagttggcctgtgaacatgttagcatagtcagggcaatgacctactctcctcaaacatggcacagagctaaaggggccaagggaaacattttaaaattttttctaaaatctgctctttcttaatcggtagtcacctttcagccctctcaagtataccactaaaatttttcatttgggatgtcaaaaacacacaaaggttggtcctgttcaaaatgtataatctcacaaataaaaggagkctaaatttatttgactagacaccatatgctcataagcaactgcttatgcaaattgtcaaattattatatcttaaaatggatttgtgggaggtagagggtggaaggaaagaagcaggttaatttagctttatgctatttgaagccaagaaaacaggtcatgtggaattgagctggaagaagggttgagttttttcatttcttctagagtcaaaagagaaaatcaatctgagatataaaaaagggtaaagtctctttgatttctacaacccaaaatgcccaggcgccaatgcatgcaatgaaagactgcaggcatcttaaactcacctacaaatatttactttgccagctaatcttcaatagtaagaagaactcccattaataatttaaacgagccttggccagaaaaaaaattcagacaaatgaaggggttagcaggaaaggatcatcaaggttagctgtgaaggtaggtaggtatgtttatactacacattcatataaatatatccccacatgtggatgccagtgcacagaacaatgagatgggtttgcaagaaacccatcctgcaagatcagagacaagtctacctggtgagttataaatgctggcgacttcacatacttccctgaagacagaagtggaaaattgacgataaaggagagaataagtcaaattcattatactgctcacacttatacacactattatgaaatgcaacgatcattttggatctttttagtggtttcctatttttccttttttgagttttttagaagcaagagaaaaagagaagtcagttgaaaatgttgttactgatgagtgaaaaagatattaggttttgctgccatagttacttgccagaaagttcttttttctttt

SEQ ID NO: 674653 - DNA, 1240 bp, Homo sapiens
caaacctgcaatcatcaactctgtagtctatcaatttctatatttataaaatgacaaattttattattctcaaattttgtttcaaattatcttcaaaagtgctattaaaaattagtattataaaaatgtaaaattttttaagtaaggcttaagcatttcaatagtcaaatacatctttagctgttgtatggaaaagaaatggtaactatatgtgaactgtatgttttatatatagaatatatcaagtaaaataatacaaagcaaggattgtgatttatatgacagaaattaatcagaaatggtgattgtttatagttccaaaggaaaaaaataatgatagwcaatttgaggaattggatctattttagaattcaaagctactatacttttatacaattttgagagatggatatattttcttacaatttgccactatacacattgttttctcaaatataggttttgctcaataagtagaaattcataaaacaccaaggttttgcttaagccttaaaatcatagcaaaggcattgacctgtataaactagaatgaaacattgaaaaattgcaacaaattatctcacttgaatgatatcttcaaaggtatttactatctgtatatagaagggaaaagtgggaagagaaatgcaaatgtgagctcaagagcttagggggatgtggaaatagtatgaaagtcactgtgtttgctatttcaaagggcctatgacaagtattagtcccacagcttatattgagactactgaagaaaaaagttcattcatcctttttactattaggataaggaagaataattacatcagtatttcaaaatatcgttaaccaaaggtagaggttatccaagatttgcttagaatagtcgtttgcacatgaagctaatcagaaatttagaatggtgtttgaaacacctatccatatcccggagctgtaaaaaaagacttctttgacccagtgatgccactaacatttctttataaaaggataggagactatgaacaactagatagaagatgccgggcagtgaaccatagaagttgtcaaaagatggcccaggtataacagattgaaatgtaaaatgcaacacaataaaacttttagaagaaacacgggagataatctttgggaccaagagctaggcaaagaatttttagacatgacacagaatcatgatcggtaaaagtaaaacacagataaactgtacttaatcaagattaaaaagacc

SEQ ID NO: 674654 - DNA, 659 bp, Homo sapiens
atatttttattgtaaaataaatatatgtacattaaaatttagaaaataaagcataaagaaaaaaatctttcatactctcactgttataattgatgtttttatattattatatattgattatataaatattaacaattttccttcctgtcctttttctttttgtaaatatactgccccccaaarttgagatcatattctacattgattttattttgcttagatttacttaagcataacaaatgcttatatgtttatatcatattaaatatttccccaagccataaaaattccttcaactacattgtgtttgttgttttatattccacctttcgcatgtatcctaatacatttaaacatttccataaagtcagacatttgggtttgtttccagtttttcagtattataaataacacttcagtaaacaatattatacatacatttttgtccacatttctaatcttttccttaggaaaattttctgaaagtaaaatttcaaagtaaaaggatatgaaatttcatagattctggacacttcattccagagtctttatcagtttacactcacaaatgtgcctgacaaaaacacggggggatttttgtaaagaatagatcctattttgtaccaagagtatctgataacatccatacaagtttccat

SEQ ID NO: 674655 - DNA, 631 bp, Homo sapiens
agctgaccacctggaaccagccaatcaagaaagactgatgatatggggcttaaaggtcatctggtccagactctgttcctcattcccctgcctccccttccctgccctgcagtttttaccttcataatctcctgcattccagaccctcttcaaagtgcactttcatctccgcaatctgcagattgcttttagaaaataaasttgtaggttgactgtagttaataacaacttaattgaatattttaaaataagttaaagaatgtgattggattgtttgtaactcaaaagataaatgcttgaagggaaagacacccaattctccacgatgtgcttgtttcatattgcacgcctgtatcaaaacatctcgagtaccccagaaacatatacacgtactatgtacccacaaatatttaaaataataataataaaaagaaaataataaagttgttttgcttttgcagatctcattggtcttttgttaacacacagtttttccctttgttgtttgaacagagcattggaataatcttttacttgtttgtgtttacaaatttaatttgttgcttttgagatctctgagcattttccaacactaaattttagatttaaactatctcctggcaatgtgttg

SEQ ID NO: 674656 - DNA, 631 bp, Homo sapiens
agctgaccacctggaaccagccaatcaagaaagactgatgatatggggcttaaaggtcatctggtccagactctgttcctcattcccctgcctccccttccctgccctgcagtttttaccttcataatctcctgcattccagaccctcttcaaagtgcactttcatctccgcaatctgcagattgcttttagaaaataaagttgtaggttgactgtagttaataacaacttaattgaatattttaaaataagttaaagaatgtrattggattgtttgtaactcaaaagataaatgcttgaagggaaagacacccaattctccacgatgtgcttgtttcatattgcacgcctgtatcaaaacatctcgagtaccccagaaacatatacacgtactatgtacccacaaatatttaaaataataataataaaaagaaaataataaagttgttttgcttttgcagatctcattggtcttttgttaacacacagtttttccctttgttgtttgaacagagcattggaataatcttttacttgtttgtgtttacaaatttaatttgttgcttttgagatctctgagcattttccaacactaaattttagatttaaactatctcctggcaatgtgttg

SEQ ID NO: 674657 - DNA, 618 bp, Homo sapiens
caaattcaatgttaaatgttggtcagggctatgttagttctactgggagaccacaaaatgacatggtccatcctcctccttatccaaagatgcatggttaaaataatatagattaggaatcatcgttacctccaaacagttaattcaattcaaatttttagcccagactggtttttaaagacattttctgccaaaattttttggaagtaaacacattaagggtaggtgtggagaacgattaatggattcatttttatactcacatctgttttggaaatatattttatgcaataaagcataaactaacaggtatacttataaatgtctggttttagaaacactaaaagatctccaatcttagaagccttaatttgaaactctgctttattgcctgaactagtgactaactgtatagcatctcaygaagtgagaaagctattttaatcaatatcagagttttaaattacttcaaatgttacgttgttaaagcctattttaatggctaaatattatcatgtattatacagacttaagtttcttatatgttaaaaataagtgaaaatagattattttgaaatataattactaaagcaagctgctttaatcaactgaatctgg

SEQ ID NO: 674658 - DNA, 959 bp, Homo sapiens
tgaggtcacctctatgctatacagaaaggcggctgtgaaggagaagtaaagatgaaaacgcaggcaaccattctgcactcgcttcctccaaggcagctcacaagcaaggatcggagtgcctgcctgccatgccagctgtgtactggggaaataaagctctgccgagttatataacccagctcaggagaaaatgatagacactagcccaaagggactcctgagattaccatccttattctactctggtggtgatggtattgagcagggaatgggcctattcaatatccttcagtcctgcagaacatggcacaataaccatgactataggggtctcctctgcactgtcccacccaatactacccaaattgaaggccaatcttaaatgtcaccattccttgaaccctccatgctcccatccctacctggctagaatttttatctcaactcccacaatgtcttatctatacaatttattatttggcatttatttgctcaacaaatatcacttgcacacctatttttgatttgaagatacagaaatataaagaattaccattgctctcaaggaaatgcagcccagttcaacaaatggcctaaaatggaggaagcagagacaayaacagtcagaggagtattccaggcagaggtggtatcagagcaaaatcttgaaaggactgatagagtgggcaatggtgtttcagacaagggaacactatgtgtgaggtcacgggagctacagagaatcccaggtatattcctagagcacaagatcatcttggagattagtgagatgaggacagaaagaggcaggggtcaaaccacttcctgcctctttccattcctgtcccttaattcatgcaaaggattcttaatttgccctgaatgaggaaagcattgaaggattttaaaaacagggacatagcatgaacagatttgcatttttggaatatcactcagga

SEQ ID NO: 674659 - DNA, 600 bp, Homo sapiens
gaccataagttccacaaggaaaggcagttacatctgtttttttctcaccattatcatctcagtgtcatccctgttgagtgaatcagtgattgattagatatcttacagaattaagagctgtatatatttcttattttagagtatggaggccaaccagttrtccaaaagatcctctaggtattatgatacatacagacacttgctatgggtggttctccatccaaacaacacaatcaacattctggtttccagtgaaactagaaaaactaagtcagtggaaactaagtcagtagctttcctcacacatctttgtcgtcgcgaggcttataccagtttggaaaaatttaattttaagagcttatttggcaaacatttactaaatatctactctgtgccacatgctgcgttaaatgagaaccagacataaagtgtctcagccatggtctccatcttggaagactggagttacagtgtgggagggatacctgtcaattccacatcaaactaaatggtcggggtggagtcatagtgagggctgtaagctgatgctctggggccccattcggtcttcctggttttgtttttgttttcgtttctttg

SEQ ID NO: 674660 - DNA, 600 bp, Homo sapiens
gaccataagttccacaaggaaaggcagttacatctgtttttttctcaccattatcatctcagtgtcatccctgttgagtgaatcagtgattgattagatatcttacagaattaagagctgtatatatttcttattttagagtatggaggccaaccagttatccaaaagatcctctaggtattatgatacatacagacacttgctatgggtggttctccatccaaacaacacaatcaacattctggtttccagtgaaactagaaaaactaagtcagtggaaactaagtcrgtagctttcctcacacatctttgtcgtcgcgaggcttataccagtttggaaaaatttaattttaagagcttatttggcaaacatttactaaatatctactctgtgccacatgctgcgttaaatgagaaccagacataaagtgtctcagccatggtctccatcttggaagactggagttacagtgtgggagggatacctgtcaattccacatcaaactaaatggtcggggtggagtcatagtgagggctgtaagctgatgctctggggccccattcggtcttcctggttttgtttttgttttcgtttctttg

SEQ ID NO: 674661 - DNA, 1172 bp, Homo sapiens
  misc_feature 1072, 1073, 1074, 1075, 1076, 1077, 1078, 1079, 1080, 1081,1082, 1083, 1084, 1085, 1086, 1087, 1088, 1089, 1090, 1091,1092, 1093, 1094, 1095, 1096, 1097, 1098, 1099, 1100, 1101,1102, 1103, 1104, 1105, 1106, 1107, 1108, 1109, 1110: n = A,T,C or G
  misc_feature 1111, 1112, 1113, 1114, 1115, 1116, 1117, 1118, 1119, 1120,1121, 1122, 1123, 1124, 1125, 1126, 1127, 1128, 1129, 1130,1131, 1132, 1133, 1134, 1135, 1136, 1137, 1138, 1139, 1140,1141, 1142, 1143, 1144, 1145, 1146, 1147, 1148, 1149: n = A,T,C or G
  misc_feature 1150, 1151, 1152, 1153, 1154, 1155, 1156, 1157, 1158, 1159,1160, 1161, 1162, 1163, 1164, 1165, 1166, 1167, 1168, 1169,1170, 1171: n = A,T,C or G
gttttgggggaaataatcccctaggtcaaagtcttatatttagctgcttctgttttcttttaaagctagaaaaatgaagggtgtgaatgaattgatataacaggaaatcaacarggtaaagaataattttgatgatttcttcttggcattgcaattatatccagtacacttgatgatgaaataaacaaatagttcaaacaaagccattaattttcttcctatctacacaattttaattagaaacatttaattagacttggctaaaatttctcaacaagattgcagaatgcatgcttatgctacttgtacaccaggaaatgtatttttcagcatttactaagtacaacaaatagctgccatgattgtaggtatttcatggaaaacattcttgtcaaaattatcttttatcccaaaaagctttcactggaaaacaaagttccctcagagtttattagttattaagctttgatattttaattgttataataaataagatgcctttttaatatattaactgcattttatattatgtcatttttatggcaagcaataaatgtgtttgatgttcttgatactatttcaccactgaattttttaaactttcattatcatgagcatttctgacatgaattaaaatgacatgcaaatctgtaagctcatttcactgaagcaaaaatgctaaattgttgaattcatagagccttttaatctttaggggcaaatattgttttcaactaaatttgatagaactcaaccaattgttttaagtagttctcttttatttctctcattctacaaccatttgtgtgtagaaaatatgcaaacacagttgtttttcaacttaaaaaataataaacattatttccactagcatgttaaattatttgaaggcactgtactaggctttctagttaaagaaacttatattacctaattacacccaagaggtaaggtccttatatgactcaccaaatatttactaataaattgttaaatatagttattttgagatgtctatgtttctaattgcatttaataataaataaaaatttaaatgttatctttaataatnnnnnnnnnnnnnnnnnnnnnnnnnnnnnnnnnnnnnnnnnnnnnnnnnnnnnnnnnnnnnnnnnnnnnnnnnnnnnnnnnnnnnnnnnnnnnnnnnnnna

SEQ ID NO: 674662 - DNA, 1172 bp, Homo sapiens
  misc_feature 1072, 1073, 1074, 1075, 1076, 1077, 1078, 1079, 1080, 1081,1082, 1083, 1084, 1085, 1086, 1087, 1088, 1089, 1090, 1091,1092, 1093, 1094, 1095, 1096, 1097, 1098, 1099, 1100, 1101,1102, 1103, 1104, 1105, 1106, 1107, 1108, 1109, 1110: n = A,T,C or G
  misc_feature 1111, 1112, 1113, 1114, 1115, 1116, 1117, 1118, 1119, 1120,1121, 1122, 1123, 1124, 1125, 1126, 1127, 1128, 1129, 1130,1131, 1132, 1133, 1134, 1135, 1136, 1137, 1138, 1139, 1140,1141, 1142, 1143, 1144, 1145, 1146, 1147, 1148, 1149: n = A,T,C or G
  misc_feature 1150, 1151, 1152, 1153, 1154, 1155, 1156, 1157, 1158, 1159,1160, 1161, 1162, 1163, 1164, 1165, 1166, 1167, 1168, 1169,1170, 1171: n = A,T,C or G
gttttgggggaaataatcccctaggtcaaagtcttatatttagctgcttctgttttcttttaaagctagaaaaatgaagggtgtgaatgaattgatataacaggaaatcaacagggtaaagaataattttgatgatttcttcttggcattgcaattatatccagtacacttgatgatgaaataaacaaatagttcaaacaaagccattaattttcytcctatctacacaattttaattagaaacatttaattagacttggctaaaatttctcaacaagattgcagaatgcatgcttatgctacttgtacaccaggaaatgtatttttcagcatttactaagtacaacaaatagctgccatgattgtaggtatttcatggaaaacattcttgtcaaaattatcttttatcccaaaaagctttcactggaaaacaaagttccctcagagtttattagttattaagctttgatattttaattgttataataaataagatgcctttttaatatattaactgcattttatattatgtcatttttatggcaagcaataaatgtgtttgatgttcttgatactatttcaccactgaattttttaaactttcattatcatgagcatttctgacatgaattaaaatgacatgcaaatctgtaagctcatttcactgaagcaaaaatgctaaattgttgaattcatagagccttttaatctttaggggcaaatattgttttcaactaaatttgatagaactcaaccaattgttttaagtagttctcttttatttctctcattctacaaccatttgtgtgtagaaaatatgcaaacacagttgtttttcaacttaaaaaataataaacattatttccactagcatgttaaattatttgaaggcactgtactaggctttctagttaaagaaacttatattacctaattacacccaagaggtaaggtccttatatgactcaccaaatatttactaataaattgttaaatatagttattttgagatgtctatgtttctaattgcatttaataataaataaaaatttaaatgttatctttaataatnnnnnnnnnnnnnnnnnnnnnnnnnnnnnnnnnnnnnnnnnnnnnnnnnnnnnnnnnnnnnnnnnnnnnnnnnnnnnnnnnnnnnnnnnnnnnnnnnnnna

SEQ ID NO: 674663 - DNA, 628 bp, Homo sapiens
cgatggttcattttccgtcctcatctcagtcctcggaaggatgaattccacctctcaggccatggtccttcctcagagtttcctttgtcttagttcattccaaagatcatgttgtagggacgtttatcacgtatacggtatttgcataaactgtatgagcgattaaaagatattctctgacattaaacacaaacaacatagaaatctcacgggtgacgataggatcacaagattcctaataaatgttaagtggatggttactcaaggtaaatcccttcatccccttgcccttcattagaatagacagaaactgactgtatacaggctttactcctttataatgtgccaaaataaaaccccaaagcacaaatcgcacaaaccaagtcatgccactgggaccatcgtgtgtcatctgagctagctgggccatgccaactcctactccatcttctgcttttccctgcattcctcaggaatgrgagcttctgtgtgagcattcataagacatcctgcattcacgtccactgatgtgttttcttttttaaaaaactatgcacattttattaggaatgtttcaaccacatagaaaacatataatagaaaccaatatagacaccacatagacgtg

SEQ ID NO: 674664 - DNA, 641 bp, Homo sapiens
tagtgtcattacccccacccctaccaccctatactgatttcatacctcagtgccttaacttctattgtctcccttcctatcattcttctcttggataacatttgctcataatttcagactcaactctggtgacacttctaaaattctttccctaaaacccagattggactagattacccgagtgctcccacagtacccattgcttatctctgacatgacttgcagcatcatattgaaatgatctgacaaagtgattgttttctcctgccatgtatatactttaggacaacaaagattatgctctgttcgtcttctctataacwtcccttccccacaacccccaatatccctctgctggtgtctatcacaaaacctgttacagaataaactgaggaggacatcaaactgacatcagatgttggaactgatataaaatgtttaagaaaaaacaaacagcaatttggaaaccaattcctttgaaaaagtattttgagttctatatacttggtctgaaaaaggtgaggcttgggggtagggtgtgtaatgtaaatcttcaatactgaaaaggtgctgtgcataagaggggtttacttggttctggaggctccagtgacagaaatagggctggctggaagatgtta

SEQ ID NO: 674665 - DNA, 586 bp, Homo sapiens
ttttctccaaacaaaaatcagtttagtctgtggtttgggttttctcctgcccaaaatcacagagtataatgttgctaactgaaactggaaattggaatagaaacataatggcaaaaagtccactaatgtaaacccaaaccacagccacctgctctaaggctctttaattccttgctgatgtgatttaaataacaaagggaaagcaaggctttaatctagcaaggaaaaacagataagtktcatgcttcaacaagaacaacaacaacaaaaaaaacacactaagaaaaagaaaaatcccaacacaactcaaaaaacaaaaagcagttaggttttctcatttaaatcaataccatgacctatgaagattacttgggtttttaatcttcacactatttgcataattgtcaaaacagccacatttgtttggaaggacccttcaatttttctaagtcttttcttagtacaagaccaaatgctcttgtattgtatgggacagtgctagctcctaaactgaaataaaactagatgcaagaaagtcaggtaaagaattatactgctccctttggtttccttggggatttacgtg

SEQ ID NO: 674666 - DNA, 978 bp, Homo sapiens
cattagactctactgtaggccacacttaaagagaaacagacaaaactggtcattggggtccacctctaccacaaacatatttgaaaagcattttataccactttgtataatttctcctttttttttgtttccagcagctggtctgcagaattcattgtttccttactcccctagctgtccaggattctcagctgcaatgcttcagttaggctggcctattctgctccctgccttcttagctcttttttcctcaatgggattcattcatcttactctccccttgaagccttgctaaatgattggctttcaaatccctaactcacatggtgtgctaatggatgttaatggcttccccttgtatttaaattttaaatggagactcctatatatacactggaaaccaaaggaataaatatttartagtgtgaattgcagggaaagtggtgaaagatgtttcagagccagtgttcccctccactattcctaatcagattaaaccctgcctgtaaggttgattctttaaacgataggtaaacacctttctcaaatttgtaggcttaagactcatcatggggaatttctttaaaaggctggctttgggacctgtccccagagactcttttttggtaggtttaaggtagagcccaggaatccatgtttttaagaagtaacacaagtgattctatggcaggtggtgttaaaaggacgttttaagaaataaccactacctgaaaggatattggaacactcctagggaaggaacagaatgcaagtcttagatttcttatatatgtttacctttgctcaaatgtcaaaataattaaaaagacttattaccttactgggttcttgttctgttccacaatttttttttttctgataaacaagttaatactatactactgttaatcatcatcatcttcatcaccattatcaacatcaataataatggaaaaacattcgaagtgtgttcatttg

SEQ ID NO: 674667 - DNA, 662 bp, Homo sapiens
aagaaaatatgggttctttacaaagtaacaagtcatttaactcrtaaaaataaagaaggaaggaaaattttttacaagtaaatgttctctatactttctccacaaaataatacatgggctatacagtttgttgctataagaaaaatatttgagaactagtcagtatttactaaaatatgttgtatataacatattgtatagagtgatttgagttttctttacttaaaaaagcctaactaaacaatttttacctcctttataagacataaggaattttagaaaaagaagaaataaataaacaaggaagagaaaggaaagaaagaagaaaaggagaaaagaaattcaaatatatactttttcaatagagatgttatcttttcatctacctactcaatgtgtttccatctttaaatgatcttttttctgagaactatttgtaggatataagatcttatagaaaataatccaattttcttaatacagtaatttttaaatgctattggactaatgaattaactaaatagttgtcatttcataagcatggaagcccctcaactacaatagtggtatcatctataaagcgatgtcttttacttctcatggatgcagaatcaaattgataagacattaattcaactaataaatagtatagttttttttgt

SEQ ID NO: 674668 - DNA, 662 bp, Homo sapiens
aagaaaatatgggttctttacaaagtaacaagtcatttaactcgtaaaaataaagaaggaaggaaaattttttacaagtaaatgttctctatactttctccacaaaataatacatgggctatacagtttgttgctataagaaaaatatttgagaactagtcagtatttactaaaatatgttgtatataacatattgtatagagtgatttgagttttctttacttaaaaaagcctaactaaacaatttttacctcctttataagacataaggaattttagaaaaagaagaaataaataaacaaggaagagaaaggaaagaaagaagaaaaggagaaaagaaattcaaatatatactttttcaatagagatgttatcttttcatctacctactcaatgtgtttccatctttaaatgatcttttttctgagaactatttgtaggatataagatcttatagaaaataatccaattttcttaatacagtaatttttaaatgctattggactaatgaattaactaaatagttgtyatttcataagcatggaagcccctcaactacaatagtggtatcatctataaagcgatgtcttttacttctcatggatgcagaatcaaattgataagacattaattcaactaataaatagtatagttttttttgt

SEQ ID NO: 674669 - DNA, 683 bp, Homo sapiens
ggaggaaaggtatcagacataaaatctgaaatacagctgtgttgtttcaaaatgaataatgtctactgggtgagacactgaatcaagggcttagtttgcagcataaggaaaatatttgtgagtgttgctggaaaagctgacagcgtagcatatgcagcctccctttcagatacagaaacatgggaaagagagcaaaatgctaatttggctaggaaagcaaatgcaacttttgtaaccaagttagcagtagccatgagaatctctatttgattacaagtaactttcttctgttcttccttgttttagaaaataaagctatgaacttctaaaaaattaaaacaaatctctgatattcagggggaatagaattcctggaaaaagacagtgaaaacattcctattgctccacacagaacattatctacaaagtatgatagacctaaagttaatgaattcactagccrttgcttccacaaacataaatcagtaatatgatttttgccttgactgaggcaaaatgccaattaattgaaggtatattttctaaaatggtaatttaaataaagtttctttattaaaaatgtgggattttcattgagttcagctctcccatgaagcacctttattagagaattaatactaaaagccagagacagtagtaatgacctttagggaaaaatggat

SEQ ID NO: 674670 - DNA, 438 bp, Homo sapiens
acaccatatgtctgtaacaaggttaccagaaagctatactccctatccttgcctcttggatctctggaactgctggttcctgactttgccctagtatttttatttataccttgagtcaataaaaggaacaattgcatggaagaagtctgtatttattgaaaacttctaccgtgtgtgtttattacccaaaacccatagtaatacttccatgactgattcatctcagaaaccagggccaggaaaacattacttttccctcctggatgaatatgctttctgggcaagagaagttctctcatcctrtgtagtttttctttccaccttttagcagaaaattcagaagaattacatatgctcaaatgtggcaatctcactcagccagaattttttatttttttttcttctttatagttcttagtggctgcctctgaattgtat

SEQ ID NO: 674671 - DNA, 628 bp, Homo sapiens
aaaaaaaaaaaaaaaaaaaaagaaagaaagaaaagcaaagaaaaaagaattattcctacttcattgtgttttagtaaggattaaatgagttgatgaatgcaaagtgctttgaacttgtaataagttagctaatttgttactaatattaacgtagatgggaaggcatttctaaactcatactttcacagatacatgtctcattggactgcctctcctcttagtctttcacttttccttcagattgtactcttgtttattccatttgctaccctcactatttccatatgaggaggctttctcttctctcttctggtatgcagaaagctccagcagaacttcaaacttctgccagatgaattctggaagagagtgacttcccttgttgagcaacagtgattttgttcttccaattccatttcaatttccccawcagagagagctgtgacctggtgtctactagggattattgaaaaggaaagaaaccttggaaatctaaacatgaaatatttttggagtgaatctaaccagctttaccccatttcaggaaagaatgattttcttagtaaccttgttccggccagacctttcagaaaaattcaacaattctatccacacacttttattatat

SEQ ID NO: 674672 - DNA, 648 bp, Homo sapiens
ctcaggtgatctgcctgcctcggcctcccaaaatgctgggattacagtgtgagcccccgtgctgggccattctttttttgacaatgtgtaattagtcttagacataatgtttttaaatataagcttccagagagaatcattctaggttttactgatcttttgcatttcttttaccatacaaaactgtgcaaattctgaattttcaaaaatatcatttgaaacttagtctgtattttcargtttaactttttttttttgtatgtgcctcatatcattattcacttttactcaatttgacatttattgagaatctgctatgtgaaacagccactgttggcttttgagcagtgatgtcatgtgattgcagctttatttataggaagatcagactggttgatatggatgatgggtcgactgagggagaaactgaattaataaggaaactagtttagtggggtcacgaaacctctggtacaacataataggcctgaagaagagtgaccatagtgagaagggaaagtgttggcaataaggagataggattgtgaggatttgatgtaagactcttaaaaatttttttatgaggtaaaatttgtataacataaaattaaccattttaaagtatgtaattcagtagtattgagtaca

SEQ ID NO: 674673 - DNA, 599 bp, Homo sapiens
ccctgctaaatgggtaatagtatccatttcacaaagaatggcactgaagtttaaattactaaaggatctgcccaaggtcacagagcacaaatctagagctttaatgaattcctttccaagtagacgttggtttgaatctatctactggggtatacaatgtgtgatcaattctgaaatattacatttaagtctttggaattattcttgttaatggaccacataacagaaatrgaagggggtcgggcgcagtggctcacgcctgtaatcccagcactctgggaggccaaggcaggcagatcacctgaggtcaggagttcgagaccagcctgaccaatatggagaaaccctgtctctactaaaaatacaaaattagtcgggcatggtggcacatgcctgtaattccagctactcgggaggccaaggttgcggtgagccgagatagcgccattgcactccagcctgggcaacaagagcgagactccatctcaaaaaaaaaaaaaaaaaaaaagaagtagaagggaagagtcaatgtagaactacagaaaaaaatgtaggatggttaccaaagatgatcagcatgttcaaattttcatgtgtca

SEQ ID NO: 674674 - DNA, 617 bp, Homo sapiens
aatgcattatagccattcccactgccaccatatccaccaccaccatggctgccaccaaagccaccacaaccactgaagtttcctccacgaccaaaattgtcattcccactgaagccacctccaggaccaccaccaaaatttccagaacyacttcgaactctttggctagatgaagtactacccatctcttgcttcgactgggctttcctaacttctaagctgtggctattcacagtattgtaattttttttttttttaagatggagtctcactctgtcacctaggctggagtgcagtggcatgatctctgctcactgcagcctctgtctcccaggttccagcgattctactgcctcaggctcccaagtagccaggattacaggcacacaccaccatgcccagctaatttttgtatttttagtagagacggggtttcaccatgttggctaggttggtcttgaactcctggcctcaagtgatctgcctgcctccccctcccaaagtgctgggattacaggtgtgagccactgcacccagtcaagcatatttctaagaaaagggcaaacaattctcaaagaggcccctaatatctaaaaccagtttagaatccctgccct

SEQ ID NO: 674675 - DNA, 657 bp, Homo sapiens
ttctccataagatcacttggtaaattctataaaatccagatttgggggccttgttgtagatgtacctgtttaagaaagtttaggaatcataatattttaaaagcttcccaaatcaaatttgtattcaatttgtctgaatatatctgcgggctttttggagagctgagatgaaaattgctctgataaatcactaaatttgcatcacttagactcctaacagtttttaatttaatttwattttattttattagaatacttacatattgtcattttggatttaatccattttctactctacactgctgtcaactttatctttgtcaactccctatttaataaatatctaggattcctaaagaagtccaaaccagctcaatatttgctcatcaatctatttatacattcattctttcaacaaagacttattaagtatatgtgtggttttttaggaaacaattattgactgatgaaacaaaagaccaagcctatgttctcagagtgttttctttctagagggaggagacataaaatcagataaacaataccaacatatattgatagagaaatagataaagcacaattgtcatcattttcttgatagctataaccaagccaattaattacaggtacagcatttgaagcccatagaactcgagg

SEQ ID NO: 674676 - DNA, 624 bp, Homo sapiens
aaagaagttccacccgtacccccaaacctggatacttcctccaggccgcacggtgctggcctcctccagcgactttgagcaggagagcaaatgagtcaagctcctctcacaggatgaggctgctgggagcagctcagaggactggaattagaaattctaattattagaactctcggaatgcaccaaaggacaatttataattagcacatgtcaaaaggccatccgcaaaggggacacattataaatcagaaaacaaagatggccccagaaagggactggggagctgagctgtttggcctcccacccctcctgatggccctaaatccaatccacctcccactcctgtgagccctcctccctcctatgccagcctctctcctgctgctctgccctttgcaagcccagcattggtgcttcccgctccctaagccctcttccctstgctgctcggtcagggccactgtccgaaggccttagcacagggatccctctcttcagggtccatgcagctctaaccccaggtcctgagcgggtcagaggcttttggctcctgctgtcacaggctgcaaataaggatttaatgactagcctttttatgaggaagaaaatgtctccagtggactg

SEQ ID NO: 674677 - DNA, 1038 bp, Homo sapiens
ttaaaaccagagatacctgacgttcayttttaagtttttacatgtttatgcaaatccactgccatctttttgaggcataagtcctgtctgctacacacaaaggagatgctaaggaacacttgcttgcctttatgttagaaacagaaacagtgtgattttttctgatgttctcaattacagagtctactgactcaggtctatatgtgcctgatgatgatcacgagccccatcaacaaagggagttcccgctcagcatggaggcagaccctccgccaaatgaaagaaaaatgtaggccaggtgtagtggctcacacctgtaatcccagcactttgggaggctgaggcaggtggatcacctgaggtcaggagttcgagaccagcctggccaacatggtgaaaccccatctctactgaaaatacaaaaactagctgggcattgtggtacatgcctgtaaccccagctaactgggaggctgaggcaggagaattgcttggacctgggaggctgaggttgcagtgatccaagatcatgccactatactccagcctgggagacagagcaagactctatctcaaaaaaaaaaaaaaaaaaaaaaaagaagaaaagaaaaagaaaagaaaaagaaaagaaaaatatagtcttcattcttcttaattctatcataaatctgagagtagaataataaaagtacatgaaaaactacccatagcttagtatagtttatgttacacacaaaacctgagagatataggcaataaatgttcctggaatatgttttacagcaacattggtccatcaggaaagtttccctccaggaaagattctgaacatagagaaataacaagaaatcaaattataaggaagattaactattgaccttttcctgacccctctatttctccccttcaagcaggagaattataggtcagtccaacgttgaagaaggagtaacatttctcattttgagctttctcaagaaatcttggctatcagagctcccagctgattcctagtggtttcttatgtttaaatacagg

SEQ ID NO: 674678 - DNA, 584 bp, Homo sapiens
agatagtggagtgagtaagcctcatttagaaagagacatcaagagttcaaacgttttctacaccccccaaaaytgatttcttcagagcagagtttcaggaatagtagtagatgtaaaaagaatatttaggggtagaatgtcaccacaccttacctccttatttacacacaaaagagtaagtctagagcccatgcacattatgtgctagctcaaatatgtgaacacacataggttccttccagatatctggggtctccactgatctctgtttcattcaaaatatttattggacactgttacatacacaatgccagtatctcttcttgattgcctatataacagatcatatctctgccacacaatttaatgcctgtagttttctcctttttccatgttgaaaagtttctctcgactgagtgcaaaagtccttcagggtagctgctaggtcctaccctatcatgtaattactgggcagtctcccaagcacagaccatattcaacaagtgatggcttgttaaagttcctgcttctactatgacctaaggaataaggggaattatattccctaagtgaccaattttctc

SEQ ID NO: 674679 - DNA, 584 bp, Homo sapiens
agatagtggagtgagtaagcctcatttagaaagagacatcaagagttcaaacgttttctacaccccccaaaactgatttcttcagagcagagtttcaggaatagtagtagatgtaaaaagaatatttaggggtagaatgtcaccacaccttacctccttatttacacacaaaagagtaagtctagagcccatgcacattatgtgctagctcaaatatgtgaacacacataggttccttccagatatctggggtctccactgatctctgtttcattcaaaatatttattggacactgttacatacacaatgccagtatctcttcttgattgcctatataacagatcatatctctgccacacaatttaatgcctgtagttttctcctttttccatgttgaaaagtttctctcgactgagtgcaaaagtccttcagggtagctgctaggtcctaccctatcatgtaattactgggcastctcccaagcacagaccatattcaacaagtgatggcttgttaaagttcctgcttctactatgacctaaggaataaggggaattatattccctaagtgaccaattttctc

SEQ ID NO: 674680 - DNA, 661 bp, Homo sapiens
ctggccttgtgtgtcagtaaaacacacatcactatggagagctgctttrtaataatgtccttctttcaatttactcaagggccatagccattgtggggcaaaaaaggatattataatgtccacctccttgtgagaaaatgatctaagggtaagagacaggcagaagattttccaaggccacaacaaattcaagaccagaagtcaggcctcctaattttctgaccaggagctccattttatctggaggataatgagagtgaactagagtcttcattcctctgattttttctttttcaattcctcatgccttttgacttattttgccagaagaagggatcattatggggaaactggaatgatttcagtggagaaataatgggaagaggtatgaaatgcaagaaagcaccttttgcagtgtggttttgaccccctgacatacccaagaagccatttttcttgtctgacagcaagaattccttccatgtaattttcagcagcaagcagggcttgggaagagtcctgagttggccttacatagatcagaactcgtactcagcaaaacagacacgttgcatatttggggtgccccagcttcattgtgctagatcgaatgtcttcatctcttaaccaccctcctttgtttttggtccccagtgctgca

SEQ ID NO: 674681 - DNA, 661 bp, Homo sapiens
ctggccttgtgtgtcagtaaaacacacatcactatggagagctgctttataataatgtccttctttcaatttactcaagggccatagccattgtggggcaaaaaaggatattataatgtccacctccttgtgagaaaatgatctaagggtaagagacaggcagaagattttccaaggccacaacaaattcaagaccagaagtcaggcctcctaattttctgaccaggagctccattttatctggaggataatgagagtgaactagagtcttcattcctctgattttttctttttcaattcctcatgccttttgacttattttgccagaagaagggatcattatggggaaactggaatgatttcagtggagaaataatgggaagaggtatgaaatgcaagaaagcaccttttgcagtgtggttttgaccccctgacrtacccaagaagccatttttcttgtctgacagcaagaattccttccatgtaattttcagcagcaagcagggcttgggaagagtcctgagttggccttacatagatcagaactcgtactcagcaaaacagacacgttgcatatttggggtgccccagcttcattgtgctagatcgaatgtcttcatctcttaaccaccctcctttgtttttggtccccagtgctgca

SEQ ID NO: 674682 - DNA, 661 bp, Homo sapiens
ctggccttgtgtgtcagtaaaacacacatcactatggagagctgctttataataatgtccttctttcaatttactcaagggccatagccattgtggggcaaaaaaggatattataatgtccacctccttgtgagaaaatgatctaagggtaagagacaggcagaagattttccaaggccacaacaaattcaagaccagaagtcaggcctcctaattttctgaccaggagctccattttatctggaggataatgagagtgaactagagtcttcattcctctgattttttctttttcaattcctcatgccttttgacttattttgccagaagaagggatcattatggggaaactggaatgatttcagtggagaaataatgggaagaggtatgaaatgcaagaaagcaccttttgcagtgtggttttgaccccctgacatacccaagaagccatttttcttgtctgacagcaagaattccttccatgtaattttyagcagcaagcagggcttgggaagagtcctgagttggccttacatagatcagaactcgtactcagcaaaacagacacgttgcatatttggggtgccccagcttcattgtgctagatcgaatgtcttcatctcttaaccaccctcctttgtttttggtccccagtgctgca

SEQ ID NO: 674683 - DNA, 661 bp, Homo sapiens
ctggccttgtgtgtcagtaaaacacacatcactatggagagctgctttataataatgtccttctttcaatttactcaagggccatagccattgtggggcaaaaaaggatattataatgtccacctccttgtgagaaaatgatctaagggtaagagacaggcagaagattttccaaggccacaacaaattcaagaccagaagtcaggcctcctaattttctgaccaggagctccattttatctggaggataatgagagtgaactagagtcttcattcctctgattttttctttttcaattcctcatgccttttgacttattttgccagaagaagggatcattatggggaaactggaatgatttcagtggagaaataatgggaagaggtatgaaatgcaagaaagcaccttttgcagtgtggttttgaccccctgacatacccaagaagccatttttcttgtctgacagcaagaattccttccatgtaattttcagcagcaagcagggcttgggaagagtcctgagttggccttacatagatcagaactcgtactcagcaaaacagacacgttgcatatttgggrtgccccagcttcattgtgctagatcgaatgtcttcatctcttaaccaccctcctttgtttttggtccccagtgctgca

SEQ ID NO: 674684 - DNA, 657 bp, Homo sapiens
ttttcttataactttgagagaaaattacagaattgttaaagaattatcattttgtaccgattaatgccacatatttaatactttttcagtaccccaaacttttaaaaatgtttttacttgttaggtgcaacataaacagctacacgtaaaaatactattaaatttatatgctataaataacagtatcagcaatgattcctacaaacactaccctgccaaaaaaaaaaaaaagagacccaaatgcacactaacgggagcttaagtctccacaagagcttccccagcctttctagaggacggtgaaaacaggctgagagcccgaggctcaaaaaaacagctcaaaggggctggaggccagtctraaagctgaggctgcacatgggatgctacgcacagctcaggaaagaggttggcaagcaggagccggaaggagcaccccagcccgcaggccaggagcgcccgcaggccccctcagccccggagcacgctcaaggccctccctcgggttcccagtaccccgggtttccagacctacggccaccaggggaggctcggcctcgggacgggtgcgagagtcacgcggcgcgcgacagaccaccaagtgctgcggtacggcgcccgcacctgtataactcgggacgcgtcaggcgcggcgag

SEQ ID NO: 674685 - DNA, 1239 bp, Homo sapiens
aaaaattatctgaacgatactatgatgtactgaattagacaataagatgtggttcttacccttgtaaatggacaaaaaaaagaaccccagggattataaatcaaactttttaagtcagaaattcaatacctttattgttttttactcttttaaaaaacacagcatataatttggatcatatttcaagttatggcataataacaggtcttactatttgctctgatgaagcgtttataacctggtaatagaatcactgaaagagatgattgcaaaaactaccaaagttacaaaatatttacatttcttgaggaatttaggcttttgagagtttagtatggtcattaaacttggaaagccaagaccaaaccaagttttagagctcctctcatgacactttctcaaatacattaaatattactttgcttaatacttttttctcaatcataatatactaacccttttggatgaatgaatgttgccatctttgccttctaaaaattatatgtttatttgagacccaaawaagcaatatggcattgaaaaacttggcccatgttattctcagcagggtctgaggcaacatctcgtaatcaaacatattggcatttctttggaaaattatatcactaataagacaatatgatatatctatgaagattgtaggaaatagatctatccatttggatagaaccatttaaaaaataacaacaactctaattatctgatatacatttgaactgatgaaaatattattctggtgtccagtcacagtatgtaataacaaggtagggagtgtggggcggggatgatgcctcagtggaaaaaaattatattgtcttattttatatacagtcaatatgatataaattatcatatatatcatatatgtcatatatcatattgtcttattagtcatactgtgtgtgtgtgtgtgtgtgtgtgtgtgtgtgtgtgtgtgtatatatatatgtatatataatctaataatacaccccttcctctattggttcaatgtaaattctaccaccaaatgaatttgccacaatcttaccaaattgatactttgggtttttagaaattttgtggtttctaatactgagaataatggatcatggtggtggtattccaatatggtggtggtattccaacattttaggaatcatgatcttccctgcataataaatttgcctccagggaggaactttgacactgtggagagtctagatacttcttggattt

SEQ ID NO: 674686 - DNA, 600 bp, Homo sapiens
cactattttcttaactaaagaaaaacaaactagcgtgtgtaatgatacctctaatgaactaagaacaagttaaatattaagtggactcaattgagaaggtagaataaatggtaaattaattggtctgaattgtttcaacaagctacattttgatattaaaaacagataaacacatatctgaaaacatttattttagacacttatcaagttggagtcataaaattttgctgtactaaatgtaaaatttaccaagtagcttcctgcctattctacatgcagaggtgtaaattaatcattatcatagaagatctttcttgactattgagcagtttcacagcttatgacaatatgtatcattgactcttaaggaaaataaagcatcaagaatgcattgttttctaaccaaaaacatcatccacagcrcttgtcaatcttagactcattccttaaagaaaaattaatatacttaggcaaaatatctttgggggttctaatttcatttataaggtatactgtttttttaaagatataaaaaactgggtggcttatacttttaacaaaaataatggttttgcaaactaatctacatttagggaacta

SEQ ID NO: 674687 - DNA, 667 bp, Homo sapiens
atgtggcgttctccctgtgtgtgcctgtgtcctaacttcctccttcataaggacaccagtcatatgggatcaggggcccaccttgttccagaatgaccttaactaattgcatctgcagtgaccctatttccaaataaggtcacattctgaagtactgggataaagatttcaacatagggaggagggggacacaattcaacccataacacgaggaattcccacgttaatttagccttgatggaattggaaagagattaatgatatagctcaggggaaaccagaacacacactcccaggctagaaagacaagcttgtccttctgaaccttccccaaactcaggtgtcactggaaagtcagccacccccctgggatgcccatgaaagcattgcctatgaagcattgggtctcagccctgayggggcagaatgggggccggctgaggtgagcggtgactccaagggctcagtgatgggcagtccaagtccccgcccagaggagaaacagaatcactccacactggcttgttctctccctgggtgttgggaggaggctgtccatcataggacctgctccagagtaagcagaagagagatcacttctctcaatattcagcagaccctgcaccatcacagtttccaatattcaaggggaagtagagctctggga

SEQ ID NO: 674688 - DNA, 630 bp, Homo sapiens
gctgsgaccacaggctcacaccaccacatccagctaatttttaatgttgttgttgagacgggagtctcattatgttgcccaggctgttctcaaacttctgggctcaagtgatcctcccacctcgacctctcaaactgctgggattacaggtgtgagccaccatgctcagctgtactatattttatgcaactcatttaatcccttcagcaacatatgtaactcatttatgccttcaaaaacatatgttttttgaaccctgtggttttgagattgatctatgtgacacatgaattttacattcatttatttttgtgcacttttttattggagcataatatccattaataaaattcacaaatcttaaaggtgcagcttaaggaatttttcaaagttgttacacccgtggaaacattatttgtttaaaaaaattaagcagccggttaccaggacttagaagctttccttgcaccccctttcatgttcattcatttaaattgctaagtagtattccattgtataaacatattatttcttaatccattttttaattgataaacatgtaagttgtttgcactgtttctcttaataaacaacgctgttggaacatttgagcttatcgcaggtgtgtac

SEQ ID NO: 674689 - DNA, 615 bp, Homo sapiens
gccatcagttattaatcaaaggctgctcctggggccacagtgtaatttccctggcacatctggcctgctgtgcacaggagcagagtagctctgtaggtcagaggaaacccccaggcaaatgaatctaggcgctgacaggtagaaggttagtgtgctctgcagtgttaagggtgaggggctctgggcagggcactgacagtgtcaactgcagtcaagaccttgttccactcagatccacctgtgtcctgtgttaggcttactctatcctatcactgcttcttcaaggtcacaaataaacattaaaaaaaaaaaaaaaaagacaacaggagcattagtgggccaggatctcactgtctactgctgcagtctttcccaygatgttcattgatcagctctcttctattctaccctttgtagaccctccagccccttggccagcatttctactggtttagattgcttaccttatggaataatgcagacctttttctctgagaggtctaagtcccagattaggagggattttttttttcgatgcaatcctatgtcctggcaggtctgatattatccatgccatagaaggcagtgctggttgcacagtcacttgatgtccca

SEQ ID NO: 674690 - DNA, 615 bp, Homo sapiens
gccatcagttattaatcaaaggctgctcctggggccacagtgtaatttccctggcacatctggcctgctgtgcacaggagcagagtagctctgtaggtcagaggaaacccccaggcaaatgaatctaggcgctgacaggtagaaggttagtgtgctctgcagtgttaagggtgaggggctctgggcagggcactgacagtgtcaactgcagtcaagaccttgttccactcagatccacctgtgtcctgtgttaggcttactctatcctatcactgcttcttcaaggtcacaaataaacattaaaaaaaaaaaaaaaaagacaacaggagcattagtgggccaggatctcactgtctactgctgcagtctttcccatgatgttcattgatcagctctcttctattctaccctttgtagaccctccagccccttggccagcatttctactggtttagattgcttaccttatggaataaygcagacctttttctctgagaggtctaagtcccagattaggagggattttttttttcgatgcaatcctatgtcctggcaggtctgatattatccatgccatagaaggcagtgctggttgcacagtcacttgatgtccca

SEQ ID NO: 674691 - DNA, 248 bp, Homo sapiens
  misc_feature 244: n = A,T,C or G
tgccctcctggccctgttttctctactccctctggtycccagcactggctgttcgtttcctgtgagtgccttgcccttccccacctgcatctttgcactgttttccccaaaaagttttcccagacctctgcagacagccttctgagcctccgccctgggactgcccctctgggcagtgatgattcctacctacatttggagctttcatgtgctcttaatagcattttttttctctctccactcngcag

SEQ ID NO: 674692 - DNA, 569 bp, Homo sapiens
ccttatcctgaaagacacagacaccaagaggaattggaacaaacaggacttgctaagttcccctggtttattaccayagatcacacccttctgtcctccaattatacttctgcacaactatctataaaagtacagttttccctgttcctttgggtcttcatttctggaggctctaatgtcatgtaaaacttatattaaatatatttgtacacttttctcttgttgatcttttgttagagatgtctcagccatgaaccttgtggtgaggaaaaagataccacttttctgtcctaccctagccaagtgactttaatcaagtcacttaacttctttgacttactttgtttctctgaagaagtgagtaaaagggtaacaccttgctatgaatgagtatatgcaaagcacttaaaacaatgcctgtacatggtaaggcaccatacatgtcagttgttatttctctaagttaaacaatgagtataacaatcacaaaaaagtcaaacatatgacatatttataggccatttgatatagtttaaatatttgccccctaaatctcatgttgaaacctg

SEQ ID NO: 674693 - DNA, 611 bp, Homo sapiens
taaatctatccttcaagtgacccaattctttaatctctgtaaggctcctcctgctttattaggctttcaggcatttccatgcttatgtacattagaaagatgaagatatgcttccatacctgcttctgaggatgaaaacgcatgatttatggtagacacrggaacattggaacattcaaagtactccaggtcttcctctggctcacctttcacctcggcaccagctgatttctgaccacatgacgtggatgccagtttctcctcatcagtagcatggccatccctattagaaatgtctgaaatctgggagatcactgccccttcatcctgagaaacacaacagagaagatgctaccctttaggagggcaagcaatggggaaaagtgacatcccatgaatggaacaaagtagacacaactccatacagatatgtgagaggttaaccacagacctgggtacaaagcaaggaggaagttggagtctttcaattgtgagatgctgttttatagaacctagtttctgtaacttgagtctgaggttttaaaaaatgatcttctctaggttaagtttataagcaagcagtttcagtggtttaagacaatggttttcaa

SEQ ID NO: 674694 - DNA, 611 bp, Homo sapiens
taaatctatccttcaagtgacccaattctttaatctctgtaaggctcctcctgctttattaggctttcaggcatttccatgcttatgtacattagaaagatgaagatatgcttccatacctgcttctgaggatgaaaacgcatgatttatggtagacacaggaacattggaacattcaaagtactccaggtcttcctctggctcacctttcacctcggcaccagctgatttctgaccacatgacgtggatgccagtttctcctcatcagtagcatggccatccctattagaaatgtctgaaatctgggagatcactgccccttcatcctgagaaacacaacagagaagatgctaccctttaggagggcaagcaatggggaaaagtgacatcccatgaatggaacaaagtagacacaactccatacagatatgtgagaggttaaccacagacctgggtacaaagcaaggaggaagttggagtctttcaattgtgagatgctgttttatagaacctagtttctgtaacttgagtctgaggttttaaaaaatgatcttctctaggttaagtttataagcaagcagtttmagtggtttaagacaatggttttcaa

SEQ ID NO: 674695 - DNA, 655 bp, Homo sapiens
agtttaagtatataaaacctcaaaatttttcatcaccaaaggcttcccagaataatcctaatccaatctctaaattttaaaaaactatgtcctttattttcaaatgcatttacgtaayaaaatacagcaaccaagaccaattacctcaaaatgagaaataaaacgattttctctgtaaggtcatgcacatttgctcttttgctcattttccttctggctaatggcattgatccattagcctgctcacagagctgagagtgaaatttataagcctgtcatatagggtaattagtaagcatgtcataaacataggaatatagaaaagaagacattctattaggagagagtctatttacgtggtgatagaaattttagcttaaatgtaaaaatgcttttccttaatttgacacttttctgtgttggtgaccacaaacattattttttaaattgtctgtttgataggaattctcattgatttatagaaataacatcatcatgatatacttcataaaactgctccagattccagaagcaatcaagaaagaagagaaacagtttgtctgagaaatgcaagttcctttgaattatcaggatcagagaggcacttaaaatgtgacagctgtcacatctcattctggcctggagctaaataatt

SEQ ID NO: 674696 - DNA, 1298 bp, Homo sapiens
taatccatgtgaaaattaaatgctttatgtatccaagctgcctcacccgtttgacttggaggacatagctgcatgggagaaaactctagaactaagtttgtcccttttgtgatttgggttcttggatggttggcaggagtcgaaaaatactgcctcagttgttcttcttggtcttgaaaacacaagcatcttaaaatggtgatagatagcaagaaagttaacaacgtattgcaagaaattgtttttcccaatctgtagttttaaaaaaatatttatagtgtgtttgctgtttcttatgtatttatttgattattgctgcatttgagtcatacaaaatgtgcatgtgtggtsaaaaatttttttatgatgtcgttttttgtttgtttattgagacagagtcttactcttgtcacccaggctggagtgcaatggcacaatctcggctcactgcaacttccacctcccaggctcaagcaattctcctccctcagcctcctgagtagctgggattctaggcgaggcgcccaccaccacgcctggctaatattttcgtagttttagtagagatgggggtttcaccatgttggccaggctggtcttaaactcctgacttcaggtgatctgcccgtctaagcctcccaaagtgctgggattacaggcctgagtcacctcgcccggcctacaatgtctttctttatgatgtctttccctggttatgttttcctactctatgtcatttaaacattagcctagagttatcactaatacttttatagttttgtcttcagatttgaaatatttaataagtctggaaattattcttatataaggccgtggtagaaatagcaattttatttattccttatgtgtatcaagttgtcaatagcattttaaataccattctttgttcacaaatttgagaggccatatttatcataaattgacatacatttttcatttttcttttctgttttgtttctttgattttttaattagtattttggtgcattagaataaaaaagagcccctgcttcaatattttagttgtggaaccaaacaaaaaaaaaagcattcttttagaatgcacctggtgtttcaacacagcctgttatgctctgtctcacgtacttggatcttaagtaaaaccagactgttgtcccagtatgtagtggcccaaggctgaggttctcaaatacctgtgagcctaagaatcatcttgggtgcatgtaaagggtgcacattctcagctgacttgccggggattcctatccaggtcagtctccaggggcaatgagtcc

SEQ ID NO: 674697 - DNA, 223 bp, Homo sapiens
tgttcaaaatttgaatttatttgctagagagaaaagtaagaaatttatattatgaataarcacataaataggttattgttttttaaaatgaggcaataatcattatcttaagtaattttattaagtggacaatttatccctccacttattctcaaattaactcattgattcccttggcagacatttaatgaggcactgctatgggtcagatatcctggctgat

SEQ ID NO: 674698 - DNA, 1129 bp, Homo sapiens
tgtagatctctctcatttctgcatatcttgaatgcacaggtactaattgacctttgttctggagcaaagagcagccatgtatgctgtttagaataatgaataagttgtctgtctgtggcaaagatcaggcctgctgactcccggttttgaaagacttgggttccataagctcaggaatcctctcctgtagaatgtgttcaagcatttatctgggcacttcttggaaacaaaggaaactggcaaatatgcagatgctcatgcttcttgctttgttgtgagtaataaattactttttactttaatacaatgcatattaattaaattttaggtcwttaataaacaaaaaatagttttgcattatatagaaaactgaggagcatttgataaacatttaaatcatttcccaagtttatatcattttactcaaaaattcaaatttattcagaaaaaaatgaagcctctaatattaatatttagaagaactaggaacacccttgagctagattgctctgggatctcatcacagaagaggcatgaggttagccagggattggaggttgactatgactttgccaacacgcctaatggtgtaaggtaaagataagtgagaagataatatgatcaaagttatagaaacggaaatatggaaaggaaaaaatgagacatttactcactgaaaagaacattaattagggtaagcaaaagaaaaacagtaagaatccggtatttttgtatggcataaacttgaatattcagagaaaattatgatctcaaaatgttagaacaattttcttatttgtatttattgaattctattacttctctgggactagaacagttacatcagattgacactcacagatttacaaaagtgcattgtttttcacacaagcgtttttcaggataggagcagggatagttagtttccaatgaatctgaaaccagtttatgaatatggaacatttgggttaagaatttgcattgtgtcaaagatactcatctcacagttagcactgttttttcaagtaactcaaaacactaagtggagagaacaaacagacgtttgaatatcttggtgtttttacataaaagctacacattatttccaatctgaaggcttcattttcat

SEQ ID NO: 674699 - DNA, 1428 bp, Homo sapiens
gactttgatgtgcatggtccagggagcattcctttgagaacaagactttttgcatttttctgaaactttgactaataggacaatcaatgtttattaaatttaataaataaaatggttcgaatatattatgccttgacattaaacagaaatatasctagagacactaaaccaaacatccaaaacttagaatagttctattacttaaaactctcttcatctcttatcatatttatttaaaaccatcatattcttagatcttttcatttctgtcactaaacaagaagtaccctgcaccacagcccacttgttttaagcgcctggtgagttaccgcatgtgttaacagtgaatggagaacgaaacctgctcaatttcttaatagtctgctagagacactagagttttgtaactagcaacatgttaaggaattcaaatttaattcataagttacaaatcactacttatcaaaggtacatagggtcaaaacctcaaatactaaatctaatgctgctaaggatctagagtcagctagttattaggcaaataaagtgacactgtgaacatcaaatgatatgtactctaggcaaattaagacttctttcttgaaatttaaaataaagctaacgttcacttgctttgcagatcactggctctgcaggtcactggttgagacatcaactgactatgcatatgaaacacttaggagtcttgttaaaatgcagattctgagttggtaaatctgaaataggacccgagattctgcatttctaacaagctcccagatgatgccattactgccagtcaatgactaaattttgaagagcaatgctccactcttgtctacctgatttgttttcactgctgccaaaataaacatcctaaggcatagatatgacagtgtcagcttcctccttatatattccaccctttggtgatttcacaagttcatcttccttactgtgacacacaaagactctcaaaagttgcatgtggcctctcttgagcctcatctctgagtccatcttcctcatttgcagcaattccataccccacaattctattttaagcccagcaaaaccaaacatctcacatatcctaactcttaattattcccgtttgtaaggttttgttttgttttcatactccaccccaggtcccctctgatagtacttcaatacccaccttaaatattgtatttttagtaaaaatcttccaacatctccctggaaggagttaagtataactcctaaactcctagtagaatggccaactaccaaacagatactatgaaaaactttctcaaatgaaacaattaaaataccagataaaacaaaaattaaaagagtaggttagacagataaatataaccacagtgttgacatgaagaaaaaaaaaaaaagaaatccatatggccaagtacaaaggaccct

SEQ ID NO: 674700 - DNA, 671 bp, Homo sapiens
atgaaaaacaaaatattatagatggggagtgctgtaaagataaattttagtgccaattgaactaccagtcatggaagaaagtaaaataaagttatttcaagacatgaaaagtgtctcaaaaatttaccttttcaaaggaaattactaaaggatattctataaacaaataaataaaaaagctaagaggaggagagcatgaaatagggaacagaagatcaaaactcattagagaaaaaagaagccttgagagcaattagtttgaattgtttgggtgaggctgctgagggaatgaaactgacaaataattagatagtttgatgatatagacaattgttctgacctatgagaagctatgggaggatgttgccataatttgaaaaaaattcaggaaactgacattagcaaaccaaagccagtaatacaaagtagaatgatatatcatgaccaaggggattttatcttaggaataaaaggtgggctgaagattcaaaaagtcaatccattaatatttaatactttaataatttgatcttatttaattaamcatataaacaggctaaaacagaaaatatataattatctcaatagatctagaaaacaatttgagaaaatgcaacacacatttctgataaaaaatctgaagaaactaacaaaaatagaatagtttctca

SEQ ID NO: 674701 - DNA, 604 bp, Homo sapiens
gtgctttttttcagatagcagattgtattcccatctcttcagatagagagttcttggagaaatttaaaatatgcagtttagaatctgtaatggccccggttagtgcatacccgacttactggccttccaagtaggctcctggtaaaaaggtgaggctaaaagcaggcattctgttcagattcccttgccctggtatttgaatgaaaacaaatcaacatttataaaacaaattaccttccactttctataagttaggatgttttggatttcaagaaacagaaattccaaatcaattggtttaaaattaccaatcatatcaaaacatgtatctgaaaggccagaggtagaggtagggcaggatatagcatggtttatcagtgccagctcctgttctcagcgattcttttggctctaccatcttgcttttgtgtaggttcaattccaggcttattttcttcctgttaaaattaaagacgcttcaggtctaatatctrtatcatgcctcatcttggagaagagagagcttctatcatctcatacttacatcctcattgtatccagggaaactttctgtcctcattttcataggcctatatatgggtac

SEQ ID NO: 674702 - DNA, 564 bp, Homo sapiens
ccattgtaagaggcagaaacttcctgtacttccttttttgatctcatcggtgcccaagtgccatcctccttaaattgtatttcatcacagtctgtacagtactttaggatttccataaacaagctataagaaaacaattcatccttagaatatattttaaatgaacataaaggttgaacaacttaagttatatttattcttaaaatctagtactaactaggaatatagctgcctaatttatgtcacatttatgtaagaaaatatcatgtgaccatgaaaaatgacattttcaaagatttttaatcatatgggaaaatgttcacaaaaagtgagaaaasgtcaacaaaagaaagcttcatttcaaaaataaaattctgtgtgagtagtatatagacagtagttacctctgggtgataccttcatgagtatttatttttcttctttatacttttttgcatattctaaattgcccacaataagcatgtcttatttgataaactaaagcaaaacatatacaaatatgtaatcaaaggttaaatctctttgataaaataccgtgacaga

SEQ ID NO: 674703 - DNA, 617 bp, Homo sapiens
ggggttgctctggttcaaatgcctcttgacagtctttctttccttttcttttttctttttctttttttttttttgagaggtagttttggttgtcacccaggctggagggccacagcatgatctcggctcactgcaacctccgcctcccgggttcaagcgattctcctgcctcagcctcccaagtagctgggattacaggcacctgctaccacgcccgactaatttttgtatttttagtagagacgggatttcactatgttggccaggctggtctggaactcgcccgcctaggccgcccaaagtgctgaggtacaggcgagagccaccgcgcccggcccggccgacagtctttcttctataatacgatacaaactagtaaagattttctttttcccctggcggaaaagagctgttaggcttccagatttgtttttgtgggttattagacctctacttttcttctkggtattttccctcccttatcaactttgtttgttgtctcaaataggcaatgaggaagacacaggtgtttattattattggaatgctctttccatttggtcagtggtttctcaaagcaggaggaattcaagttctgagtttctaaagtcaggacc

SEQ ID NO: 674704 - DNA, 617 bp, Homo sapiens
gggtactaacaactctaattgaatatctagtgggcaaatgaaaatcaacacgttcaggctgggcatggtggctcacatctataatcctggcactttcagaggttaaggccagaggactgtttgagcccaggagtttgagaccagcgtgggccatgaagcaagaccctgtatctacagaaaattttaaaaattaactgggcctggtgctacccacctgtagtcccagctactcagaaggctgaggcaggaggatcccttgagcccaggagtttgaggytgcagtgagctatgactgtatcctccagcctgggaaacagaacaagatcctgtctttaaaaaaataaagcggccaggcgcggtggctcatgcctataatcccagcactctgggaggccgaagtgggcggatcacgaggtcaggagatcgagaccatcctggctaacacagtaaaatcccgtctctactaaaaatacaaaaaaaattagccgggcgtggtggcgggcacctgtagtcccagctacttgggaggctgaggcaggagaatggcgtgaacccgggaggcggagcttgcagtgagcagagatcgcgccacggcactccagcctgggcaacaaagc

SEQ ID NO: 674705 - DNA, 617 bp, Homo sapiens
gggtactaacaactctaattgaatatctagtgggcaaatgaaaatcaacacgttcaggctgggcatggtggctcacatctataatcctggcactttcagaggttaaggccagaggactgtttgagcccaggagtttgagaccagcgtgggccatgaagcaagaccctgtatctacagaaaattttaaaaattaactgggcctggtgctacccacctgtagtcccagctactcagaaggctgaggcaggaggatcccttgagcccaggagtttgaggttgcagtgagctatgactgtatcctccagcctgggaaacagaacaagatcctgtctttaaaaaaataaagyggccaggcgcggtggctcatgcctataatcccagcactctgggaggccgaagtgggcggatcacgaggtcaggagatcgagaccatcctggctaacacagtaaaatcccgtctctactaaaaatacaaaaaaaattagccgggcgtggtggcgggcacctgtagtcccagctacttgggaggctgaggcaggagaatggcgtgaacccgggaggcggagcttgcagtgagcagagatcgcgccacggcactccagcctgggcaacaaagc

SEQ ID NO: 674706 - DNA, 617 bp, Homo sapiens
gggtactaacaactctaattgaatatctagtgggcaaatgaaaatcaacacgttcaggctgggcatggtggctcacatctataatcctggcactttcagaggttaaggccagaggactgtttgagcccaggagtttgagaccagcgtgggccatgaagcaagaccctgtatctacagaaaattttaaaaattaactgggcctggtgctacccacctgtagtcccagctactcagaaggctgaggcaggaggatcccttgagcccaggagtttgaggttgcagtgagctatgactgtatcctccagcctgggaaacagaacaagatcctgtctttaaaaaaataaagcggccaggcgcggtggctcatgcctataatcccagcactctgggaggccgaagtgggcggatcacgaggtcaggagatcgagaccatcctggctaacacagtaaaatcccgtctctactaaaaatacaaaaaaaattagccgggcgtggtggcgggcacctgtagtcccagctacttgggaggctgaggcaggagaatggcgtgaacccgggaggcggagmttgcagtgagcagagatcgcgccacggcactccagcctgggcaacaaagc

SEQ ID NO: 674707 - DNA, 617 bp, Homo sapiens
gggtactaacaactctaattgaatatctagtgggcaaatgaaaatcaacacgttcaggctgggcatggtggctcacatctataatcctggcactttcagaggttaaggccagaggactgtttgagcccaggagtttgagaccagcgtgggccatgaagcaagaccctgtatctacagaaaattttaaaaattaactgggcctggtgctacccacctgtagtcccagctactcagaaggctgaggcaggaggatcccttgagcccaggagtttgaggttgcagtgagctatgactgtatcctccagcctgggaaacagaacaagatcctgtctttaaaaaaataaagcggccaggcgcggtggctcatgcctataatcccagcactctgggaggccgaagtgggcggatcacgaggtcaggagatcgagaccatcctggctaacacagtaaaatcccgtctctactaaaaatacaaaaaaaattagccgggcgtggtggcgggcacctgtagtcccagctacttgggaggctgaggcaggagaatggcgtgaacccgggaggcggagcwtgcagtgagcagagatcgcgccacggcactccagcctgggcaacaaagc

SEQ ID NO: 674708 - DNA, 975 bp, Homo sapiens
taactgtccggcacttaaagaggctggagagagtcatcattggttatctggaggtttatgatggacctgaggaggaagctagactgaagatattggaaaccctaaaacttctcatgcaacatacttggcccaggtaatagcagccttaaggtgcaaaactcagccgattttctcttgagaacttgcttggatgtatttaatacattcagtacaaagtattaaatgtatactatgtatttgaatacctcccattttcacacacctataggattttaaactgagaaaatggcattagaaagataaaatatactatagttacttgaggtgctcatagttgactcttttaccaggtatcagttccagattctgacagttaaatcgcttctctttgaaactctagtatatcttttttgttttttttttttttttttttgaaatggagtctcacactgtcgcccaggctggagtccagtggcgcgatctctgcccactgcaacctctgcctcctgggttcaagtgattctcctacctcagtctcccaagtagctgggattacaggcgcccaccgccaggcccggctaattttttgtattttcagtagagatggggtttcactatgttggccaggctggtcttgaactcctgaccttgtaatccacccgccttggcctcccaaagtgctggggttacaggcgtgagccaccatgcccagcsttttgtttttgtttttgtttttgagatggagtattgctctgtcacccaggccggagtgcaatggcgcgatctcagctcactgcaacctctgcctcctggattcaagtgattctcctgccttagcctcctgagtagctgggattacaggtgccctccaccatgcctggctaatttttaaaaaatttttagtagagatggtgtttcaccatgttggccaggctggtctcgaactcctgacctcgtgatttcccctcctcagcc

SEQ ID NO: 674709 - DNA, 1430 bp, Homo sapiens
gccatcttagtcacatgaccaaacacctaaaatcatttttaaatactcagtgttgagtggtcctccaagtagcattaagtagttggtatctttaagcatcttatttattcaaagcaggtaagtccatcactaacccacacaggatatttgttctgatgagctgmcaagtctagctgttgaattaaaggagaccaaagaaagaggcagaagatgggctttggcaccgttggaaagaatccaagtctcatagaataatggagagaaaatattgggaggcttaacaggcaactttatcagccttggcttctttcagtttttgacctgttctcccattttggctgtatgcattgctaaattaccttcaaacactgagtttccacactctgatgtatgatgttccctccatactgattcctttctctggcttgcaaactgcttatcctacaagtcctgctttgtatgttaccttccctataaagcatcctcagtatccacagtacactatagagtttggagtgtgggttctggagccagaatgcctggattcaaatcctgaccatgtctcttgttagctatggataagtgacttgacttccccatgcctcagcttcctgatatgcaaaatggaaataatcatagtaactaatttcatagcggtgttgtaatgcttaacgagctggtgcatgtgaagtattaaaaatattgtctggcacatagtaagtgcttagtgttggctagcatttttcctcaggtagagttactcactctttttggacactcacggtataatcttctgtgataatgattatcacagtgtggtgattattttgtttatatgcctctaagatgttggcttgcagaagatcaaaacaacattgttctttctgtcttgcatagtgtctcatgtgatacatggtctgtagtgcaacttcaataaatgtttattaaaataatgaactgtgggaaattttgtggtccatttaaagatgaattaataagggacccaaggtgaagttattactaattaaatcagctatagtgattaaccaaattacatagtcatttgtagttttgcagttttaatctttgactatattatggtcaaatccatacgtacaaagatgaaagaaggaagtgaaaatttattgaacactatgtgctatatgctttatatatcataattggtgacctttaaattattaccattttacagttgaggaaacagattcagagatgtttagtgatatatctaaggtaaaaaacaaacaaaaaaccaaaaacaaactagaggctgggcgctgtggcttacacctgtaatcccagtactttgggaggccaaagcgggcagatcacctgaggccaggagttgaagaccagcctgaccaacatagagaaaccccatctctattaaaaatacaaaattagccagg

SEQ ID NO: 674710 - DNA, 641 bp, Homo sapiens
tgcttaaagcatccaagatttcactggtgctagtccaagttgattcctgtgtccctttgataattttgttatgatcctattagttgttaacattagaataaacagagtgaagggcatataggaactctctatgctatctttgcaacttttctattagtctaaaattattttakaattttttttaacttgaaaaaaggactcaaaaggagcgttaagatagctcctggcaatttctttctttagctgggtgcaggtcacatggttgtgtttcttttgcgaaaatccatcaagctatacatttatgatttgcatacttttctgtgtgttttactttagtaaaccatttctaaaggtaggtgatagtgctttacaaatattgtttgagaatttagctgtaaaatatacagtaacagaaaataataggcaggatttcctatagaagggcctgctggtaagtttcaaatcaccctcaataaccactggggaaatcctcagccaggagtagcttagagcaaagtcctcatctgagttttatttagatccctgtgtctgatgtcactgtgttctgtttaataatcttggtcacttgcatttcccaaggtgatccacgtcgcttctgttcagttggtcactttcttgga

SEQ ID NO: 674711 - DNA, 633 bp, Homo sapiens
tgacaacagagatttcyttgacagggattttcagtctcagggcaaataatttcaaagaactttgttactgaagactaaagctaattaaattatcactctggagtgaagattacccagaattagtaaaaaacaaaatttgcatatattaagtatactgactcctggaataaacccgaaagcacaagggtaaatcaaacccaagatatccaataacctcagggcctcatctgaaatctctgaacccaggagtgaaaggaatttgaggtgaggctgtggctccatgagctttccatcctccttccattcagtccatttgtgctcctccccaactgattggacaaacgccactaggaagcaaatgtgacaaatcacagtcatggctccaaatgacctcaggaaagaaggaaatgttcctattcataaacatgtctcccaatttatttagcattttttaaaaagtatttgaaaaatattttataacttttccatatttgctttgcacagatttgcacagatttgaataccttgtatttccttacttcacttgcaaactatgtattttattgaaactgcatgttttaaaactatggctggtgtataaaatacaattgtcttttattaatatcagaaaaa

SEQ ID NO: 674712 - DNA, 633 bp, Homo sapiens
tgacaacagagatttccttgacagggattttcagtctcagggcaaataatttcaaagaactttgttactgaagactaaagctaattaaattatcactctggagtgaagattacccagaattagtaaaaaacaaaatttgcatatattaagtatactgactcctggaataaacccgaaagcacaagggtaaatcaaacccaagatatccaataacctcagggcctcatctgaaatctctgaacccaggagtgaaaggaatttgaggtgaggctgtggctccatgagctttccatcctcctyccattcagtccatttgtgctcctccccaactgattggacaaacgccactaggaagcaaatgtgacaaatcacagtcatggctccaaatgacctcaggaaagaaggaaatgttcctattcataaacatgtctcccaatttatttagcattttttaaaaagtatttgaaaaatattttataacttttccatatttgctttgcacagatttgcacagatttgaataccttgtatttccttacttcacttgcaaactatgtattttattgaaactgcatgttttaaaactatggctggtgtataaaatacaattgtcttttattaatatcagaaaaa

SEQ ID NO: 674713 - DNA, 1329 bp, Homo sapiens
atttacagcattttaaggtgctgtttgttcttcttgatttctaacttggtagatcagtaatttaaaattcaacctttgatatatagaccaataacacattcttgatttaaggacaataatcactgcagttgtgaaaataaacaccactacttakactgcctggcagggtctgcattgtaaaacaagcctgagttgtgtttatattgcatttggattgatggggaatgtggcattcatctgccaggggtcacttcaggcttccatggcaggaggccatataatttaaaaaattaaaaaattaaattaaattaaaaagcccctgcagatatttgctagtactgcttgatactcaggaattcaggaattgaatattatagggtaaggtgtgctttaaacacaatcttaggattctgcaggcacaatgacagaggaagagacacgggccatggaatattcagatgtggagcagaatcttaattcatcgacttatcactatgcatctttgacaagtaactcacaactctgaaatctcatatttctcatctgtaaaatcagtataatgatatctacctcatagggtggtttcgaggtttaattaaggtgctatgtagagtgtctaacatacaaagaaagccagataaatgatagctactattcagactcagtcatccgataattgcatagtctatgttaatatatctttatttgactgtgcatttcaacatggccagtgcctgacaagtgatattcatattgatgactctgaggctagcctgttaagtccctaagggattcttaatccacaaataataaatggtgatgaaaagggttttagcgctaatgtatttaatcagtttttattagcatcacattgataaattcaatgggaatatctcacagtcttattttactggccttctctgcagcttttgacactgttcaaactctttcttgaatattagggttttaaaattttagtatgaataacacattttccccaacctccctaactggtctttccaaatatttttgtgggcaacaccttttttttttacttcttaaatattggttttccttaggcatctttcagaagacatcccttctcacctcactaatctttttagacaatgtatttcattcctatgacttcacttgtcatttaagtcatggccgctgagtaaggctgtgcagtctgtacactgcccgaaagtgctaggccaagagagagagagtgctggcagagattcagtctgtgttctgcttgccaggatgtgtactccagggccagtatttacctagaggagggctttttctaatttatacaaaatt

SEQ ID NO: 674714 - DNA, 1329 bp, Homo sapiens
atttacagcattttaaggtgctgtttgttcttcttgatttctaacttggtagatcagtaatttaaaattcaacctttgatatatagaccaataacacattcttgatttaaggacaataatcactgcagttgtgaaaataaacaccactacttatactgcctggcagggtctgcattgtaaaacaagcctgagttgtgtttatattgcatttggattgatggggaatgtggcattcatctgccaggggtcacttcagrcttccatggcaggaggccatataatttaaaaaattaaaaaattaaattaaattaaaaagcccctgcagatatttgctagtactgcttgatactcaggaattcaggaattgaatattatagggtaaggtgtgctttaaacacaatcttaggattctgcaggcacaatgacagaggaagagacacgggccatggaatattcagatgtggagcagaatcttaattcatcgacttatcactatgcatctttgacaagtaactcacaactctgaaatctcatatttctcatctgtaaaatcagtataatgatatctacctcatagggtggtttcgaggtttaattaaggtgctatgtagagtgtctaacatacaaagaaagccagataaatgatagctactattcagactcagtcatccgataattgcatagtctatgttaatatatctttatttgactgtgcatttcaacatggccagtgcctgacaagtgatattcatattgatgactctgaggctagcctgttaagtccctaagggattcttaatccacaaataataaatggtgatgaaaagggttttagcgctaatgtatttaatcagtttttattagcatcacattgataaattcaatgggaatatctcacagtcttattttactggccttctctgcagcttttgacactgttcaaactctttcttgaatattagggttttaaaattttagtatgaataacacattttccccaacctccctaactggtctttccaaatatttttgtgggcaacaccttttttttttacttcttaaatattggttttccttaggcatctttcagaagacatcccttctcacctcactaatctttttagacaatgtatttcattcctatgacttcacttgtcatttaagtcatggccgctgagtaaggctgtgcagtctgtacactgcccgaaagtgctaggccaagagagagagagtgctggcagagattcagtctgtgttctgcttgccaggatgtgtactccagggccagtatttacctagaggagggctttttctaatttatacaaaatt

SEQ ID NO: 674715 - DNA, 1329 bp, Homo sapiens
atttacagcattttaaggtgctgtttgttcttcttgatttctaacttggtagatcagtaatttaaaattcaacctttgatatatagaccaataacacattcttgatttaaggacaataatcactgcagttgtgaaaataaacaccactacttatactgcctggcagggtctgcattgtaaaacaagcctgagttgtgtttatattgcatttggattgatggggaatgtggcattcatctgccaggggtcacttcaggcttccatggcaggaggccatataatttaaaaaattaaaaaattaaattaaattaaaaagcccctgcagatatttgctagtactgcttgatactcaggaattcaggaattgaatrttatagggtaaggtgtgctttaaacacaatcttaggattctgcaggcacaatgacagaggaagagacacgggccatggaatattcagatgtggagcagaatcttaattcatcgacttatcactatgcatctttgacaagtaactcacaactctgaaatctcatatttctcatctgtaaaatcagtataatgatatctacctcatagggtggtttcgaggtttaattaaggtgctatgtagagtgtctaacatacaaagaaagccagataaatgatagctactattcagactcagtcatccgataattgcatagtctatgttaatatatctttatttgactgtgcatttcaacatggccagtgcctgacaagtgatattcatattgatgactctgaggctagcctgttaagtccctaagggattcttaatccacaaataataaatggtgatgaaaagggttttagcgctaatgtatttaatcagtttttattagcatcacattgataaattcaatgggaatatctcacagtcttattttactggccttctctgcagcttttgacactgttcaaactctttcttgaatattagggttttaaaattttagtatgaataacacattttccccaacctccctaactggtctttccaaatatttttgtgggcaacaccttttttttttacttcttaaatattggttttccttaggcatctttcagaagacatcccttctcacctcactaatctttttagacaatgtatttcattcctatgacttcacttgtcatttaagtcatggccgctgagtaaggctgtgcagtctgtacactgcccgaaagtgctaggccaagagagagagagtgctggcagagattcagtctgtgttctgcttgccaggatgtgtactccagggccagtatttacctagaggagggctttttctaatttatacaaaatt

SEQ ID NO: 674716 - DNA, 602 bp, Homo sapiens
ccaaatagaacaccaggaagtctagtagataaatatgacatttcagctgggtgccagctaaaagttggggttccrttctaaagatgaagttgaggtcgataattgaaagcaaccagaagagcaatgtcagcaagatggctgacaggaagctgctagggatctttctctcccaccaaaaaaaaacccaaaataatgaataagcaactgcatatttaccaaaatagctaaaggagagcaccagagaacagcaaataaacaggaaaaaccatggaaagtacaaaaacctgagatggctgcacagagaagggaaggaaacctcaggtctcctgtacaccagagcagcattctcccaaccccagaggtgacaccgcatcctgcccaccaaaggactccaaccctccagcacaccagagcagttgtacttctgagtaccatacctgatgtggcaccccaccctcgagaatacagaagctccccggactgctgtagccatgctttctggggctaagcagatgcagtaattcccatcccaaggattcagagccctggctaagccatgccaccccactccccagtccaaataggcacagtgtcatgcctac

SEQ ID NO: 674717 - DNA, 2382 bp, Homo sapiens
aatggtaaactggataaagaaaatttggtgcatatacaccatggactactatgcagccataaraaataatgagatcatgtttttttcaggaacatggttggagctagaggccattatccttagcaaactaacacaataacaaaaaaccaaatagtgaatgttctcacttaaaagtggaaactaaataatgggaacatatggacacacagaggagaacaagagacatggggacctactggaggatggaggctgggaggagagagactctcagaaaaaataactaatgggtactagatctaatacctgagcgacgaaataatttgtacaacaaacccccatgacataaggttacctatataacaaaactacacacatgccgctgaactcaaaataaaagttaaaaaaattaaaaaaattctaaatggagggaatagcatattcaaatgctgtgaaacaaagaatgagcaatattttgaagaacaaaaggtagtctagcataggagtattagacaccgtggtgtaaaaatgagtaataaaattatatctcttgaggaacatttcatctgtgatgaaagagaggaatgtatcagaggatcagaggaaaaatgtgttaagtgatacgtattaatgtgtgcaaagtcctaaggaggtaaagcgagagtgactcggtttgcctggcagtcaaggaaggcgtcacacaggaggtaacttctctcttttgcttgatcataagtaccctgaaggcggagatcttgtcttacattttttttattatccattttgcctagcatagtagcaggtacccaaggagtgttggataaattcctgatttaatgttatttgttgcaatgacccctgggaggctggagcagaggctggtagcatagaatgttgggtgtggctgtgacacgccaggttagcatgagggtgctgcccatgccacgtggctgtggctcttgtcctggggatgcataatttctatcaactcacttttatattcattcattgacattgaccacctcagtgttgtgcactgattccatgctggtgaatataaagactaatggctcatgcccttgcccttggcaagcatgaagttgggagacagagatgtaaacatattattacatcagtgtgacatgagaaataccctgacagagcacaagatactacaaagtgaagaagaagtgatgttttttggtggttgaggttattaaggtgtgagcagacctcgtccttggtttccttctcttctgtctctagggtcttctccttagtagcttattccatgccatgttttccactaatcttcatgaggcttatttccaaatctatttccccagcatgacctctttccacagcttcatccatatagatctaattcttatttgacatctccacctaaagtcctgctgacacctctaactcaatttgttcaatgctgagctcatcttttttctacaaaacctgttcaccatcctgctccctattttgttaacagctccctgctgaagccagtgatgcaggctctagtgcacattgataactttgaatcaacccttttctttcttcacttctgcatccaactattttttgttgattctatttctgtgctatcactcctgccattttctctccttcctgctactgttatcctatttcaggacctcattttctttctctcatgtaggtagtgtacttttagccataagagtaacacgactctctatttagcaaaatcagatcttcaaaattcttctcttgatggagacttttcaggtgaggaggaggagggggaatttagactggtgattctcaaccttggttgctattggaattaaccagaataactctggaaaacactcatgccttgcttctactcccaaaggctctaatttaattgatccaggatgtgtcctggagcatcaaagttttttaaaaatatctccacataattttaatgtgtagttaaggttgagaaccaccaaactagaccaagagaacccacttttctcccctttttgattgacatttccaccaccaccactcttgctggaaaagtgaaaaaacttttgtacctcaagacaggatggaaattttcaaagacttttacaaatactaaacagaagggaaattttaaaaatgaagtatgaaaacatcatacttatactatgatagttagctttctctaatctaaaagatgaatatatcaatacaacacagtagctacagcatctgtttaaaaaataatatataaacctagaggcataagaagattccactctcttattcattctctctgtttccaattttctctacctcagtctcaagcattattgccaaatttattctcttgaaaaccagcttttaatatatcaatcc

SEQ ID NO: 674718 - DNA, 2382 bp, Homo sapiens
aatggtaaactggataaagaaaatttggtgcatatacaccatggactactatgcagccataagaaataatgagatcatgtttttttcaggaacatggttggagctagaggccattatccttagcaaactaacacaataacaaaaaaccaaatagtgaatgttctcacttaaaagtggaaactaaataatgggaacatatggacacacagaggagaacaagagacatggggacctactggaggatggaggctgggaggagagagactctcagaaaaaataactaatgggtactagatctaatacctgagcgacgaaataatttgtacaacaaacccccatgacataaggttacctatataacaaaactacacacawgccgctgaactcaaaataaaagttaaaaaaattaaaaaaattctaaatggagggaatagcatattcaaatgctgtgaaacaaagaatgagcaatattttgaagaacaaaaggtagtctagcataggagtattagacaccgtggtgtaaaaatgagtaataaaattatatctcttgaggaacatttcatctgtgatgaaagagaggaatgtatcagaggatcagaggaaaaatgtgttaagtgatacgtattaatgtgtgcaaagtcctaaggaggtaaagcgagagtgactcggtttgcctggcagtcaaggaaggcgtcacacaggaggtaacttctctcttttgcttgatcataagtaccctgaaggcggagatcttgtcttacattttttttattatccattttgcctagcatagtagcaggtacccaaggagtgttggataaattcctgatttaatgttatttgttgcaatgacccctgggaggctggagcagaggctggtagcatagaatgttgggtgtggctgtgacacgccaggttagcatgagggtgctgcccatgccacgtggctgtggctcttgtcctggggatgcataatttctatcaactcacttttatattcattcattgacattgaccacctcagtgttgtgcactgattccatgctggtgaatataaagactaatggctcatgcccttgcccttggcaagcatgaagttgggagacagagatgtaaacatattattacatcagtgtgacatgagaaataccctgacagagcacaagatactacaaagtgaagaagaagtgatgttttttggtggttgaggttattaaggtgtgagcagacctcgtccttggtttccttctcttctgtctctagggtcttctccttagtagcttattccatgccatgttttccactaatcttcatgaggcttatttccaaatctatttccccagcatgacctctttccacagcttcatccatatagatctaattcttatttgacatctccacctaaagtcctgctgacacctctaactcaatttgttcaatgctgagctcatcttttttctacaaaacctgttcaccatcctgctccctattttgttaacagctccctgctgaagccagtgatgcaggctctagtgcacattgataactttgaatcaacccttttctttcttcacttctgcatccaactattttttgttgattctatttctgtgctatcactcctgccattttctctccttcctgctactgttatcctatttcaggacctcattttctttctctcatgtaggtagtgtacttttagccataagagtaacacgactctctatttagcaaaatcagatcttcaaaattcttctcttgatggagacttttcaggtgaggaggaggagggggaatttagactggtgattctcaaccttggttgctattggaattaaccagaataactctggaaaacactcatgccttgcttctactcccaaaggctctaatttaattgatccaggatgtgtcctggagcatcaaagttttttaaaaatatctccacataattttaatgtgtagttaaggttgagaaccaccaaactagaccaagagaacccacttttctcccctttttgattgacatttccaccaccaccactcttgctggaaaagtgaaaaaacttttgtacctcaagacaggatggaaattttcaaagacttttacaaatactaaacagaagggaaattttaaaaatgaagtatgaaaacatcatacttatactatgatagttagctttctctaatctaaaagatgaatatatcaatacaacacagtagctacagcatctgtttaaaaaataatatataaacctagaggcataagaagattccactctcttattcattctctctgtttccaattttctctacctcagtctcaagcattattgccaaatttattctcttgaaaaccagcttttaatatatcaatcc

SEQ ID NO: 674719 - DNA, 2382 bp, Homo sapiens
aatggtaaactggataaagaaaatttggtgcatatacaccatggactactatgcagccataagaaataatgagatcatgtttttttcaggaacatggttggagctagaggccattatccttagcaaactaacacaataacaaaaaaccaaatagtgaatgttctcacttaaaagtggaaactaaataatgggaacatatggacacacagaggagaacaagagacatggggacctactggaggatggaggctgggaggagagagactctcagaaaaaataactaatgggtactagatctaatacctgagcgacgaaataatttgtacaacaaacccccatgacataaggttacctatataacaaaactacacacatgccgctgaactcaaaataaaagttaaaaaaattaaaaaaattctaaatggagggaatagcatattcaaatgctgtgaaacraagaatgagcaatattttgaagaacaaaaggtagtctagcataggagtattagacaccgtggtgtaaaaatgagtaataaaattatatctcttgaggaacatttcatctgtgatgaaagagaggaatgtatcagaggatcagaggaaaaatgtgttaagtgatacgtattaatgtgtgcaaagtcctaaggaggtaaagcgagagtgactcggtttgcctggcagtcaaggaaggcgtcacacaggaggtaacttctctcttttgcttgatcataagtaccctgaaggcggagatcttgtcttacattttttttattatccattttgcctagcatagtagcaggtacccaaggagtgttggataaattcctgatttaatgttatttgttgcaatgacccctgggaggctggagcagaggctggtagcatagaatgttgggtgtggctgtgacacgccaggttagcatgagggtgctgcccatgccacgtggctgtggctcttgtcctggggatgcataatttctatcaactcacttttatattcattcattgacattgaccacctcagtgttgtgcactgattccatgctggtgaatataaagactaatggctcatgcccttgcccttggcaagcatgaagttgggagacagagatgtaaacatattattacatcagtgtgacatgagaaataccctgacagagcacaagatactacaaagtgaagaagaagtgatgttttttggtggttgaggttattaaggtgtgagcagacctcgtccttggtttccttctcttctgtctctagggtcttctccttagtagcttattccatgccatgttttccactaatcttcatgaggcttatttccaaatctatttccccagcatgacctctttccacagcttcatccatatagatctaattcttatttgacatctccacctaaagtcctgctgacacctctaactcaatttgttcaatgctgagctcatcttttttctacaaaacctgttcaccatcctgctccctattttgttaacagctccctgctgaagccagtgatgcaggctctagtgcacattgataactttgaatcaacccttttctttcttcacttctgcatccaactattttttgttgattctatttctgtgctatcactcctgccattttctctccttcctgctactgttatcctatttcaggacctcattttctttctctcatgtaggtagtgtacttttagccataagagtaacacgactctctatttagcaaaatcagatcttcaaaattcttctcttgatggagacttttcaggtgaggaggaggagggggaatttagactggtgattctcaaccttggttgctattggaattaaccagaataactctggaaaacactcatgccttgcttctactcccaaaggctctaatttaattgatccaggatgtgtcctggagcatcaaagttttttaaaaatatctccacataattttaatgtgtagttaaggttgagaaccaccaaactagaccaagagaacccacttttctcccctttttgattgacatttccaccaccaccactcttgctggaaaagtgaaaaaacttttgtacctcaagacaggatggaaattttcaaagacttttacaaatactaaacagaagggaaattttaaaaatgaagtatgaaaacatcatacttatactatgatagttagctttctctaatctaaaagatgaatatatcaatacaacacagtagctacagcatctgtttaaaaaataatatataaacctagaggcataagaagattccactctcttattcattctctctgtttccaattttctctacctcagtctcaagcattattgccaaatttattctcttgaaaaccagcttttaatatatcaatcc

SEQ ID NO: 674720 - DNA, 2382 bp, Homo sapiens
aatggtaaactggataaagaaaatttggtgcatatacaccatggactactatgcagccataagaaataatgagatcatgtttttttcaggaacatggttggagctagaggccattatccttagcaaactaacacaataacaaaaaaccaaatagtgaatgttctcacttaaaagtggaaactaaataatgggaacatatggacacacagaggagaacaagagacatggggacctactggaggatggaggctgggaggagagagactctcagaaaaaataactaatgggtactagatctaatacctgagcgacgaaataatttgtacaacaaacccccatgacataaggttacctatataacaaaactacacacatgccgctgaactcaaaataaaagttaaaaaaattaaaaaaattctaaatggagggaatagcatattcaaatgctgtgaaacaaagaatgagcaatattttgaagaacaaaaggtagtctagcataggagtattagacaccgtggtgtaaaaatgartaataaaattatatctcttgaggaacatttcatctgtgatgaaagagaggaatgtatcagaggatcagaggaaaaatgtgttaagtgatacgtattaatgtgtgcaaagtcctaaggaggtaaagcgagagtgactcggtttgcctggcagtcaaggaaggcgtcacacaggaggtaacttctctcttttgcttgatcataagtaccctgaaggcggagatcttgtcttacattttttttattatccattttgcctagcatagtagcaggtacccaaggagtgttggataaattcctgatttaatgttatttgttgcaatgacccctgggaggctggagcagaggctggtagcatagaatgttgggtgtggctgtgacacgccaggttagcatgagggtgctgcccatgccacgtggctgtggctcttgtcctggggatgcataatttctatcaactcacttttatattcattcattgacattgaccacctcagtgttgtgcactgattccatgctggtgaatataaagactaatggctcatgcccttgcccttggcaagcatgaagttgggagacagagatgtaaacatattattacatcagtgtgacatgagaaataccctgacagagcacaagatactacaaagtgaagaagaagtgatgttttttggtggttgaggttattaaggtgtgagcagacctcgtccttggtttccttctcttctgtctctagggtcttctccttagtagcttattccatgccatgttttccactaatcttcatgaggcttatttccaaatctatttccccagcatgacctctttccacagcttcatccatatagatctaattcttatttgacatctccacctaaagtcctgctgacacctctaactcaatttgttcaatgctgagctcatcttttttctacaaaacctgttcaccatcctgctccctattttgttaacagctccctgctgaagccagtgatgcaggctctagtgcacattgataactttgaatcaacccttttctttcttcacttctgcatccaactattttttgttgattctatttctgtgctatcactcctgccattttctctccttcctgctactgttatcctatttcaggacctcattttctttctctcatgtaggtagtgtacttttagccataagagtaacacgactctctatttagcaaaatcagatcttcaaaattcttctcttgatggagacttttcaggtgaggaggaggagggggaatttagactggtgattctcaaccttggttgctattggaattaaccagaataactctggaaaacactcatgccttgcttctactcccaaaggctctaatttaattgatccaggatgtgtcctggagcatcaaagttttttaaaaatatctccacataattttaatgtgtagttaaggttgagaaccaccaaactagaccaagagaacccacttttctcccctttttgattgacatttccaccaccaccactcttgctggaaaagtgaaaaaacttttgtacctcaagacaggatggaaattttcaaagacttttacaaatactaaacagaagggaaattttaaaaatgaagtatgaaaacatcatacttatactatgatagttagctttctctaatctaaaagatgaatatatcaatacaacacagtagctacagcatctgtttaaaaaataatatataaacctagaggcataagaagattccactctcttattcattctctctgtttccaattttctctacctcagtctcaagcattattgccaaatttattctcttgaaaaccagcttttaatatatcaatcc

SEQ ID NO: 674721 - DNA, 2382 bp, Homo sapiens
aatggtaaactggataaagaaaatttggtgcatatacaccatggactactatgcagccataagaaataatgagatcatgtttttttcaggaacatggttggagctagaggccattatccttagcaaactaacacaataacaaaaaaccaaatagtgaatgttctcacttaaaagtggaaactaaataatgggaacatatggacacacagaggagaacaagagacatggggacctactggaggatggaggctgggaggagagagactctcagaaaaaataactaatgggtactagatctaatacctgagcgacgaaataatttgtacaacaaacccccatgacataaggttacctatataacaaaactacacacatgccgctgaactcaaaataaaagttaaaaaaattaaaaaaattctaaatggagggaatagcatattcaaatgctgtgaaacaaagaatgagcaatattttgaagaacaaaaggtagtctagcataggagtattagacaccgtggtgtaaaaatgagtaataaaattatatctcttgaggaacatttcatctgtgatgaaagagaggaatgtatcagaggatcagaggaaaaatgtgttaagtgatacgtattaatgtgtgcaaagtcctaaggaggtaaagcgagagtgactcggtttgcctggcagtcaaggaaggcgtcacacaggaggtaacttctctcttttgcttgatcataagtaccctgaaggcggagatcttgtcttacattttttttattatccattttgcctagcatagtagcaggtacccaaggagtgttggataaattcctgatttaatgttatttgttgcaatgacccctgggaggctggagcagaggctggtagcatagaatgttgggtgtggctgtgacacgccaggttagcatgagggtgcwgcccatgccacgtggctgtggctcttgtcctggggatgcataatttctatcaactcacttttatattcattcattgacattgaccacctcagtgttgtgcactgattccatgctggtgaatataaagactaatggctcatgcccttgcccttggcaagcatgaagttgggagacagagatgtaaacatattattacatcagtgtgacatgagaaataccctgacagagcacaagatactacaaagtgaagaagaagtgatgttttttggtggttgaggttattaaggtgtgagcagacctcgtccttggtttccttctcttctgtctctagggtcttctccttagtagcttattccatgccatgttttccactaatcttcatgaggcttatttccaaatctatttccccagcatgacctctttccacagcttcatccatatagatctaattcttatttgacatctccacctaaagtcctgctgacacctctaactcaatttgttcaatgctgagctcatcttttttctacaaaacctgttcaccatcctgctccctattttgttaacagctccctgctgaagccagtgatgcaggctctagtgcacattgataactttgaatcaacccttttctttcttcacttctgcatccaactattttttgttgattctatttctgtgctatcactcctgccattttctctccttcctgctactgttatcctatttcaggacctcattttctttctctcatgtaggtagtgtacttttagccataagagtaacacgactctctatttagcaaaatcagatcttcaaaattcttctcttgatggagacttttcaggtgaggaggaggagggggaatttagactggtgattctcaaccttggttgctattggaattaaccagaataactctggaaaacactcatgccttgcttctactcccaaaggctctaatttaattgatccaggatgtgtcctggagcatcaaagttttttaaaaatatctccacataattttaatgtgtagttaaggttgagaaccaccaaactagaccaagagaacccacttttctcccctttttgattgacatttccaccaccaccactcttgctggaaaagtgaaaaaacttttgtacctcaagacaggatggaaattttcaaagacttttacaaatactaaacagaagggaaattttaaaaatgaagtatgaaaacatcatacttatactatgatagttagctttctctaatctaaaagatgaatatatcaatacaacacagtagctacagcatctgtttaaaaaataatatataaacctagaggcataagaagattccactctcttattcattctctctgtttccaattttctctacctcagtctcaagcattattgccaaatttattctcttgaaaaccagcttttaatatatcaatcc

SEQ ID NO: 674722 - DNA, 2382 bp, Homo sapiens
aatggtaaactggataaagaaaatttggtgcatatacaccatggactactatgcagccataagaaataatgagatcatgtttttttcaggaacatggttggagctagaggccattatccttagcaaactaacacaataacaaaaaaccaaatagtgaatgttctcacttaaaagtggaaactaaataatgggaacatatggacacacagaggagaacaagagacatggggacctactggaggatggaggctgggaggagagagactctcagaaaaaataactaatgggtactagatctaatacctgagcgacgaaataatttgtacaacaaacccccatgacataaggttacctatataacaaaactacacacatgccgctgaactcaaaataaaagttaaaaaaattaaaaaaattctaaatggagggaatagcatattcaaatgctgtgaaacaaagaatgagcaatattttgaagaacaaaaggtagtctagcataggagtattagacaccgtggtgtaaaaatgagtaataaaattatatctcttgaggaacatttcatctgtgatgaaagagaggaatgtatcagaggatcagaggaaaaatgtgttaagtgatacgtattaatgtgtgcaaagtcctaaggaggtaaagcgagagtgactcggtttgcctggcagtcaaggaaggcgtcacacaggaggtaacttctctcttttgcttgatcataagtaccctgaaggcggagatcttgtcttacattttttttattatccattttgcctagcatagtagcaggtacccaaggagtgttggataaattcctgatttaatgttatttgttgcaatgacccctgggaggctggagcagaggctggtagcatagaatgttgggtgtggctgtgacacgccaggttagcatgagggtgctgcccatgccacgtggctgtggctcttgtcctggggatgcataatttctatcaactcacttttatattcattcattgacattgaccacctcagtgttgtgcactgattccatgctggtgaatataaagactaatggctcatgcccttgcccttggcaagcatgaagttgggagacagagatgtaaacatattattacatcagtgtgacatgagaaataccctgacagagcacaagatactacaaagtgaagaagaagtgatgttttttggtggttgaggttattaaggtgtgagcagacctcgtccttggtttccttctcttctgtctctagggtcttctccttagtagcttattccatgycatgttttccactaatcttcatgaggcttatttccaaatctatttccccagcatgacctctttccacagcttcatccatatagatctaattcttatttgacatctccacctaaagtcctgctgacacctctaactcaatttgttcaatgctgagctcatcttttttctacaaaacctgttcaccatcctgctccctattttgttaacagctccctgctgaagccagtgatgcaggctctagtgcacattgataactttgaatcaacccttttctttcttcacttctgcatccaactattttttgttgattctatttctgtgctatcactcctgccattttctctccttcctgctactgttatcctatttcaggacctcattttctttctctcatgtaggtagtgtacttttagccataagagtaacacgactctctatttagcaaaatcagatcttcaaaattcttctcttgatggagacttttcaggtgaggaggaggagggggaatttagactggtgattctcaaccttggttgctattggaattaaccagaataactctggaaaacactcatgccttgcttctactcccaaaggctctaatttaattgatccaggatgtgtcctggagcatcaaagttttttaaaaatatctccacataattttaatgtgtagttaaggttgagaaccaccaaactagaccaagagaacccacttttctcccctttttgattgacatttccaccaccaccactcttgctggaaaagtgaaaaaacttttgtacctcaagacaggatggaaattttcaaagacttttacaaatactaaacagaagggaaattttaaaaatgaagtatgaaaacatcatacttatactatgatagttagctttctctaatctaaaagatgaatatatcaatacaacacagtagctacagcatctgtttaaaaaataatatataaacctagaggcataagaagattccactctcttattcattctctctgtttccaattttctctacctcagtctcaagcattattgccaaatttattctcttgaaaaccagcttttaatatatcaatcc

SEQ ID NO: 674723 - DNA, 2382 bp, Homo sapiens
aatggtaaactggataaagaaaatttggtgcatatacaccatggactactatgcagccataagaaataatgagatcatgtttttttcaggaacatggttggagctagaggccattatccttagcaaactaacacaataacaaaaaaccaaatagtgaatgttctcacttaaaagtggaaactaaataatgggaacatatggacacacagaggagaacaagagacatggggacctactggaggatggaggctgggaggagagagactctcagaaaaaataactaatgggtactagatctaatacctgagcgacgaaataatttgtacaacaaacccccatgacataaggttacctatataacaaaactacacacatgccgctgaactcaaaataaaagttaaaaaaattaaaaaaattctaaatggagggaatagcatattcaaatgctgtgaaacaaagaatgagcaatattttgaagaacaaaaggtagtctagcataggagtattagacaccgtggtgtaaaaatgagtaataaaattatatctcttgaggaacatttcatctgtgatgaaagagaggaatgtatcagaggatcagaggaaaaatgtgttaagtgatacgtattaatgtgtgcaaagtcctaaggaggtaaagcgagagtgactcggtttgcctggcagtcaaggaaggcgtcacacaggaggtaacttctctcttttgcttgatcataagtaccctgaaggcggagatcttgtcttacattttttttattatccattttgcctagcatagtagcaggtacccaaggagtgttggataaattcctgatttaatgttatttgttgcaatgacccctgggaggctggagcagaggctggtagcatagaatgttgggtgtggctgtgacacgccaggttagcatgagggtgctgcccatgccacgtggctgtggctcttgtcctggggatgcataatttctatcaactcacttttatattcattcattgacattgaccacctcagtgttgtgcactgattccatgctggtgaatataaagactaatggctcatgcccttgcccttggcaagcatgaagttgggagacagagatgtaaacatattattacatcagtgtgacatgagaaataccctgacagagcacaagatactacaaagtgaagaagaagtgatgttttttggtggttgaggttattaaggtgtgagcagacctcgtccttggtttccttctcttctgtctctagggtcttctccttagtagcttattccatgccatgttttccactaatcttcatgaggcttatttccaaatctatttccccagcatgacctctttccacagcttcatccatatagatctaattcttatttgacatctccacctraagtcctgctgacacctctaactcaatttgttcaatgctgagctcatcttttttctacaaaacctgttcaccatcctgctccctattttgttaacagctccctgctgaagccagtgatgcaggctctagtgcacattgataactttgaatcaacccttttctttcttcacttctgcatccaactattttttgttgattctatttctgtgctatcactcctgccattttctctccttcctgctactgttatcctatttcaggacctcattttctttctctcatgtaggtagtgtacttttagccataagagtaacacgactctctatttagcaaaatcagatcttcaaaattcttctcttgatggagacttttcaggtgaggaggaggagggggaatttagactggtgattctcaaccttggttgctattggaattaaccagaataactctggaaaacactcatgccttgcttctactcccaaaggctctaatttaattgatccaggatgtgtcctggagcatcaaagttttttaaaaatatctccacataattttaatgtgtagttaaggttgagaaccaccaaactagaccaagagaacccacttttctcccctttttgattgacatttccaccaccaccactcttgctggaaaagtgaaaaaacttttgtacctcaagacaggatggaaattttcaaagacttttacaaatactaaacagaagggaaattttaaaaatgaagtatgaaaacatcatacttatactatgatagttagctttctctaatctaaaagatgaatatatcaatacaacacagtagctacagcatctgtttaaaaaataatatataaacctagaggcataagaagattccactctcttattcattctctctgtttccaattttctctacctcagtctcaagcattattgccaaatttattctcttgaaaaccagcttttaatatatcaatcc

SEQ ID NO: 674724 - DNA, 2516 bp, Homo sapiens
tgtttagcgcttaacatagagcaggttctcaactgggggcaattttgtcctctaraggacatttgccaattactagcattttttattttcacaactaggaaatgttatggcatctagcagatagaggccagggttgctgctgaatatcctaaaatgcacaggacaactcctcacaacaaagaattacctgaccccaaatgtcaacaatgctgatgttgagaaaatctgccttggagtaagcttggccatctggaggcactaaaaagtgtagctattaaaatataattataatatctttcccacttacatgtactgagtatatatttagaaaatctggaagaagctatggtgcattaagaatgactataatttctttggcactccacccattaagaggtggggtctctgttgtctgtccttgaacccagacaggctctgcaattgctctgaacaacaacaacaatatgacagaagtgatgccatgctagcttataaaactagcagtttcctctttctgccttttggaacaccttctttgggaatctcaagctagcatgtctgaagtctgacttcctaagagcaccatgctggagaattcaattgtcagcgaacccattgacagtcccagctgactccagccttccagccacctcagccaagtcaccagccatgtaaataaacctcttggactctccacagcagtccatccaacaactgaataccactggtgaagtattgtagtcaacatcccactgagaagaattgcccagttgactcttgcctgcattgctgctccaaaatattggaatatataataaaatggttattattttaagctataatgcattggagataatttgttttgcaccaatacatgaccaaacagaagtaacagatgtcctcaggtaatttatgatgtcttgaaaagacctcataactaaaaaagagaaaaatgaaaaaccaaatatttgtatttaaaaaatgttaagatacattcattaaatggaaactaatacagagttcttgaagtttactgaattggaatcacggaagcagattttctcaacatcagcattgttgacatttggggtcaggtaattctttgttgtgaggagttgtcttactctttaaaagactttgggcaagcttcttaacctctagaacattagcatctctaactgtacctgttgataataatatctgctacatgaagttattctgaaagttccactggaaaatagatatagaaaagttcctaatgcaagtattagcacaaaattagtacttgttaaatgtttgctaaatttaaataactttagaagttagtaagtaaaggattagcaagaatttttgttatgggggaaaacacacaggaggtgtaaaccttgagctaaattataaattgttataatttcaaactgtttcttgccttgaaataggcaacattttaatttgcagttgtttgtacatgaagaaatgctacagttctgtctggtgagtggcctcaggtgactatcctaagaatacatttgtgtatgggttaggggcattctgaaatataattctatctatggacatacagggcttcagtcagagagagaaataaagacctggtaactgggtatacaatggaagccaaatttcaatgataaactgttgatcactcagaaaaaaatccttcagtgcttaaggggcaaaactagcaaaatggatttagcagctcaatgcaaacattagagggagtgggagtcttggtgctgtttcagtgcagtgactataatatttaaacaaccaggttggaaaggtacttgcatatgggaagaaaatggtttcaaatcactctgaaggtctgagcaatcctgttgtgggaccttctttgaaaagaaaatcatgggagcaaaaagtatttccttacaagagaagaaagagcacaacattgtctgagcagcagtagctctggagtgagccaatgcaagaggctgggtctgcaaagagcactgaaagcattgacctccccagatgcattagaaagggcccaaggcagcatggaaattgatgttggtgactcttgagccaaagacctagggagagcactaagcaaaaagaacaaagctagaggcatcattttacccaactttacactatgctgtaaggctacagtaagcaaaacagcatagtactggtacaaaaacagacacaaagaccaatggaacagaatagagaacaaaaaataaatgcatacacctatatccatctgatctttgcaaagtcaacaaaaataagcaatggagaaaggactccctattcaataaatggtgctggaatagctggctagccaaatgtagaagaatgaaaccgaacccctatttttcaccatatacaaaaatgaactcaagacagaataaagatttaaatgtaagacctccagctacaacaatcctagaaaaacacctaggaaatactattctggacattagtgttgggaaaaaatttatggctaagttctgaaaaacaat

SEQ ID NO: 674725 - DNA, 1349 bp, Homo sapiens
ccatgatgacttggaagcctggactccaaaggaaggagttccaaagccttgatcaatggaacagaggcattgtccttgggacccgaaggagctgataccacgtcacttataccaggatccttgctggttaattcacatagggcggtggaggacacagtgcagtctctgtttgcactggcttatgggagactgagcaagatagagtagagagaaagtagatgaaaggtgccatgaaagccatcctcagctcaagcctgtgtcttcttagcaggggtcattgcatcctctttattatcaaagggtgtgatcctaatacgcttatgagacagccagtgtagatgtgatatcaagccagctcggccctccctggagcctccatcatatgcatctatgtgtcccccttcattactttccgattccttttccccctcctacagcaatagcctgaaggatatttttaggccccagtgaggctgtgatcactgacccttggcttctgaaaatttttacaccgttttgaagggatgtgcatactcaggaatacagctatttttgaatctgtactagagattctaggctgtatcctccatgggggcttattttttaagtttgagcagaaaatattccaagggacattggtagtgtaatggatgatgagcctgtatgctgatgctgattaggccagagtgggtccagactgctctggccatccttgaccggaggaagaactagtacgtccaccttgcctcaaggggagcagatctgtcaatggctcaaagcctggagtgcagttcctactagctccacctggagtcttaaaagaggaacagatcagcatggaggagatctttgggtcctgggcattttgcattttttaagggtatagagtcatacttttatagttcaacaacattgacaagaatggatgttttgagtccgttggttaaccttggatttgaaaagaggaagaaaaacagaaaccacacattagcagggcagcactgaggttacagtcatgttaccawagacgccaggcttgaagagccgtttggggacaacagagcacaacactggaaaaataaattttttagagacagggttccgctctgtcacccagacttgagtgcagtggtgctcactgtaacctcaagtttttgggctcaaacaaccctcccatctcagcctcctgggtagctaggattacaggtgtgggccaccatacccagctaattttttattttttatttttgtagagatggagtcttgctgtgttgcccaggctggtctcaaactcctggcctcaagtgatcctcctaccttggcctcccaaagctctgggattacaactg

SEQ ID NO: 674726 - DNA, 665 bp, Homo sapiens
gatcacactcaacgtgcacacacacatgcatacacgtgtaaagcacaaatacagaaaacaaacctgaagagtctaataaagcacaaacaaacaggggaaagccaggggtggggagagcacatgatttaggagagattttgaatrtcctaaagtttttttaagtgaaaagtctcagtaatgagatcctcttggcaatcttcctttatcattgcaaaggagacccagacctcaagtgacagctggtattgactcaaaactgccatcatcctagatgggcaaccaagcacacctaacattctctctatcttttatgtattaagtactgccaaggtgccaggcattgctctgagcactttacttgggttaattcatttagttctgaaaatcgccctatctaatggatactattaatatgcccactttgtaggagaggaggctaggacacagagagtttaagttatttatacaaggcccaacagctaataagtgccagtatgaatccagaacttttgctctcaactacagctgatgctagaagagattattctttgttattattttttccttaacagggtgatcaggggattccaggagacagaggctcacaaggtgaacggggaaaaccaggccttacaggcatgaagggggccatcggtcctatgggt

SEQ ID NO: 674727 - DNA, 1309 bp, Homo sapiens
ggctgtctaatcatacgattagtttttctttgcaacctagacatgtgaattgagcatgtcccataattgctgagtgtctcgcttctttctctgcctctcttgcagagctacgtggatcacattagcaatccctggaactttagtctcccccgccttcagttttgtgccacaggtcagctagtgttattgcttggtcggttgtctcaaagactctctctgctgccaccaaacttgcccattgggactagttcctcgtcactctgagaattttaaaggaacatatttattaataataaagagtcctgacttcctctttgtgcactcactagggcaaaacataaattaaatgacaaatcatttgaatgtgaacactaggaaggtgacttgtgagctaaggtgctttttgcctcttggacatggaagttgtagctggctttgtgctggactatgctaggttataagagtatttggttttcttgtgcaaagtccacagaaaggtgagctttgcttgagactattgagtggaaaaatacacacgcacacattcagttctgggctaagtttttcagtacctaatttttccatttccattgctgcagctgttttatttggttgctgggccttacataaaccagtttacaattccttaaacatatactgctttgtcaaataccacaacattaagctcaagaaatataagaaactcctggtacatacaaaaagtctacataaccagtggattaattatgaaataccctatttaatgtgaaaattattcactttttttgttttgactgtatacacagtcccttttacgccacagcatgtattaggtgaggggctgcctccagaatgatccagccgagatgggcttccatcagtgtaacatgactaccctctagtggttttatagagaatgacatagctattcatttgtttaaaaaaaaacgtttagcaataattttaaatattttattttattttaattgacatataatagttatacatatttatgggatatgtagtaatgtttcaatagaaatattacataatgaccagattagggtaattagtatatccatcatctcaaacatttatcatttctttgtattgggaatattcaacatatttataggtccttgacatttcrgaaaaccatgtaatcattaggcagttagtgtaagtaatacacacatgaggcaggcagagcagaataacactttagatgcatgttttctctttctgaagagttacaaagcagttgatagatattcatgaatgtagctgctgggctaaccatttatgccca

SEQ ID NO: 674728 - DNA, 1577 bp, Homo sapiens
gttactctactgtatttctagttctcatataaagtaagataacgtgcatccaagcaccaagatttcagtctctactgctaattattatttaaaataatcaagactccttggagaagacctgagtccgtgtttgaagcaatggagtcaagatcgacttggggcatcttataatcttattccttaaaaaaattcaacaatctatttttggcttatggatgctaagcaaaggaagtaggaaccatgagagccaacatggattcatttgttaaatcttacagttcagaagagtaatcttgattttagcaaaccatttgtcaaaatcatgtgatactgtcaattccttgcaaatagacaaagaaatgtagggtgagttttaggacaatgaaatggattcagagctcactaaacaatagattagaagatgatttacaagtggacagaaagaatcccatggcatttggaaagacctaatccttgactcttggcttttttagtcaacatttctatcaacagctagaatgatgacatgcttatgaaatttagcatgacacaaagttatagggtcagccaacctgctcttcaagagacaacatttcaaaagacatcttcaggttggaataagatatgaacacaaatgatttgaaattaataagaggaaacataagatcacacacttagattcaaaaaataaacacacagtccataatgagaaacacctcatttaaaaatatttttataaggaagatccagggctgttagttaactgaaaacttgtaatgaatcaacagaataatatggatgcttttttccaaaaagcaatacatcttaggatgaattattgaagtatctagagcaggggtcagaactttctctgcaagggccagatagaaaatatttaagcctttatgtaccatattgtcacaattgctcagtcctgttgctgtagtgggataacagccagagaaaagaggtgaaggaatgtgcatactttatttatggaaacaaattcaaatttcagataattttcacatatcatgaaatatcttttgatttttaaaaaccgtttaaaaatataactcrctcccactgctccctaccaaaaagcaaaaaccattctcagtttgtaggctgtacaaagcaggtggcaatagctttggctagggggtacagtttgctgactttggtctaaataaaaagacactactctgcattggtcaaaatattccttggtaaatgagagtcatttataaattaaacatttcccaggggtgataatagtggaggagctagacacatttactccataaaagagaaaactaaggaggagtatgagggatattgaaaaatactcaaagggctgtcatgtgagtacaagcaggtactttacctgtgttgttttacagaccaggtataatgaaaggaagttccagggaggcaaaagttaactttgtataaagaagaattttcatcaaagagctgtcccatcataaaatgggctgccccttaaggtttttgtggcatggccatctttcgagaatgttgctggagggattccccatagtaggtgggaggtggga

SEQ ID NO: 674729 - DNA, 423 bp, Homo sapiens
aaaaaatggggtctaactgagacctcttgtaaggctggcatgaattcaaagctttgggaggctagacaaaatcaaatagagtrcagactgagggtagagtttttcttaaagagaactgaacattttctttgaaagagtcacatacctattcatctttgtccagctttactagttcaggagctcatgccttaggtgctctctctatggttagtctcaattcactctgtaaataatttctaagaaactctacagccttaggtagattgttgacttcattggatctgttgtgcaaaagcgggtggatcatgacgacctggccttttctgagttcactttagggagtggttctgagagagcagtccccggagcagcggagtcaccagggaccttgttaggaatgcaaattcgctggtccacactggg

SEQ ID NO: 674730 - DNA, 621 bp, Homo sapiens
actgcagcctcaatgtcccaggctcaagtgatcctcctgcctcagcctcccaagtagctgggattacaggcacccaccaccacacccagctaatttttgtatttttagtagagatggggttttgccatgttgcccaggctgatcttgaactcctgagctcaagtgatcctcccacctcggcctcccaaagtgctgggwttacaggtttgagccactgtacctggccctgattttcttttgatagaatgagtttgctctcaggtttgttggctcctgatgcaaatacatttctgatggtcttttttcaccatttcttccaaaatgaccagatgtttttgaattccattggggaacacagcttaggctctaatgggaacccccagcccacatacataccagtaattgtgtacaatgcatgatgaacagatctgttttcctgtcttcacctatagagttccagagctcatctggtctaagtacaaatctgaagccttggactcaccactggagttggtcttgctgccagtgtccctaggtggagccctcagtgcatgtttactgaccaagttgagttttccctcatccctatctaccacagtcacccagttgttgcttgggcct

SEQ ID NO: 674731 - DNA, 980 bp, Homo sapiens
aggtgtcagcctccaggggcataaaacaaactgcaaaattctaattaaaggtcgtgggcttatgtgttagatgtgaaatatcccctgacaaacgaatcaccaatttgtgaattgggattcaggggttttttgcaagtttgtctcagtaacgagacacctctaaattagtgacttcctcagcacctaaggcgttgagttttatacatgtagtaaatttcacatcaaattaagagcatttttgtttcaaaaatacataatcctacagccagtcaacagccacctggagtgtcatggtcccaaggaaggacagccagtaaacaggcactggggaagaagggaaagagggaactcccggcagggacccagcccaccctgcaggctcaccgcggtgccggtgctgccgtgtgtgtgaagcgaggacccgctcggccgctccttgcggtgaggcatctaggcttccatccctgcccagagtatctgcgggaggcatcgacaaaaccagagaaggcttattcctcctagtcatgtaccatggggtcaaagacacttagaattgtcctttctgcatgctctctgagaccctgcgaggtccatgcagccctccctgattgactccaccgccactatctctctatctgtctccacaccccaaagcaggcctccaggctgtagcagatgacacacacatacatgcacacacacacagtcacactcacacatgtgtttctgggcagctccatgtctgctaattcggctaatgacagcactgaaacatatgctcaccattattgccccaaaatatttcagaacaaaycagattttcctggtattttcctttcaagccatgttaccaagcgtgtctcctcttgcaacagccttgtggaccaaggctcagaaagcacccctcaccctccatgggccagggaacctaggacctctcttaataccatccccatggtgataagatacagcttgcatct

SEQ ID NO: 674732 - DNA, 1475 bp, Homo sapiens
ctttatttatttatttttgagacagagtcttgctctgtcacccaggctggagtacagtggtgtgatcttggctcactgcaacatctgcctcccgggttcaagcgattctcctgcctcagcctccctagtagctgggattacaggtgtgtgccaccacggccagctaatttttgtatttttagtagagacgggttttcaccatgttggccaggctggtctcaaactcctgacctcaggtgatccacctgcctcagcctcccaaagtgctgggattacaggcatgagccaccaagcccagcttagagaagcttattttttaaaagaaaatacacaaaaaaatcaaaatctcataagtccaattgtaatttttttttggcttttaaaaattgttaatgccctcaaatattctcctatccaatcactgtattttaaatggcattcctccagcaaatatttgttgagcccccactatgtgccaggattgaaatgtcaaattgaaggaggcaatagctactgaagtaaagcaaaaaaaagtactggttatttttccttctataaaatgacctagtaataaccgctttacccaggagagttgctgtaaagatctaataacatgacacatataaccacacccctaaagaatgaggtgttactgcatgttctcactcataggtgggaattgaacaatgagaacacatggacacaggaaggggaacatcacactctggggactgttgcggggtgtggggaggggggagggatagcattaggagatatacctaatgctaaatgacgagttaatgggtgcagcacaccagcatggcacatgtatacatatgtaactaacctgcacattgtgcacatgtaccctacaacttaaagtgtaataataataaaataataaaataaaaaaaagaaattttgcttaaataaatattataataaaaaaaacaaatgaggtgttattaaaatgtttgcaagagaaaccctagtaattccaagcacatattttaggaatggtttcttgtgtagaaaatcctggaatgtgaggctctgctgatttttttaatgcatattctcttcttatgtatgcggaattttttttttttttgagatagagccttgctctgttgcccaggctggaatgcactggcacgatcttggctcactgcaactgccaccccctggtttcaagtgattctcctgcctcagcctcccgartagatggaattacaggcgtgtgccaccgcacttggctaatatttgtatttttagtagagatggggtttcaccatattggccaggctgttctagaactcctgaccttgtgatccacccacttcagcctcccaaagtgctgggattacaggcatgagccactgcacctggcctatttttgtttttactaatgtttcaagagacccactttatgtacagaattctggctacaacctaacaaatgagttgctctgttc

SEQ ID NO: 674733 - DNA, 598 bp, Homo sapiens
ccagcccttgctcctctccctcatcttgctgtggctcccctggccttcattctgtttctggagtgtgccaagctgctcctgcctcagggcctttgcacacgatgttcccactgctccaaatgctcctttcctggaacattccacatggcttgcttttctttatttacrtcttagttcaatggtcagataataattctcagaccacttcacctagtgaagtaccttagctctcagagactctcagctatttgttttttttcccctcttcatagcacttatcattctcagtttattttggtaatctattggtcgactttactttcccgtcctccctcctcaaccaagtatgttccacatggataaggactcagtttccttcagtctgagcctatcccacagcctggcacagagtaagcttttcatgttcctcgggcctgtgcacgaaaatgctcccaccactgctgttggtgtttggatgcacacaagctggaaatactaacggaagtgcctgaggcagaggggaggaaggagggaataagcagactttctctactggagtgcctcagaaacagcctcaagaacctggagatgatgttga

SEQ ID NO: 674734 - DNA, 640 bp, Homo sapiens
cactatattttcatatacctgactttttcagtcaagattctggtgctcagaatgggaaaaacatacaactttatgttaataagttgtatttctgttggtgcctcctacacatrgcagggaagcaggattgattatggcctgtgcaattaatattttaacctagagaaaaaatgggagaaagcaggaaatgtaattagactgtgccaaagaagtgtaattttgacagttgagttggaagatgaatggtggttgtggggagaagaatttgaaaggagggtagacaaaaaaaaatcacccaaaaagctgtggcatttgctcaggagagatatgacatgcagatgaaattaggcaatatcagtgaatatagagaggaatagatacatttttaaactatggtaaatagtacgattgaagtgtgtgccgggtgcaggtaaaaaaggaagaggggacagcatgatgtcagactgggactccctgagttggaggtgcctgtgatatatgggagtggttgaggggctgagattataaggggagtgaatacagaagggagcagaggataggaccctaggaagcatctatcaagttatgggcagaggttgtacgtagcacagaaaggcaagaaattgccagggaaatagga

SEQ ID NO: 674735 - DNA, 640 bp, Homo sapiens
cactatattttcatatacctgactttttcagtcaagattctggtgctcagaatgggaaaaacatacaactttatgttaataagttgtatttctgttggtgcctcctacacatggcagggaagcaggattgattatggcctgtgcaattaatattttaacctagagaaaaaatgggagaaagcaggaaatgtaattagactgtgccaaagaagtgtaattttgacagttgagttggaagatgaatggtggttgtggggagaagaatttgaaaggagggtagacaaaaaaaaatcacccaaaaakctgtggcatttgctcaggagagatatgacatgcagatgaaattaggcaatatcagtgaatatagagaggaatagatacatttttaaactatggtaaatagtacgattgaagtgtgtgccgggtgcaggtaaaaaaggaagaggggacagcatgatgtcagactgggactccctgagttggaggtgcctgtgatatatgggagtggttgaggggctgagattataaggggagtgaatacagaagggagcagaggataggaccctaggaagcatctatcaagttatgggcagaggttgtacgtagcacagaaaggcaagaaattgccagggaaatagga

SEQ ID NO: 674736 - DNA, 624 bp, Homo sapiens
caggtgatctgcctgcctcggcctcccaaagtgctgtgattacaggcgtgagccaccgcgcccagcctcccttgactcttgttattttctcttagtaatttttgatccactgacctcctactctgctctttarctataaatctccagttgttcatgttgtatttggaattcagcccagttctatactgaggtatctttcctgcattgtaatagtcctagatacaatctgtttttactgctctatcatctagctctgattttcttcctctctctctctttctctctctctttaagagacatggtcttgctccatctcccaggctggagtacagtgtcaccatcatagctcactgcagcttcgaactcctgggctcaagtgatcttcctgcctcagcctcccgagtagctaggactacagacttgcagatctgcacccagcttatttttatttttattttttcttttggtgaagaggagttttgcagtattgcccaggctggtctcaaactcctggcctcaagcgatcctcctggcctcaagcgatcctcctggcctcaagcagtcaaagtgctgggattacaggtgtgagccaccatgcctggtcctaaaattggtcttttgaga

SEQ ID NO: 674737 - DNA, 1154 bp, Homo sapiens
gagccaccgcgactggcctgattctagtttcttgggagtgggtgcctttttgtaagggagaaaaagtaatatattttcctcattcatagatagattcatagctgaaacccctctaacaaaagatagattaataagagaaaagcataaaacatttgcttaatacaagttttatgtgacacaagaatcttcagaaatgaagacccaatgaaacaaggaaatctgtgaatatttatgcttaggtctgaagaatagacagtcatacagaagcatgatgggaagacagaaggacatgacctaatgggaataaactggggggaactcagcaagatctgtttgctcaggtgctttgtggcatctctgtgtgacattcctttcctctgggtatagggtaggacaattgtcacatgaaagtcttcaggcaagaagggcaggggaaggtgagagtkacctttctccttctgcttttttctgtttccaagatgccatatttttgggtagtatttcctacacctcatgattgtgaaagcctgcagcatttagatggacagctgcccctttgttcaaagccttggatgcatttgctgagaaggtccctggatacaagacaatgccatcagtctatcatttctgaggaagaggttcttaaataaaggagaaattggaaggaaaaaatcaattaggatcagggagatggctgctctgtgccacccctttctcccttagctaaagtggcttttgattggactgggctgtctctgagctggagcagaagttaatcgaaggccatttttctttctttgcaaggagcaatgttaatcagaacagcgagagcttgagtgtcaactctgcacttatataaaaatggccttggggatgaacgtgcaacaattatcccgtgaccagagtctttttcaggaaggacaaacccaagattagtggttaatgctgaatcccaaggagtcttgccctgaagctgaggaaataatcctgatactgtgtatttccagctcaggaccatttgcaggccgggtgcggtggctcacgcctgtaatcccagcactttgggaggccgaggtgggtggatcacaaggtcaggagatccagaccatcctggctaacatggcgaaaccccatctctactaaaaatacaaaaa

SEQ ID NO: 674738 - DNA, 756 bp, Homo sapiens
ccctgagagcgttatttatgagctgtgcttctcaattctgttttttcaaatgaattagggaagtgatttgaatcataaaataacaaaaacaaattgactgcccaagagaaagaaaatgagcaagaatataaaatttctttgtaattctaaatgttctgtagtggtttcagttagataataaattcatttatatcaggaaaccgccccccaactcagatagatggatgtttgtgctgtgcaccagagttaggacatcagccttgtagaacaacatggtgttgaaattaggatgcctcgttgtggttctgtagaatgttgatgtctctgagtatggatctccatttgacacaaaattttacaaagtttgtggctggcatctctttctgggccttacgctctatttcttccatgccccagtctctaactctgtgcttggtctttcctcacagactgaatcastttggaacatatcaacagatcatttaaaggtacaaaatgaatatttgtatgcaatttttaaaaagacagccagttgtgatcaaactccttaccatcagtaggacacacatgagagttctgagaataagaggaagagagttcacatatgagagggcagaaccaagctcagtggtgtaggagttcttgggaacagggggagtgctgcagatgttagacagagaacctaaatccttcactgccaatggccattccagagatggcctttgaattggaggcagaagtgggacagaaccttta

SEQ ID NO: 674739 - DNA, 1634 bp, Homo sapiens
aaggggaaagaaggctcatgcatcatccttcagggaaacgacaagtattgcctacatcacttcccttcacatcctattccagatcttagtctcatggccaccctggctataagaaaggctgggaaatgtagtctttagtttgaacagctatgtgcccagatgatgattgagggttctattcctacagaggagagggaaatggatattagcagacaacttgcatcctctgcccagtgtctgcatttttcccttcctgtaagcttgcagttgaaatcctcaaacataagtgcaaactatagataacaaataaaatcaaattaatcttatactattaaataatgcatatgttaagttatattagaaaaacatgtaagaaatcagaaaaagcagagttacagtatcacaaaaaggtcagtttctattggtaagagttaaaatgcagggacttcttaacaagatggggtctttgtgctgaacgccttccatgttctcctccggctatccactcctcctccatctcctcattgctctaggtcccaggaggctgacttggagggaccacactgacagctctctcaccctttgcttctacttgggtttggccaaaaggaagcatcagcaggagactgtgggggagattgaaggtggggctggtgcacttagttccccagcggtggtcccgcagcgtggctgcaggttggctattccttacttgaggtcagttgccatagaggagcccttccttttggccctccagtttccatgtttccacatctgctctcactcctttctctttccagcctaagaaaagtgatggttccctgccatttctagccccaggatactgcattaccacttgtggtttctgcagaaaaagatttaaaaagcaaaatttcttgaggcatttttaaaccaaccattatttatcgaaacagtctaagtagtaatgtaaaatttgcatcctagataaaaagaatatgtactattttcaaatgtccatggacaatttagaacattgaacaatatctccaacatgtatggcaaaaaataatgttyttaacatattaagaactttgaaacaaagttatgagaacaacatttgcggaagaaaagttaacacattaaaaattaattactggtaatcaaaaaatgtgcaaattaaagtagcaataagttatcttttttcacctatcaaattaacaaagatttaaaaaatagtgcttgcaagagtgatatgacactgttgttcacagctagtgggagtatgaactgataaaaaaaactttctagaaataaatttgtcctctgtgtcaagaaacatttgaaaatttatgttctttcaatcagtaaatccacttttagaaatttattaaaaataaataataaatgatgtagatgtgtttaaggatgagtagtacacatttataatagcaaagtggaaatagtccagataatcagcaatagttgatggttacactatggtatatcatcatggtatatcaatatattaaaaatatatagacattaaaatagggttttcaaaaagattaaatgaaatgggacaatattccccaaataatattaacttcttaacatataaaactacagaaacagtttgattcttaagttaaaat

SEQ ID NO: 674740 - DNA, 678 bp, Homo sapiens
taaggagcagtgatgagatctttatcagtcctcactacaaagctttcatctccagccttctccatagctctgtggagggcagagagttgagggaaggaagaatggagcttgggagcatgggatcatgtatgtataccaggaaagaaaacacacattctttattctattgcttcaaasacagtttgtgagaatggaagataacaagcacagctggccaggaaggcagggcacacatggcaggtcaagttcctgctatccagggaggtggcccagagcttccctgctgctcctggaggaagcagagtccaagctggcccagatgaggccccgggcagcactgcttctgtgtgggtatggccagtcgggacgtggcgccacacactgctcctccgaactctggtgaagggctgcccagcctcacaggcctgagcagagtctcccacatctgcgaatggggccaatggcactcactgtctcttcaggcccccacggacggcatgcctggggaagcctagtctacttaccatcagcacgttgatctgtcacacagcatggagccatagtttacaaaggaccacggcaggtcaaggacaggccactaaaactgttggtgctgggcaccatcacccaccctcaccaccatcaaagacactggtgcagtgagacttcgagtctgca

SEQ ID NO: 674741 - DNA, 1155 bp, Homo sapiens
ctttttatctttcattgttattattgcatttaatcttcaccacactcgaggtagattcccttattgtccatttaagactgtgtagacattgaggtcgagatactatttttacctaaagctagcattacctccctacgccctcaccccgcagcatgacgaggtgcagcatcccgctgttagagattcattcctttgagtcttattgaaatgcgactttgaggagtaaaagaagaggaaacgcctcagaggagtttaggtgacagctgttgacaagcagagtgtgaaaaggcttcaggacaggaccgtgaagatgggagtggggtccagaactgggctgtccagtacagtaagccactatggtagccactagccacattgtttattgaccatttgaaatgcagccagtccacattgagatgtgttataaatacacagtgaatttggaagacttagtttgaaaaaaatagaaattacatcaataactgtatttactacttgttgaaatgatatttttgaatatagcgaattaaataaaatattaaaattaatttktacaggcttgtatatctttttaatgtggttactaggaaatttaaaattccgtgtgtggctcacatcgtattaatattggacagcgctgatctagaaggagagaaagccctgagacccatttaccagatcggcagagccttggtggcaggagccacgtgtcaggagaagctgccgagtgggaagcaggagttgcagcgccccatgctgggcctcgggctcctactgttctgtcccctcgttcttccaggacaatggcccacctgtacggggaccctgagtggtcgcagagggacctggagggacctatcagatacgcccgggagcacctggccaagagcaagctggaggtcttttccccagagcgcctggcgagctaccgccgggagctggagctgcgggctgagcagggccaccccacgacctttgtggacctgtgggcgctagtgctggagtccatgctgcacggccaggtagggcgcctgcgcacgtgggggagacgcgtgtgtgcaccgcgggggcgaaggcagggctcccaagcggctgacatgcgcgtgcgtatttcttgcagcgtggaagagccagtgttttagtgtctgcctcact

SEQ ID NO: 674742 - DNA, 1557 bp, Homo sapiens
tttttttcatagcaccttgttttatagatagaatattcttcttggatgtacctggagctactaattagtgttttcttccaaattctctctgtatcctgatttatgtttcttccagcctgggttgttctgtttctatttatgcgtgtatttgtttatttgttgctggttttcatcacacattgggtgatcttggttgtgggcatggatttccccagctgtygcatggttaggtctgtctccctgctggggccctaccttgatgagaagtttgtgagtgctgttgattcttgagcagggctttatttggggtgcaaacgtccagccctggttttcctcagtgtattgagatcttgtagagaagcattccgaggctttctttccttctcttttcctcggtattatattctccattttctatgttctatgttccagacattcatgggaacctttcatctacttagggtcctcctcccaacttctctttgcttatgggaatttatctacttttcccctttactatgctcttaataggatcttggagaggagggaatgagaggaaagaaaatgtgcctaacaggccgttaaaaacaaaaacaaaaacaacaacaacaaaaccttaaaagttttcacgtttcaaaatgatcattgtagaaaattgagaaaatataaacagtcaaataaaaatgacctgttcttttatcacccagaaataacattgttaatgttttaaaacatgttccagttcctttttctatatatttttataataatgggatcataccatgtgttctgttttctaatatgcgtcttaaaactaagcaaaagcttctaaacatctttccatgtcacaacatatcccttacaatattctgagacctagtatttattgaaagctatatcatcacttatttaaccaaccctctatttttagacattaggttgtttctaatttccactattctaaacaagcgtttataaacacgctgggctaaatcttccctcatagccttgactacctacgatgggtaaagtcctcatagtggagttgctgggtgacagtatatgcaccccatccgcgggccagcattcagggttctctctgaaatacacccccctactttcactttctggttccaaactgtcacttcactgcacttcgcttggattctgtgaagcattgtagcagaggcattaagagcataattttcagagtcagacagaccagggttgaatcttagctttgctgcttattaaatgtgtgaccttaggctgttttaattaacctctttgaacacctttccataagatgaggaaataattctacctttctgatgaggttgttatgagaattaaacaggataaaaaaatgcatgtaaagcacttgacacaggcccaggcagtttgaaagtgttcacaaatcatggagttagattcattcccatccctaagcccattcaaatccctctttcaaggccacattcaagatacaaccccctccacgggtctttcctgaccagggcagcccatcacactgagttgttatggcacttgtgggct

SEQ ID NO: 674743 - DNA, 1557 bp, Homo sapiens
tttttttcatagcaccttgttttatagatagaatattcttcttggatgtacctggagctactaattagtgttttcttccaaattctctctgtatcctgatttatgtttcttccagcctgggttgttctgtttctatttatgcgtgtatttgtttatttgttgctggttttcatcacacattgggtgatcttggttgtgggcatggatttccccagctgtcgcatggttaggtctgtctccctgctggggccctaccttgatgagaagtttgtgagtgctgttgattcttgagcagggctttatttggggtgcaaacgtccagccctggttttcctcagtgtattgagatcttgtagagaagcattccgaggctttctttccttctcttttcctcggtattatattctccattttctatgttctatgttccagacattcatgggaacstttcatctacttagggtcctcctcccaacttctctttgcttatgggaatttatctacttttcccctttactatgctcttaataggatcttggagaggagggaatgagaggaaagaaaatgtgcctaacaggccgttaaaaacaaaaacaaaaacaacaacaacaaaaccttaaaagttttcacgtttcaaaatgatcattgtagaaaattgagaaaatataaacagtcaaataaaaatgacctgttcttttatcacccagaaataacattgttaatgttttaaaacatgttccagttcctttttctatatatttttataataatgggatcataccatgtgttctgttttctaatatgcgtcttaaaactaagcaaaagcttctaaacatctttccatgtcacaacatatcccttacaatattctgagacctagtatttattgaaagctatatcatcacttatttaaccaaccctctatttttagacattaggttgtttctaatttccactattctaaacaagcgtttataaacacgctgggctaaatcttccctcatagccttgactacctacgatgggtaaagtcctcatagtggagttgctgggtgacagtatatgcaccccatccgcgggccagcattcagggttctctctgaaatacacccccctactttcactttctggttccaaactgtcacttcactgcacttcgcttggattctgtgaagcattgtagcagaggcattaagagcataattttcagagtcagacagaccagggttgaatcttagctttgctgcttattaaatgtgtgaccttaggctgttttaattaacctctttgaacacctttccataagatgaggaaataattctacctttctgatgaggttgttatgagaattaaacaggataaaaaaatgcatgtaaagcacttgacacaggcccaggcagtttgaaagtgttcacaaatcatggagttagattcattcccatccctaagcccattcaaatccctctttcaaggccacattcaagatacaaccccctccacgggtctttcctgaccagggcagcccatcacactgagttgttatggcacttgtgggct

SEQ ID NO: 674744 - DNA, 648 bp, Homo sapiens
ccctgtacattgctggtggagatgtaaaatggttcagcagctgtggaaaacatcatagcagctcctcaaaaaattggacataaaattaccycaaaagtattgaaagcaagaacttgaacatatatttgtacatcagggttcatatcagcattatttataatagccaaaaggtagaaacaacccaaatatctatcaatggatgaataaataaaatatcatacatacctacaatggaatgttaatcagcctaaaaaaagaagtgaaatttttatatatgctacagcatagatgaaccttgaggacattatgctaagaaaaataagccagacaaaagacaaacattgtatgattctgtttatatgaggcaccaagaatagtcaaatttatagaggcagaaagtagaataacagttatcagggactgtgggagggagaatggagagttactgtttaattggcacagagtttcagtttgagatgataaaaaatttctggagatggatagtggtgatagttacacaacaactgaactgtgtacttaaaaatggttagaatggtgacttttatgttatgtatattttaccaaactaaaaaaggattaaaaagtaaattttcagataaacggaaacagaaaggattttccatcagc

SEQ ID NO: 674745 - DNA, 612 bp, Homo sapiens
ctggaggaagacctgacaattactcagttaacttaatccctgtagagataaattccttaggggttaatgawaaagggtactggcacatccccttctgctctctgtactcgtcaaattagccacgtaattgccgaatcccaaacccacttggtagatacagctgtaatgttactctttaaagataaacagttttgtaaataagcatcttcccactcccactcccactgagggctaaaaagcacccctgtgtggaagactgagtaatcacgttcaatctggagtgagatatgccagactggggaagagacgcttcatggttacctgggagacactgctgggattggactgctgggccttcctcccaccagctgctaccatttctctcccatctaagaagttcccttgttttcctctctgtctcctcctcagtcttcccttcttccccctgccctctcaacataggtgttcccaaggttctgtcctcagccatgatcacgggtcccaccatctcacaaaacaattctacattttgccctccagtctaacccctccttgaattccagaccctcattcttaccttcctgctggacagcccctttatgtgtccaaaat

SEQ ID NO: 674746 - DNA, 908 bp, Homo sapiens
gattacaggtgtgagccactgygctggcagaaattaaggcaaaataattcacccacctccaggtccagcagtacaagaaggatgagagagaaaatgtccatctttcaagagagctgcaagggaagcagtgtctggggaagagcaaggaagtgaagagaagattcagtgaagagttgaggttttgggagattatgctgacaattgaccttaaaattccaaagggccagtgaaatcctttaagagaagtgcaaagtcatggaggagtcttggcatgaaaatggccaggcagtcctgggcttcatgtgataagtgacatgatgagagtagccctgtggtctccaggcagcagaggaggtagagaagacataagtgacagtggtctttataggagtccgaagaattctacagcactctcttggcttctactaatggagacttccaggccagcaggaggtgatcctactctttttggtcatctaacacagatctgacaagcccaatagagctttccgtgatcatggaaatgttctacatctacaccgtccaatatggttgccacccgccatatgtggatggcacaaatctaaccccaaccatatccccagccttttttgaccattctcttcattactaacaggagtatcattccttgtctactaaagaaaatgtatgtcgacttaaaaagcacagaatagactacgtaaaacagactagaaaaccaaggcagtgggcacctttgcacacaaattgaaatctacatttccagatgatgattagaggtgataattacaaatggacacacattatcataaagcttgagcttaacaaagttctagactagattatgaagctgatcctgacacctactaaggaatgctctccagaagtcagcattggctcactaagaa

SEQ ID NO: 674747 - DNA, 862 bp, Homo sapiens
tgaagtgcttactatgtgtcaggcatcttccaagtgttttacatggatgatctcatttaatcctcatgataaccttgtgaggtaggtcaatttatagcccattttaccacctgggatactgaggcctttcaggggttaagttcctagcccaagttgataatgctagaaaaatggtcaattaaggattatgaacccagtttggtctgacacagaggccgcatcctttatcaccatgctattcagaattcttgtacacacrtacctacggtttttttctcttcttctgttatttcagtattatagagtaaaacttcatgcagcggtaatttttatcttgaccttagacaaataattggtctgactaaaaacaaacaaaaaaatggagatcttaacagcaagattgattgtcctacctacctgcaaacatttcaaaggtgcctctctcactgcagggttgttttggaaagatcttagttatatatcaaagaaaataatatcttccacactaaaaggttgaaaatagaaatatttggaagtggaactctatttgaagttccgtgacgtatggtgacaatgtgaacttctaatactcttcattttctggaaaacacaatcctctaaactaaaaaagatggtggaatggacatctatgaaggtttttgttacttgaaaagtttgatcctaaaatggatttgtgtgtgggtgcattggaaaatcattcatttcttttgaatgggagacaataattatagatgaataagaaaaatacaacttaaatattagaaatcattgattttttttaggtggcaagatatcaccctggaattatggttagatattgtaaattgagttaaaaaattta

SEQ ID NO: 674748 - DNA, 862 bp, Homo sapiens
tgaagtgcttactatgtgtcaggcatcttccaagtgttttacatggatgatctcatttaatcctcatgataaccttgtgaggtaggtcaatttatagcccattttaccacctgggatactgaggcctttcaggggttaagttcctagcccaagttgataatgctagaaaaatggtcaattaaggattatgaacccagtttggtctgacacagaggccgcatcctttatcaccatgctattcagaattcttgtacacacgtacctacggtttttttctctkcttctgttatttcagtattatagagtaaaacttcatgcagcggtaatttttatcttgaccttagacaaataattggtctgactaaaaacaaacaaaaaaatggagatcttaacagcaagattgattgtcctacctacctgcaaacatttcaaaggtgcctctctcactgcagggttgttttggaaagatcttagttatatatcaaagaaaataatatcttccacactaaaaggttgaaaatagaaatatttggaagtggaactctatttgaagttccgtgacgtatggtgacaatgtgaacttctaatactcttcattttctggaaaacacaatcctctaaactaaaaaagatggtggaatggacatctatgaaggtttttgttacttgaaaagtttgatcctaaaatggatttgtgtgtgggtgcattggaaaatcattcatttcttttgaatgggagacaataattatagatgaataagaaaaatacaacttaaatattagaaatcattgattttttttaggtggcaagatatcaccctggaattatggttagatattgtaaattgagttaaaaaattta

SEQ ID NO: 674749 - DNA, 663 bp, Homo sapiens
catgcatgggagggtctttgtccccttgaggatactgaataaattaagtgttatgcaccagcgttttgactgtgatctgtcacatgaagccaggtgtggatttttccatttttggtgtcaagttggcttcaaaaagtgtcagattttgaaacattttggagttcagayttttggattaggggtactcagtctgtactaacaaatagaatatcattacataatttgaccacttggggtttctcctcagctgtaaaatcaaggatttgaaataaataacttttcaggtacttttctgctgtaaaatttatacatataatttgtgtctggtgtgttaattggcaggtactatttgttaaataaataaagcaacttaacttttgttgcatacaaatactctagacttctatcttcccctcaacaatttatgattttcttaccttaatttacattttttacagtgtgtgttccttaacatcttattatagctatagttatcactgactattttgtcttttagtattcatactaaggatttccgtattctgtcattgtattcatggaatattctgaatttgatcgtgaatgtacctctactagttctgaatttgagtttgaatttacctctaccaatgatttttatactttcacttattttcatgatgg

SEQ ID NO: 674750 - DNA, 663 bp, Homo sapiens
catgcatgggagggtctttgtccccttgaggatactgaataaattaagtgttatgcaccagcgttttgactgtgatctgtcacatgaagccaggtgtggatttttccatttttggtgtcaagttggcttcaaaaagtgtcagattttgaaacattttggagttcagatttttggattaggggtactcagtctgtactaacaaatagaatatcattacataatttgaccacttggggtttctcctcagctgtaaaatcaaggatttgaaataaataacttttcaggtacttttctgctgtaaaatttatacatataatttgtgtctggtgtgttaattggcaggtactatttgttaaataaataaagcaacttaacttttgttgcatacaaatactctagacttctatcttcccctcaacaatttatgattttcttaccttaatttacattttttacagtgtgtgttccttaacatcttattatagctatagttatcactgactattttgtcttttagtattcatactaaggatttcygtattctgtcattgtattcatggaatattctgaatttgatcgtgaatgtacctctactagttctgaatttgagtttgaatttacctctaccaatgatttttatactttcacttattttcatgatgg

SEQ ID NO: 674751 - DNA, 654 bp, Homo sapiens
cttagccccgccccaatccacaccccttatctctaaaccttacccagaccgtcctgctcatacctttgtcttaatttttccttccaaacagtaggtcctcaggacaaggaggtggggcaaagtggctgcagaatttctgggaattggctaggagagaggcggtcggacctacagtcaggtctgcatggaaggttcaatgtttttagttagattggatgtgtactgggaatacagctgacccttgaacaacaggggtttgaactgcaggtccattgagaggcggacgttttttcacccaaacaccggtggaacatacagtatacgaagggcggattttcctacatccgcgggttccgcagggcccactgctggacttgtgtatgcccagatcttggtatctgcgaggttcgtggaaccaattccccgcggactccgagggacccatggactttggggtctgatggagacggggaaggggccaaggttccccccaaaaccattctttggcgagcaccacgctcatgaggcacaggargtggggtcctctccaattccccgcactcccgacaggacggtgtagccgaggaagaacatttgaaggcaggagaggatggcatcccggcacggaacacacacaggcagccagcaggcaga

SEQ ID NO: 674752 - DNA, 507 bp, Homo sapiens
cctaaaatatcttctttgtgaaatataagacacacagacaaaaaatgcacaatacaaacacacaactgaataaataattataaaatgatcrtccgattaagaactagaactttgtcggctatcagcaaccgtggaaacttccaggatatcccctcccgcttaacttgtccagtccactattctgagttttataggacattgttgtccttgcttttttatatggtttactactgacaatgtatccttaacaatattacagtttagttttatgtgcattataatgggtttgcttttttttttttttttttttttggagacagggtctccctctgttggccaggctggaatgcagtggaatgatcttagctcactgcaacctccgtccccctaccccaggctccagcgatcctcctgtctcagccccccgagtagctgggcctacaggacacgccaccacacctggctattttttgtatttttactcgagacggggtcttgccatgttgc

SEQ ID NO: 674753 - DNA, 1907 bp, Homo sapiens
aggcagttgtctatggtcaactgatttttgacaataatgacaagagaatgcatgggtgtgggtgtgtgtatatacacatacatagatatgtatacatatatataaatacacccatatgtatacatacatatacatggatatattaatatatatatacatatctatgtatgtagatatatacccttatgcatatacatagatatatacatacatatacatacatagatatatatacaaacacacaaatttttttatagaaacctcctctctccttcttgggactagatattcaactttttttttctccttcctaactcatagtttctttagcaacatcatacagacagagaagctatgtaaacatttagagatgcaggcaccaagtaatgaaagaaagcatttctatacataaaacattacttatgcctgtttttattttttacattaagatgtaaacattctcttatcctaaatagctggtgaaaaaacagaaacagaaacaaaaaacaaattaaggctttaaaaataactggtaagaaatttccaagtgttattgctgaatgtatccaaacaccaaacattattaaatataactaatcaattcaatgatagggaggtagctcctgaccaaaggggtaggagctataaaatatcaatacatagcaaaatcacaattaaccagaatgttccaaagctggaaaccaccattctcagtaaagtaacacaggaacagaaaaccaaacaccgcatgttctctctcataagtgggagttgaacaatgagaacacatggaaacagggagggaaacatcacatgctggggccttttggggggtggggggctaggggagggatagcattaggagaaatacctaatgtagaagttggcttgatgggtgtagtaaaccaccatggcatgtgtatacctgtgtaacaaacctgcatgttctgcacatgtatcccagaacttaaagtataataaaaaaagaaaactctttaactattagtttagaaaacctttctaaattgaaccacttcactttcctggctcagtaagtacaaaatgccaaacacaattcaatgttgttttgatgatttaggatcatgtgatgcctggggcatctcctagaatattcataatttctgtgcagctttgttagaggcataaaactggaatgaactacagtttcttgttttaaataactctctgatatcatgagcttattgtttttcttttacctcattttcctaaaaggaggatgcagacaaagattgtagttaagcaagattttatagttctagacatatccacatattccagttcaggcagtacactgcacaaagatgtaatgaggatggggtttggaggagctatgtgcagcttgtaaattaattctctattaccaaccccatatcctaccccttcctctgccagtctgattgtcagaccttaatgtttctcattcaaattctatagagaaagaatcccagtctcctgactatgcattattgaaggtatctgctgcatgggaattaaagacttctgaaattctgcttatcagcagtcggggggattgaccactccacacaacttcaacccatatctttttttacagctcctcaccttatccccacccgcagccatgccaggtgatgcaaagtcctttcagatgtcactctctgaccacaccttaggctttggcatcttccaacaacatgaytggttctcttcttctattgtttttttgccttccagaattgtgttgagctctctcaccctttacttcctccaatcccataattttttaaaaatcagtttattccttcattttagtggggtttggagaaggacaagagataaacatgagtgggcaacttggtgtgtttcacagaaatcttacacctctt

SEQ ID NO: 674754 - DNA, 856 bp, Homo sapiens
agcatttgaaatatattgacatttgtaatttttactacagtctataagattgttaaaattatcatacccatttctagatgaagaaggccaaaacccagagaggtttactaagttcacagtgtcccacagttaaatgagtaatagagctagaattcaaacccaaatagcctgatctaaagctagacatattagccattattttatacctttaatatggacatagtaaccattactttataaccttatactttttaygtagtctttggatactttggtttgtatctaaagactaagtgctaataccttggaaagtcacaaaaatataaggattggcctatgctttttaccaaagtgttaaacgtgttgaaatttctcagcatattccatgtatataataaattaggtactaatttttgtttcttttatttctggcatatcatgttctgtgtattttttcccataaaaactaagtaaaacaaaacaaaacaaaaaattttctcaagcttttgtcgtctgatactaaattcatttttattttctcatatagagtagttatctttatttctatgctcattaacattctatgtctgaatcctttagaagaaataataacaaatattgcagacaaggtcataaaaatgatattccagagaaaggcaaatcaaaaccacaatgagacatcacttcaaatgcgtcagcatggctactattaaaaaaagagaaaataacaagtgttggtgaggatgtggagaaatcggaatccttatgcactgcaggtgggatgtaaagtgacatacctgctatgaaaaacaatttgtcagttcctcaaaaattaaaaaatagaaataccatatga

SEQ ID NO: 674755 - DNA, 2329 bp, Homo sapiens
tcttgaatgtttgtcatgttgactaaaggtgaatggatggtaatatcttcgtatatctaagttacatgatgccatagaaagcataccatatgatatggtttggctgtgtcgccacccaatctcatcttgaattcccatgtgttgtgggagggacctagtgggaggtaattgaatcacgtgggcaggtctttctcatgctgttctcgtgatagtgaataagtctcacgagatctgatggttatataagggagagtttccctgcacaagctctctctttacctgctgacatccatgtaagacatgacttgctcctccttgccttctgccatgattgtgagtcctctccagccatgtggaactgtaaatccattaaatgtctttcatttataaattgcctttatcagcagcatgaaaatggactaatacagaatattacaggcacgtcttgtagagaaccagataaataagtctgctttgatgtgattctttaatggttgtgtagcaggcctagagtatgtcatccttgtagcagctacagaagctctgaaaccagagtagaggtcactcttttgtaagagaagtatatatctattaaaaaaacctcttatctgttggggtgtctccctcactctaccaagaaaagaaggaatgactctagcctccagacactcttagtaaatggagaaggcactgatttaaatccacttaacaaaccttacccttgtttactgtgtttttcctagttacttcctcattactggcctccctacacccttctttgttatagcttaagattgtatttaagcctgaattcaaagtcacctcttggagatttactcatttctctgggtacctcccatcaatacatgaggtatacatgttaataaacttctttgttttcatgttaatctgtcttttgttacagggatcggtcccaaccaagaactcagaaggagagaaaattattttttcctcccctatagttgcaagtttgcatgtacctaagaaagtaaatgacaatagtcttcaaaagcttcttttaagaaaaattttgcataggtgttttctctgaattttcaggtcttctctgattcccagaagaattaatggacactcaaaaggaggtctctgattccctatattagataaaaatttctttgcatttttgtttttgataatgtatgtcttrgtttattaagttggtttaattaaggccactaagaagtatcattttctgcctctgagagatggcaaagatttagaaattacaataagtggggcagatacaatataggcatctgggcttggtggagtggaaaagtagtataactgttgttaaacaatatatgaaattaatatcatttcaccaagaaagtctccctctagaaatctgtcctaaggaaataaacatccatccattcaacaactactgattgagcacctattatgtgctatatactatatcaggcatggaagttagcagtaaaaataccaagtctctgactcagtggaattaatcatctagtgggggagagagaaaataagtgtgtgtgtgtgtgtgtgtgtgtgtgtatgtgtgtgtggatttatatatacaaatgtattttaattaatttaaatgtaaatcttaatttataagtctatttattaaataaaaaatgtgcattataataataaatgcataaacttttattatatgtaataaatatcaaagcacatatattcaaaacatatataaaactatatataaattatatatgtaaaaaatatatatagcggccaggcgtggtggctcacgcctgtaatcccagcactttgggaagctgaggcgggtggatcacctgaggtcaggagttcaagaccagcctggctaacatggtgaaaccccgtctctactaaaaatacaaaaattagctgagcatggtggcacgtgcctgtaatcccagctactaggggggctgaggcaagaggattgcttgaacctgggaggcagaggttgcggtgagccgagatcttgccactgcactccagcctgggcaacagagtaagactctgtctcaaaaagaaaagaaaagaaaagaaaaaaaaatatataatgtctcatagtagtaagtgcactaagaagaaaaataaagctggtcatggtaaagagtcagctcaggcctatctgaagaggtgatattgaaacctcctttgcaaagattgagacagagatatctaacatggctgactccatcttgcttctattctcacaggctggctgtcctcactcagtcctgggtgtaggccaagctaaccatggcaggaatttagtttacagtttaacttt

SEQ ID NO: 674756 - DNA, 664 bp, Homo sapiens
ttagactcttttgctcttctatcttctaccaggtgaggacatattggtcctcctctctggaggatgcaggaacaaggaaccatcttggaaacagaaactgggttcttaccagacaccaattatgccaacacctggatcttggacttcccagcttccagaactgtgagaaaatatatttctgttctttataaagtacccagtctcaggtattttgttattgcagtgcaaacaaagaccataatctcattgcacctgcatgagactccaaaagagatcagcagaagacctcctggctgacccccatcaatccatrgaagtatgagatagtggttgttttaggccactacgtgttagggtgctgtgttactagctacaacagtgggatagggctaaggttattttgcttggattatgggggcagggaaagagagcatggagtatggtgccccaacccttacatacctccatctagaagtgacaggcaaactttccactcatatttcattagccagaacaaggcaccttgccacacctaacttcaaggaaattatgcccaggaagagaagaacatggtgggcatgagtgatatctaccatctcatctgtagcagcaaaggagaatagggaaaggagcaggtttgtaatgatttgttgtgcccaatcat

SEQ ID NO: 674757 - DNA, 623 bp, Homo sapiens
caggttcatgccattctccygccccggcctcctgagtagctgggactacaggcgcccaccaccacgccagctaacttttttgtatttttagtagagacggggtttcaccgtgttagccaagactgtctcgatctcctgacctcatgatccgcccgccttggcctcccaaagtgctaggattacaggcatgagacaccgcatctggcccttttttttttctttctattgaggtctcactatgttggccaggctgatctcaaactcctgggctcaagtgatcctcccaccttggcctcccaaagtgctgagattacaggtatgagccaccatacccagctcacctttattctaatttctgattccatattgatattgtgcttagatatatcaactgtagagaccctatattcaaagcaagatatttttaaaatgtcagcctcccccagaatgttccaagatattaaaagaaacattaactcagaatctttatttcatcaggaaaaatttcttctataaacagttagtaactcccaagggctgtcactggtacaatactaagaatattgcctctgcagaaataaatgaataacacatttttagatgttggaatgatgttatctgca

SEQ ID NO: 674758 - DNA, 623 bp, Homo sapiens
caggttcatgccattctcctgccccggcctcctgagtagctgggactacaggcgcccaccaccacgccagctaacttttttgtatttttagyagagacggggtttcaccgtgttagccaagactgtctcgatctcctgacctcatgatccgcccgccttggcctcccaaagtgctaggattacaggcatgagacaccgcatctggcccttttttttttctttctattgaggtctcactatgttggccaggctgatctcaaactcctgggctcaagtgatcctcccaccttggcctcccaaagtgctgagattacaggtatgagccaccatacccagctcacctttattctaatttctgattccatattgatattgtgcttagatatatcaactgtagagaccctatattcaaagcaagatatttttaaaatgtcagcctcccccagaatgttccaagatattaaaagaaacattaactcagaatctttatttcatcaggaaaaatttcttctataaacagttagtaactcccaagggctgtcactggtacaatactaagaatattgcctctgcagaaataaatgaataacacatttttagatgttggaatgatgttatctgca

SEQ ID NO: 674759 - DNA, 623 bp, Homo sapiens
caggttcatgccattctcctgccccggcctcctgagtagctgggactacaggcgcccaccaccacgccagctaacttttttgtatttttagtagagacggggtttcaccgtgttagccaagactgtctcgatctcctgacctcatgatccgcccgccttggcctcccaaagtgctaggattacaggcatgagacaccgcatctggcccttttttttttctttctawtgaggtctcactatgttggccaggctgatctcaaactcctgggctcaagtgatcctcccaccttggcctcccaaagtgctgagattacaggtatgagccaccatacccagctcacctttattctaatttctgattccatattgatattgtgcttagatatatcaactgtagagaccctatattcaaagcaagatatttttaaaatgtcagcctcccccagaatgttccaagatattaaaagaaacattaactcagaatctttatttcatcaggaaaaatttcttctataaacagttagtaactcccaagggctgtcactggtacaatactaagaatattgcctctgcagaaataaatgaataacacatttttagatgttggaatgatgttatctgca

SEQ ID NO: 674760 - DNA, 623 bp, Homo sapiens
caggttcatgccattctcctgccccggcctcctgagtagctgggactacaggcgcccaccaccacgccagctaacttttttgtatttttagtagagacggggtttcaccgtgttagccaagactgtctcgatctcctgacctcatgatccgcccgccttggcctcccaaagtgctaggattacaggcatgagacaccgcatctggcccttttttttttctttctattgaggtctcactatgttggccaggctgatctcaaactcctgggctcaagtgatcctcccaccttggcctcccaaagtgctgagattacaggtatgagccaccatacccagctcacytttattctaatttctgattccatattgatattgtgcttagatatatcaactgtagagaccctatattcaaagcaagatatttttaaaatgtcagcctcccccagaatgttccaagatattaaaagaaacattaactcagaatctttatttcatcaggaaaaatttcttctataaacagttagtaactcccaagggctgtcactggtacaatactaagaatattgcctctgcagaaataaatgaataacacatttttagatgttggaatgatgttatctgca

SEQ ID NO: 674761 - DNA, 623 bp, Homo sapiens
caggttcatgccattctcctgccccggcctcctgagtagctgggactacaggcgcccaccaccacgccagctaacttttttgtatttttagtagagacggggtttcaccgtgttagccaagactgtctcgatctcctgacctcatgatccgcccgccttggcctcccaaagtgctaggattacaggcatgagacaccgcatctggcccttttttttttctttctattgaggtctcactatgttggccaggctgatctcaaactcctgggctcaagtgatcctcccaccttggcctcccaaagtgctgagattacaggtatgagccaccatacccagctcacctttattctaatttctgattccatattgatattgtgcttagatatatcaactgtagagaccctatattcaaagcaagatatttttaaaatgtcagcctcccccagaatgttccaagatattaaaagaracattaactcagaatctttatttcatcaggaaaaatttcttctataaacagttagtaactcccaagggctgtcactggtacaatactaagaatattgcctctgcagaaataaatgaataacacatttttagatgttggaatgatgttatctgca

SEQ ID NO: 674762 - DNA, 668 bp, Homo sapiens
atcaagatagggaatacaggaaaaggaggagatttttaggggtggggggttgtacaaatgcaaaagcaaggagaaaagagattatatttttagccatctgtggaacaagtagatggaaatacctggctggatataaatctctcagactcagaaaaaagtctgagatggaaaagtcacaagcataaagctatggtaaacagaataacaccaagagaatagagaaagtatgttatgtaaagaaagctcaagaggggtcacaggaagaggatgcccctccccctcaaaaacttagaaacaatggtcacaaaagtagtgaatcgtttcaagagtatggtgtttaggaacgaagagattttgaaaaggggaacacagattcctatgaaacatgaacatctaaaggaggaaaaaagtctatgaagaagagctcagagaggtagcatcagggccaagaaagagtgatgttacaaaggtcaagggagtttccaggaaggaatgctcgatacagtataayatgatagtaaatgttcatgacctttttaagagtacttactgagaatagtggggcaggaagtctacagatttaagtgacggtaggaattgaggaatggatggtgtttaagtacaaacatgtctggacaacttgtccaagattcttggatgtgaaagga

SEQ ID NO: 674763 - DNA, 2659 bp, Homo sapiens
tcccaagtcgctggaattacaggcgtgtgccacaatgcccagctaatttttgtacttttactagagatggggtttcaccatgctggccaggctggtctcaaactcctgacctcaggtgatccacccacctcggcctctcaaagtgctgggattacaggcatgagccaccgcacctggccttatccatctttttacacagcatcctgaacrttctagaaacaaaggttaatatttgaccagtgagaatatttgttctttaaagtctaaataagttgcatcaaaaaaatgcaaagccatcttctaattaaaaatttgtcatttttttccacaggctttaaacttaagagcttaggctagaattttaatttaatgtttatagctttttttcttagctaggtctctccaaaggaaagactacagtcgtgtttttaaaagctgcctgagaaattatgtatcttaatatgtttttattttattggttactaatgctttaactgacatcactaaaaaaggggagaatatggaaacatttagaattcagagtttattaattgtaacagggatttatttttacatttatattaccactaaagaatatctacagcggcaataaaagaatgcattttaaactgattagctaaaaagtctaaaaaactttttttaaaagcaaaccagatgactctcctaacactgtgtagttttcttaaaggctttgaactgggttcacagtatgtgacaaatatatgtaaacattaactacttttaaaactggaaactgttccctagcaaagaatcaacctttcaggcttgagaattcatttgatatgcaatgcttttaagattttatcaggatattacaaaatgaatttacataacaagttatatcacgcatactctcattctaaccaaatgtacttaaacattcatttggctatgaagagattatgaaatatgtaatgccaatatagagaataaaattcatcccgagacatggaaaggagaaaaaaatcaaaattttctagagccaattatagccatgattaaattattatatttattccttacaacaatatattgaaataggtgtgatcacctttattttacatcggaaaagaataaagttcagcatggttacataagttgtccagttcacaaagctagtaaggacaagacaagaagatttgaacccaaagctctctgattgcaaatttctgactgcttatgctcttgctactactaactgtagaacaacattctagagggtaaagagaaaaactcacaaaaaaagagatacgtatatactgcattacagcctaaaatggggtaaaactgaataactgaaaaacttacatggagagtaaattagaagagttagcagaagaatactaaaacaaccaattctaagcttttcaaacgcaaaaaactgaactacaagaaaggaaaaagcaatcataatctttaacgtcattgaaaagaaaaacctcaatccattactaaaaatgtttcattgttttcatccaacatgtccctgattccatagttatctccattcaaaatctaaaattgaaaccacgatgagagttcataaattttttcccatcattcttatctaattctttgctttaaaggtttagaaggaaataggtattaacaagtgaatcactatctagagaagttttttgttgttttgttatgttttgttgtgtttttatgaagaaactaaccattctttcacaaagatctatccattaaccctttcaagaaatatttacttaatgccaaccttgattgaggcactgatccaagaactagaaatacaaagtcatacagaactcagcagctatcttctggatattgtcatcatggcggaaccgacatttgaacaaacaattttagaaaagatgcatacattgtgagaaattcctccaggtgagtttctctcttctaacttgtcttatcgggtatgccaagaatgcaaggacctgactgatcttcatcggtgtcgtttctcaggattgtgtttgcaacaagaaaccttgagggataaggtaaagcctctcttcagtataaagagtaggcttgtttattgcttgctaatggaacagctggtaacccaagctcactcctcctcagttgtgatgccaccctctagatacacagtatacacctgggcattggtcattttattcctgtaggatatggaggcaaggagaaccaatataaacacaatgctcatgctgcttgctctaccattataaagtcttttgtctctgacccagaagtctcatgtcatctgctaacatccatggaagagttacaggtaacttcctagcttataaattggatgaaatctcaagctcaacatactaataaaaatatatgaagtgatatgaatgattagataagcagttaagttttcttgggaattagtttccatgagacatttgagttggttctgaacgatgaataggaatggatgagacagaagacaaggcagagcattcaagacagtacaatattatgtacaagaaaactgagatgtgataaagcacaacatgttcagggaactgaaacctaagtatcctcttagagctattacagtaggtgagtacagatgactaagagtcttgtatactctatcaaagagcttgtctgcttg

SEQ ID NO: 674764 - DNA, 648 bp, Homo sapiens
tatactaggcaagggatgttgaattagtgaatgcattaatgcaaaaatgttatataaatccttgaatttaagaaatttcaagagagaagacactggcttggaaagtggacagttccaatttgtcctcactgtctactcaaccaggtatgatgactacctttgtgtctgagtataatctcattttaaaatcagagtaatcctgatatcaaggaagtttggtggtttaagtggaggagagtggtagcgaaagaggtaaggccagaaaagggacaaaaaaagtgctatgaatgaaatacaaagattggtgaaatgtcatcatttctgcttggtagcagaaattatttctaattaagtaaattttaagtaaataagtaatcagaaattacttactcatggtgtgggcctagtcagcttgccctcatgaattgtaaaatgggtagataaaatgctgctattttcctcccctctaccccccccyttacacacacacacacacacacacacacgcacaatactttttaaaaaccaagcctaacagtaaaggtacagactcacacgctcctatgtgtgcttgcctaataactgtaatgccctgttgagccagatacaataaaaaacaataagtaaatgtgatgagtatttcatgaa

SEQ ID NO: 674765 - DNA, 648 bp, Homo sapiens
tatactaggcaagggatgttgaattagtgaatgcattaatgcaaaaatgttatataaatccttgaatttaagaaatttcaagagagaagacactggcttggaaagtggacagttccaatttgtcctcactgtctactcaaccaggtatgatgactacctttgtgtctgagtataatctcattttaaaatcagagtaatcctgatatcaaggaagtttggtggtttaagtggaggagagtggtagcgaaagaggtaaggccagaaaagggacaaaaaaagtgctatgaatgaaatacaaagattggtgaaatgtcatcatttctgcttggtagcagaaattatttctaattaagtaaattttaagtaaataagtaatcagaaattacttactcatggtgtgggcctagtcagcttgccctcatgaattgtaaaatgggtagataaaatgctgctattttcctcccctctaccccccccctyacacacacacacacacacacacacacgcacaatactttttaaaaaccaagcctaacagtaaaggtacagactcacacgctcctatgtgtgcttgcctaataactgtaatgccctgttgagccagatacaataaaaaacaataagtaaatgtgatgagtatttcatgaa

SEQ ID NO: 674766 - DNA, 653 bp, Homo sapiens
acacacacacacayacacacacacaagtccatggagacacaaaaactcactcacactgccacactcagagaaaataaaacacaaagaaagagagagggagatttatactcccaaaataaaccgtggctgggagaggggtcgatatattctttttgaaggcagctataaatgttcaattaacctatttctcatgtcttttattatgaccacatatggtgacaaatgggcctaacaagaagggtcacagaacaacagatgtgtaaaatagcaaaatgaaacacctcaacagatgtaaaatttttattttgcgtgaagtgaataggaatgtggagattgcattttgcaaagtatgaaaatgccctcaaattagaaaggctatgagttggaatggttttagaaacattctatggatttatttgaagtattcatgaaaggtctttcccactacagccacccaaatactgtgaagcctgatagtctgtagttaaagatttagtcctttatggtagagatagttcatcttgcacttttgttttggaacacaaatgcctttggttggtagagcacatgtgagaaacaaccacaaaataactgaaggggattgtggagagacaggaaggcagcagagccttgaatcctgagtaagttggcat

SEQ ID NO: 674767 - DNA, 594 bp, Homo sapiens
ccttttctggaaaaatctttcggtacattctgctgaagtacccagatattagtgtctaatccctacaacaaatgtctcctttcactgacttcctggacccagtacatttggctccctgatgtgatcaattggcagaggacatgcacttggaagttttcacactataactagactataactgagactagaatctcactttctacttggatacagtgctaggtgttaaaagtatttatgcctggcatcagaaagaatataatgattgcactacttaaagtcaatttatgtaagcaaatatctttttagatttgtgttatataaaaatgaaagctaaatttaacataaaagccaaaatttaataaattaaaaatttcggcctggcrcggtggctcacgcctgtaatcccagcactttgggaggccgaggcgggcggatcacgaggtcaggagatcgagaccattctggctaacatggtgaaaccccgtctctactaaaaatacaaaaaaattagccgggcgtggtggcgggcgcctgtaatcccagctactcgggaggctgaggcaggagaatgggtgaacccgggaggcggagctt

SEQ ID NO: 674768 - DNA, 946 bp, Homo sapiens
ggcagtttcgaggttttccatatgaaatgtgtggtttgtaagaattaaattgtgagcccccacgtaatggacaaagtacttgttcccaaccctgtccagcaataggcccgtctatgtgcccacccctctttccttagtctacagggcatgattcaccctaggggagcaattgactggatgctcttgtgtttcccagctcgggaaagatatttyccctgacattcctttaccaaacttttttttttacacaactcaaaactttactgtgcagtcaaatttagccccttagactctaaaagtgaaaaaacaaatattacaggagaacaatgccatgtacaatgtacagaagagtaaaaatgaagtaaaccaggggacagtgagctggtaggtcagaggcattaccagggaaggagcctgtgcaaggctatttctttctttttgttccagcaatccagtcgtcaagtcaccatcaagcattggtaaatacaaaagcgatttagatagctatatactatatatattttatatagcaagagagaaagaaatttcctcttaggaaaatattcacttttgtcaaccctagaaagttttgctggtgaccctgttgtagctggcaggagtttgtttgttttgttttgtgttaaacatgtgcagtgttgaagccatagcatcctttcctaagaactcatcattgggtggaagtttgtcctacacagtctgcttgccttggcattcacgtttcgaacactgagcaggcttccaccagtccccgttgtgacaatgacagatgttacattcgtccactttcacttcaatgccagctggaattatcgtcgttcctgcaaagcagtttggacctgaaacacacagatacattgattagttgattaaatctgagaggctccctttctccccaccatccaaacccaagccccaaagccataaa

SEQ ID NO: 674769 - DNA, 640 bp, Homo sapiens
gggaatttagcctggagaaaggaagcaatgttcatttcaggcagagggaaaagcatatgttgatatacagctttgggtttaaatcacatcctgttaaaaaggccttccttgactataatacaaatgttatttatattttatagaaacaattaataatttaggaaaattctctacctctttcctcaaaaaagtatttgttttttacaaatggaaatttgatatttataataaaacaactaataaatgactcaatttgacctcattcattttaaattcttcaaaatatacatcttgtttatttgttcatctatccaacaaaattttattgaatctacatraacttttcctaagaactatggtagctactgtgaatataagggtgaaaaaacaaatgtaacctcatgctgtcatggagcttataaatctttgaggccatctctcctcaatcatcatgaacgtggtgaatgtgtctagaagaaaatttccaagtgaaactcatatattagtgtttgggtttttatttctgcataacaaatcatcacaaaacatagtgtcttaaaataataattacttattatctcacagtttctgtgggtcaggaatttcagagcagcttagctgggctattttggctgggggt

SEQ ID NO: 674770 - DNA, 654 bp, Homo sapiens
aagtgttaagagaaaattgttattgtagaatttgactcccagtaaattttttttcaagaaggaaaataaaatatagatgttttcaaacagagtatggatcattatttataagagattgtcactgaataaatgtctgaaaaatgtactttaaaaaaaaaggaaactaattccagaaggaacaatgatatgcaagcgtgcaagaaaatctaaacaaatatcattcaaaacaataattaagatgctttatgttagagattcttaactagagaaactcttgaacatgtataccaagaagcatttacagaaatgctcagtatagctttttgagtaatagccaagaacttagawaaaaaacacttagtactcattgacaacaaaatgtataaattaattttgctgtattcatgcattagctattagacagcagtgaaaatgaatgaactgcagctatttgcatcaacgtggatgaagctaaagaacaaaatactgagtcagaaaagcagatttcaggctgagcacggtggctcacgcctgtaatcccagcgctttgggaggccgaggctggcggatcacttgagactgggtgtttgagaccagcctggccaagatggtggaaccctgtctctactaaaaatacaaaaaattagcggagca

SEQ ID NO: 674771 - DNA, 641 bp, Homo sapiens
cttcttcaaaattcaatttcctcttttcaggaatctaaattagatgactacaggttattgggaggatttgaaataatgattttaatgccaagcactgacataaaatagatattcataaagtcattgaagttattgccgttgttgtcattactagttcaaaagcgacaagagttagtagcaacattagtaggaaactatttagctagaaacattagaatgcactctctttttgctatatrtaaggaaactttagtggagttaaactaaccatcttcttttcctcctcattcttgtttataaaaattatggtgttagagctttttattcatttttcttagataatacccagattcccacaattgagcttgaaaattaatgacttaatcacatagtctgacatcacttctggttactctgtcccagataatgtgttgctgaagccagttcttccattagtgatagatgtgctgttccatgttcaaagccagtgagtcacactcttcagtgatttgctcttcaactgatagaatgctactgaccatgagcagtatttcaaattcggttttaattctagcttttcttagaccaagatttaatatttaaacctgtggaaaatagtgacaaaaataaataaaactgga

SEQ ID NO: 674772 - DNA, 1119 bp, Homo sapiens
aaggcacaaaagcctgagctatgtcacactttcattcagaaagtaagactttatgggaatagcccagtttaaactcggcttttattctgtaaataaattcaagtcacttgatcttcctttgaaactttctagctaatccttttgttgagtccctctggtgcttaagcaaatggttagaactaattgtttcctaccttggggaaaacatttgttgtagaagaattaacttaactagatcaacaaagcagctacctcctttgttatcttagattcctaccatctctaatccccagaatgttctgaccctgaagcctgcacaggctggatatttttagtattcctctccaatatcctctgaaaagtagttatctgatttggaaaaaatacgcttgttaaatgtattttaataatacaaattacttacttcaaaatcacctatgtgtctgtatatacacatctatatgatacataattatatgtatatttgtgtatgtataattatatgtgtcatatgatataaatttaagcaccatgtgtatatagatgcaaacacaaatttaagttagattagaatgattacatctaagagcttgtaagaaaattaaaataataacctaccctgacttcgcttccaatttaaaaataaattaattgatgtacagaaatctaacataactactcaaagtcatacaagctagttaataacagaattagcttgaactaataacaagtattccacatttctactccagtgccttgtccatgttaaaaatttcacaattaacttgtagtgtaggcagagtcatttctattgccaccatctgtgataggatatcagaggtatgtgctctggagcgatgagattttatcaaccaaacaaggatgactaaatgagaaaatgctgtctagtacttaccaaactkcctggcacagaataaatttttaataaatcttagcttttgatgttgtagttgttttggttgttattgacacttaaatgttgtaaatactttaaagacggctgctaaagatccagtgtaatggctcacacctataatcccagcaccttaagaggctgaggcaggaggatcccttgaggccaggagttgaagactagcc

SEQ ID NO: 674773 - DNA, 1119 bp, Homo sapiens
aaggcacaaaagcctgagctatgtcacactttcattcagaaagtaagactttatgggaatagcccagtttaaactcggcttttattctgtaaataaattcaagtcacttgatcttcctttgaaactttctagctaatccttttgttgagtccctctggtgcttaagcaaatggttagaactaattgtttcctaccttggggaaaacatttgttgtagaagaattaacttaactagatcaacaaagcagctacctcctttgttatcttagattcctaccatctctaatccccagaatgttctgaccctgaagcctgcacaggctggatatttttagtattcctctccaatatcctctgaaaagtagttatctgatttggaaaaaatacgcttgttaaatgtattttaataatacaaattacttacttcaaaatcacctatgtgtctgtatatacacatctatatgatacataattatatgtatatttgtgtatgtataattatatgtgtcatatgatataaatttaagcaccatgtgtatatagatgcaaacacaaatttaagttagattagaatgattacatctaagagcttgtaagaaaattaaaataataacctaccctgacttcgcttccaatttaaaaataaattaattgatgtacagaaatctaacataactactcaaagtcatacaagctagttaataacagaattagcttgaactaataacaagtattccacatttctactccagtgccttgtccatgttaaaaatttcacaattaacttgtagtgtaggcagagtcatttctattgccaccatctgtgataggatatcagaggtatgtgctctggagcgatgagattttatcaaccaaacaaggatgactaaatgagaaaatgctgtctagtacttaccaaactgcctggcacagaataaatttttaatamatcttagcttttgatgttgtagttgttttggttgttattgacacttaaatgttgtaaatactttaaagacggctgctaaagatccagtgtaatggctcacacctataatcccagcaccttaagaggctgaggcaggaggatcccttgaggccaggagttgaagactagcc

SEQ ID NO: 674774 - DNA, 1119 bp, Homo sapiens
aaggcacaaaagcctgagctatgtcacactttcattcagaaagtaagactttatgggaatagcccagtttaaactcggcttttattctgtaaataaattcaagtcacttgatcttcctttgaaactttctagctaatccttttgttgagtccctctggtgcttaagcaaatggttagaactaattgtttcctaccttggggaaaacatttgttgtagaagaattaacttaactagatcaacaaagcagctacctcctttgttatcttagattcctaccatctctaatccccagaatgttctgaccctgaagcctgcacaggctggatatttttagtattcctctccaatatcctctgaaaagtagttatctgatttggaaaaaatacgcttgttaaatgtattttaataatacaaattacttacttcaaaatcacctatgtgtctgtatatacacatctatatgatacataattatatgtatatttgtgtatgtataattatatgtgtcatatgatataaatttaagcaccatgtgtatatagatgcaaacacaaatttaagttagattagaatgattacatctaagagcttgtaagaaaattaaaataataacctaccctgacttcgcttccaatttaaaaataaattaattgatgtacagaaatctaacataactactcaaagtcatacaagctagttaataacagaattagcttgaactaataacaagtattccacatttctactccagtgccttgtccatgttaaaaatttcacaattaacttgtagtgtaggcagagtcatttctattgccaccatctgtgataggatatcagaggtatgtgctctggagcgatgagattttatcaaccaaacaaggatgactaaatgagaaaatgctgtctagtacttaccaaactgcctggcacagaataaatttttaataaatcttagcttttgatgttgtagttgttttggttgttattgacacttaaatgttgtaawtactttaaagacggctgctaaagatccagtgtaatggctcacacctataatcccagcaccttaagaggctgaggcaggaggatcccttgaggccaggagttgaagactagcc

SEQ ID NO: 674775 - DNA, 388 bp, Homo sapiens
taaaaattagctaggtatagtggtacatgcctgtagtcccagttacttgggaggctgaggcatgagaatcgcttgaaccctggaggtggaggttgcagtgagccgagatcacaccactgcactccagtctgggtgacagagtgagactttcaaaaaaaaaaaaaaaaaaacctgaaattttcttagtaagaaagggatgaagaggaaggttattggatatgcaaacactgtttgttaaattcaaataactgagtgctaacaatgccagacactgttctagttgcttgraatacttcagtaaacaaaatgaaaattattcttgcctggagggacttatattcccatggtggggggacagacattattgatgaagcatatggtattgata

SEQ ID NO: 674776 - DNA, 545 bp, Homo sapiens
acaaacatgattccagctttcttttactttattttttcccctaggaccacagcaattagaataattttatcatgagtttgagcaaataagtcatccaatcccaaactgaaagtaattgaaaagtaaaccatcacaacatcccacctcaaacaggtgtattgggaagcagtgtgtgtatatagcacatcttataaaatgaaataggcagggtacaaaatttctgaaaacagaatctctcaaytaggaccttccccatgtgtgtgccattaccttgataaatttgagacttgaccagtggctcaataaatttggagaaaacagaaacaattaagttctcacttcagattcatactttttaaattttcttttatattttcaaatttatggtcttaatgcaggctaggtattgcattttgacaatggaatctgaaacagctacaactctagattttgtaaattcttcttcaccatagcagtggcttagttttaactgtgattactgtctcattggtcaaactgttttgacagaaaggacattttattga

SEQ ID NO: 674777 - DNA, 669 bp, Homo sapiens
tgaggctccccctttcttagctgtgtgatcctagcaacttaacctcatgtagcttgggttttctgtggctttcaagcacactttaccacacactggtatggctcttgtaagcataaaatgcaaaagtgttttgtaaattctgaagcatgatgtaaaatcacgcgttgggatatcattatttcattattacttttaaattgttgggtcatgattaggatcgggaacagacaagatcatgacatcatcaatccaatgttggcttcacttttctttctmttgacttagagtgaagtgacttgatactcctctcagcctcattgggcatcaggtcacacgaatagaccatcttgttcttctctgtcactaaaaccaccactgtattctatcccttgttgtgggtccctgctttctctagtcatggaacccaagagtgagtcggtcactgagaaggtgtcatactgaattgatgggatgcctggacatataaaatggtgacgttcccacgaaccatttctctgagtcctcatagcataaatataatgcactccagttgagcattgtgtcagaaggacatgattctcacctcagactcaggcagggacaatgctcgaaaaccacaaccactgctcccatctaagctgagtagctccaggagtgagggcacctcct

SEQ ID NO: 674778 - DNA, 642 bp, Homo sapiens
aaataggaagtaataggacaggggagaaagagagatgataaatggagtgggaaacagggataaggataaccagcaaaaggaggcagagagactggaatgtgtactaattaaacacgtgctaagcagaaagacaaacatcgcaagttctcacttatttgtgggatctaaaaatcaaaacaattaaactcatggacatacagagtagaagaatggttcctagaggctgggaagggtagtgggggactgggtaggagaaggtggggatggttaatgggcacaaaaaaacagttagaaagaatgaataagacctactatttgacagcacaacagagtgactatagtcaatagtcaaaaataacttaattatacatttaaaaataactaaaggagtgtagttgggttgtttgtaacataaaggataaatgcttgaggggatggataccccattctccatgatgtgattatttcacattgcatgcctggatcaaaatctcatgtaccctataaatatatacacctactatgtacccacaaaaattaaaaatttwaaaatatgaaaataaaaaataaaagtaaatatgtgttaaggacctagacaaaccttgagtagcaccctaattttactacttgctagctgtgtca

SEQ ID NO: 674779 - DNA, 621 bp, Homo sapiens
ggataccagtggtgtgccgctgaagcaagggcagccaacaacactcrgacataccttttcaacaaaataccaagtcccttggggttcctagctaatctctgccagctttttgtttctttctttttcgtgccctggcttccttctgtgagtttcatgctaagttccagtactctccccttggcattcattcaagttatgattattcagctgtaactttggttctttttatgaggagaagtggtgtctggagtcagccatcttgacaaatatctcacaataagtatctcacgacagataagtttttgataggggaaggatagggactaagatattgccaaggtagagtggacttaccttaagtctacttaaggactacactaccttaactgcattaggtcttaaaagggcaacatctgcttttggatacctgaatcttttcataggctgggtaaatagtaagtttcagttgtcaatattcttaaagtaaatgtatactaactctttttacatttttttaaatcacattttaacattgcagtagctgactgcaagttgtctttctatccatgtgttgtagatttgtaaaagtcccagaggcaataagcaattttctgaaagtca

SEQ ID NO: 674780 - DNA, 605 bp, Homo sapiens
agggctttaatgaaataaataagatggattcaaagttcactttaactttgagttcttgataattcatttcattttgtcaatttttaggctaaaaacagtgcctaaaggctctttcatattggctatgcaaaattccattcagagtctcctccaatctcctttccttttatggwtaaaatcagtcagtaatagcatgttgaactatatcattttgctgtgatttttgtcttgttacataaacctctctttaataatatagtgaatctgatgcgaagtttgacaaattagaatactgttagaagaatttaaaaataatcaacatgattaattcaccatgtttcaaaagagaagactgaagattctggttttcagaatcttgcatttcaaaattattacccataaaaagagaataacattatctgattggaatgtcagagaaagcattaataaaaggtgtagtccaaaatcaagcataaagcttaacacattttctctggtaaatgagaaacttgattggctgatgtatcctaaatcaccaaacctaagatatctttcaatgtattaaaatttattttaaagccatgtataaatgtcactgtatagtg

SEQ ID NO: 674781 - DNA, 887 bp, Homo sapiens
tgaatagcaaacaatgctattcaaatgctttagatttccagcctggagaagtgaaagctattttacaataaactagaaattagccccgttagtcccatatcattgctatcatttgcaagagacatagccatttaatgaatatacattatcctgaatattaatttcctattattataaaatgtcaggccagcacaattgttggccttgtcatcttgtaatactccatgatatgacagaaaattgttctctaaaggaaactattgaagaaataaatctatttcaacaattttttaaaaattttatctctatatagcaaattcatgtaaagtaatataagaactcttcagatttatactttatttctaaaataacataactgaactaaaactgatttgggggatatgtatgtatataactatattttctctcctaataaaacaaaatttattggtacccaaattcatcacaccatacataaaacaatagcatagatgttacctaaggtgtcattctaatatcaaatatctaagtacattataaaagtctgcttaacaatcatttaacattttccatcttcccattgaaatacacatggggtactcaacacgctctacatctcgacattggagattgaagattcaacattacaggatcttgagataaattatcctttgttacagtgcacaagtttctsaaatgagccagagcagcatggctacaaaaaaggaagggaagaaaaactttgagccacttgttcctcgtgggcctggcttggtgataaaagagcaatgacatgaaaatggaatgggatctgcttcaatattattttctgagttggctaaagccagttacgtctctctcccctctaacatgttattccccatttc

SEQ ID NO: 674782 - DNA, 597 bp, Homo sapiens
ccttggcgaaatcacaactcttcattcttgttaatggtgccattgattttacatctctaaagctagaatcaaaacacttttaattccttttgtattgcatttctctaaacagtcccattttcacccttgcataattctgccacttgaccctgaaatcctaatagcctcattgatggcatttaatgctcaacttccacatatgaccatcagtagtccatgttgagaacacasggagacagagatgtatttccaaattaattaattttagtttttcatatctttttggaatttcaaagagtatacgcttggatgttgaatatatttgaacttaacctctgaatttaacactcaaataagtaggttaacttgaagacacccaacctacagaatcaggtactgtgaaaattttaaaaacaatgccacaaattataaaattcagtttcttcatacataataacatacatagtttaggggtgcatgtgataatttaatatattcacttaatttgcaaagatcaaatcagtgtaattatatatccattactttaaatatttgccttttcttctagaaacatttgaattattctcttccagctat

SEQ ID NO: 674783 - DNA, 597 bp, Homo sapiens
ccttggcgaaatcacaactcttcattcttgttaatggtgccattgattttacatctctaaagctagaatcaaaacacttttaattccttttgtattgcatttctctaaacagtcccattttcacccttgcataattctgccacttgaccctgaaatcctaatagcctcattgatggcatttaatgctcaacttccacatatgaccatcagtagtccatgttgagaacacacggagacagagatgtatttccaaattaattaattttagtttttcatatctttttggaatktcaaagagtatacgcttggatgttgaatatatttgaacttaacctctgaatttaacactcaaataagtaggttaacttgaagacacccaacctacagaatcaggtactgtgaaaattttaaaaacaatgccacaaattataaaattcagtttcttcatacataataacatacatagtttaggggtgcatgtgataatttaatatattcacttaatttgcaaagatcaaatcagtgtaattatatatccattactttaaatatttgccttttcttctagaaacatttgaattattctcttccagctat

SEQ ID NO: 674784 - DNA, 597 bp, Homo sapiens
ccttggcgaaatcacaactcttcattcttgttaatggtgccattgattttacatctctaaagctagaatcaaaacacttttaattccttttgtattgcatttctctaaacagtcccattttcacccttgcataattctgccacttgaccctgaaatcctaatagcctcattgatggcatttaatgctcaacttccacatatgaccatcagtagtccatgttgagaacacacggagacagagatgtatttccaaattaattaattttagtttttcatatctttttggaatttcaaagagtatamgcttggatgttgaatatatttgaacttaacctctgaatttaacactcaaataagtaggttaacttgaagacacccaacctacagaatcaggtactgtgaaaattttaaaaacaatgccacaaattataaaattcagtttcttcatacataataacatacatagtttaggggtgcatgtgataatttaatatattcacttaatttgcaaagatcaaatcagtgtaattatatatccattactttaaatatttgccttttcttctagaaacatttgaattattctcttccagctat

SEQ ID NO: 674785 - DNA, 597 bp, Homo sapiens
ccttggcgaaatcacaactcttcattcttgttaatggtgccattgattttacatctctaaagctagaatcaaaacacttttaattccttttgtattgcatttctctaaacagtcccattttcacccttgcataattctgccacttgaccctgaaatcctaatagcctcattgatggcatttaatgctcaacttccacatatgaccatcagtagtccatgttgagaacacacggagacagagatgtatttccaaattaattaattttagtttttcatatctttttggaatttcaaagagtatacgcttggaygttgaatatatttgaacttaacctctgaatttaacactcaaataagtaggttaacttgaagacacccaacctacagaatcaggtactgtgaaaattttaaaaacaatgccacaaattataaaattcagtttcttcatacataataacatacatagtttaggggtgcatgtgataatttaatatattcacttaatttgcaaagatcaaatcagtgtaattatatatccattactttaaatatttgccttttcttctagaaacatttgaattattctcttccagctat

SEQ ID NO: 674786 - DNA, 614 bp, Homo sapiens
ttgattcctggattccacagtttactagctgtgagttagagaatttaaattacttacctgagtcttggtttcttatttgcaaactgaactgtaaactatttgttctacccattttataagacttttgtaaggataaaataaaagaatacatatgcaaaktactgaaaaacctgtcactgttgttattactagtattattgtgaaagaagctgtagatttatgtcagccccagacaggagttgacagaaccttcgagttgcacaaggcctgctggagcacttcagagaattccaaatgaatcttgattgcattgtggaatgtacagcactggggccctggggaccagcatggaatgtgagtaaagacaagataggttctatcatcctccagacctgcagatgtgtgttcaaatcctgactccatggggcttgactctatcccatctggaaaaatggaaataaaagtgcctaccttactggtttattgtgaggactatttgagataatgtatttaaagaactagcacagtgcacggcacatagtgggcactcactaaatattagctcttaatatagttatgaaaactaaacccaatggggagaaaatgcaaggcca

SEQ ID NO: 674787 - DNA, 614 bp, Homo sapiens
ttgattcctggattccacagtttactagctgtgagttagagaatttaaattacttacctgagtcttggtttcttatttgcaaactgaactgtaaactatttgttctacccattttataagacttttgtaaggataaaataaaagaatacatatgcaaatyactgaaaaacctgtcactgttgttattactagtattattgtgaaagaagctgtagatttatgtcagccccagacaggagttgacagaaccttcgagttgcacaaggcctgctggagcacttcagagaattccaaatgaatcttgattgcattgtggaatgtacagcactggggccctggggaccagcatggaatgtgagtaaagacaagataggttctatcatcctccagacctgcagatgtgtgttcaaatcctgactccatggggcttgactctatcccatctggaaaaatggaaataaaagtgcctaccttactggtttattgtgaggactatttgagataatgtatttaaagaactagcacagtgcacggcacatagtgggcactcactaaatattagctcttaatatagttatgaaaactaaacccaatggggagaaaatgcaaggcca

SEQ ID NO: 674788 - DNA, 642 bp, Homo sapiens
atccatcttaagtgataacaaagcctttggtaaagtcatcacttgcagttacttagatggcagattatgcacctgctgctgaacttgtgactataagggaagagtttgataaacaatgttagtagtgtgtgttctatattgataaatgcatttggcaagtaattggaggaagatgagttcaataattttcccagtatgtaagtataactaaaaagaaatcaagagaatccagaaacatcagactttgtaaggtggaaaaaccttgctgcttctggaccccaagtagtaagagagtattttagaagtccaatctaccaaggctcagtcttgagaattatgtccaagaaagaaaggcctttggggtgtggtaattggctcatggaactgactggaaacacagggatgtgagttaaccaaggtttggggtggcttgcaaagcagctatgagcattgtctaaatgcagagcaggwtctaaaaccattggacccataggcaagtcttggtaccatctttgcaaggaagtaggctgctaaacttgcagctcccacagagactttttcccccaaacccacttcagaagtgaccaagatggtaacagacaatgatgaattccttggagaggagagccaggcacaagagga

SEQ ID NO: 674789 - DNA, 1567 bp, Homo sapiens
atcaaatggaatggaaaggaattgaatggagtagatgggattggatgggattggaatgaaatgtactggaaaggactcgaatttcatgaaacggaatggaatgaattggaacggaatggactcgaatggaatggaatgtcatgggatggcatcaaatggaatggcatcaaatggaatggaatcgaatgcaatggaatgctatggaatggaatggaatgcattggaatggaatgtcctctaatggaatggattcgagtggaatggaattgaatataatggagtcgaatgaaatggaattgaaaggaatgggatcgaatacaatggaatatactggaatgtaacgtaatgaactcgaatgtaattgactggaatggaatgtacatgaatggaatgtaatcgaatggaaagtaatccaatggaatagattctaatgcaataaaatcgactcagatagagtagaatgtaatggaatggagtgcagtgcaatggaatggaatggaatggaatgcaatggaatggaatggaatggaatggaatggaatggaatggaatgggatggaatggtatggaatggatagtaatggactggagtgaaatggactggaaaggaatggactcaaattgaaagggctcgaaaggaatggagtcaaatggaatggtctggaatggaatgaacacgaatgtaatgcaacccaatagaatggaatcgaatggcatggaatataaagaaatggaatcgaagagaatggaaacaaagggaatggaattgaatggaatggaattgaatggaatgggaacgaatggagtgaaattgtatgcagtagaagagaatagaatggaatgcaagcgaaaggaaaggaatggattggaatggaatggaattcattggaatggaagggaatgtagtgtaatggacaggcctggaataaagtggaatgctacggtctcgaatggaataaaaatgtatggaatggaatgcaawgaaacggaatcgaatgtcatagaatgtaatggaatgcaaaaaaatggaatccaaaatcattgactggaaaggctgggtgtcgaaaggaattgactccaatggaatggaatcgaatggaatggaagtgaatagaatcgaactaaatcgaatggaatggaattgataggaacggaatggaaaggaatgcaatgatttggcatggaatggaatcgaatggcatcgaatggaatggaatggaatgcaatggaatggaatgtattagaatgtaatgaactttaatggaatgtactcgaatggattcgactggaatggaatgttctggaagtgaatggactccaatggaatggattcaaaaggaatggaatcgtacggaatggaatctaatggaatggaattaaatggaaatgaatcaaattgaatagcacggaattgaattgaatggaatggaatgcaatggaatctaatgaaacggaaaggaaaggaatggaatggaatggaatgggctggaatggaaaggaatcgaaacgaatggaatggaatcgaagtgaagagactggaatggaatgcactggaatggaagggagt

SEQ ID NO: 674790 - DNA, 1567 bp, Homo sapiens
atcaaatggaatggaaaggaattgaatggagtagatgggattggatgggattggaatgaaatgtactggaaaggactcgaatttcatgaaacggaatggaatgaattggaacggaatggactcgaatggaatggaatgtcatgggatggcatcaaatggaatggcatcaaatggaatggaatcgaatgcaatggaatgctatggaatggaatggaatgcattggaatggaatgtcctctaatggaatggattcgagtggaatggaattgaatataatggagtcgaatgaaatggaattgaaaggaatgggatcgaatacaatggaatatactggaatgtaacgtaatgaactcgaatgtaattgactggaatggaatgtacatgaatggaatgtaatcgaatggaaagtaatccaatggaatagattctaatgcaataaaatcgactcagatagagtagaatgtaatggaatggagtgcagtgcaatggaatggaatggaatggaatgcaatggaatggaatggaatggaatggaatggaatggaatggaatgggatggaatggtatggaatggatagtaatggactggagtgaaatggactggaaaggaatggactcaaattgaaagggctcgaaaggaatggagtcaaatggaatggtctggaatggaatgaacacgaatgtaatgcaacccaatagaatggaatcgaatggcatggaatataaagaaatggaatcgaagagaatggaaacaaagggaatggaattgaatggaatggaattgaatggaatgggaacgaatggagtgaaattgtatgcagtagaagagaatagaatggaatgcaagcgaaaggaaaggaatggattggaatggaatggaattcattggaatggaagggaatgtagtgtaatggacaggcctggaataaagtggaatgctacggtctcgaatggaataaaaatgtatggaatggaatgcaatgaaacggaatcgaatgtcatagaatgtaatggaatgcaaaaaaatggamtccaaaatcattgactggaaaggctgggtgtcgaaaggaattgactccaatggaatggaatcgaatggaatggaagtgaatagaatcgaactaaatcgaatggaatggaattgataggaacggaatggaaaggaatgcaatgatttggcatggaatggaatcgaatggcatcgaatggaatggaatggaatgcaatggaatggaatgtattagaatgtaatgaactttaatggaatgtactcgaatggattcgactggaatggaatgttctggaagtgaatggactccaatggaatggattcaaaaggaatggaatcgtacggaatggaatctaatggaatggaattaaatggaaatgaatcaaattgaatagcacggaattgaattgaatggaatggaatgcaatggaatctaatgaaacggaaaggaaaggaatggaatggaatggaatgggctggaatggaaaggaatcgaaacgaatggaatggaatcgaagtgaagagactggaatggaatgcactggaatggaagggagt

SEQ ID NO: 674791 - DNA, 1567 bp, Homo sapiens
atcaaatggaatggaaaggaattgaatggagtagatgggattggatgggattggaatgaaatgtactggaaaggactcgaatttcatgaaacggaatggaatgaattggaacggaatggactcgaatggaatggaatgtcatgggatggcatcaaatggaatggcatcaaatggaatggaatcgaatgcaatggaatgctatggaatggaatggaatgcattggaatggaatgtcctctaatggaatggattcgagtggaatggaattgaatataatggagtcgaatgaaatggaattgaaaggaatgggatcgaatacaatggaatatactggaatgtaacgtaatgaactcgaatgtaattgactggaatggaatgtacatgaatggaatgtaatcgaatggaaagtaatccaatggaatagattctaatgcaataaaatcgactcagatagagtagaatgtaatggaatggagtgcagtgcaatggaatggaatggaatggaatgcaatggaatggaatggaatggaatggaatggaatggaatggaatgggatggaatggtatggaatggatagtaatggactggagtgaaatggactggaaaggaatggactcaaattgaaagggctcgaaaggaatggagtcaaatggaatggtctggaatggaatgaacacgaatgtaatgcaacccaatagaatggaatcgaatggcatggaatataaagaaatggaatcgaagagaatggaaacaaagggaatggaattgaatggaatggaattgaatggaatgggaacgaatggagtgaaattgtatgcagtagaagagaatagaatggaatgcaagcgaaaggaaaggaatggattggaatggaatggaattcattggaatggaagggaatgtagtgtaatggacaggcctggaataaagtggaatgctacggtctcgaatggaataaaaatgtatggaatggaatgcaatgaaacggaatcgaatgtcatagaatgtaatggaatgcaaaaaaatggaatccaaaatcattgactggaaaggctgggtgtcgaaaggaattgactccaatggaatggaatcgaatggaatggaagtgaatagaatcgaactaaatcgaatggaatggaattgataggaacggaatggaaaggaatgmaatgatttggcatggaatggaatcgaatggcatcgaatggaatggaatggaatgcaatggaatggaatgtattagaatgtaatgaactttaatggaatgtactcgaatggattcgactggaatggaatgttctggaagtgaatggactccaatggaatggattcaaaaggaatggaatcgtacggaatggaatctaatggaatggaattaaatggaaatgaatcaaattgaatagcacggaattgaattgaatggaatggaatgcaatggaatctaatgaaacggaaaggaaaggaatggaatggaatggaatgggctggaatggaaaggaatcgaaacgaatggaatggaatcgaagtgaagagactggaatggaatgcactggaatggaagggagt

SEQ ID NO: 674792 - DNA, 826 bp, Homo sapiens
aatggactggaaaggaatggactcaaattgaaaggtctcgaaaggaatggagtcaaatggaatggtctggaatggaatgaacacgaatgtaatgcaayccaatagaatggaatcgaatggcatggaatataaagaaatggaatcgaagagaatggaaacaaatggaatggaattgaatggaatggaattgaatggaatgggaacgaatggagtgaaattgtatgcagtagaagagaatagaatggaatgcaagcgaaaggaaaggaatggattggaatggaatggaattcattggaatggaagggaatgtagtgtaatggacaggcctggaataaagtggaatgctacggtctcgaatggaataaaaatgtatggaatggaatgcaatgaaacggaatcgaatgtcatagaatgtaatggaatgcaaaaaaatggaatccaaaatcattgactggaaaggctgggtgtcgaaaggaattgactccaatggaatggaatcgaatggaatggaagtgaatagaatcgaactaaatcgaatggaatggaattgataggaacggaatggaaaggaatgcaatgatttggcatggaatggaatcgaatggcatcgaatggaatggaatggaatgcaatggaatggaatgtattagaatgtaatgaactttaatggaatgtactcgaatggattcgactggaatggaatgttctggaagtgaatggactccaatggaatggattcaaaaggaatggaatcgtacggaatggaatctaatggaatggaattaaatggaaatgaatcaaattgaatagcacggaattgaattga

SEQ ID NO: 674793 - DNA, 826 bp, Homo sapiens
aatggactggaaaggaatggactcaaattgaaaggtctcgaaaggaatggagtcaaatggaatggtctggaatggaatgaacacgaatgtaatgcaacccaatagaatggaatcgaatggcatggaatataaagaaatggaatcgaagagaatggaaacaaatggaatggaattgaatggaatggaattgaatggaatgggaacgaatggagtgaaattgtatgcagtagaagrgaatagaatggaatgcaagcgaaaggaaaggaatggattggaatggaatggaattcattggaatggaagggaatgtagtgtaatggacaggcctggaataaagtggaatgctacggtctcgaatggaataaaaatgtatggaatggaatgcaatgaaacggaatcgaatgtcatagaatgtaatggaatgcaaaaaaatggaatccaaaatcattgactggaaaggctgggtgtcgaaaggaattgactccaatggaatggaatcgaatggaatggaagtgaatagaatcgaactaaatcgaatggaatggaattgataggaacggaatggaaaggaatgcaatgatttggcatggaatggaatcgaatggcatcgaatggaatggaatggaatgcaatggaatggaatgtattagaatgtaatgaactttaatggaatgtactcgaatggattcgactggaatggaatgttctggaagtgaatggactccaatggaatggattcaaaaggaatggaatcgtacggaatggaatctaatggaatggaattaaatggaaatgaatcaaattgaatagcacggaattgaattga

SEQ ID NO: 674794 - DNA, 826 bp, Homo sapiens
aatggactggaaaggaatggactcaaattgaaaggtctcgaaaggaatggagtcaaatggaatggtctggaatggaatgaacacgaatgtaatgcaacccaatagaatggaatcgaatggcatggaatataaagaaatggaatcgaagagaatggaaacaaatggaatggaattgaatggaatggaattgaatggaatgggaacgaatggagtgaaattgtatgcagtagaagagaatagaatggaatgcaagcgaaaggaaaggaatggattggaatggaatggaattcattggaatggaagggaatgtagtgtaatggacaggcctggaataaagtggaatgctacggtctcgaatggaataaaaatgtatggaatggaatgcaatgaaacggaatcgaatgtcatagaatgtaatggaatgcaaaaaaatggaatccwaaatcattgactggaaaggctgggtgtcgaaaggaattgactccaatggaatggaatcgaatggaatggaagtgaatagaatcgaactaaatcgaatggaatggaattgataggaacggaatggaaaggaatgcaatgatttggcatggaatggaatcgaatggcatcgaatggaatggaatggaatgcaatggaatggaatgtattagaatgtaatgaactttaatggaatgtactcgaatggattcgactggaatggaatgttctggaagtgaatggactccaatggaatggattcaaaaggaatggaatcgtacggaatggaatctaatggaatggaattaaatggaaatgaatcaaattgaatagcacggaattgaattga

SEQ ID NO: 674795 - DNA, 630 bp, Homo sapiens
gtaatgaactcgaatgtaattgactggaatggaatgtacatgaatggaatgtaatcgaatggaaagtaatccaatggaatagaatctaatgcaataaaatcgactcagatagagtagaatgtaatggaatggagtgcagtgcaatggaatggaatggaatggaatgcaatggaatggaatggaatggaatggratggaatggtatggaatggatagtaatagactggagtgaaatggactggaaaggaatggactcaaattgaaagggctcgaaaggaatggagtcaaatggaatggtctggaatggaatgaacacgaatgtaatgcaacccaatagaatggaatcgaatggcatggaatataaagaaatggaatcgaagagaatggaaacaaagggaatggaattgaatggaatggaattgaatggaatgggaacgaatggagtgaaattgtatgcagtagaagagaatagaatggaatgcaagcgaaaggaaaggaatggattggaatggaatggaattcattggaatggaagggaatgtagtgtaatggacaggcctggaataaagtggaatgctacggtctcgaatggaataaaaatgtatggaatggaatgcaatgaaacggaat

SEQ ID NO: 674796 - DNA, 1501 bp, Homo sapiens
tggactggaatagaatggactcgactggtacggactccaatggaatggaatcgaatggaagggaatcgaacggaagggaatcgaacggaatggactcgaagggaaaagactgcaatggaaaggtctcgaatggaatggaaattaatggaatggaatggaatcgaatgaaatggagtcaaaaggaatggaatcgaayggcaagaaatcgaatgtaatggaatcgccaggaattgatgtgaacggaacggaatggaatggaatccaaaggaatggaatagaatggaatggaatcgaatggaaaggactcgaatggaaatcactcgaatagaatgcaatttaataaaataggatcaaatgtaatggaatggaatggaaaggaatcgaaacgaaaggaatggagacagatggaatggaatggaacagagagcaatggtatagaatggaatggaatcatctggaatggaattgaatggaatggaataatatgaaatggaatggaatggaatggaatggaatgcccttgaattaaatggactggaatggaatggactcaaacagagtggaatggaaagtgtggagatagaatggaatgaactcctttggaatggtgtagtatgcaatgcaatcgactggcagggaatcaaaaggaatgtaatcgaatggattggactggaatgcaatggactcgaatagattggaaacggaatgcaaagtaatggaatggaatagtatggaatgcaatggaagggaatggagtggaatagactagagtggaatggaatggactggaaagcaatggactggaatggaactttcttggatggactggaatcaaacggaatggaatgcagtgcaatcaaatggcatggaataaaatagaatgaaagagaatcaaatggaattgaatcgaatggaatcgaatggattggaaaggaatagaatggaatggaatggaattgactcaaatggaatggactagaatggaatggattcgaatggaaggcaaaggaatggaatctattggaatggactgtaatggaatggaatggaagggattggaatggactcgaatggaatggactgcaatagaaaggattcgaatggaatgaaaaagaattgaatggaatagaacagaatggaatcaaatcgaatgaaatggaatggaatagaaaggaatggaatgaaatggaatggaaaggattcgaatggaatgcaatcgaatggaatggaatcgaacggaatggaataaaatggaagaaaactggcaagaaatggaatcgaaatgaatggagtgttatggaacggactcaaaaggaattgaatgtaatagaatggagtggagtggactcgaatataatggactggaatggaatgaaatcacatggaatgggaacgaatggaatggaatggaaaggaatggaatcgaatggaaaggaatcgaatggaagggaatgaaattgaatcaacaggaatggaagggaatagaatagacggtaatgga

SEQ ID NO: 674797 - DNA, 1501 bp, Homo sapiens
tggactggaatagaatggactcgactggtacggactccaatggaatggaatcgaatggaagggaatcgaacggaagggaatcgaacggaatggactcgaagggaaaagactgcaatggaaaggtctcgaatggaatggaaattaatggaatggaatggaatcgaatgaaatggagtcaaaaggaatggaatcgaatggyaagaaatcgaatgtaatggaatcgccaggaattgatgtgaacggaacggaatggaatggaatccaaaggaatggaatagaatggaatggaatcgaatggaaaggactcgaatggaaatcactcgaatagaatgcaatttaataaaataggatcaaatgtaatggaatggaatggaaaggaatcgaaacgaaaggaatggagacagatggaatggaatggaacagagagcaatggtatagaatggaatggaatcatctggaatggaattgaatggaatggaataatatgaaatggaatggaatggaatggaatggaatgcccttgaattaaatggactggaatggaatggactcaaacagagtggaatggaaagtgtggagatagaatggaatgaactcctttggaatggtgtagtatgcaatgcaatcgactggcagggaatcaaaaggaatgtaatcgaatggattggactggaatgcaatggactcgaatagattggaaacggaatgcaaagtaatggaatggaatagtatggaatgcaatggaagggaatggagtggaatagactagagtggaatggaatggactggaaagcaatggactggaatggaactttcttggatggactggaatcaaacggaatggaatgcagtgcaatcaaatggcatggaataaaatagaatgaaagagaatcaaatggaattgaatcgaatggaatcgaatggattggaaaggaatagaatggaatggaatggaattgactcaaatggaatggactagaatggaatggattcgaatggaaggcaaaggaatggaatctattggaatggactgtaatggaatggaatggaagggattggaatggactcgaatggaatggactgcaatagaaaggattcgaatggaatgaaaaagaattgaatggaatagaacagaatggaatcaaatcgaatgaaatggaatggaatagaaaggaatggaatgaaatggaatggaaaggattcgaatggaatgcaatcgaatggaatggaatcgaacggaatggaataaaatggaagaaaactggcaagaaatggaatcgaaatgaatggagtgttatggaacggactcaaaaggaattgaatgtaatagaatggagtggagtggactcgaatataatggactggaatggaatgaaatcacatggaatgggaacgaatggaatggaatggaaaggaatggaatcgaatggaaaggaatcgaatggaagggaatgaaattgaatcaacaggaatggaagggaatagaatagacggtaatgga

SEQ ID NO: 674798 - DNA, 1501 bp, Homo sapiens
tggactggaatagaatggactcgactggtacggactccaatggaatggaatcgaatggaagggaatcgaacggaagggaatcgaacggaatggactcgaagggaaaagactgcaatggaaaggtctcgaatggaatggaaattaatggaatggaatggaatcgaatgaaatggagtcaaaaggaatggaatcgaatggcaagaaatcgaatgtaatggaatcgcmaggaattgatgtgaacggaacggaatggaatggaatccaaaggaatggaatagaatggaatggaatcgaatggaaaggactcgaatggaaatcactcgaatagaatgcaatttaataaaataggatcaaatgtaatggaatggaatggaaaggaatcgaaacgaaaggaatggagacagatggaatggaatggaacagagagcaatggtatagaatggaatggaatcatctggaatggaattgaatggaatggaataatatgaaatggaatggaatggaatggaatggaatgcccttgaattaaatggactggaatggaatggactcaaacagagtggaatggaaagtgtggagatagaatggaatgaactcctttggaatggtgtagtatgcaatgcaatcgactggcagggaatcaaaaggaatgtaatcgaatggattggactggaatgcaatggactcgaatagattggaaacggaatgcaaagtaatggaatggaatagtatggaatgcaatggaagggaatggagtggaatagactagagtggaatggaatggactggaaagcaatggactggaatggaactttcttggatggactggaatcaaacggaatggaatgcagtgcaatcaaatggcatggaataaaatagaatgaaagagaatcaaatggaattgaatcgaatggaatcgaatggattggaaaggaatagaatggaatggaatggaattgactcaaatggaatggactagaatggaatggattcgaatggaaggcaaaggaatggaatctattggaatggactgtaatggaatggaatggaagggattggaatggactcgaatggaatggactgcaatagaaaggattcgaatggaatgaaaaagaattgaatggaatagaacagaatggaatcaaatcgaatgaaatggaatggaatagaaaggaatggaatgaaatggaatggaaaggattcgaatggaatgcaatcgaatggaatggaatcgaacggaatggaataaaatggaagaaaactggcaagaaatggaatcgaaatgaatggagtgttatggaacggactcaaaaggaattgaatgtaatagaatggagtggagtggactcgaatataatggactggaatggaatgaaatcacatggaatgggaacgaatggaatggaatggaaaggaatggaatcgaatggaaaggaatcgaatggaagggaatgaaattgaatcaacaggaatggaagggaatagaatagacggtaatgga

SEQ ID NO: 674799 - DNA, 1501 bp, Homo sapiens
tggactggaatagaatggactcgactggtacggactccaatggaatggaatcgaatggaagggaatcgaacggaagggaatcgaacggaatggactcgaagggaaaagactgcaatggaaaggtctcgaatggaatggaaattaatggaatggaatggaatcgaatgaaatggagtcaaaaggaatggaatcgaatggcaagaaatcgaatgtaatggaatcgccaggaattgatgtgaacggaacggaatggaatggaatccaaaggaatggaatagaatggaatggaatcgaatggaaaggactcgaatggaaatcactcgaatagaatgcaatttaataaaataggatcaaatgtaatggaatggaatggaaaggaatcgaaacgaaaggaatggagacagatggaatggaatggaacagagagcaatggtatagaatggaatggaatcatctggaatggaattgaatggaatggaataatatgaaatggaatggaatggaatggaatggaatgcccttgaattaaatggactggaatggaatggactcaaacagagtggaatggaaagtgtggagatagaatggaatgaactcctttggaatggtgtagtatgcaatgcaatcgactggcagggaatcaaaaggaatgtaatcgaatggattggactggaatgcaatggactcgaatagattggaaacggaatgcaaagtaatggaatggaatagtatggaatgcaatggaagggaatggagtggaatagactagagtggaatggaatggactggaaagcaatggactggaatggaactttcttggatggactggaatcaaacggaatggaatgcagtgcaatcaaatggcatggaataaaatagaatgaaagagaatcaaatggaattgaatcgaatggaatcgaatggattggaaaggaatagaatggaatggaatggaattgactcaaatggaatggactagaatggaatggattcgaatggaaggcaaasgaatggaatctattggaatggactgtaatggaatggaatggaagggattggaatggactcgaatggaatggactgcaatagaaaggattcgaatggaatgaaaaagaattgaatggaatagaacagaatggaatcaaatcgaatgaaatggaatggaatagaaaggaatggaatgaaatggaatggaaaggattcgaatggaatgcaatcgaatggaatggaatcgaacggaatggaataaaatggaagaaaactggcaagaaatggaatcgaaatgaatggagtgttatggaacggactcaaaaggaattgaatgtaatagaatggagtggagtggactcgaatataatggactggaatggaatgaaatcacatggaatgggaacgaatggaatggaatggaaaggaatggaatcgaatggaaaggaatcgaatggaagggaatgaaattgaatcaacaggaatggaagggaatagaatagacggtaatgga

SEQ ID NO: 674800 - DNA, 1501 bp, Homo sapiens
tggactggaatagaatggactcgactggtacggactccaatggaatggaatcgaatggaagggaatcgaacggaagggaatcgaacggaatggactcgaagggaaaagactgcaatggaaaggtctcgaatggaatggaaattaatggaatggaatggaatcgaatgaaatggagtcaaaaggaatggaatcgaatggcaagaaatcgaatgtaatggaatcgccaggaattgatgtgaacggaacggaatggaatggaatccaaaggaatggaatagaatggaatggaatcgaatggaaaggactcgaatggaaatcactcgaatagaatgcaatttaataaaataggatcaaatgtaatggaatggaatggaaaggaatcgaaacgaaaggaatggagacagatggaatggaatggaacagagagcaatggtatagaatggaatggaatcatctggaatggaattgaatggaatggaataatatgaaatggaatggaatggaatggaatggaatgcccttgaattaaatggactggaatggaatggactcaaacagagtggaatggaaagtgtggagatagaatggaatgaactcctttggaatggtgtagtatgcaatgcaatcgactggcagggaatcaaaaggaatgtaatcgaatggattggactggaatgcaatggactcgaatagattggaaacggaatgcaaagtaatggaatggaatagtatggaatgcaatggaagggaatggagtggaatagactagagtggaatggaatggactggaaagcaatggactggaatggaactttcttggatggactggaatcaaacggaatggaatgcagtgcaatcaaatggcatggaataaaatagaatgaaagagaatcaaatggaattgaatcgaatggaatcgaatggattggaaaggaatagaatggaatggaatggaattgactcaaatggaatggactagaatggaatggattcgaatggaaggcaaaggaatggaatctattggaatggactgtaatggaatggaatggaagggattggaatggactcgaatggaatggactgcaatagaaaggattcgaatggaatgaaaaagaattgaatggaatagaacagaatggaatcaaatcgaatgaaatggaatggaatagaaaggaatggaatgaaatggaatggaaaggattcgaatggaatgcaatcgaatggaatggaatcgaacggaatggaataaaatggaagaaaactggcaagaaatggaatcgaaatgaatggagtgttatggaacggactcaaaaggaattgawtgtaatagaatggagtggagtggactcgaatataatggactggaatggaatgaaatcacatggaatgggaacgaatggaatggaatggaaaggaatggaatcgaatggaaaggaatcgaatggaagggaatgaaattgaatcaacaggaatggaagggaatagaatagacggtaatgga

SEQ ID NO: 674801 - DNA, 1754 bp, Homo sapiens
gcacaaaagtgaagaaagagtaactgggatttagtgattacaacaaataacacatttaaacagtacatttgtgaagtatctaaaaattccccaccaactggatgtcaactatgatctgataaaacaacacccttccaatttttagaaaaatagttcaaccttaagtttgacttaggactgaacaatgtgtgtgtgtgtgtgtgtgtgtgtgtgtgtgtgtgtgttggtataaatgtttattttattagaaggtaaactcctggagattggaaattcttgctcaatgttttatctcccaccacttttgcaacagtgatttgcccattgttgattctcagtgtttgtacactgaattgagttgagtccagatgaatamtgaattccagttgtttgtttcaggaaaggataattaatagtttaaacttgattctgattatacatttatatgaacaccctgtgcttcagttgtatgttccagaccaaaagataaaatgaaaaaaaaaaaagatgtatgctgcatggctgggtttgtgccaaatgaaattcaaataaacttagaaatccaaacattttattttgctgttagccactagcagagttaatcagtgcatggaatcttaatgaaaataagagtacctatgcaaataatggaaacagagttcttaatgattcttgtttgtctggaatattagaatttagagctgacatgtcctggcgtggtgactcacgcctgtaatctcagcactttgggaggctgaggcaggcggatcacgaggtcaggagatcgagaccatcctggctaacatggtgaaaccccgtctctactaaaaatacaaaaaattagccaggcgtgatggcaggtgtctgtagtcccagctactcaggaggttgaggcaggagaatggtgtgaacccaggaggcggaggttgcagtgagctgagattgggccactgcacactccagcctgggtgacagagcaagactccatctcaaaaaaaaaaaaaaaaaaaaaaaagaatttaggctgattcatacaatttaaatacatacataatgcatagtattcataactgtctttatgatatttattttaatattaattaggttgaaagctattatttaaaactaacaaaaactcaaaaatattataagtaacatttatcaataagctcaataagccattttacatcaccttctatgtgaaacatactgtactaggtacaaccctttaacataaatccttaagaaatattaatagttccatccttgaataagtttgcagtgtggtgtgttatatgcgccaaaacaacaacagcaataacataaaaatgacagtatcattatgacaagtataatgaatgggaaatctccagcttttttctcatgtgttcttaatattaccctgaaattttcaaaatattacagactgttaaggatctgcatgttgttttttgcctacattgtttgttgatgcttgttgacacaaaaataatgatgaataatattaaaactcaatctcttattaagataaatttgcaaagtaagacaagttgtttataaggtgagaaaaataacattttacccagaaacctccagtgagctataattgaaaaaggaattaaagctcaggccaggcacagtggctcatgcctgtaatcccagcacttgggaggccgaggttggtggatcacctgaggtcaggagttcgagaccagcctggtcaacatgtgaaccccatctctactaaaaataga

SEQ ID NO: 674802 - DNA, 604 bp, Homo sapiens
aaggtatatgtataatacagtggactttggggactcaaggggaggagtgagaggagggtgagggattaaaaggctacaaatgtggtacagtgtatactgctcaggtgatatgtgcaccaacatctcacaaatcaacactaaggaacttattcatgtaaccaaatatgacctgtgcctcaataacttatggaaaaaatttttaaaaagtcactcacaaaaaaataaataaatatccttgcaggaatgaaccattccttacatacgtaaaattctttaatgcctagtattaatggctatcattcattgaatctgtgtgttacggacttaaaaaatctctaatccctatgccattgctacaaagaagatatgattcaccttctatatccctattcctgctttttttaaaacaaaatttatagaragtgcaattaagtaatttattcaaaatctcacgggtaatatgtggtagaacagactgaaaactaagtctataagagtttaaatcctacaccttttccattacatcacattcatagaatctcattttatgtaacacaattttagatttctgtggtacacagtgtatattaacattaaagcttac

SEQ ID NO: 674803 - DNA, 604 bp, Homo sapiens
aaggtatatgtataatacagtggactttggggactcaaggggaggagtgagaggagggtgagggattaaaaggctacaaatgtggtacagtgtatactgctcaggtgatatgtgcaccaacatctcacaaatcaacactaaggaacttattcatgtaaccaaatatgacctgtgcctcaataacttatggaaaaaatttttaaaaagtcactcacaaaaaaataaataaatatccttgcaggaatgaaccattccttacatacgtaaaattctttaatgcctagtattaatggctatcattcattgaatctgtgtgttacggacttaaaaaatctctaatccctatgccattgctacaaagaagatatgattcaccttctatatccctattcctgctttttttaaaacaaaatttatagaaagtgcaattaagtaatttattcaaaatctcaygggtaatatgtggtagaacagactgaaaactaagtctataagagtttaaatcctacaccttttccattacatcacattcatagaatctcattttatgtaacacaattttagatttctgtggtacacagtgtatattaacattaaagcttac

SEQ ID NO: 674804 - DNA, 614 bp, Homo sapiens
agaaagcatactcaagcctggcttgctagccgcccccacgtttaaccttgtgaatgtcacagcctgagggatcagcctacgagcctcccctccttatgaatgagtactttcctggggctggcagggcagctccctccaaaacacaagtgggttccatggtgagcaccacttgtctggatatatggcaatgacttttcaaaatttaaaaaagaaagaaaatttaagaaagaaaattgtctaagacagaagcaacttttgaaagatttttaacccttaggctctttttatcagttacacatacatatattaatacctgcttatgcaagataatactctctccctttttttcttctttccttccctccctcctcctccttcctctctctctctttctstctctctaatttggaattccctgaaaatacaggtgtgctgggaaggaaacttaacctatgcaacatgtgtggagctacaatttttagagaattagagtttaacaaaacatactaaaaagtgtttctcaaagcctgttatatgcaacagagattccataggatgtgctggtaaaaccaaccaaccaaaagaagaggttctgcctttatttaattgaacaa

SEQ ID NO: 674805 - DNA, 608 bp, Homo sapiens
ccattgacaactgtcaatggttgctcacaggttggggcaggggtgggggtgcagyggggagtgtaggcttttcacactatcagtgtctaaattaagggagtaaggcaacctgaaacctcttgctcccaggttccatagttcccattccccttccagttggaaatttgtactgcaaccagaggaaccagatagggggtgagaacacttaggggactgggtcctaagatcaaaggccagtcttgtggcaataatgacagttctcagggggactgtgactcactacattccactccttgttggggtgatcagacccaacaccaggccatgggggctacgaagtccggcagagtcaaaggaatgagaaaagacaagttaaggcataaagtgggaccagggggccaacgctagtatggaggctgtgaaggccccgagctctgggagcctatgccatttattggtaatccaacaaagaagcaggtagtgaggatatgagggttgggagaaagcagtgcatcaggtgaatgagctacagctgtgacggtttagcattttctttgaagtatatggaacatgttatgctacttgagataatgggaaacatgttcttc

SEQ ID NO: 674806 - DNA, 608 bp, Homo sapiens
ccattgacaactgtcaatggttgctcacaggttggggcaggggtgggggtgcagtggggagtgtaggcttttcacactatcagtgtctaaattaagggagtaaggcaacctgaaacctcttgctcccaggttccatagttcccattccccttccagttggaaatttgtactgcaaccagaggaaccagatagggggtgagaacacttaggggactgggtcctaagatcaaaggccagtcttgtggcaataatgacagttctcagggggactgtgactcactacattccactccttgttggggtgatcagacccaacaccaggccatgggggctacgaagtccggcagagtcaaaggaatgagaaaagacaagttaaggcataaagtgggaccagggggccaacgctagtatggaggctgtgaaggccccgagctctgggagcctatgccatttattggtaatccaacaaagaagcaggtagtgaggatatgagggttgrgagaaagcagtgcatcaggtgaatgagctacagctgtgacggtttagcattttctttgaagtatatggaacatgttatgctacttgagataatgggaaacatgttcttc

SEQ ID NO: 674807 - DNA, 630 bp, Homo sapiens
gttgccttacatgcttatgggaatgttgccctctccaccagcayggcctttgccattccttccctactgatggtgcatagaagtcaggtgtgaaggcaacatcaaaggaaatcatattctaccatgcattcattctgacttaaagacatcacaagataacttagttggaaaatgtgttattctacatttatactatacaattctgactggtaaatttaacaagaaaatgaacatttgttcaaagttttctccaaatagtgaataacacttgggttggtgatcatcatcaatgaagcaaataacaacctttgagaaagtcattcaaagccagtattcacttttggcatgattgatgatgcagtcttgcaattaattgcagaaccagaattaaatatatgatatcaaggaactgaagaggagaagatctattttgctttaatacattatggagccatggcattatgagtaataacagcattgctatctttttctcatagtggaacatattaaattagctgggtatggcacattttaaataaaatatgaagagatggtttctgaacctgaaagaagggttgattttgggtttaaaatatacagcacatgcactgattggaaaataaacaaatt

SEQ ID NO: 674808 - DNA, 814 bp, Homo sapiens
aaagaggttaggaaagtgatgttgaggtgcagaggtggaagcaggtgtaagacgttccagcctggctgccaaagtgtttgaattcatctgcaagctatgcgtgcccttagctattgcaggaagcgtggtgaactctgccrtatataatgtggatgctgaacacagagttgtcatcttcgacctgttccatggagtacaggacactgtggtaggagaagggactcactttctctcctcatggatacagaaagaaaccaggtatctttgactgcggctctcgaccatgcaatgtgccattcatcactggtagcaaagtagagagaatgtcagcatctctgcgcatcctcttcccacctgtcacaggccagcttcttcacatccttaccagcgctggagaggactgtgatgagcacgtgctgtggtccatatgattcaattatctcccactgggttcctcccacaatgcatgggaattatgggagctacaattcaatatgagatctgggcggggacagagccaacccatatcactatctttgcaacttttctgtaaatctaaaacaattgaattttttaaaaatacgtatttaaaagaaaatatcacttttcacaaagaacaaatgggacagaataatgaaatatagaatagattttccttaaactaaaaaaagacatgtacatctgatttgaaagattcattgtcattttagccaaaagtttgaaatgaaatcaaccactatactgtaaaggtttcatttttattttattttaaaaagtaatagttactttaaaacttcttgggattaaaaaagta

SEQ ID NO: 674809 - DNA, 2011 bp, Homo sapiens
aaggaaatgttcaaaaggtaaaatgacaggggtacgtcaaaggaaaacaggagtcaacctgaactagttcccaattgtttccaggccctccatcatcaatctattgcctaggaaagcttgggagcacagagatttcctaccacacaaaggaggagtctgcctcccactaactttggtgtctcgagtctcaaaggagcctaacatatttacctagggcatgtttaaggaagaaaaggagaagtgtggctgtacaataaatgaggctgatgtgtgaatacttcctatgacccaatgatamgggctacaaaggaagtggaacagaatttgttttctttttttgaggtactattcaagaaccaactaatcaactagtagcatgtaaggagcatagaggaagaagctgaagtttaattttggattcctaagacttgggaaacatcacagagatgcataatagacagacatcttcatgggtaaagacactaaagaaaagaaaaatgtaaaataatttttcaacataccatagagaaagatgtgataaaatctcttacctcacttctaacaagaaactactaatcatctcagaaaaataagatctgtctggaagatcagtgagagaaatacatcacaatacaaaatgaaactacaaagtgattgaaattagaaaagagagttctaaaaatggagaatacattaagaagatcaaacctgtatacaatttcaattcaattacaggagaaataataggtgggagagagtaaagaaaagggagggccaataatataaaaaaagaagttttattagtctaagaagagtttaatgataaaagaagtgcattaagtaattcgggtaaaaattattcactttgaaataaaaaaagatgaagatgaaaccttaaagtttcaatgcagatatacaaattatttacaaagagcaaaaaagcattgtcttttatttacaacatacaacactgagacagttaaacaccttctatctaccatagaaaaacaagactaattcaaaaccccattcaagcataagatctcattcacatgtcagagtgacaagaagacacaggaggttaaggttgataaaaatacacaagaaagaactgtgtaataaacaaacaaacagaaaactggaataattagttcagctgaaaggcaatagattcatggtggaggaataaacagtgaagaaggacagtcttgagtctaggagctgacaaaatcaaaaatatctcatataaaacaaaattaatttcagggtataatttggatatgaaaaaatagaaaatttagcaaatattaaatatataattctatatctcatatatttatatatattatataataatagtcaaatatatattaacctttatgttttttaacaaaaaacaaaaaacaaagtagaagtattatactacaaaaaatataaatgttttgcctgacaaaattttcattaacaaagacataaaatagattaggatttttacatcatatagcatattgagttattctccaaaaagagttcctacaaatttatattaagaagaaaacaattcaatataaaaaaatcacctaacaggaataaatagtcctcagatgagaaactcaaaacaacttaaaataaaaaacatgtaagatgattctcaactttgctagtagacaataaaaatagtgaaatgaataaagaggccctaatttcacctaccttgctagcagacatttttgaaaaagaaaataaagaggtaatgtctggttctgtgaatatgcactaaaaaaaaattgctgttacatgttattaataggatattttggaaattagtctggcaataacactaataatatgtgtgtataagtgtgtgtttgcacatgtgtgtatatgtgatgaagctcttgatgttaaggagctgaatacctgtatacacatatgtatgtttgtgtatatacatacatatgcatgtacctatacacacatatacatacatatttaagtgtatgaataaaaa

SEQ ID NO: 674810 - DNA, 2011 bp, Homo sapiens
aaggaaatgttcaaaaggtaaaatgacaggggtacgtcaaaggaaaacaggagtcaacctgaactagttcccaattgtttccaggccctccatcatcaatctattgcctaggaaagcttgggagcacagagatttcctaccacacaaaggaggagtctgcctcccactaactttggtgtctcgagtctcaaaggagcctaacatatttacctagggcatgtttaaggaagaaaaggagaagtgtggctgtacaataaatgaggctgatgtgtgaatacttcctatgacccaatgataagggctacaaaggaagtggaacaraatttgttttctttttttgaggtactattcaagaaccaactaatcaactagtagcatgtaaggagcatagaggaagaagctgaagtttaattttggattcctaagacttgggaaacatcacagagatgcataatagacagacatcttcatgggtaaagacactaaagaaaagaaaaatgtaaaataatttttcaacataccatagagaaagatgtgataaaatctcttacctcacttctaacaagaaactactaatcatctcagaaaaataagatctgtctggaagatcagtgagagaaatacatcacaatacaaaatgaaactacaaagtgattgaaattagaaaagagagttctaaaaatggagaatacattaagaagatcaaacctgtatacaatttcaattcaattacaggagaaataataggtgggagagagtaaagaaaagggagggccaataatataaaaaaagaagttttattagtctaagaagagtttaatgataaaagaagtgcattaagtaattcgggtaaaaattattcactttgaaataaaaaaagatgaagatgaaaccttaaagtttcaatgcagatatacaaattatttacaaagagcaaaaaagcattgtcttttatttacaacatacaacactgagacagttaaacaccttctatctaccatagaaaaacaagactaattcaaaaccccattcaagcataagatctcattcacatgtcagagtgacaagaagacacaggaggttaaggttgataaaaatacacaagaaagaactgtgtaataaacaaacaaacagaaaactggaataattagttcagctgaaaggcaatagattcatggtggaggaataaacagtgaagaaggacagtcttgagtctaggagctgacaaaatcaaaaatatctcatataaaacaaaattaatttcagggtataatttggatatgaaaaaatagaaaatttagcaaatattaaatatataattctatatctcatatatttatatatattatataataatagtcaaatatatattaacctttatgttttttaacaaaaaacaaaaaacaaagtagaagtattatactacaaaaaatataaatgttttgcctgacaaaattttcattaacaaagacataaaatagattaggatttttacatcatatagcatattgagttattctccaaaaagagttcctacaaatttatattaagaagaaaacaattcaatataaaaaaatcacctaacaggaataaatagtcctcagatgagaaactcaaaacaacttaaaataaaaaacatgtaagatgattctcaactttgctagtagacaataaaaatagtgaaatgaataaagaggccctaatttcacctaccttgctagcagacatttttgaaaaagaaaataaagaggtaatgtctggttctgtgaatatgcactaaaaaaaaattgctgttacatgttattaataggatattttggaaattagtctggcaataacactaataatatgtgtgtataagtgtgtgtttgcacatgtgtgtatatgtgatgaagctcttgatgttaaggagctgaatacctgtatacacatatgtatgtttgtgtatatacatacatatgcatgtacctatacacacatatacatacatatttaagtgtatgaataaaaa

SEQ ID NO: 674811 - DNA, 690 bp, Homo sapiens
tgataatttaacaagtacaggttaatattgttaagcttcattcttatgaatcataaacaaaaataaagaaaagaatataatgaattgcaatgaaaacacactgagtaaaaaattcaatgtacagattattcaatttttatccgagtatactgatatataaaaaatgcatacagggcataaatttaaatattaccaattatttttcttggatagtaaaaaataaattattttattttggattttggattttaaaatgttcttaaataagctttataatttataatcataattagcatatgttatttttaaaatttagatctatmatcataatttaaagatgagtttactataaagagttttctcccatagtagagagtttcaaggcctaatttttggaccaaactaacagtcataaatatttcactgatatagaaactggaagtgaaagacatcagcttctaagaacatttacaaaaccaaaatccaaagttctttgacataggatgttagccattgtttgaaattgttgcttatatatatatatattttttttaccataatatatgttcatattgcagacaattgccttttcacagtttaaatcattttagccagcattttaattaatgactctgctgcacatacattctctttcacaatatgtgtttcataacaccgttatgatcgggg

SEQ ID NO: 674812 - DNA, 690 bp, Homo sapiens
tgataatttaacaagtacaggttaatattgttaagcttcattcttatgaatcataaacaaaaataaagaaaagaatataatgaattgcaatgaaaacacactgagtaaaaaattcaatgtacagattattcaatttttatccgagtatactgatatataaaaaatgcatacagggcataaatttaaatattaccaattatttttcttggatagtaaaaaataaattattttattttggattttggattttaaaatgttcttaaataagctttataatttataatcataattagcatatgttatttttaaaatttagatctatcatcataatttaaagatgagtttactataaagagttttctcccatagtagagagtttcaaggcctamtttttggaccaaactaacagtcataaatatttcactgatatagaaactggaagtgaaagacatcagcttctaagaacatttacaaaaccaaaatccaaagttctttgacataggatgttagccattgtttgaaattgttgcttatatatatatatattttttttaccataatatatgttcatattgcagacaattgccttttcacagtttaaatcattttagccagcattttaattaatgactctgctgcacatacattctctttcacaatatgtgtttcataacaccgttatgatcgggg

SEQ ID NO: 674813 - DNA, 690 bp, Homo sapiens
tgataatttaacaagtacaggttaatattgttaagcttcattcttatgaatcataaacaaaaataaagaaaagaatataatgaattgcaatgaaaacacactgagtaaaaaattcaatgtacagattattcaatttttatccgagtatactgatatataaaaaatgcatacagggcataaatttaaatattaccaattatttttcttggatagtaaaaaataaattattttattttggattttggattttaaaatgttcttaaataagctttataatttataatcataattagcatatgttatttttaaaatttagatctatcatcataatttaaagatgagtttactataaagagttttctcccatagtagagagtttcaaggcctaatttttggaccaaactaacagtcataaatatttcactgatatagaaactggaagtgaaagacatcagcttctaagaacatttacaaaaccaaaatccaaagttctttgacataggatgttagccattgtttgaaattgttgcttatatatatatatwttttttttaccataatatatgttcatattgcagacaattgccttttcacagtttaaatcattttagccagcattttaattaatgactctgctgcacatacattctctttcacaatatgtgtttcataacaccgttatgatcgggg

SEQ ID NO: 674814 - DNA, 733 bp, Homo sapiens
ctgaaggataatggaaacaatagcaaatttatcttctcagtcacctgtgagtcttcctttgagagtgggacttgcagagtacttggtggggtagagctctttgtgactatgctatttaggaaatggtgagagatggattgttttcagtacatcagtcataagaggatatgagtgagttccaactttccttattttaccttagtcttgacaaataacaagtatggattatgtctgtatttctccgacttgtttaaggtagaactggactgggtgttaacagtgttagttcagyagagacatgagcaaatcactcacttccccttcaagataacactttaaaggtgccaccatttgcagaagaaagcagtgatttaaagcagctatactagcacagtttagaatacttacactagctgatggagtagatacattctagaaatatttacctgtagtgggagttgaacagtgagaacacacggacacagggaggggggaacatcacacactggggcctgttgggggttggggggctaggggagggatagcattaggagaaatacctagtgtagatgacgagttgatgggtgcagcaaaccaccatggcacgtgtgtacctatgcaacaaacctgcacgttctgcacatataccccagaacttaaagtataataataagaaagaaaaataaatatttacctgttaaggacatttctgtgtattttattccatctttcc

SEQ ID NO: 674815 - DNA, 733 bp, Homo sapiens
ctgaaggataatggaaacaatagcaaatttatcttctcagtcacctgtgagtcttcctttgagagtgggacttgcagagtacttggtggggtagagctctttgtgactatgctatttaggaaatggtgagagatggattgttttcagtacatcagtcataagaggatatgagtgagttccaactttccttattttaccttagtcttgacaaataacaagtatggattatgtctgtatttctccgacttgtttaaggtagaactggactgggtgttaacagtgttagttcagtagagacatgagcaaatcactcacttccccttcaagataacactttaaaggtgccaccatttgcagaagaaagcagtgatttaaagcagctatactagcacagtttagaatacttacactagctgatggagtagatacattctagaaatatttacctgtagtgggagttgaacagtgagaacacacggacacagggagkggggaacatcacacactggggcctgttgggggttggggggctaggggagggatagcattaggagaaatacctagtgtagatgacgagttgatgggtgcagcaaaccaccatggcacgtgtgtacctatgcaacaaacctgcacgttctgcacatataccccagaacttaaagtataataataagaaagaaaaataaatatttacctgttaaggacatttctgtgtattttattccatctttcc

SEQ ID NO: 674816 - DNA, 993 bp, Homo sapiens
ttttcatattactcaagactgaaaaattaccttgatccttaaattttcactcgttttaaacaaaaggttcaaaaaaggatgcctggctagggtggcacatggagatttaattattctgtgctgaactttaaattcctaatctgctggacagcttaggaaattggtggcattgtctctggagatacaggattatagtcacctcatgactaactgtccctgtgacctgttttgttcccatggaattattgttggcaaattgttctgccattttcacacttccatttttagagaagcataaaaggaagcactgatgattagaaatgcatttcataattagatttgtgttagtgttgatttgaacatattcaaataacacttaagtatctctatgtaatagtgacataatgtagatcagcagttagcttaagaaattgccttgagagagaaggttcatataacactaatatagagaggctaatgcactttcccaatgaagtttgttttggattattcgcagggatgacctgggtatttggaataataatttacactaagaaaagaaagtatggaaaattcaagttaatgaacaattggcttgtattagagagtaagacaattttgtcattcagattgtcctctagttccctgatgtatatttgactaaggcctagagagaaggagctacaaatataaagcaagaaacaatgccaaaaaaaaaccctgtttcattacactttctttgggggcagtaatacagtgttgttgttgatgaatgtaatagttttgatagacacactttatggaggtgaaagattgggcagaggccttgaatagtatgctgagtactgcatgtcaatagtctgaccagctraaaacatcacaaaaagtcagtgttaaaaaagaaaacaattattaattatcacatgttcaacaagagactttgattctgagcattagtgagacatccacctaagttctaagaaatggtttgca

SEQ ID NO: 674817 - DNA, 636 bp, Homo sapiens
gaaatactcaaggtttcatgggaataaagaggaatttctttctgtccctgcaaggggagaaatctggttgagtgaatcatgatttagtgattctttatgactggttcataaagaaggtgtgatttttcagttgagagtctaaggatgagtaggagtttttcaataagggagggaagggcattctatgtagatagatgatcatatttaggcagtgatataagaaagaatatgaactcaggaatctgcatataggtyggtgtgtttataatagtggtttaaaacatgcaagtgggaagagatatggccagaaccatgaggaactcttgtccatgtcagaggctttgacctatacttatcttttagatgagaagagctgtagaacgtttgtaagcctgggcataactaccagatttgcaccagtgaaaggcctctttacttatttaaatttttaaaatttcagtagcttttaggttacaagtggttttggttacatggattcattgtacagtggtgaagtctgagactttggtgtacccatcacccaagtaatgtacattgtatccaatatgtagtttttagcccacacccccttttccaccccctgcttctcaatctccaaagtccattataccattc

SEQ ID NO: 674818 - DNA, 606 bp, Homo sapiens
tgtttatttcagttctttatatattctggatattagatctttgttggatgcatagattttgaatatcttttctcattgtgtaggttgtttttttttttattctgttgatagtttcttttgctgtgcagaaaatctttagcttaactgggtcctacttgtcaatttttgtttttgttgcaagaaaaaaaaaaactatctagccatagattcttgtcaaggctgatgtccagaagagtatttcctaggtttttgtctaggatttttattgtttgaggtctcgctcttaggctttgtatccttcttaagttaatttttgtatattaactttagatggatgataggtaaaggtccaatttcaatcttccgcatatggctagccagttaccccagtaccggttattgaacagggagtttttttccccattgcttattgccattctttaatcgttcatcattttaaaaaatgwtagaattccgcaggagtgtattctgaacctatgcaggtgttagtttgttccccactctaaacctcttcatatccttctctaccctactttctgcttcctggggttgacccccactctgcatcacccagccttcctgtca

SEQ ID NO: 674819 - DNA, 646 bp, Homo sapiens
tcccttcaaacctgcccctcatcctccctttgatatctctctgaataacaccaatttccttatgagctggaaatctttagtgatttaacatcactgacaactttcataattgttctgaaaagaagcatagtaatataatctggcacttataaagatcaaaatcagcccaaatataatcccaaacatttgaacaaacatgaattactcacatattaataatgactatataaattttgtcaattttatttttataattagttaataggatttaattttagtttctaatagttttaataaattcatttacttaaaaacaacaaaactaaacagatatttatttatgatatttaattggtttaattaaacaggcctatgaggagtcaggctgcttaaatgatgagacttttactaaatacctattacttacattacatgttaattacagaatttttaaaatgagaaaataactggaattatgagcattggtagtataagtcaaacttaataacagatccatatttattatcagaccttattctaaatattccagttagaatttgaagcaagaaatatttatgttgcctactaatcaagtcaaatacacatcctggcttgtaactaaaaataatattttattttttwaaat

SEQ ID NO: 674820 - DNA, 618 bp, Homo sapiens
ccagacggttttctaaatgttgttatatcatttcatcctcatagccacctcacaactactataatctccattttacaaatgagggaactgaggcataggaaagttaagtaacactcctatggacacacagttactcaaggtcaaaaatgagattttaatttaggatttcccagttcaaaatacattgttcttagattctaatccctccttaatatttagcaattggtagacattggctttctataaacaatattaaaatgctactaaatttcctggcagaaggagcaacaatttaggaatcatgtcccctgctgcttcaagctcattagtggagagcagtttataactttttagttgcatccttggcagttacagagacaatggttttatagaagacacaagaaagaaataactttctatgagatttgtgaaaaattataatgtggtttataagtagcaaatgaaatacccaagcatatttgggacccccactgctatggtctggaatattcrtttcctcctaaaattcatatggtgaaatctcaacccctcaaagtgatggtgttaggaggtggggtctttgggagttgataaggttgtgagggaggaatcctcatg

SEQ ID NO: 674821 - DNA, 609 bp, Homo sapiens
atttatattaggtttttgttgactagacccactttttttttttgcttatatatgtcaagcaataccttagtaaggtactcacttattttatccctartggcatattaatcaggcaatgtcatagatctctggttactattccacctctgtggtatctatggtcattgtacacacctcttttctaagggtaaaggccatgatctggcctctctactcagtaatcccattattttcataaaaaacacccaatcccatctcattgtggtaccccctactgttgtgccttgcctacaaaggacagctacatcttaattttacaaggatggatgttctcttggcctcatctgagaaatgcttaagggaaggttgtaggggtcacacataatagatcccctccaacattccctacttcctaggcctacagtatgccaggaatatgtcaaacttatatcctcattgattttaggatactgttaagtccaggctttgtttttaattgacagctataaattgtatatacttatggtgtacaacatgatgttgagactactggatcacatggtaattctatttttaatttttgaggaacctccataccatttttatgct

SEQ ID NO: 674822 - DNA, 2330 bp, Homo sapiens
tataatttttttttctaaaacctctcctatgtttagacttaaaattatttgtataaaacaaaataaattgtcttggttagaagacctcaaacatcattattaaattaaattataatacaggtaatttttttctaatattaaatttacatgccttatataagaaggttaattaaaattatgtattttgtgggaggccgaggcaggcagatcacgaggtcaggagatcgagaccatcctggctaacacgttgaaaccccatttctactaaaaaaaaaaaaaaaaatacaaaaaaattagccgggcgtggtggtgggcacctgtagtcccagctacctgggagactgaggcaggagaatgatgtgaacccgggaggcagagcttgcagtgagctgagatagcaccactgcactacagcctgggcgacagagtgagactctgtctcaaaaaaaaaaaaaaaattatgtattttgatttgctcccagggttggttctaatccactatataatgaccattgccctaaactgtcacttatgaagtgcatatcacacatagttttgctcaggaccaaaagtcacttatgccctgaattttgagttttaaaaatgccgggtcatttattctttcttctgagatgcatttgctccagactttttcaaaataatttttattcacatatcatgtccttggatctatctcctgggcstgtattctgtttgtagaatattgggcttagttcttcattttcatctgctgtaagcctgtggatgatataaacctgggtatctgggagcagtttcctaggaaacaggaagggcagcccctatctttgcagcctctgtgttctgtgttctgtcctcgtcacttacctgagcccttagcattatttccttttatcccctcctgtgtcttccttctttaggctcagctccagactcatgtttatagagtaacaaggtgaaagcccatgctctctagctggccccattactcttccaatgttcacctccctgattatcactcctcccgagttatgtgtttcctaataccagatagagtttggggcttgagaaaatgctatcagattttcatctctagatttatacttttctatctgattaaaacagccatagcaacttggtatacctaagtattaggacacaatcacagaagacttgtttctggtaccatgcatgttttgtaaacattttcaattatcatcaccataaaaaaatgaagacttatggtaacaaaatacttatttgtcttcttaagtgcttgttcataatttagtttaatgatgctacactttcttgtgctctctctaggcctcaagggccatttgtattgatttacccatttggtttgtttcagtaacagccacataaaacacagagtggagaaagcaaattttctcatgtggaaattcacatttatcggtgtaatagaacttttgattctgggtgacatctaggaaagtattctaattctgtaaatataaatttggatgaacataataaagaaaggtaaacttaactttcatgattactcattttacatttttagaattatacacacaaacacacatcaattgataataaagcttgttgagttattttgccctggaaatctaggtttcttcaaagtgttatattatgtctggttaatatgtaagacagtggagtaaaaaatgaattaagacaaaacaaagcaaatagacataaaaaaaaagagatgagaaatcagctaattgaagtcaccctcagattgtacctcattgtttctggtataaagtcccctgaaaaaaatattacttttatttagcactgcaaagtgatttttgttattatttttgattatgatatttattaaaatgatcatatttttctttacacatagcatccttaacttagttaactgtataactcaaatccaagagaactggaatttaaaatcacagagagcctgtcatttaaggttctcaagcacttcattgcaacttattatccatgacaggtttttcattacatttttgcggggttgaaatattaaagcattcatttggatacaggtatctagttgaaaaatgaatccaactatcaatcatgaataatccccataagactattgcactgcaaggggaggatggggtcaggaaatactgttctgtgaaaatttataatacattatgcatatatattacatgtagaaatggtatgcacgcatgagaaaaaagaatcatttcatgcttatttgcaaatggtcagagaaacatttggggtcacttcagatcattaggaccattaactgtgatttgaattaagaaaataga

SEQ ID NO: 674823 - DNA, 654 bp, Homo sapiens
tgaaaaatatgccaatatgtggcaaattctggagatttaaaataatttctaggacattgggagaatgacagattttcatccagaagaaaaaataatattagaagcatttatttacaaagagctaagtaatacctttagatcattaaacgctaggtggtggtgatagtggggtgtgtgcggcgggggtggggggtgtttcgctatgaattctttaagatttcaaggtgctatttaagtgtgagggcaatagaaaaatattggaaagcgttaggcgtgtaaagcttacccttacacacgtactttctgaaaaaatacgaactraatatatgtccaggcaggcaaaggatgtatcagattaatacttataataaataaacttccagaatgagtaagctctgatacaaaatgaatgtaggggagtaactgagaaataacacacagcatgagtttcaaatgactgcagcaaatgttcacaatgctatatataaatgtcaaattgagttcatactaagaaatgtgaaattggccgggtgcagtggctcgcgcctataatcccagcactttgggaggccgagacgggcagatcacgaggtcaggagatcgagaccatcctggctaacacagtgaaaccccgtctctactaaaaatacaaaa

SEQ ID NO: 674824 - DNA, 1876 bp, Homo sapiens
caaacggggtttcaccatgttggtcaggctgttcttgaacagccttgtgggttttactatttggacttgcaaaggttagtaccccagggataatgatttccttttgagtgttccatctttttgagaatagccttccacttataagtggaagcatcatttccacttataagtgagaacatacaatgtttggttttctattcctgagttacttcacttaaaataatggcctccaattccacccaatttgctgcaaaagatattatctcatgactttttatggctgagtagtattccatggtttatagcattttctttattcaccggttggttgatgggcacttaggttggtgcgaattgtattgttataaacatgcatgcacgtgagtctttttcatagaatgactttttttgctttggctagatactcagtagtgggaattgctggatcaaatggtagagttctacttttaattctttaaggaatctctatacagtctcaatagtggttgtactaatttacattcccaccagcartgtaaaagtgttctctttctactacattcatgccaacatctattgttttttaatttttacattatggccattcttgcaggagtaaggtggtatctcattgtggttttgatttgcatttccccaatgattagtgatgtcgagcaatatttcttatgtttgttggctgtttgtatatcttcttttgagaactatctattcctgtcttttgcccactctttgatgggattatttgtgttttttttttcttgctgattcctttgagttttttgcagattctggatattagtcctttttcagatgtatagattatgaagatttccccccattctgtgggctatttactctgctgattatttcttttgctgtacagaagctttttattttaattaggtcctatctggaaaaattttatcaagatatcagtagtggatttgagttaatttatgtgtgttgtaatttctttaatgctgaagacatgtaagcttgtattattgaatatgaaagtagaagttttctcttgactttgccccagacagagttagacagggaaaaaaagaaaagaaacaaagttagggagcatgatatagatgtgaaaagacaccaacctcatattctgaaaagctaaagggactattatggacatggatggttagccatggagaagttaaagcacagtgctcttagacatctcctgcatacatctaaagtgcctttcaacccctttaggctcatattttctgctacaatgactgctactagttttgtaagtgctaatgctaattgaaaccacatcatgggtgcagatcaaaaataagccagtcaggcatccctgctgaaaacgtacgcagcaggatgacccctttgttcttcttaaaaatgaactaattcaagacaggcactgcctctggatcattattcattaatgtatgcaacattccctctgccgcactctttcctctttctctctctactcttcactataattttcatgtggaaaagtaaaagaacgccagttctcttgtaaactgcataattgggtttaatatgcagacgtgccatttctaggcatgtacgttttctgcattaataggagttatacgcaaagcatttagagatcacctgtggataggcttgttaattaacggagttagagccttatttcattccatttaaaccagagtaattgaaatcagcataatcaccactgcagtattcagtactttcgccccttttcaaggttattttggcaattatgttcttggctgagcatgttagtaaatgctgcggttacttcctgtactacttgacttttcttaatgctgtgccctgtagaatgtatttt

SEQ ID NO: 674825 - DNA, 595 bp, Homo sapiens
tctaacttatctttcataatttacaaayttctaagtgagtagtctacatcaaatatttaatggttataaagaatccctttctatggctctaccaccatttatttgatcaatcccctcctaatggacgctagcatgtttctaatagttagctcttaaaacaacattgcattgtccatcaaagaacactgtatcaagaaagtaaaaagaggacccatgaaatgcaggaaaatatttgcagataatatatctgctaacagcttgagtaaccaaaatatataaagaacctttacaactcaacaattaaaaaaaaaaacttaaaaatgggcaaagacttgaatagacatttctccaaagttgactgggcacggtggctcacatctgtaatcccaacagtttgggaggccgaggcaagtggatcacctgagctcaggagttcgagaccagtccagccaacatggtgaaaccccatctctattaaaattacaaaaattagccaggaatggtggcatgcacctgtaatcccagctactcgggaggctgaggccggagaattgcttgaacctgggaagtggaggttgcagtgagctgagattgc

SEQ ID NO: 674826 - DNA, 640 bp, Homo sapiens
tttcttcatctggatcacgggaaaccagaatcaattctatctcaaaataagatgggggactctatacaaaggcaccttgcaaagtatggtggtatatcgatgtaagsatatgtcaacagtgcaaagcttgaattccttctagaatacttaactaagtggtcacctagtccatgtcaatacctcttcagaaacagaaaacttgctgtttctgaaaaagtcagcttccacttactgtttttcctaatatcaagacaaaattggacttcttgttttatttccactcatgggtctgaattctacctcctgccacgatcagttcgaatccttttgttacattatatggtctcccaaatacattttactaagagcaaatccgccctacaacattactctgctcaaatcttctccctaggctgtacctcacatcttgaggtcattcaactgttcctcacagtagagttttgaatttctatgtcagcctggtcactcctctcttggcacactgcagtttctctacatcctcaagtgtggacttgcctatacagagtagaagataatcgctgaatttcaatagtgtatttcaagtattgcaatctagccttccaatggcctttctgggtgctttatggtttctaagcca

SEQ ID NO: 674827 - DNA, 1073 bp, Homo sapiens
taagagaaaatcaatttcacatgcaataaaataaaaacaatggcatgcacatgcccttcacgatttgcaaagccatcaccaggcccacaccttacccacctgggcctgctgaggcctgcaccttcatgcagtgcccaggagtgtccactggatgaaccttctcacactgatgctcaggcaaggctgggaggccggtggggccattttgtttttctaaatttctgcttcacagatggggaaactgaagctcaaatacatttctctggggtcgtttaaaaagtccacagaagaacctgaactcgacttcaggccttctgattccaaagccagggacctgtcctctatgccgccatccccagcatgattctctccaagaaaagagaattgttttaaactcaagtcccggggggctgaagggctataactcttttttaaaagggtaactcagagtggctgaaagaaggtgactgttgtgaggttgccagtgcccttccccctctggcacggcatcctcccctgtccacccttcggttacaaggtgggcaggggtctggcagggagaggccagtgttattgcaggctgcggctgacgcactgcccatgycccactccaagagccctcagccgaacctccgagtgcagctcagcattcctgcccttctctgacccagggaggcagagaacccagccaaaccactcatcaacaagcccactgtcatgtgtcattaatgatgtcagatcaaatccaagcaacaattggaaaaacagattgcaacattgtgctctttattgctggtgtttctgtggagcattagcaataaaaagactccagagaggagctgtaaaggagaaagcgaaaaagagcaaaagagaaagcaagaaagatactttttcccttgctgcaagcttcacgacacagccactttgtaacatgcaccatatgcagcagccactctgcacaaggcccaataacctccttccaaatggtaataaatcccctcggaccccaacacacttgtaatttacaacttggctaaaatgaacattatttcaagctaagcgtattctcagag

SEQ ID NO: 674828 - DNA, 1073 bp, Homo sapiens
taagagaaaatcaatttcacatgcaataaaataaaaacaatggcatgcacatgcccttcacgatttgcaaagccatcaccaggcccacaccttacccacctgggcctgctgaggcctgcaccttcatgcagtgcccaggagtgtccactggatgaaccttctcacactgatgctcaggcaaggctgggaggccggtggggccattttgtttttctaaatttctgcttcacagatggggaaactgaagctcaaatacatttctctggggtcgtttaaaaagtccacagaagaacctgaactcgacttcaggccttctgattccaaagccagggacctgtcctctatgccgccatccccagcatgattctctccaagaaaagagaattgttttaaactcaagtcccggggggctgaagggctataactcttttttaaaagggtaactcagagtggctgaaagaaggtgactgttgtgaggttgccagtgcccttccccctctggcacggcatcctcccctgtccacccttcggttacaaggtgggcaggggtctggcagggagaggccagtgttattgcaggctgcggctgacgcactgcccatgtcccactccaagagccctcagccgaacctccgagtgcagctcagcattcctgcccttctctgacccagrgaggcagagaacccagccaaaccactcatcaacaagcccactgtcatgtgtcattaatgatgtcagatcaaatccaagcaacaattggaaaaacagattgcaacattgtgctctttattgctggtgtttctgtggagcattagcaataaaaagactccagagaggagctgtaaaggagaaagcgaaaaagagcaaaagagaaagcaagaaagatactttttcccttgctgcaagcttcacgacacagccactttgtaacatgcaccatatgcagcagccactctgcacaaggcccaataacctccttccaaatggtaataaatcccctcggaccccaacacacttgtaatttacaacttggctaaaatgaacattatttcaagctaagcgtattctcagag

SEQ ID NO: 674829 - DNA, 606 bp, Homo sapiens
ctgcaattacttttgtgtcaacataatacatcctttgtatttccccatgtcaaatattcttgaaaaacattattatggtggaataacctgtcttaaatatgtaacataatttatttaaactcttccttattttgggaatttaactaactaacattttttgttaatataaataatgctataatgaacatctttgcatatatatcactgtgctcttaacagattttgagactttcttaaaaagtatttatatcaagaataaattatatatttttttgagrcctttaatacatattatcaaaaggttttcaaaaatgtataaatatatatttctaccagcagtatataaaatgtccatctttctgcatctccgctatccgtcggttagcatgaagttatagaaattctgaatctaggttcccctggttgttggcatgacatgtacaggtctaagaccctacaatggtgtgtcaaattttatgtatatgtacattttttggagatgagggttcttgacagaatgtttaaacattgaattattcttgtgtttttgtttaatttttcatttcttaaataacaaatgaagttgaacttatcttcatacattta

SEQ ID NO: 674830 - DNA, 606 bp, Homo sapiens
ctgcaattacttttgtgtcaacataatacatcctttgtatttccccatgtcaaatattcttgaaaaacattattatggtggaataacctgtcttaaatatgtaacataatttatttaaactcttccttattttgggaatttaactaactaacattttttgttaatataaataatgctataatgaacatctttgcatatatatcactgtgctcttaacagattttgagactttcttaaaaagtatttatatcaagaataaattatatatttttttgaggmctttaatacatattatcaaaaggttttcaaaaatgtataaatatatatttctaccagcagtatataaaatgtccatctttctgcatctccgctatccgtcggttagcatgaagttatagaaattctgaatctaggttcccctggttgttggcatgacatgtacaggtctaagaccctacaatggtgtgtcaaattttatgtatatgtacattttttggagatgagggttcttgacagaatgtttaaacattgaattattcttgtgtttttgtttaatttttcatttcttaaataacaaatgaagttgaacttatcttcatacattta

SEQ ID NO: 674831 - DNA, 606 bp, Homo sapiens
ctgcaattacttttgtgtcaacataatacatcctttgtatttccccatgtcaaatattcttgaaaaacattattatggtggaataacctgtcttaaatatgtaacataatttatttaaactcttccttattttgggaatttaactaactaacattttttgttaatataaataatgctataatgaacatctttgcatatatatcactgtgctcttaacagattttgagactttcttaaaaagtatttatatcaagaataaattatatatttttttgaggcctttaatacatattatcaaaaggttttcaaaaatgtataaatatatatttctaccagcagtatataaaatgtccatctttctgcatctccgctatccrtcggttagcatgaagttatagaaattctgaatctaggttcccctggttgttggcatgacatgtacaggtctaagaccctacaatggtgtgtcaaattttatgtatatgtacattttttggagatgagggttcttgacagaatgtttaaacattgaattattcttgtgtttttgtttaatttttcatttcttaaataacaaatgaagttgaacttatcttcatacattta

SEQ ID NO: 674832 - DNA, 592 bp, Homo sapiens
ttaatacctgggtgacaaaatagtctgcacaacaagcccctcatgatacaagtttacttatgaaacaaactggcacatgtaccccttagcttamaagcaaaaaagaaacaacataaaataaaaaattctgatggaactgtttctaaactctgctataataaaagctaatttttcacctgtagccctcaagttccttatcagtaaaatgagcttaattgtgaagtcatttctagctttaaaattttgggccaggccgggcacggtggctcatgcctgtaatcccagcactttggaagcctgaggtgggcagatcactaggtcaggagatcaagaccgtcctggataacacgtgaaaccccatctctactaaaaatacaaaaaattagctgggagtggtggtgtgtgcctgtagtcctagctacttgggaggctgaggcaggagaattgcttgaacctggaagagggaggctgcagtgagccgagatcgtgccactgcactccagcctgggcgacagagtgagactccatctcaaaaaaaaaaaaaaaaaaaaaaaaaaaagaaaaaaaaaaaaactgggccaaactcccagga

SEQ ID NO: 674833 - DNA, 592 bp, Homo sapiens
ttaatacctgggtgacaaaatagtctgcacaacaagcccctcatgatacaagtttacttatgaaacaaactggcacatgtaccccttagcttacaagcaaaaaagaaacaacataaaataaaaaattctgatggaactgtttctaaactctgctataataaaagctaatttttcacctgtagccctcaagttccttatcagtaaaatgagcttaattgtgaagtcatttctagctttaaaattttgggccaggccgggcacggtggctcatgcctgtaatcccagcactttggaagcctgaggtgggcagatcactaggtcaggagatcaagaccgtcctggataacacgtgaaaccccatctctactaaaaatacaaaaaattagctgggagtggtggtgtgtgcctgtagtcctagctacttgggaggctgaggcaggagaattgcttgaacctggaagagggaggctgcagtgagccgagatcgtgccactgcactccagcctgggcgacagagtgagactccatctcaaaaaaaaaaaaaaaaaaaaaraaaaaagaaaaaaaaaaaaactgggccaaactcccagga

SEQ ID NO: 674834 - DNA, 596 bp, Homo sapiens
tgatccacctgccttggcctcagaaagtgctgggattacagatgtgagccaccgtgcccggccctcgaaatcttgtttcaggattcagkcaagtactatacttgtatgatatatttatgtaagtgttataataatggagacttacatattttacatatacatacatgcagtgttttggttaattgttaaatatatctgtcctcaggttgaaaagtggtttatatagtcttgtgatttttagaattcttctaaattttgattccaagactgtattttgcaagacaggttgtcaatgcaaccctgtcaaatttatatatagagacacaaatctaattttcgtttttttcaggttttattgcctctttagagtaaaaaagtaccaactttttggaaagcattttattcactcaaattagcttctgaaccttattgcatccactttaggctaaatctgctaagttaacattggcatgtctttgcaaacacttccatgatgatggtttggaaaagatgtgttgactttcaattctaaagttactaagtgtggaatccctgatctgcctggccacagcatcattcatcatctgactaaattc

SEQ ID NO: 674835 - DNA, 682 bp, Homo sapiens
atatggcataattccttataagctgtagcagactgatcataatgtcatcatcttcttgcaactgaaacttctcttttttaaatacttcataattttattaaacattgttatgagatgtttgtttattattcagttattatgatttttttttttctgagttgaatactggataaaggtgtgtgaaggttttaacatagtggttaaaagcctagtctctgaagtcaaatttcacgagtttgaatcccggcatactttgctctatcaccgggcaatttttttaactgctgtgaacttcagtttcctaatatgtaagaggaaaataataataggaactacctaatagggttgttgtgatgattaagtgtagataggcagatagatagatcatctatctcatgagttatttatttagttaaaataaattctaagatattttattcattgattgattcctgcaaatgttctttgttctgggattgtctttgtctttccagggctrgggaaaaccataggatatttgagtattaaaatcttatatctaaatatatataggtttattcatatcttgtcaattgtcttgtagccccaactttaagttaggtgattgggaaggtaagggggtgtggtataaggaaaattaagatatgacctcaacttttgatagatggtttattggagacat

SEQ ID NO: 674836 - DNA, 694 bp, Homo sapiens
ttttgggaggctgagatgggtggatcacttgagcccaggagttcaagaccagcctggccaacatagtgaaaccccatctctaccaaaaatacaaaaattagctgggcatggtggcacgtgcctgtaatcccagctactcaggaggctgaggcaggaggatcacttgaacccaggagtttgagaccagcctggccaacatggcgagaccccatctctatcaaaaataaaaaaattagccaggcatggtggctcacacctgtggtcccagctgctcaggaggctgaggcaggaggattgcttgaacccaggaggcagaggttgcagtgggccaagatcgtgccactggactccagcctggctggcagagtgagaccctgtctcaaaaaaaaaaaaaatttggagtggrgggacacaaacatttagactatggcatcttccaccccatgattctctgaaatcagagtatgagaccctttgcatgctttttgaaaatctattttttcctttttataccacagtgtattcattgtatgtcacttagccagaagtgtcttatgcgatgccctgcccatggagtagatgataaaagtttagatgaatggacagatgggtgaaaagcacggaaacatttgtttttctcacctggatttgcctctggcatgtgacacaatgccagtagggggagccctctatt

SEQ ID NO: 674837 - DNA, 1283 bp, Homo sapiens
tcttttttaaaattttgtttagagtttatgaattatggctttggaatcattattaattggcatggagctctttgttctgaaaagttctttttcttttgataaattaatgtagatcaaaccaaatttattacaaaaggaaaaattttattttgaatgatataggattgaatttaaggttaagtaatatggagctgggaaaatggcaaggcagggctcttaactttcacaaaaacttaacattaataaaaagggaaatcaaataatacttggagatctcaaagcactcttagaaactttgtctaattaagctttccacccactgtgcaataaatattctattagctatacaggtgagattctaakaatttctaattaagttgtgttcttttttaccgcggtgctcaaattacacagtttgccaaaggaaatgtgtgctgtgtcattgtagcatgattttcaatggagttaccatctaatttctccaaaccaggcattgtgtaacactgttgtcactttctgtaattattttcactgttacactgtgattttgaaaaattattgttaatgattacagttgaaaacttgtttaaggtatttgcatctaagaaattgtttacttccaaattgtgtgggtacgtttttagttacttggattcagatcctatttatggtaagcaggtttctttggggtagagggagggcagatgtggacaaagtggctatttgtggtatcctaattctgggtatgaatatcctggattccagggctttgcctggattctagggtgagttgttatactttattctctccatgtgtattatgataatacaggtgattaaagcatcttgaattttaatgtaatcttttaatttgagcttttgattgtctttttgaacattatgcaatcatgttttctttgtactgttctctctaaaaaatgaccaaatgccaaagattacatgatatgagaataatttgcttatattgtatcatttttcatactaaattaatgagtgggaaaatctacattggctcctgggtataaaataaagttccttctacaaactgttgattactgacgctacaggagtaaaacagaaaaagttttattcatattaggtttcttttagaaataagattgtggaggcttttctaattgtaaaaacaatgcaagattgttgccaaaagtatgagaaatatatacaaacactaagaagaaattaagtcacttttagtcgtaactgcagatggttacattttaatataacattttcaaggattt

SEQ ID NO: 674838 - DNA, 1283 bp, Homo sapiens
tcttttttaaaattttgtttagagtttatgaattatggctttggaatcattattaattggcatggagctctttgttctgaaaagttctttttcttttgataaattaatgtagatcaaaccaaatttattacaaaaggaaaaattttattttgaatgatataggattgaatttaaggttaagtaatatggagctgggaaaatggcaaggcagggctcttaactttcacaaaaacttaacattaataaaaagggaaatcaaataatacttggagatctcaaagcactcttagaaactttgtctaattaagctttccacccactgtgcaataaatattctattagctatacaggtgagattctaagwatttctaattaagttgtgttcttttttaccgcggtgctcaaattacacagtttgccaaaggaaatgtgtgctgtgtcattgtagcatgattttcaatggagttaccatctaatttctccaaaccaggcattgtgtaacactgttgtcactttctgtaattattttcactgttacactgtgattttgaaaaattattgttaatgattacagttgaaaacttgtttaaggtatttgcatctaagaaattgtttacttccaaattgtgtgggtacgtttttagttacttggattcagatcctatttatggtaagcaggtttctttggggtagagggagggcagatgtggacaaagtggctatttgtggtatcctaattctgggtatgaatatcctggattccagggctttgcctggattctagggtgagttgttatactttattctctccatgtgtattatgataatacaggtgattaaagcatcttgaattttaatgtaatcttttaatttgagcttttgattgtctttttgaacattatgcaatcatgttttctttgtactgttctctctaaaaaatgaccaaatgccaaagattacatgatatgagaataatttgcttatattgtatcatttttcatactaaattaatgagtgggaaaatctacattggctcctgggtataaaataaagttccttctacaaactgttgattactgacgctacaggagtaaaacagaaaaagttttattcatattaggtttcttttagaaataagattgtggaggcttttctaattgtaaaaacaatgcaagattgttgccaaaagtatgagaaatatatacaaacactaagaagaaattaagtcacttttagtcgtaactgcagatggttacattttaatataacattttcaaggattt

SEQ ID NO: 674839 - DNA, 1283 bp, Homo sapiens
tcttttttaaaattttgtttagagtttatgaattatggctttggaatcattattaattggcatggagctctttgttctgaaaagttctttttcttttgataaattaatgtagatcaaaccaaatttattacaaaaggaaaaattttattttgaatgatataggattgaatttaaggttaagtaatatggagctgggaaaatggcaaggcagggctcttaactttcacaaaaacttaacattaataaaaagggaaatcaaataatacttggagatctcaaagcactcttagaaactttgtctaattaagctttccacccactgtgcaataaatattctattagctatacaggtgagattctaagamtttctaattaagttgtgttcttttttaccgcggtgctcaaattacacagtttgccaaaggaaatgtgtgctgtgtcattgtagcatgattttcaatggagttaccatctaatttctccaaaccaggcattgtgtaacactgttgtcactttctgtaattattttcactgttacactgtgattttgaaaaattattgttaatgattacagttgaaaacttgtttaaggtatttgcatctaagaaattgtttacttccaaattgtgtgggtacgtttttagttacttggattcagatcctatttatggtaagcaggtttctttggggtagagggagggcagatgtggacaaagtggctatttgtggtatcctaattctgggtatgaatatcctggattccagggctttgcctggattctagggtgagttgttatactttattctctccatgtgtattatgataatacaggtgattaaagcatcttgaattttaatgtaatcttttaatttgagcttttgattgtctttttgaacattatgcaatcatgttttctttgtactgttctctctaaaaaatgaccaaatgccaaagattacatgatatgagaataatttgcttatattgtatcatttttcatactaaattaatgagtgggaaaatctacattggctcctgggtataaaataaagttccttctacaaactgttgattactgacgctacaggagtaaaacagaaaaagttttattcatattaggtttcttttagaaataagattgtggaggcttttctaattgtaaaaacaatgcaagattgttgccaaaagtatgagaaatatatacaaacactaagaagaaattaagtcacttttagtcgtaactgcagatggttacattttaatataacattttcaaggattt

SEQ ID NO: 674840 - DNA, 635 bp, Homo sapiens
ggctggcctgtcaggagccgtggaagcagggcacatgtggtagcagtccatgccacagggacctctgcatgccagctctgtgctgggtgctggaaaggcagtggccaacaatgaccacctagtggggaaggcggacagtacagtgtcaacagacaagaagaccctttagataatgacaaacatgccatgaaagaaagggggacagagagactgaggggcagccgtcagtagggtggctaggcgaggcttcttcaaggaggtaacatctgagctgagaactctgcagggcagacagtcaagtggcttgtccaagctcacacagtaagttctggggaagccagactagcacacgtctctagactcccttcgagtggtctccctgctcctagaaacatccttctcttggattctgacatgtcttcctgttttcctcctaccctgttgaacactgcttctctgagtccttggctgactcatcctctttccagtgctggactgttccagycctcctctggaatgtgggcctccaccccgccccctccaaaactgccacctccacccctcacctctcccctagcttcagtggcctgcttgacatctccacctggatgtcgaagggtctcttagaacaatgc

SEQ ID NO: 674841 - DNA, 1593 bp, Homo sapiens
taaagggtgggcaaggcaggcttctctgagaaggtaacatttgctcaaggacccaccagagacaagggatgtggaagagcattccaaacatagggaatggtaagtttaagtcccgagtgtacgtggacaacattctgtatctaaacaactgctaggatcccctatggctagaactgaggagcaacggggagagtagttggaggtgagttcagccaataaactcacaccgtttattaggctgttgccacagccttttggctcttactctgagtgagagggaaatctctggaggtttgtgaagaggtgggtatcatggtctgacctacgttaaataggaaaagccgggaacgatggtgtgtgcctatagtcccagctactaaggaggcttaagcccaggcttgagaccccatctcttaaaagaaaaaaaaaaatggaaaggctcacaatagaggcagtgaagaaaagttgttttttaaaaaaggcagtggtcactgtattagtacatgattctgggaaatctaggtatgagttcagaaattttaattaacctgaaaaacttgtaccagaagccatttgcttatgctaatgtgaatacaaagagcttgctttggttcattactaaataacattcttcgtgaaagtgtcattgaatctttttagcaacatatctatacaaaactctacaatgtaagtatgtacattcagcaaatcctgtgagatgcagaagagtgaatttggttcaggagttgtgagttggcttttattggtagaaaatttcctgaatgtcaatacctaatactagtatggaaaaataatttgcttttcaaaataaatagataaatttaccttatgttattcttgaatgaagtttttcatttaatcaaaggtatttttaagcttttgttttggggctttttttttcccttgtggatctgtggctataataaagtcagcattctttatttactggtgataaattctgtgaaatgttaaagtagacatgttggaccagctattgtgaaattacagctctgtctctaacttcccattacatgagcacacctataactcatttatattagcacagtaagtatacctttaacaccaaataaggtattttctaggtcaattcttcttttcagtttattcatggatttctacctagggtcagtacttttcattaagtctaactaagaatcagatctctcatgaaccaactctttagttttagacagaaatccttttaggtcaagaatacatacctcctacgaggattaatcctgcatgctctgtgatgagctgacattgactttgactaaagaaagatttatttttggaagcaggattttaaaattagttcttttgaattctcagcaagttctaaagaataagcattcctagctcactggacttgactaagtaagctgagtggagatggttgaggagagaaagagaatctarcctttatggactgccgtctgcgtaccataggtatcatgtgagcctcacatcatcatttgggtaaaattatcttcattttcaccaaaggatggtgaggctcaaagaggatgtgtgacttgcttaaagtcattt

SEQ ID NO: 674842 - DNA, 642 bp, Homo sapiens
gaaatgggcatagacactctttatgaactttaacaaaagattagaaagctgcctctcagttactactgtgcaactcttccaaatgttaatttagagtctgaacatgccagtttccccatgggaattgctcaattctaatagttctctatgctgtacaaacatacattatctgcctagggcccggtaaagctattttcattttgaatgaaaaaagttagagcttgtaagtattttaatttttcctgaagtagcttttgtgttaatatrggttgttctgaatgtgttagaatgtcagtatctggagacaacatatggaaagggaacaagctggtggggagggagcagaatttgttctttgcaagtcagactgtttagttccctggtattctccttagttattggctaacaacattttcagatctccagtatgtcccagcaatacttgacggaaacagggctctagttttaggctctcctgaggctgaaatgcaggtggctaaggagggggtcagagggtatattgcagcttcctcttgctgctgtaacaaatgacaatgaacttagtagtttgaaagacacaaattcatctttttacagttctgcaggggaaaagtctaaaatcaagctgtgggcagagctaca

SEQ ID NO: 674843 - DNA, 1665 bp, Homo sapiens
ttgactctttgggatgacctaactgcagaaaggagctacccactatgtgtcttctctgctgaaagcttgacattcactgggacgacctgcctgtggaaacgagctacccactgcaggtctcctgaaagctgttctgtcactcagtgaggctcctctctgccttgctcaccctccagttgtctgcatacctcattcttcctggacatggtacaagaactcaggacccgctgaatggtgggactgaaagagctgtaacacaaacagggctgaaacacaccctcctccctccattcaccacgttgcaggtgacaagaaggagagaagagctgtggcccgttgggaagcccagatctaggggctccccaagccagggctgtgacaccttctttgggactgcacagttcctggtgtctccaagcttccgggtgccaccgtgttctcctagaacatttctagatgtgttacttaggaatgtggcagctgtcttgcttcttcatccagacatgggtccagaaatgggtgcctgcagcagaagccatgtgtggtacatctggtccagccacagactcacatggagctggcacctgtgccagtgcccggagctgtccatcctgtcgcagcaaccagcgtacctggctgtgcacagtggctggaccctgtgctagctcacccacacaccccttgctgcttcacgcctggcttgcccttagcaggtgtgtgatctaggctggtagcataagctgagcacaacctgttgggccaagtgggtgacatgagcccagcaggcatgagcaatactcaggtagaaggcgctgctggccacagaggtgtctggctggcaaagtgacacccaaggatcctgtgacatcaggatctgctcacctgcaaaatgctggtctcacctggggctgtagtgttgcctggttgttgagagctctgtctctaggggacaatgcctgggtttgtgtcctggctctaccactttctagctgggagaccttgcacaagttcttaactcctttgtgtttcacattttcatctgaaaaattggggtaataatagctcattcagtcttcattaaaagcttaagaggtaggttttttaattattgttccaggctttgcttgagctgagagggccagcgagagtcaaggtataggagcaattgagcagagagagtgtatcagtcagtttttgctgtgtaacaaaaccatgaaatggcataagagcattcattcagatttcataggtctgtgggtcacatgtggtggttctggcttagtctttgagttgagttggccctgactggagggtcacaggctgcctgaagcatgtttttctcataatggaggtcagaagctccccgaaggacacaaagctcttatgattatggttctgaactggcatcttgacacttcttcccacattccattggctaaagcgtgtcacaacatccagtgggtgaaaaaatacactcccacttcgagagacgaggacgagggatagagacccttgtggctcccatacccagccttctgccagtccgtttgtacttgttctccagcaagaagctcaacagacatttstcaattggtcataaatctggtacctaggaatggtgctgacctcttgcaggcctccagggaggtcctgagagtcccatga

SEQ ID NO: 674844 - DNA, 620 bp, Homo sapiens
cctgacactttctatagtttccccttgaaaaaaaagttgagaatccctctcaatccctgaaaaaaaaaaaaaaaaaaaaaagacagggaagcttgaaattgtcactcttaggtaatgagtctccttcaggtcctcacaccatcacagcaaccaattcagcctccctttaaactcatgggaaaactgaagcccaaaaaagaaaatggtagttgtggatcagaatctacattttctgggaccaggagctsttgctcatgcctgtaatcccagcactttgggaggctgatgtgggaggattgcttgagtccagaagcttgagaccagcctgggcaacatagtgagaccctgtctctacaaataaccaaaaattagctgggtgtggtggtgtgtacctgtagtcccagctacccaggaggctaaagcaggagaattgcctgagcccaggaagtcaaggctgcagtgagcggtgattgtgccacagcactcggcttgagtaacagagtgagaccccctgactcaaaaataataataataatctacattttattttccaacagacaagtgtctttctatgtcatcctgctggctttccttccaccaagatctctcaaagctcatat

SEQ ID NO: 674845 - DNA, 666 bp, Homo sapiens
taattagaatttgtaatgttccacggcctaagtgtagttttcatgtttaattatgtagaatcaagtaaagccttttgcttcaaatccttagagtttttctgttttaaaaaactgaatgcaaaagaaaaatgctttccatttccttattattagacttttattaatgtctcattgttgaactttgtgtttgcattgtccgggtaatggggttctgagaatatcggtaaggtaaaatcccagtgtgtcaggtatcattgggacatccatattgtaatgaaataaacttttataaagttaaaactctkaagtttttctttatgtttagcttcctatgtacatttgtcagactctactccagcttggtatgttgtagaccggaaaaatctggaaaaagcattaccagtagagagaaataagaagtgtgacaaccttttcatccaaattactgtattccaagcttctgggtattttttggtagttggttcctttttctgggggaaatgaatggtgtgtgtgtatacagtatagaagagtgagaggagtagcagaagagaaattcatccaaagttggaactgtaaattgctttgttttagctcatttatttctttctttcactagctctactacagtgcttttgttagatagactatgagtacaaaaacgtg

SEQ ID NO: 674846 - DNA, 1899 bp, Homo sapiens
tttattttttacctatattttcccatgcagttttttctcaattttaaaaaattttttgaagatggtcttcattttctattccccttcattattttctctttcaaaagtcccacctttactaaggtacaagtcattccattgcaggaaaaaaaaaaagaaaaaaaaaaagaaaactattttgttcagaaaataagtacccaaaattgtttgtttgtttttttttttttctttagcaatgtaacttgtagtcgcattaatgagatcacattttatagtggaaggtacttttagggaaagtatgatgacatatgttccatttaaacctgaagcttttcctggaaatgtattgtggacttcatttgaataaaatgcttccgatgaatctgttgctccttacagattttgagaaagtaccttgttcttcctgtcagtggcaggcagcatctctttaatttttttttccaataatattgcagtactctagtactcattttaaagatagatggatttttttttctctygtaaagaagaacattgtgggggataaaacgctggatgtgatttcaaaaaatgtcaaaatatgtcaaacgcagataccactcaagggtttcattaactgaagctttggtgataagtgtcatcttgtcaaagacccacccatctcttccaatacattaccaaatgtactaatttccttgccgagcttgatgtttattgtatagctgaaattgaaaatggtcggtaatggagtgagcttcaatccaagaccaattctgaatctaaattacttgcttctttcaatagcatcgacagaggagagctttatgcaccttgtacctaatcaacccttactgtgaccctaaattcagcagtcttcagagattaataataaaatcctcagttcaaacaattatttgccctgaacaagttgcccatttcttatgctgagaatgaaagaatgtgacattattttttaaaagctctgcatgttgtgggccaccatttatttttgatctctgacccccctgatgcagtctgattgcaaatcccacatgcttacttgaatatttttttggtgttgggggggtagttgtgagatttctttgttagcattttaacgtgcctgttcttccacatcccctaacagttgtggttttcataaagtaaacaagatacattctatcaatatgtatttctaaagtttttaatatagagctctataaatcatggaaagcatgatcgaattctagttttgtacaaaactactcagagtctctagaaaataaaaacaaactccctggaaaaatcaattatttatctactttctcaaataaaaaatttaattcaaagaatgtcttattgaggcttaaaccctaaatgattttttaatgaaatgttttctactccattccagttggcagtgtagcttatagttcttgagtgaagttatctaagcaatatcaaattcttttagtcatctttacaatgaaaaacattcattcatattcaatgccagagcatttttttctaatttggtatcttcaacttccttatgtccaattagtattcattagtgtaattatgatgatggaaaggctcagtccctgttcttcaagacattaggaagtttggggaaagccttgaaacaaaatagtaaaagaaatatttggacatcccaaatgcttctttgattcaatactgtgatttgattcatcagtgaaggttggttctatgtccaggagcttgctgggggagggaagagacccatagtggcttgctgccctagaaactctgcctgccattgtcaacatttcctccggctgtcttgcttttggagggaaactctccctaaggactgccctggttgacagaatgagagtctccagaagattcttctgc

SEQ ID NO: 674847 - DNA, 636 bp, Homo sapiens
agatagagacctgccccttcccctaccttagataacctgcaacatgtacccagactgttccatgagataaactmttgtgtttgagccagaatagaaaactgagtctcaatgaggtgaaagagtgtgagggtgtgtctaaggtcaaccagcaggtataaagacagggcccctgaagctagggtttgaatcctggtgtgtgagacctcaagtgaacagttcccttttctgagcctcaatcttcttatctgtaacacagcgttaaccactgtcctggcctccagtgggaggatgtgtataaagcccctccaacagatgcttagcaaaagtaattgtggagtaaggctacctttggggaaagttggagaaaaacaggggcatgagaggggcttctaggatatagtaatgtttcattttgtaatctccaggctggtaatacaagctcatttgtgaaaactgtacatttatgatctgtgcacttttctattaggtgcacaagttatatattattcccaatcttttgctatatattagtccaggtttttacttttgcaccaacctatttttgcaccaacctaataaatgtatgataaattccgataaaaaataagcataacacattaaaacacaaagtaaata

SEQ ID NO: 674848 - DNA, 652 bp, Homo sapiens
ggaaaagtagtcatattttttctcttcactttttccccttcccttcacatactttttcacttcactcaaggacgtcactcccttattctccctcagtaattctcccctgagggaagtcagaattactggaatgatgtccttgagtagacaagagacaatgtggacatagctgcaggtggtgggtagatgtgttacttggagcatgtggaaattctcttttgatcctttcagtttttttcagtgaataagaagcaaagtcatcagctgagaatgaggatgctaaagaggtataggaagtttgataagaagaaaatatatgaaattatagtttaggaaacagctaatgaaaggactgggggaacttagtataactgccaggaattaaggtttatttatttagaggaaaatatacttcacatggttggatatttggatgttttctccagtaatgctgaactacaggagaagagctatggaaaaastggagaggttgcttaatcagccggaagagggaggtttttctgagtgagtgtggtgtgatataagaggagaacaaggaagttgaaggcatagcaaaggaatggttagaatgattgatcatagaatttaaggtgggcaaaaacaagaggacaatgggggagagttaatagaa

SEQ ID NO: 674849 - DNA, 617 bp, Homo sapiens
ggaacagtatttaccagatgtcctctggccacttctactttccaacacagaaccctcctgaactttagacctatattttctagtatttcctcaatgcccaccagcatctcatccttcttcgcaaagccaatccccattgaaaagtgtttagaaggtggaatatcagggatcagagactaacagcaggagtgaagacaaggaaggtattgaccaattgaaggctgtaccgtcctttaaaaaaaaaaaggcatgtaaggcgagaaaagctgtagtttttaaagtaaagatgtgctttcagaaatatttcctctattaaatttctacrtctactgtagacttgaactcttaagagctaatgctgtagtatttatttctgtgtccgagtacttacagcagtgtctggcacaggtaagggctatgaacaaatgtttatatcattgatttgaatgcactttcaaatggggccagcaacaccttcccacaaggatttatcacaaacattccctagtcacttttgcttaggcaataatttcatcagttaaataagggaattgggtcacattctgggacaagcagcataaaactttcctcaattgcaccagactagcttattacac

SEQ ID NO: 674850 - DNA, 645 bp, Homo sapiens
taagaacttcatttgtcccttcaactgaaaaacgaacatctattctttgcctttaagactcttgtatattttatatgtttttcatatacagtagaaaataagcttataagaaactamacataaattaaaatataccaatgtacattagaaataaaaataaagttagtatttatttatgtgaaattaaactttcttttatccaaggcttagaaatgaatgtcttaaacttgaaattcggcaagataccaatgttgacaggattttattgacacattaaaaacagtgttaaaattataatctagagtagtctgattttactaataagctataataccactctctgtttctcttcattattttcttttataaactaaactgaacttccacaagtttttatgtagactccagcgtttgttataagttatcgcagagatttctcagaagattacaatataaacaatacacatacatacacgtgtatattgatagctgttgtggtggtgataggggggtgtttaatatcctattttccatctcacctaggtttgaaaatgacacagtattaactccttccttacaatatgcttttatctagaaataaaaatatatgttgtatggaatttaagaggatgagaaattgttatt

SEQ ID NO: 674851 - DNA, 645 bp, Homo sapiens
taagaacttcatttgtcccttcaactgaaaaacgaacatctattctttgcctttaagactcttgtatattttatatgtttttcatatacagtagaaaataagcttataagaaactaaacataaattaaaatataccaatgtacattagaaataaaaataaagttagtatttatttatgtgaaattaaacttwcttttatccaaggcttagaaatgaatgtcttaaacttgaaattcggcaagataccaatgttgacaggattttattgacacattaaaaacagtgttaaaattataatctagagtagtctgattttactaataagctataataccactctctgtttctcttcattattttcttttataaactaaactgaacttccacaagtttttatgtagactccagcgtttgttataagttatcgcagagatttctcagaagattacaatataaacaatacacatacatacacgtgtatattgatagctgttgtggtggtgataggggggtgtttaatatcctattttccatctcacctaggtttgaaaatgacacagtattaactccttccttacaatatgcttttatctagaaataaaaatatatgttgtatggaatttaagaggatgagaaattgttatt

SEQ ID NO: 674852 - DNA, 1515 bp, Homo sapiens
gttctgaatagagaagcaagatagggcaggaaagttacatcatgacatgtcccacctaaaaccctttagtggctcaccatttagggctgtgcatgatttggtccttatctacctctctaaatttcatgtcttgtggtctttatcctcccactcaacactccacctccaatacctttgtacaagttgctatcttattttgctcctctcccttttccaactcaaagccggttaaaatttatttattcttcggatatcagtaaacaacatgctgaaatagatttgcttcctattacaccattaggatagaaagggagatagatagctagataatagaggtatcagttatacagtatatttaattaatcgggcatacaattattgtacaaacatgccaatttatcagatagaaaacagctttggagaaacaatttcttttttaattttaatgctttaatttttatttttattttaatagagacagggtctcactatattgtccatgctgctcttgaactcctgagctcaaacgatcctcctgcctcggcctctcaaagtgctaggattacaggtatgaaccactatacctggactgaagaaacaatttcttacttaatcttactatgtgacagaatctcggaacagtacagctgggaagaagttatattttaaacagaatgacaatattattgtgttctcgttggagtttgtcattcaatattgtcattgagtattctcactattccatacaaaatactacagaaagtttgttggagagcaggtatagtcttgtactgaagctcctatacaaagtacatggtgatgatgtggctgactcaaatggcttgaacgttgccatcttagaataggcagcagaacaagatatgcaatgcaacttctttctcgatagatatttttgtgtgctgaaaataaatgattcagaggtccctaccactgagttggatgatactttattattaagtacttaatgcggtcagatcattttaatctctttayacaaaactgaccctgaaggtttgcaacaatttgcaattagtagcagatagtttaatgagaataaaaccgttttttaaacaaaataagtaccagatactgctaaacattttttaaggaaggcatgatatatgtatataaaggttgttcattttatccacttttttccacagtgtatatcatatggtgttattcaatcgtatttgttaaatgaaagaatgaagagtgattggttctcatagaaatcaggaacatatggatataataacttgcccaagatcacacagctagtaaatggtggactatagtcatgtttgatgctcaaaatattctagattttttccaaaatgcttcactacgctgccttcctattatgtgttcatcagataaaaataatgacgaattggtatattgtcttaatttatgaaatatttcatttaaagtgtttgtatatcttaaaattatcaaatctgctttgcctgtcactattatcacttctttata

SEQ ID NO: 674853 - DNA, 894 bp, Homo sapiens
tcttgtctttttttctttctttatgttgcattttgaatggatgttcctaattttaatgtggttgaatttattagatttttaatttatgatttacaaattttgtgtcacatttaagaaatcattacttcccacatggtaataaagatattcttctatattgtgttaaaatgctttctagtttagaattatgaatattttgtagtttataactaattttaatatatcacgtgaagtagaggtccaattcatttttctccacatgcttaaccaatagtttcaactacattttgtgaaatcttatttcctactgacaggattttcataaaatatgttcggtcatagatacatctgtttctaaaatctctgctcgattattttagttaacttatctattcctgcactaagactaaaaagccttattttacctttatgataattatagattgttcctctttggcaataccttggctattgattaaacaactaaggctctttccatggcttgcctctgggatcctcaaaacgtggctagaaaatgaggagaagaaagtacagagggtgcagaaaagacatattgactcctaactaatatggaataaaagtgacatatcatttaatcttgcattccattgttgagaatagtcacatgggcccacctaggtccatctggttggaaaaggtagtttcttattgctcaaagaaaaagaaattatttcagtgactatctgggctattgcctaggaaaattttacrtctgactaattaaatattctgtaaatgtttgttagggctttctggtcaaaacttttaggattgaaaacttttaatagaaacataaattattggtccaatattttaataattattgaattatttcagttacttcttcattca

SEQ ID NO: 674854 - DNA, 2659 bp, Homo sapiens
attcccaggctgccaactagaaccagcccccactgctgcctctgacgtacacaacttgacacactcctacggccaatgccaccgacccacattctagcatgggctgagccctggcctcggctcaaagcatcatgtttgcaaaagagcatgaggaagactctctgagaggttgggatggaagacaaacaggttgaatgctgctttatgcaaaccaaaagctccacctctgtgaatttctgtttttgaaaaattgtcacctccagaaaaggaacagggagctgcaagtgcgtcacttgtgttggcctcccccaagcctcaccactcttctggaaggaaaagaagagaaatccatgcaaatggtctcatgccatctgaaacctggaccctgccaggtagaatgcctagggctaggagcagtgatttaaatttcataaccccaggacacagggtcctccatctgcagctcccaggagtgtccttgccatgcgctttgggggtcttttccttcacagtccaccaggctgcataggactttgatttgaagctataaataaggttggaatgcacatgaaatctaggttccagaacatgtagcaatctgccttctatagaactttatttttagacctcatttactaaaaggagagattcctcgtagcatctctaaagtacagctaatcctatgagagcccttttcttctttcacaaaagatgtttatagcaggaagcagagatgtgaggctggtagaaggcccaactctgaacccagcaactaaataaaaataatgataataatggcaatgattaacatttaataagcatttacaatgacaggcactattctacttgtttcacatacattacctcatttaattctcaaacagcccaatcaagtaggtaatattattattcccattttatagatgagggaactgaggcatagagagattatgaaacttgcccaacatcatatacctagtaagtggccagaattcaaacctaggcaatctgtcaggcttgacatgttcgtttttagccagccactgcctctcaacaaacagagcactgaggctgtgctgccctgggctcagccattagggagcaccacaggccaactcaaaggccagcaacacctctgctgccagatctttcctcctctgagtgtggtctgacaatcagcagcattggctgtgaaacacccaggagtctgttgaaatgcagaatctcaggctctaacccagacctccaaaattagaatctgtattttagcaagatcccctggtgattcatttgcatattaaagtttcacaagcactactctagaaaactgaactttacttctagtctctgttacaagttgcctttctttgcttctagtttgtttgtactaaactttctctcttgagcatccatatttctgcctcccctttggcctgctagaaatgctctgcttcttccaacttccctcccgagtcaacccgggaagggagggctcaggacagccaccacacggaggcaatagacagggatgtgaggagggtccccagtatctccagactccaggcagccagagaatgcagagaatgagaagccaccactagggtactacctttgaggcctgccaggtgacagctgtccctcacatttggagcagtgctgcgactgggcaaaggctcagtgggcaggtatatgcattctttcaccagagagaaccttgggccttctgtggtcccttagaaccctcctctttactccaatttctctttactccaatgaggggactctgaaggaaactggcctgggcattggagatggtggtgttgggggctggcacttcacccttggcagctcttagctgagctcacatggccaaaattcagagcacatggtcctgggagagcaaagcttaccctttggattagacaacatgtgcaactgaattacattattatgtaagtgctctggagccagaggcaggcagaactggagaaaaccagactgggatttccaaaaatatagagaggacactataactcagggactctacaaggctagccttttagaataaaacaagcagatcctttgattaagtactcatatttagggaaggccttctctaggaatggctgatcctgtgttgaggaatattttatttatttgttgttaatggggggagggaggataacagtgaattcttytgggtccaggctgtccttgaccaagttcctctgcttcaaggcaaggttatctaacaacgatgatgataccactggctggcacagattggctacataggatattaatagaaattaatttttcctaagtaattaagagagcttaagccccatggaaaaggataacctaaactcacaatctctggcagggatttatttctaagtatctgagtgatatttagaaatacttaaatattaaattcttattattttaaaaatatatttattctttcctaatttcaaagagaaagatgaaggtttttatcccctttgggcaaacagaaacatttccttggcagcagaacagtaaagtgcctctctcaggtaccaatgtgaatagctcagagaagctcctgtttccctgccagtagactagcgttctcaatccacttcccaacagtccaacagtgttcagctctcagcat

SEQ ID NO: 674855 - DNA, 1836 bp, Homo sapiens
gtgaaaaaaaatgtcctctcttgtggaataaatttttttttttttttttgaggcggagtctcactctgtcacccaggctgcaatacagtggcacaatctcggctcactgcaacctctgcctcctgggttcaagctattctccagcctcagcctcccgagtacctgggactataggcacgcgccactgcatccagctaatttttgtatttttagtagagacagagtttcaccattggccgggctggtctcaaactcctgacctcaggtggtccgcccgcctcagcctcccaaagtggtgggattacaggcgtgagccaccgcgcccagcctaaatttttgatgatagaataaaaagctgtcaaaaacttttacctcatatatgtatcccacatatgccaagagcaatttactttgtttatggcagtgattctgtccaactagaaggtgaactatatgctactacacatgatggtacttgcttgcccacactgggtctagctccatcacctaggctggagtgcagtggcaccatctcagctcgctgcagcctagacctcccgggctcaagtgatcctcccacctcagcctcctgggtagctgggactacagacatgtgctgccacacctggctaattttgtttattttttgcagaaacaaggtctcactatgtttgcccaggctggatccttcagtttcctttgatagggaaattttgctcaatttttccttctcagagcataatacttgtcattaattctgtggatgatttcacaagttcctcagcaatttttgtgactagtacttctttttggcttaagttttggtcctctttttcaagataaaattaaaaattcattcatttcatatcagaaagaattacatttcgtacttgttttaggaaacctgaactggctcaataaatcactgctttaaaaaaatggcatgaagctttgatggctttatgccactatttcacatggtttcattatgaagaaagcactaaggataggggcaagagaattactggccaaatgaaatctgtcagatattcatcatcatattacctgtctacattttccatttatagctgcttatgcaaaaacatcaaactgaaaaaatttgcttgtctaaggacatacagattcacattctacatttttatcagggtcttctttgctatttatgtttataattctatcctaaattatagtatagatgttactattttcatccctacttttatgcttcaatggattacttctgagctactgattcatttggggtttggggttctaatgtaatacaatggttgtaasaaaaacgcacacttaacaactgcaattgataatataaatacacattagctgagtgaactagatatcttataaatgttggctgagacaaacagaacacagtaatgattaggaatgtaatgggacagctgggaaaatcatcgctcatcttaacatttcaaatttgtaacatgcatatgaagaataacattttaaaaaacttttcctttgatacaatcaaaatgcctatgtactagtgcatggaccctcaagactacagtctaagaattccactctagaccaatctgacttggcaataacattgctgaataataaaagtgcataagaaaatgaacatcgagttcatttcatcattcagagagcaggtgcccctcctggtacatgagaataaaccatacaccatagactgagacctgcctttggaaacataggcctacctgagggttctcctcccgttttggtttgggtgcagcaggtggggtgatggtgcggctctctgtttgtttctcatctgtttctgtg

SEQ ID NO: 674856 - DNA, 1156 bp, Homo sapiens
tttttccaagcctcttcttccagaagcctcttctcaagcagaagaaacaccagttgattaccatcttcaaacacaaaaggtagctagcatactggtagactgggcttgcattcctattcttaccatgaccaatgtctaactcattttatgaagctctccgtaaatactgaaataattttamaacagaaaatatcaaactataaacacaaacctaatttactttttcaaaattagaaaaaatgtggaagtaatgctcctttcatatggcaacaataattaaataagtgagaataaaactgattattgatgggcaggggctacatgagactttggtcctacaaacaagacatctaaagctctcaaaaatcattatgctggaaatattttactagatctgaaaaacacaagcacatagatctttgattttctttcctggccacttccatattttccttctgcttttatatgattacataaagaaagcgtaagcatctgccttatcaatactgtggcaaccagtgctctggggcacaaatgcggctttgtaattttcccccactggtgttctctcgtatttccccctttatactaaacgctatgtaagagtgggaattgttttatgcacctcttgtttttgcatccctttgtgcctattatggtacttcatgcagagcgggtgtatagtaaagagttgattgggcttctgggtgaagagtatgatctaagcgagaatcactcaagtctttctctctccaacacacacacacacacacacacacactttttaatcaaaaaggacacatttcctccataaaacaaaacaccagtgggaaagtagtttacagtgacattttaaagtcctggatgcccagaaatcttattttcatgtctctttgaataggaaggagagaagtatgatggaggagggagaaaagaaggtcaactataagggtgtgctgttccattccaaggctgtgtgaagtctcttggagtctcttacttccatttctaaggctgagtaaagcaattagcagcagtgcttttaaggaagggcaaatcaattcctttccactaaaaaattacccatggttcaaatttctctctctcatgcaagaaaaagtacaattatctcagtgttatataaataataccaaaa

SEQ ID NO: 674857 - DNA, 1300 bp, Homo sapiens
catgattgttttaattttagaaatagtccttttaaaaccaaatttttcaacttttactattttcatttaatactatttgaaacttctggccagtgtacttttttttttttttttttgagacagggtctcactttgttgcccaggctagagtgcagtggcaccatcttaactcactgcagcctcaactccctgggctcaaaggatcctcccacctctgcctccggattagctgggaccacaggcatgcgccaccacactcagctaatttttgtatttttagtggagacagggttttgccatgttgcccaggctggtctcgaactcctgggctcaagcaatatgcctscctcggcctcccaaagtgctgggattacaggtgtgagctaccatgcccagcccagtgtactttttaaaatataaaacaagacgaaaagattaaaaatgcatattacctatagatcatgtaataggataatgtggcagagaaaagatgaatgaataaaaaccaattgcatttctatggggcaataaataaaaggagaataaaataagaaaaatacatacacattttttaaaaagtactgtgtaggagctgtatgaaaagagtggccctttactgggagattcagaaggagagttgaataaatagaaaggttgagctctttttttgttgctaaaatttttagttgtaatttagacacaatggaatgtatctttcaaagtataattttcagtgagttgtgataaatatatatacctatgtgaacattacccaattaagatacagaacatttgtgtcacaccagtcatcttcccatgtttccaggcaggctctccgcctaccccagctgattcttattaccatcacttagttctgccagttctaggttttcatataaatggaaccagacagtatgtacttttatgtctgactttttttgctcagcatgaaaaactatattcttccattaaaggttgaataacttaaacaaaaaaaaaatttttttttttttttaatggactcaagcgatcctccttcagccttcccagtagctgggactacaggcacatgccacggcacctggcagctaggctgaataacataaaagattggtttttctgatattaatatcaagttcaaaattttaaaatttcacatgaaaattcaactaggaatatttttggaattttacaaattgttttttatcagaataaataagaatgattgagaaacttaaaaaaataaaaaaaaggtggtagtggtggaacttgccctgccaaatacgaaaatattttaaaa

SEQ ID NO: 674858 - DNA, 547 bp, Homo sapiens
attttcaaataacaagttatatatttaggatcaactatgtatatagtaatttggtaaatgggaagaaatacaaaagaggaataacatgatctctgtcctcaagaaactgactctcttaggacaagactcatttgaaataaggagagaattctatctagcaatctccctactttttgcctaggtaaaataattttctggaggattttttaatatatagaaatctataccataattgttctcttcattttttaaaaaagctttgtaatgaaagttttaaaatatttacacaagtagagaaaatactataatgaacgctacccccatacccagtcttccagattcaacagttatcattattttgtcatgcttgttttgttgatccttctgtttgttttcctttcttttccattccttcctctctatttccctccccgttttgcctcccttccckcctgcattcctatatttaaaaataaatttatgatgttgctcatttttactccacacacattgtattagtccattttcacactgctataaagataac

SEQ ID NO: 674859 - DNA, 609 bp, Homo sapiens
caaaagttactgtaaatctgctgtgttggtcttgtattacaatctttagattacactactattttatttcaaacaggactggtagaaacttcttcatgcctttgcaaccaaaggcctttagtcctataaaactgatcaccttgttgcttggccaagtaccaaccttagaaagttatgcagtgaacaccatctgacttagattagttgaaaagtaactggatcaatccccctttaccccaaacatctaaacggaacaattttcttttcttcaggatgcagcrtaatcctcaaactgcagagccacttggtgatgaagccaggatcgcagtgcatttgacaacttaatgcaactttttactagcacttaaaactcagatatgaaatctatacttgatcttttctgcttggaattggccagattagtggttctgccccggcatacaacaaaaggctctcagaaacactcagggtcgctaaccaattaggagaaccaacagagctcgacaaacagacaagagggagaagggcaccgccttccaccccgcccgcttagacagcctttcaactctgtccactttgaggatgtgtaggatgatccaggtaatcatg

SEQ ID NO: 674860 - DNA, 609 bp, Homo sapiens
caaaagttactgtaaatctgctgtgttggtcttgtattacaatctttagattacactactattttatttcaaacaggactggtagaaacttcttcatgcctttgcaaccaaaggcctttagtcctataaaactgatcaccttgttgcttggccaagtaccaaccttagaaagttatgcagtgaacaccatctgacttagattagttgaaaagtaactggatcaatccccctttaccccaaacatctaaacggaacaattttcttttcttcaggatgcagcataatcctcaaactgcagagccacttggtgatgaagccaggatcgcagtgcatttgacaacttaatgcaactttttactagcacttaaaactcagatatgaaatctatacttgatcttttctgcttggaattgrccagattagtggttctgccccggcatacaacaaaaggctctcagaaacactcagggtcgctaaccaattaggagaaccaacagagctcgacaaacagacaagagggagaagggcaccgccttccaccccgcccgcttagacagcctttcaactctgtccactttgaggatgtgtaggatgatccaggtaatcatg

SEQ ID NO: 674861 - DNA, 647 bp, Homo sapiens
ggtcccagcagagctccatcgaggaacctctgccttttggtttccgctcttataccataaatgaatgcccttttcttggtcgttttggttttttttttgagacagagtctcactctgtcaaccaagctggagtgcagtggtgtgattgcaacctctgcctctcaggttcaagcgattctcctgcctcagcctcccgagtagctgggactacaggcctgtgccgccacacccagccaatttttgttttttggtagagatggggtttcaccatattggccaggctggtctcaaactcctgacctcaggtgatccacttgccttggcctcccaaagtgctgggattacaggtgtgagccaccatgcccagccagggttctcttaaatataatggaaagaggagaattggaatggcagagagagagaactaggaccctgaatgaatgaatcaagttgagttggagagaaactgtatttataggaaagttaaggctctgagtttggaggccaagcagggtgggggtgagcaaagccgtgagaaggaaagcagggcttcaaaaagcagctgctccttcttgatagacgcagagaggaaacagsaaagaccggggtccatgcagtcttatttgtagcacttgaataacttggtg

SEQ ID NO: 674862 - DNA, 2696 bp, Homo sapiens
  misc_feature 1324, 1325, 1326, 1327, 1328, 1329, 1330, 1331, 1332, 1333,1334, 1335, 1336, 1337, 1338, 1339, 1340, 1341, 1342, 1343,1344, 1345, 1346, 1347, 1348, 1349, 1350, 1351, 1352, 1353,1354, 1355, 1356, 1357, 1358, 1359, 1360, 1361, 1362: n = A,T,C or G
  misc_feature 1363, 1364, 1365, 1366, 1367, 1368, 1369, 1370, 1371, 1372,1373, 1374, 1375, 1376, 1377, 1378, 1379, 1380, 1381, 1382,1383, 1384, 1385, 1386, 1387, 1388, 1389, 1390, 1391, 1392,1393, 1394, 1395, 1396, 1397, 1398, 1399, 1400, 1401: n = A,T,C or G
  misc_feature 1402, 1403, 1404, 1405, 1406, 1407, 1408, 1409, 1410, 1411,1412, 1413, 1414, 1415, 1416, 1417, 1418, 1419, 1420, 1421,1422, 1423: n = A,T,C or G
caacttaggagaacaggctcaacccacagtcattacaaatccaccatctctatgaaacagtctgggctcaataaatgtttactaaaggatggacagttggaaagaattgattccacgccagtgaccccttttaaactagcatgtgtctgagacagccttgaggtgaaggaatgggttttgaaaatggattatcgtgatacggaaaaagctgtaactctagtaagtgcagtcaagatttgtttctagaaaacaatcctcagcatcttggtcagatcaagagcacttcattcatgagtagtggtgtaggctaatggaatatatacccacatgcctcgggcctaaatgataccaacttagtttcagtgcttttaatcttttatgttttcataaacacctagttggtgcatcatatggcaattttccttatgagtactgtccatgggtggcaggtgacttatgaatcataccagtaatgaaactgtaagattcaaaaaaaagttcatgatataaagaagtagtttattatcctttacttcaccaatgctttcaaatctcgattttaccttaagaatcagacaagctacctcctgagtcacctgaaaactactgcgccacccttggctctctgttcatttgcaaaacacctggtcaccaagaaaccaaaaggcccttaaattctaccatcagcaaaacctttttttcaactaatcttaaatatcatttcctgcagagccaagtacataacattaatagaaatttatagacatttcaagctgtgtctatagataaagaaaatattgaagaagtcctttctccttcctgattttcacatcaggtgctgtataccaccacagcattcatcaagatttcacccaaagtaatttttggagattaattggctccctcaatttcttcttgggattatgctgtaattttcttccctttcttaattataactcagctgtgaaagcatttgtagatggatatcatggaagtacaattcaatcttttatatatgtgtgtgtgtgtgtgtgtgtgtgtstctgtgtgtgtgtgtgtgtgtgtgtgtatttttaaattatggagatgaggtttcactatattgcccaggctggtctcaaacccctaagctcaagtgagcctcctgcctcggcctcccaaagtgctgggattacaggcataagccactgcgcccggccttgaaatcccattttcaaccaacatttattcctttcattttattttttggatgaaagttataaatgccctacaaacaaaataacctacttgatacattcttactctaccacagcattctaccagnnnnnnnnnnnnnnnnnnnnnnnnnnnnnnnnnnnnnnnnnnnnnnnnnnnnnnnnnnnnnnnnnnnnnnnnnnnnnnnnnnnnnnnnnnnnnnnnnnnnaaaatatcaatagtagtaaccatggttttgttagtaacactagtaatggtcaccatttactaagggcttactaaacccccaagcactttgcaaatgtttcacaagcttttttaaaaaataagctttcatttttgaatcattttaaatttgcagaaaagttgcaaagatagtacagagtccccgtatgctctttggccagcttcccctaaagttaacatcttacaaaaccatgatatatctgtcaaaacaaaaaaattaacattggcatgatactattaactacagatttgatttggattttagcagttttataagtattttatcttcccaagaaccctacgaagtaagtaccattctaaacccaatatgatggaggatgctgaggcttaataagaatcaatcacttgcttatattaacagtaaaatgccaaagactagcaagacttagatgatgattttggttcctccatatctggaggctctgcttaatccctacaccataagcttacctagatatcatcattcccaatttatagaacgagaaaccctgacaagaagcgagctacctgaaggcatgctgcatcaaacctggatgtgtccgagtccaacgtcccagttgcactctggccacaccaccgtctccctccataacacaagagagatgaggagttgctcagggcccatgcaaagcccctgaaacccatgaggaatgtcgtgaaggctgtgatgtggagggaggggatcacagccctcgaaacggactacttgttccggggctactggtaaacctgagagctctctcgtggctctcgtcaggtaaaaggggcacagggagccaactcaagagtgccttacaaggagcatgtctagaggaatgagtggcagaaggagcagccaccaactactctaaatttagctacaaccaaaccactgggatccttgctttgggcctctataaggaactcttttaaaacattcttctcctgggggatcctgtagctcagtcctttctagcccctagattttaccacctgggcaacaaaagaggcaggagtcgttaacaacctcacacagacctaagaagaatgacacaggccaaacagacagagacctggacgaacttatctggacagcccataacaagccatgttttgcacttttcttccagccttcatttcctttttggcactccatgatcccctccaggtgtttctgatgcacactacggtttgagaacctgtgacctagaaatgtattcggaagggtctctgta

SEQ ID NO: 674863 - DNA, 2696 bp, Homo sapiens
  misc_feature 1324, 1325, 1326, 1327, 1328, 1329, 1330, 1331, 1332, 1333,1334, 1335, 1336, 1337, 1338, 1339, 1340, 1341, 1342, 1343,1344, 1345, 1346, 1347, 1348, 1349, 1350, 1351, 1352, 1353,1354, 1355, 1356, 1357, 1358, 1359, 1360, 1361, 1362: n = A,T,C or G
  misc_feature 1363, 1364, 1365, 1366, 1367, 1368, 1369, 1370, 1371, 1372,1373, 1374, 1375, 1376, 1377, 1378, 1379, 1380, 1381, 1382,1383, 1384, 1385, 1386, 1387, 1388, 1389, 1390, 1391, 1392,1393, 1394, 1395, 1396, 1397, 1398, 1399, 1400, 1401: n = A,T,C or G
  misc_feature 1402, 1403, 1404, 1405, 1406, 1407, 1408, 1409, 1410, 1411,1412, 1413, 1414, 1415, 1416, 1417, 1418, 1419, 1420, 1421,1422, 1423: n = A,T,C or G
caacttaggagaacaggctcaacccacagtcattacaaatccaccatctctatgaaacagtctgggctcaataaatgtttactaaaggatggacagttggaaagaattgattccacgccagtgaccccttttaaactagcatgtgtctgagacagccttgaggtgaaggaatgggttttgaaaatggattatcgtgatacggaaaaagctgtaactctagtaagtgcagtcaagatttgtttctagaaaacaatcctcagcatcttggtcagatcaagagcacttcattcatgagtagtggtgtaggctaatggaatatatacccacatgcctcgggcctaaatgataccaacttagtttcagtgcttttaatcttttatgttttcataaacacctagttggtgcatcatatggcaattttccttatgagtactgtccatgggtggcaggtgacttatgaatcataccagtaatgaaactgtaagattcaaaaaaaagttcatgatataaagaagtagtttattatcctttacttcaccaatgctttcaaatctcgattttaccttaagaatcagacaagctacctcctgagtcacctgaaaactactgcgccacccttggctctctgttcatttgcaaaacacctggtcaccaagaaaccaaaaggcccttaaattctaccatcagcaaaacctttttttcaactaatcttaaatatcatttcctgcagagccaagtacataacattaatagaaatttatagacatttcaagctgtgtctatagataaagaaaatattgaagaagtcctttctccttcctgattttcacatcaggtgctgtataccaccacagcattcatcaagatttcacccaaagtaatttttggagattaattggctccctcaatttcttcttgggattatgctgtaattttcttccctttcttaattataactcagctgtgaaagcatttgtagatggatatcatggaagtacaattcaatcttttatatatgtgtgtgtgtgtgtgtgtgtgtgtgtstgtgtgtgtgtgtgtgtgtgtgtgtatttttaaattatggagatgaggtttcactatattgcccaggctggtctcaaacccctaagctcaagtgagcctcctgcctcggcctcccaaagtgctgggattacaggcataagccactgcgcccggccttgaaatcccattttcaaccaacatttattcctttcattttattttttggatgaaagttataaatgccctacaaacaaaataacctacttgatacattcttactctaccacagcattctaccagnnnnnnnnnnnnnnnnnnnnnnnnnnnnnnnnnnnnnnnnnnnnnnnnnnnnnnnnnnnnnnnnnnnnnnnnnnnnnnnnnnnnnnnnnnnnnnnnnnnnaaaatatcaatagtagtaaccatggttttgttagtaacactagtaatggtcaccatttactaagggcttactaaacccccaagcactttgcaaatgtttcacaagcttttttaaaaaataagctttcatttttgaatcattttaaatttgcagaaaagttgcaaagatagtacagagtccccgtatgctctttggccagcttcccctaaagttaacatcttacaaaaccatgatatatctgtcaaaacaaaaaaattaacattggcatgatactattaactacagatttgatttggattttagcagttttataagtattttatcttcccaagaaccctacgaagtaagtaccattctaaacccaatatgatggaggatgctgaggcttaataagaatcaatcacttgcttatattaacagtaaaatgccaaagactagcaagacttagatgatgattttggttcctccatatctggaggctctgcttaatccctacaccataagcttacctagatatcatcattcccaatttatagaacgagaaaccctgacaagaagcgagctacctgaaggcatgctgcatcaaacctggatgtgtccgagtccaacgtcccagttgcactctggccacaccaccgtctccctccataacacaagagagatgaggagttgctcagggcccatgcaaagcccctgaaacccatgaggaatgtcgtgaaggctgtgatgtggagggaggggatcacagccctcgaaacggactacttgttccggggctactggtaaacctgagagctctctcgtggctctcgtcaggtaaaaggggcacagggagccaactcaagagtgccttacaaggagcatgtctagaggaatgagtggcagaaggagcagccaccaactactctaaatttagctacaaccaaaccactgggatccttgctttgggcctctataaggaactcttttaaaacattcttctcctgggggatcctgtagctcagtcctttctagcccctagattttaccacctgggcaacaaaagaggcaggagtcgttaacaacctcacacagacctaagaagaatgacacaggccaaacagacagagacctggacgaacttatctggacagcccataacaagccatgttttgcacttttcttccagccttcatttcctttttggcactccatgatcccctccaggtgtttctgatgcacactacggtttgagaacctgtgacctagaaatgtattcggaagggtctctgta

SEQ ID NO: 674864 - DNA, 578 bp, Homo sapiens
ttgttcttgccacataggctatcctgaccactgaaatttgtgtgcacccttgtgaggatttgggggaaatggaggagctgcttccagtcatgttaattcttttctcatatatctttcacatggattctgctggttcagtgacctttataatgtagttggtcctcaaaggtctgccataggtcactgtatgtgctgtatgttagaaatatttcacaattaaaatataagtgttattaaaaagaaagaaaacctatgataagacttcagaaaagatacactgctccaaaataggtggattctaggcaaagtagttatgagaatcatttgtcatttctatatttcaaatctatcctcaagtcctcastcatttttatcttattgtttcgtagcgtttacaaccccaccatgacatcctatccaggttatcccaccgttacattgtcctgtactataaaatttattctacagtttttgttttccttctgtgagtccaaactcttatatcctaatatttaacatttcctgatttgaggtcttaacatttaaatcctcatgactaaatttgaaattcccattcc

SEQ ID NO: 674865 - DNA, 578 bp, Homo sapiens
ttgttcttgccacataggctatcctgaccactgaaatttgtgtgcacccttgtgaggatttgggggaaatggaggagctgcttccagtcatgttaattcttttctcatatatctttcacatggattctgctggttcagtgacctttataatgtagttggtcctcaaaggtctgccataggtcactgtatgtgctgtatgttagaaatatttcacaattaaaatataagtgttattaaaaagaaagaaaacctatgataagacttcagaaaagatacactgctccaaaataggtggattctaggcaaagtagttatgagaatcatttgtcatttctatatttcaaatctatcctcaagtcctcactcatttttatcttattgtttygtagcgtttacaaccccaccatgacatcctatccaggttatcccaccgttacattgtcctgtactataaaatttattctacagtttttgttttccttctgtgagtccaaactcttatatcctaatatttaacatttcctgatttgaggtcttaacatttaaatcctcatgactaaatttgaaattcccattcc

SEQ ID NO: 674866 - DNA, 1528 bp, Homo sapiens
tcttgacataaaatggaacattattcctaatgagtgtgtgtgtttatgtgtcaataagtaagtttatcatgatcacctgtggaaattttttccattatagagtcttttgggaatagggaatatgagttccggtcagtattataaattgagagagactctgagcagagaaccactggtagagaagaaaatgtcaaaataaaactccaagcattgattatacttgtatacaattttataccaaatagaatttataaatgaagaacacatattttaaatgaagaataaattgatgggtcaaatctgattggacagtgattactttactttgtgtgaagaaaagctaaggccaggaactcactctttggatagaacacagagaaactaacaggcaaaataccttttaaactttaagaacaagaaatagactttgttagtttagatttcttggtagataatttttagcctgtcagtaacgagtgtaaaattttgtctagaaaaaaaaaagtyccagatactcaggaaactgaggcagtaggattgcttgagcccaggagttccaggctgcagtgggctatgattgcaccacttcattccggcttgagtgacagagcaagaccatgttccctgaaaaaaaaaaatagtaacaaaaaaactgtaaagaatttataaataactaccaattgtcagtgactgagggaaaaaaagaatatggactaatagtcttgagctaggagactaagtggatagaaaagacatgcatctgagggcagtttgagaagcatgtcaatgccatcctagccctttcgattattgacccatagagagagaggttccaatgcaggtgaggtgatacatagattaatatccacacaaatgctatatcttacacaatatcacactttgctaacgctgcacataatcaagaggtacccataggcagcaagatgtttggaccaccgtatgtgactctggatttttctttcctgtaagagtcttctactttctgactgagtgtacattgtgttgctaaagaggtatgcaggttaattcataccccagttaggatgaatttaggttatgaaaatccccatttcatacctcagagcttacataacattctctagagaaccatgcttcataaatcaatagatcatatatttgtttattgtaagcaattctcaaccaagatcatcttgcaaaaagtattccatgtattaggactctcgtagcagatatcattagtctatatacgtggaggtcagctatcagcatggttacaaggatattagtcctgttatctgcttcttttcttctcacaggagcacttcttcaataaagacaggaatatttcacaggacaattattttaattccttgcgctgtagaattcaaagttctagtgaatcaatttttcagttgaatcacgaaggaaaggatatattagcattttccacacttacagtgccattaagcctgttttacattctgtcatgttacactttgtattgttacactttgaagctcagaag

SEQ ID NO: 674867 - DNA, 621 bp, Homo sapiens
gaaatttgtaaaaacaaacaacaacaaaatatgtgtgaacaaataagatattgtagactactgttttacagctgtagatttctttcccatgtattcattctagaatataaccattacattacaaaattggcataacttttagataatagccttatgccactaaaaagtaaaaagaaaaaacagaaattatatktgtactaataatcactttcaatatttttgacactgtgtaaaattataatccatgagcttttcatgtatttctaaaaccataaacttcaaatttttttcttaaggaatatttaccttgacaagtaataaagtgctcacaaacatatttgatagattcacaaactgttaagatgtcattctttatgactatttaggttttcatacacaaaaaccaatgttaagcactaagtttttctaaagagctactgcacagcaaaggaaactatcatcagagtgaacaggcaaactacagaatgggagaaaatttttgcaatcggcccatctgataaagatctaatatccagaatttacaagaaacttaaacatatttaaaagaaaaaaaacaaccccatcaaaaaatggacaaaggatgtgatcagatacctctca

SEQ ID NO: 674868 - DNA, 621 bp, Homo sapiens
gaaatttgtaaaaacaaacaacaacaaaatatgtgtgaacaaataagatattgtagactactgttttacagctgtagatttctttcccatgtattcattctagaatataaccattacattacaaaattggcataacttttagataatagccttatgccactaaaaagtaaaaagaaaaaacagaaattatatgtgtactaataatcactttcaatatttttgacactgtgtaaaattataatccatgagcttttcatgtatttctaaaaccataaacttcaaatttttttcttaaggaatatttaccttgacaagtaataaagtgctcacaaacatatttgatagattcacaaactgttaagatgtcattctttatgactatttaggttttcatacacaaaaaccaatrttaagcactaagtttttctaaagagctactgcacagcaaaggaaactatcatcagagtgaacaggcaaactacagaatgggagaaaatttttgcaatcggcccatctgataaagatctaatatccagaatttacaagaaacttaaacatatttaaaagaaaaaaaacaaccccatcaaaaaatggacaaaggatgtgatcagatacctctca

SEQ ID NO: 674869 - DNA, 617 bp, Homo sapiens
ttgagcaaatgttttccattaggcaccagtgtgagaattttgcctgcatgattaattttcaaaacaaccctgtgagggttttgttattggattatgcttagagataatgaaacccaaaatgagtagaaccagaatttgaaagcaggcaggcatagccaacaagataagttaattctcagggtttttcttaaatgctacttgccaataggtaacacaaatattttcttatgctttatttcataagataaatcagtggacaagcatttagtaattaccaatatgttgttattgctgagaagaagattaccaaaagaataaaagcataatgattgacatacataaacatctattataattgatgaaatgaagcaaagtgaatgccttagatttatactctccaacagggcaacacattattttttgctatcacaaacaggcaagaaagagcacagaattaagtatttatgtattacctcattcatctctttattccaatgttatatattaagtattttaagagataaagagatattgtactcagcttgaacataccttggtaacataaggcaaagttccgtccaatagaaatygagcctcagagaagagagaatagacag

SEQ ID NO: 674870 - DNA, 3407 bp, Homo sapiens
ggggcaggagaaatggagtgtcccaggccaacagatgcaaggcaattgattcagtcgcttactccagcccctgtctagaatgacctgctaccaaagagcccttctggaataagtggagagcagaatgcagtgccgtggatcaacagagggaccagagactgggtgatagacttgaagcctggtcattcccatagtctaagatctcaggatctctcccagtttatcccagtctcaccctccacccaccaccattagaatgatgtgggaggaagggaagatgagaggaggaggactgaagagatgagtcagtgaaaagtaggtcagactcctactctcctagcagaatcccaagtgtggaaggagctgcctgatgcaagctgaggaatcccctgtattcccttagcacattgttgctcagcctttgtttaaacccatccaagacagggaatgtgctacctttcaaggctgccagagccatttcctccttgagctacccactgcctcactctacacgtagggaagtgtcccatccccctaattttaaactactccaaaatccatacaataggtctgtgttccaaaacaccaaaatgtatgagaaatagtgtctccaaataaggtttgaaaacactgcaagactatatgcaatttatttcctacagtttgatgactttgctgaaactgaaccatcaaccattttaagatctctgataagattgcaaaggactgtgcacttaagaaacaacttagaaattcacaaaatgtttgggattcaaagggagaggcttagcaatcctctaattgggcatttatttacaaaattataaacctaggcaagcttttatataaaatattaactgggattatatcaaaagaagcttccatgctcaaccaagtttgggacatgttaggtcaaatgtctagattgcaggacttctcagagcctttgagatgatgattccctctgtaatactctaagcaggactagtgcagaatgtctccctagctcccttaattatggaattattattttgtaggttattacctggactgattgtctatgttatactctttgagaaaagctgatctaagctgatctaccatcactgcaaccttaaaatcattaaaactttctgagacttggttgctttctgtgctatttctgtcctaccaatgaagaccaaggtggtgtaactgtggaaaccctgagcaggcacacaggaggcacagggcactcacgtcgcctttctttcccagtcagtgacagccacgtgcttaaaagaaacccatctgtttaccagcccaggttatgagccaaatgctggtcccagtgacaatctcatatctattttctcagccttcaacaaataagaaagaaaaatggccttttaacctcagctgacatagcaatgggacctggaaaagcaatggatgagaatctgtctgttcaatgcaatattttcctacagagataacaaccaattgcatttcctttcttaagagccagtgatgaatgtgactgatgggcaagaaataccactcctgggtaatacattttagggtaaagctatgataccaaactcaccccatcatttctgagaacggtctggcttaagtggatcatcacagaaagtatcagcattctgggaactcaggcatggttttcccaggtaagctctgctctccacagatatttattctgctcagataccagtccgcttacaaagagttaccactgtctactgtatgcctgtccctggtgtgtgtgtgtctgtgtgtgtgtgtgaggagggtgggaggtggagacagacagagacagagagtgagarctggtgctgaagttccacgggcaaaagggctcttacgcagagaaaacaaagagaaggaatagctgcaggtcaactccaaaatcactgggggcttagaaatccgcagactcagcagtacctggaacactgccttttcaacagactcaatccttccttcccttgggcgtgaaacacaaagggtatttctggtattgtataaaggcctatgaagtcagggcacttaatgacaagggatttctcagtttttcgtgggaaatagaatccacattcaagaagttaactgggaagaatgttcatttctgattctgtgctcagctcttgatgtttttgacccaggtgtgtaaggaccagatggcttctgtttactgtagctcacctcaggcaaaacccacaattctgttatgtctgcaccctcaaataaccattataaacaacatagccagagactctgggaccagaccttgcattcagtgattcccctacattaactcacctctatgcagagaagtaggtgctccctgttgaagatgataaaaccaagatacaaagagagtaaataacttggccaaggtccaaaagtaggaagggacaggactggaattcactgtggcattctgactccagaactgctgttctcagtcactatactacactaccaaggttatcatcccagtgcaaaagtgaataatgcaagttaaattagaatttgtgaggaaatgagcactatggactgaatgtttgtgttttccaaacaattcacatggtaaagccctaacccctgatgtgatggtttttggaggtggagttttggggaggccattagatcatgaaggtggaaactctcaagggagatgagtgaccttacaagaagagacatgaaagagatgatctttctctctgccacgtgaggacacagcaaaaagacggccatctgcaaactgaagcaggcccttactaaatggcaaatcagctcgtaccttgatcgtggagaccccagcctcagaactgtgagaaataagtgtttgctgtttaagccatcctgtctatggtatttgttatagcatcctgaactaaaatgagaaaatatttatctcacttactccacagcaaaacatactgatgatccaatgagacaactccttaccagttcctttccagaggcaaaccccttctctccctcttcccattcaacccttcaaatgtccagacaaagccctctcaccttccattcccatgcttttacgtgagagaaccagccctgcaggtagacagacccatcaccaaccttggagaacaacccggatatcattcatgatatccaagtcaagtctattgggagggttcattcaaacaggtcaccaaattgttgattctcaacaacatagagttcttcatacaaaaaggagtctgctgctatgaaatataaagtttcctcatattgttacacagggattatttgatttaatccttataacaatctataaaaaattcataaatgtttatctctgctctgcagataagaaaactgagctagagaaggttgacaaggcatcccaataccaatggagagtggggctg

SEQ ID NO: 674871 - DNA, 3407 bp, Homo sapiens
ggggcaggagaaatggagtgtcccaggccaacagatgcaaggcaattgattcagtcgcttactccagcccctgtctagaatgacctgctaccaaagagcccttctggaataagtggagagcagaatgcagtgccgtggatcaacagagggaccagagactgggtgatagacttgaagcctggtcattcccatagtctaagatctcaggatctctcccagtttatcccagtctcaccctccacccaccaccattagaatgatgtgggaggaagggaagatgagaggaggaggactgaagagatgagtcagtgaaaagtaggtcagactcctactctcctagcagaatcccaagtgtggaaggagctgcctgatgcaagctgaggaatcccctgtattcccttagcacattgttgctcagcctttgtttaaacccatccaagacagggaatgtgctacctttcaaggctgccagagccatttcctccttgagctacccactgcctcactctacacgtagggaagtgtcccatccccctaattttaaactactccaaaatccatacaataggtctgtgttccaaaacaccaaaatgtatgagaaatagtgtctccaaataaggtttgaaaacactgcaagactatatgcaatttatttcctacagtttgatgactttgctgaaactgaaccatcaaccattttaagatctctgataagattgcaaaggactgtgcacttaagaaacaacttagaaattcacaaaatgtttgggattcaaagggagaggcttagcaatcctctaattgggcatttatttacaaaattataaacctaggcaagcttttatataaaatattaactgggattatatcaaaagaagcttccatgctcaaccaagtttgggacatgttaggtcaaatgtctagattgcaggacttctcagagcctttgagatgatgattccctctgtaatactctaagcaggactagtgcagaatgtctccctagctcccttaattatggaattattattttgtaggttattacctggactgattgtctatgttatactctttgagaaaagctgatctaagctgatctaccatcactgcaaccttaaaatcattaaaactttctgagacttggttgctttctgtgctatttctgtcctaccaatgaagaccaaggtggtgtaactgtggaaaccctgagcaggcacacaggaggcacagggcactcacgtcgcctttctttcccagtcagtgacagccacgtgcttaaaagaaacccatctgtttaccagcccaggttatgagccaaatgctggtcccagtgacaatctcatatctattttctcagccttcaacaaataagaaagaaaaatggccttttaacctcagctgacatagcaatgggacctggaaaagcaatggatgagaatctgtctgttcaatgcaatattttcctacagagataacaaccaattgcatttcctttcttaagagccagtgatgaatgtgactgatgggcaagaaataccactcctgggtaatacattttagggtaaagctatgataccaaactcaccccatcatttctgagaacggtctggcttaagtggatcatcacagaaagtatcagcattctgggaactcaggcatggttttcccaggtaagctctgctctccacagatatttattctgctcagataccagtccgcttacaaagagttaccactgtctactgtatgcctgtccctggtgtgtgtgtgtctgtgtgtgtgtgtgaggagggtgggaggtggagacagacagagacagagagtgagaactggtgctgaagttccacgggcaaaagggctcttacgcagagaaaacaaagagaaggaatagctgcaggtcaactccaaaatcactgggggcttagaaatccgcagactcagcagtacctggaacactgycttttcaacagactcaatccttccttcccttgggcgtgaaacacaaagggtatttctggtattgtataaaggcctatgaagtcagggcacttaatgacaagggatttctcagtttttcgtgggaaatagaatccacattcaagaagttaactgggaagaatgttcatttctgattctgtgctcagctcttgatgtttttgacccaggtgtgtaaggaccagatggcttctgtttactgtagctcacctcaggcaaaacccacaattctgttatgtctgcaccctcaaataaccattataaacaacatagccagagactctgggaccagaccttgcattcagtgattcccctacattaactcacctctatgcagagaagtaggtgctccctgttgaagatgataaaaccaagatacaaagagagtaaataacttggccaaggtccaaaagtaggaagggacaggactggaattcactgtggcattctgactccagaactgctgttctcagtcactatactacactaccaaggttatcatcccagtgcaaaagtgaataatgcaagttaaattagaatttgtgaggaaatgagcactatggactgaatgtttgtgttttccaaacaattcacatggtaaagccctaacccctgatgtgatggtttttggaggtggagttttggggaggccattagatcatgaaggtggaaactctcaagggagatgagtgaccttacaagaagagacatgaaagagatgatctttctctctgccacgtgaggacacagcaaaaagacggccatctgcaaactgaagcaggcccttactaaatggcaaatcagctcgtaccttgatcgtggagaccccagcctcagaactgtgagaaataagtgtttgctgtttaagccatcctgtctatggtatttgttatagcatcctgaactaaaatgagaaaatatttatctcacttactccacagcaaaacatactgatgatccaatgagacaactccttaccagttcctttccagaggcaaaccccttctctccctcttcccattcaacccttcaaatgtccagacaaagccctctcaccttccattcccatgcttttacgtgagagaaccagccctgcaggtagacagacccatcaccaaccttggagaacaacccggatatcattcatgatatccaagtcaagtctattgggagggttcattcaaacaggtcaccaaattgttgattctcaacaacatagagttcttcatacaaaaaggagtctgctgctatgaaatataaagtttcctcatattgttacacagggattatttgatttaatccttataacaatctataaaaaattcataaatgtttatctctgctctgcagataagaaaactgagctagagaaggttgacaaggcatcccaataccaatggagagtggggctg

SEQ ID NO: 674872 - DNA, 659 bp, Homo sapiens
aaaatacaccttttaacaccatctaggtcaacatatgaatatcattttattacatgcatctacaaagatgtaaaatgtyttatattatcattgaaatctgtcttctttgaaaaataatcaaaaatgatccacaggctaattaattacacaattaatcaataaaaatacctgtgtcaacatcttaggggatgcgtttccaataacattgttcccatgtttagtgaaatgataactaaattcagatcttaaagtcacaataaaaaatgacacttaagtatatatatatatattgttgttatggaggaattacataaggtgattaaaaatattttttcaagcataaaaaatacatgtatattacattaacataagatttggtagcagaaacagaatagaaatataattcaaagttaaaaaatgggaaattttgaactattatatagatttcaaatggatgacagcacatatcaaatttctatggcatttatatttcaatgaataaattttaaagaatattgtcagtttcattttataacataagcgtttggaataaaacagaaaaaatatattatttacaactatttaaatttataatgaaaattgtttgtgttaacaaactgttgtatattaaaaaaaagttttacaaacttaattaagag

SEQ ID NO: 674873 - DNA, 622 bp, Homo sapiens
tgctttttagtgtagcttgaggtatctcttttctccaggtggctgcccaacttgcttaagccccatgcagagaagagatgcattttgttaaaatttaccatgttaactttctggataacataattattagaaaattattttatagagtggggggaaaaaactctcagctttgtcctctaagaacatattaaaaatagaaaaaaatctcactactctttcacagaaaaacatttttccrgtatataaaagtggcagtcatttcccttcagaagtcttttatgcatataaaacatcagggccacttatttattacatcattttgaaaagtctgaatgtaataagtaacttctattaaagaaaagccccaaaccttgacacagctgttaaagtgaatgtaggacacctgggttctaggtgggtcagtctggacccatttcaattgtctgagtcttggtgagaggtggcaacatgctggcagccctcgcagcctcgctgtctctgggcgcctccttggccttggcgcccactctggccacgcttgaggagcccttcagtccgccgctgcactgtgggagcccctttctgggctgcccaaggccggagcgggctccctcagcttgcg

SEQ ID NO: 674874 - DNA, 1628 bp, Homo sapiens
gagcggagtggctgacacacagccagatttcatgtacaaaattaatgtttatttaaaaagcacttttcttatcccctgataaaagcactcaaatatggtttcacaatatagaaatgattgacttatgatttttagtttattgatgatgccctgaggcataacaatcccaggagctgcaggaacacagatctatttctgtgatagggaatactttcctcctattgttcagaaaagttccattgaactccggggtgggatgaaacaatggtgcwagctccgggaagccgcaatcagggagagggctggtgaaagagccaatgccccagggcaattctagcaccttcagctttaaaatgtccactggaactctgccttgacacagcctgatctaacacaaagatgtggtttttagagtttgacagatcagggactgatggctgattcccttcctcactagtttgagaaagataaacctctctggccttcctcattccaactcacagaaatactgtgcgttaagggaagcaggtatccagagcaaactgtataatgctgatctggaacaattacctcgataaacattaactatctactgccaaaaaatacgtaaaagaaagaaactgcacatgtccctttttacagtaaatagcaaatgttgggccagcactgatagctgagaagcagtgaggattcaaggggagatgcgcttggccaggtgcagatgaggagagggaagcaggggaggagaggcagtaaggaccacgatggggaggaggcggtctgaaatattcataactcctggatgtctgcatgtgccagaaagcacgcttgggggaaacaggagagaaaagctccgtggcaagccctcctctctcctctgagtgctcttggctggattcaggccgtgcatttatgtgcttgtcgtaaatcactgttaatgtctttggtaaagggctccaacagtagactccctctccttcacatccgcttcctctggccacagggtcatttttcttcatgtacaaagaaaacacaggaaactctgcacggccatgaggatgatgtctctgatggaggaaaagtgcggcctggttcctctccattagcaaggggcggaacctgctttagggtggagctggacagggagggccttcctcagggactagagcagacaagacacacttctgtgctggaaggagaaaaacagcagcttccctcctagtccctgtcacttggtccaagcagcctggggaaaccaaacttctgtcagtccatttctaatgcagcctccaaatgatccgcacggggctctgtgacaaggtgtaggaaaactgacttttcactttcttccttctttatggaaagttacaaagagtaataaattgcaggccagatattagatattatatcataattcaatgatcagttttcaaaaaaaaaaaaaactggaatacagtaaaatacaaaaataaataaataagaccttgaaggccctaaaaaacttggtaagacttcagatgccactccacaaatccccttgaggacttgagctaaagaaaattcatcttgccatgctgattcattaaacttgcctaggaagtaaaaatgaagcctcaggatagaagatg

SEQ ID NO: 674875 - DNA, 632 bp, Homo sapiens
cccaaccctgcctgaacatgtttgtgactcagagtttgtcttgccccatccctgtagaacagcatgtaggtggatggatcagaggccttgccccaggcaaaactccatgttccaggttaccaggtgggaggaaaggagtcaaaccatgcacaatgaactcgactagacactggggatttatgcccagggcccctgagcagccataggcccacggctgcctccccacagaggacaggcacccagccagcaattctcatgcccatgtgaaatacaggtcccactgattccctagggagcaccaatgtcccctcccccatttccactgccagtgtcatctcacagatccactttttctctgttaacccatccactcagcaagtctttgccaggcatggctatgtgccggccctgtgccagatgtggaaatgcagccatagtcstctccctcctggactgcagccacgggcagactcttgggccttcctgccctgcacctttcagccctctgtctcgcaggctgtcagtaaggatgctttctaagacaacatgggactgcagactgcactctgcccttcaagacaaagtcacacagtttgaccttgtggcaagggctcctggacctgcccctgccc

SEQ ID NO: 674876 - DNA, 878 bp, Homo sapiens
ttgctaatttagacaagaaaaatacatattctcatgacaaatatcaaagtttaaaagacttcataattgtgtcagcattatgtgttaagaatctcatatttaaaggaaagtttagaaacctatccacaacctttaggcatcttgaaaaatggaaatagatctcctccccacccttaaaagcagagccactagaatgagggagaatgaagtctggacaggtaaagggatggagcatgtactggtctaggatgccccagcattcacttcctcatcttcacgccctcttctcccaatgcttattctgtgcctctggggaatactgacatttactccaccaaaggtacagaagcgtgcacacacacatacccacacacacacacaaaagcacatacacgctcaacatacatatacacacatgggcctgagctcctcaaaatggctagctaaattcatgcagcacactaaagagagctaaatccatgcaacactaaagagagagcatcacttttctgaattcaaaagactggattgcactgaatatratgggtaaacaactgaaatttcaaactccaacagccttaatagacagagaaagcatggtgcacttactataaaaaatagtaacaattattcccagtcaatgatagtgaatctttccaggatattttggttgatattttggctgattggacaatcctggaatttaaaatgttattcagtattgagcacaacattttcgggtaatgacggaagctgatcttccgtcttcactgtttaaagacaggagattggtggttaagactgcagaaaagttattagggctgtagtttcacttgtgatataaatgaatctcctttgaatgttgagatccttgaaag

SEQ ID NO: 674877 - DNA, 2162 bp, Homo sapiens
tgctgtttgactctgatcccagcagccaccaccatgttaacaggatgagcagggcttccttcaactcagggttcctgtgaaattaaaaagaattctcatcttgactcaggattgttgaacactattgatatttcttccaaggtctcacaagagtttgcctcctctcattgccatgtgaagacctctgtgggggaacaatgcatgggttcttggggtattataggggactacagagaagtgtcacctccacccaacagcctgattcagtctactcctcaggaggaacacaaagtggtctctctagtgccatgaaaccccaaaaagtgtcaaccagtattaaaggcctgcctgatatacaaccctcgaatgcaacacagtgtccttctgaggccactctaaaggccaggaaaggtttgctaagaagtctgtgctgttaaaaacagaagaaaaagacccttatcccattgctctgtgtctggtggctatagggatagtatttcataaaaaaagaaaggcaaaaataattttcaaaaatgattcaagaaatgctgtcaaagatagcaaagaacagagtcctcagagaacagtgcccaggacaggataagcactcaataacatataacactgtgtagtgctgttgagtgctggctgttgttgagtgctagctattgttgagtgcttgttgttgagtgctagctgctgagtgctagctgttgttgagtgcttgttgttgagtgctagctgttgttgagtgcttgttgttgagtgctagctgttgttgagtgattgttgttgagtgctagctgttgttgagtgctagctgttgttgartgctagctgttgttgagtgcttgttgttgagtgctagctgttgttgagtgcttgtcctgcctgggccctgtttttagcctttgatgtacatttctccatttaacttccacaatagccctattaggcagctagtattattatttctgttttacagataaagattggttttagctcagagtagttctgaatcttataaaaagaaaaaaatatccccaggaactgaatcggctccaaaatagccccatcttgggctaaatatgggatgtgacaaagccaccatgaagctaggcccccctgtcctgacagctttccaccccttccctgcccctctcaccctgctttccaggggcaatgcacctccccacttctcctgggaggggtgggcatcctctcagtcccataatctgtgccaggcccacatatgaggacttgacaggattcagcagagatgcaggcctctgctctgctctgctcatctctttgcatatagtaatttaatgaggacaaaaactgcatagagctagtaatggcacgaccaagcagcagcttaagctttgagccgctaaactatgctgcctcctattgtaatacgattatattataacccaagttcaagagaccacccactgctttctttattggatcttccaataaagtggccatgctagtagcacaattccccacggaaatagataatgactattctaaaataaatccgaggacacacccagccacaaagtgggaggtgtattatacaaatgcaaccagggcctctggatctggcatttagacccacagcaacagcttgtgtttgctcagggctaagaatgcaggactcagacactgagagcctctgagctgctgcaaactcatcaacccctccctattaaaggccattctgactaccctcagttttcctcaaagagcagttgagagctaaggtagggtagggagccaagaggaggcagggagagccagagatggcagccggcaacaggacacagaaagaaaagggacttcaaaggcagatctaagaactcacagggctttttggtgcagagtctggagataatgcacagaaatgacaccttgaaaggggaaggaaaagaaggaagaacacatcatcagccccggacttcaggtggctgaaggagagaatgtatttggcatctaccatatctttgcatccttcaatgacacatttgtccatgtcactgatctttctggcaacaatacaaaaaccaaaaaatgtgctgtgtgactggtgggattacggtaaagggtggccgttgactcctctcaacctgctgcaagctgcccacccggatgtg

SEQ ID NO: 674878 - DNA, 2162 bp, Homo sapiens
tgctgtttgactctgatcccagcagccaccaccatgttaacaggatgagcagggcttccttcaactcagggttcctgtgaaattaaaaagaattctcatcttgactcaggattgttgaacactattgatatttcttccaaggtctcacaagagtttgcctcctctcattgccatgtgaagacctctgtgggggaacaatgcatgggttcttggggtattataggggactacagagaagtgtcacctccacccaacagcctgattcagtctactcctcaggaggaacacaaagtggtctctctagtgccatgaaaccccaaaaagtgtcaaccagtattaaaggcctgcctgatatacaaccctcgaatgcaacacagtgtccttctgaggccactctaaaggccaggaaaggtttgctaagaagtctgtgctgttaaaaacagaagaaaaagacccttatcccattgctctgtgtctggtggctatagggatagtatttcataaaaaaagaaaggcaaaaataattttcaaaaatgattcaagaaatgctgtcaaagatagcaaagaacagagtcctcagagaacagtgcccaggacaggataagcactcaataacatataacactgtgtagtgctgttgagtgctggctgttgttgagtgctagctattgttgagtgcttgttgttgagtgctagctgctgagtgctagctgttgttgagtgcttgttgttgagtgctagctgttgttgagtgcttgttgttgagtgctagctgttgttgagtgattgttgttgagtgctagctgttgttgagtgctagctgttgttgagtgctagctgttgytgagtgcttgttgttgagtgctagctgttgttgagtgcttgtcctgcctgggccctgtttttagcctttgatgtacatttctccatttaacttccacaatagccctattaggcagctagtattattatttctgttttacagataaagattggttttagctcagagtagttctgaatcttataaaaagaaaaaaatatccccaggaactgaatcggctccaaaatagccccatcttgggctaaatatgggatgtgacaaagccaccatgaagctaggcccccctgtcctgacagctttccaccccttccctgcccctctcaccctgctttccaggggcaatgcacctccccacttctcctgggaggggtgggcatcctctcagtcccataatctgtgccaggcccacatatgaggacttgacaggattcagcagagatgcaggcctctgctctgctctgctcatctctttgcatatagtaatttaatgaggacaaaaactgcatagagctagtaatggcacgaccaagcagcagcttaagctttgagccgctaaactatgctgcctcctattgtaatacgattatattataacccaagttcaagagaccacccactgctttctttattggatcttccaataaagtggccatgctagtagcacaattccccacggaaatagataatgactattctaaaataaatccgaggacacacccagccacaaagtgggaggtgtattatacaaatgcaaccagggcctctggatctggcatttagacccacagcaacagcttgtgtttgctcagggctaagaatgcaggactcagacactgagagcctctgagctgctgcaaactcatcaacccctccctattaaaggccattctgactaccctcagttttcctcaaagagcagttgagagctaaggtagggtagggagccaagaggaggcagggagagccagagatggcagccggcaacaggacacagaaagaaaagggacttcaaaggcagatctaagaactcacagggctttttggtgcagagtctggagataatgcacagaaatgacaccttgaaaggggaaggaaaagaaggaagaacacatcatcagccccggacttcaggtggctgaaggagagaatgtatttggcatctaccatatctttgcatccttcaatgacacatttgtccatgtcactgatctttctggcaacaatacaaaaaccaaaaaatgtgctgtgtgactggtgggattacggtaaagggtggccgttgactcctctcaacctgctgcaagctgcccacccggatgtg

SEQ ID NO: 674879 - DNA, 620 bp, Homo sapiens
ctgtgtgctgagtcatttgtgatcagagggaaactgaaaagtggcataacagggtgacggacaggcccaggagaattcactatgagtcttgggagtgctgctagcacctctgctacctcctaggtgggtcatttcacctccctggcccaactgtgaattcaagaataccacatccagcactgcactgtggcaagggctcctgcagaataatgcaagggaagagagctggaaacgacaacgtactggtcacatgtgtgatgccatttgatgtggtttggctctgtgtcccccctcaaatctcatgttgaattacaattcccagtgttggaggaggggcctagtgggaggtaagtgaatcacgggkgtggacttccgccttgctgtgctcttgatagagttcacgagatctggctgtttgaaagtgtgtagcacttcccccttatctctctctctctccggcgtgaagatgtgttagcttccccttcgtcttccgccatgattgcaagtttcctgagacctcccagccatgcatcctgtaaagcctgtggaactgcaagtcaattaaacctctttccttcataaattacccagttgcaggtagttctttatcacagtgtgag

SEQ ID NO: 674880 - DNA, 653 bp, Homo sapiens
aatatttgttgaatgaatgaatgaatgtatatcttaacaacaaggtttgtttgttttttttttcctgcttatattgaacagaagaggcaagaacaagacatactacaacagcattttagatggaggctgtattagtttgctcaggctgccataacgaaataccacagacgggggggtttaaacaacagaagttcattgtatcatagttttagagcatagaagtccaagatcaaggtgtcagcagagttgatttcttctgaggccattctccttggcttatagatggccatgttcccctcatgtcttcacatggtctccctctgtgtgtgtctgtgccctaattttctcttgttataagaacaccaggccgggcacggtggctcatgcctgtaatcccagcactttgggaggctgaggaaggcggatcgtgaggtcaggagaccgagaccatcctggctaacatggtgaaaccccgtctctactaaaaatacaaaaaaattagctgggcatggtggcgggcgccggtagtcccagctacttgggaggctgaggcaggrgaatggtgtgaacccaggaggcggagcttgcagtgagccgagatctcgccactgcactccagcctgggcgacagagcgagactccgtctcaaaaaa

SEQ ID NO: 674881 - DNA, 2343 bp, Homo sapiens
tcaagaagctaataggcctttaataaaacacatttcccattgagataagtagagctaagtcttcttattctacagatgagggaaagcacgttgaggaagggtataaagtaattttcccaatgtcaaaggagtcagaaatagatcttggaatggagccctaataggttacagtgaaaagagaattatagaaattataaaccactcactcatatcatagcatttctacagcaggaaaaacagcctctgtctcaggagtctatttcaatggagaacacaaaaataaatagctaagcatcagaattaataaagaagtcacaatatccatatcatttcaatgcacatacaaagcataaaaactagaaaatgtgtattatcacagaccttacaagactaccctaagctcttctattttcaacaagggtggctgcaatcatgtgttaattcacctagaaatcattctcagtccagacaacatgtgttacatttacatatagggttaataatccatattatttatctaccatttaatgtaatcataatattggcaataaagataaaagcaaaacatagttaccagtgagctcattatggaagcttgtaaaaatgataaatgtttctttcctattaaaagttaaattttattaatacaaatttggttgtttttaaaattgtgtacaattcagtaaatattatctgggtaataaaggatataatgtttgtattttactgaaatatttgaactccttttctagaaaaaaattatgaaatgcccatttccatatctattatgtgtgcctgagaaaccaataatcacagtgccttgccctttggcgagaccataaactaaatacgcaaatcatctttgccttacctcaacctccagagggcaggctycctcaatttctaaagaaatgccaaaaatgtgcttttgtggctattttaatgcttcattattcaagaaactacttttgcagatctcaggaatatctcaaaatataaccttattcttgcctcgtagttacaaatgaatatgactaatttcccgtcaatatcacttaagatctttgtaaataaaacctttggatctctgtgaaatttaaattatatataatatcagcataaagttcactgcgtatgtatgtgtgtgtgttagagagaactataatatagtaagaattattttatttatagctaacatgccagaacctacgtatttatgaaatgctgttactcaaagttatcaccttggaacactttaagtgcattccaatgatgttacctctcaaaacaccatagctatcagcataaatacttaccagtttggggcttcctttatagtcataccttatgtttaagaaaaaataatatgacacaaaagaattacacatttttttactaaactaacctctaattaatgtaaagctgcttccgaaaattgaggtaattctgcaagtttcactctgtattactatccaaaatcaatgtgcctttttctagaccttccctcagccagaggggagcccactgacctaaagggtgagctccaggccaggcagcattcaacacaagctaacttaaaggagcttgggtcataacactggctggtaatctggcagtactctctgtggcttaaggtggtggtgggtactgggtgaggctcctctgcctttggaaaggtgaggcaagagtgggaaggactgtgttggggtttgagtgtcacctcaactgcaatacaacagaataccaaatagacttataaggtttttgactgttgtctctgactcccagacagtacctctgggcccatccagggcctggggaacattgctgccctgaagggaaggacacaggtatggctggctttgccacctgtggattgtagagttccagttacttgagtgaacattggcagtagccagggagtggttacagcaaaccttgggcaagacccagtgctgttctggcttcagatctgacccaatacagtcattgggatggtgcttgtataatctttttgggtcatattatttttattaaaagtaaggtatgactataaagaaagtcccaaactggtgagtatttgtactgatagctgtggtgttttgagaggtaacatcattggaatacacttaaagtgttccacggtgataactatgagtaacaacatttcgtaaatatgtaggttcgagcatgttagctataaattaggtggctcagaaaagacagagggagagagagagagagagacggactctgtttgtttgggagaaagtacaagaagagtacaagagtctctgtctggtaatccagagaattctctcggatcttgtctaagaccatcaa

SEQ ID NO: 674882 - DNA, 682 bp, Homo sapiens
aaaaactaattttgcctatctctgtgctttgtaattgcagtggtttaatccatttrtatttaatataattactgttaaggtaggatttatatctgccattttgctttttttgtttcgttttttgctttttgttcctctatttctcaattagtgccatcttttatgttaaatatatatttctagttcaccattttaactcccttatcatttcttttattctgtattttggtttataggtaacaaaaagaattacaaacaaaaatatatactaccttttatatacacctatgttgctacctttactgttaccttttatttcttatgtggattccagatattgtctagtgcccttttattttagcctaaagaacttcctttagtatttcttacagcgtatgctttctagcttcacaatccaaaccccatcaaaaatggggacctggagaaattactccacgttttaggtgaagtctgaagaaccacattctcaagagtgtgtttaaactagaagaaaagctcttgtatgaattatttccatttttatttatctgggaatgtcttaatttctctgttgtttttgaggataggtttgctgaatttagaattcatggttgaatgtttttctttttcttttcttttttttttttctgagacagtgtctcgctctgtcacccaggctgga

SEQ ID NO: 674883 - DNA, 1532 bp, Homo sapiens
tccagggtactgacacctcccaccctcaacccccagaactagccagtcatcttccggaccgcagtgatcggttctgggttgggcatgttgatccaggaactcggcctagggctttggatgtattactgcagaaaaataagctctttaaactaggataactaaattggaaggatataagcctacggtaacaaggaccaacagtgcatgccaatgaagccaactttgagggaagaaaagctgctggtgagagggtgatgtcccaccctctcaggaacctcaggaggtagatgtgtctgcagtgaactctacccttgaagccaataaatcctctctcttttatttcaagtcagtgtcagctgtgttttgtcacatgtctcagaggagccctgacttcttagtcccctggatctatcagcccaggcatcactgttaggatcctccacagaatcaaagagccccaccccacaaaaggcccaattccagttcttgctggaagaacagggatcctagaggtttgttcccacgatgatgttctccttcacaacttactcaaatccagcaaccccacacctgcaatccttagcttctttgtgttgattaaccactatgttacattctagtcaaaatgggccaggtgcagtggctcacacctgtaatcatgcctgaggcaggaggatctcttgaagccaggagtttaagaccaatctgggcaacatagtgagaccccactaacacaggaacagaaaaccaaacactgcgttttytcactcataagtgggagctgaacaatgagaacacatgaacacagggaggagaacatcacatcagggaggaggggcctatcgggggttgtggggctaggggagggatctcattaggagaaatacctaatgtagatgatgggttgatgggtgcagcaaaccaccatggcacgtgtatacctatgtaacaaacctccacgttctgcacatatatcccagaacttaaagtataatacattaaataaagaaagaaataaaaataaaaatagccaggcatggtggcctgaacctgtaatcgcagttactctggaggctgaggcaggaagatcagttgagcccaggatttcaagactgcaatgagctgtgattgcaccactgcactccagcttgaagacagagcaagaccctgtcaccttgtcaaaaaagaagaggaagaggaagaagaaggaggaggaggaggaaaaagaaagaaagaaaagaaaaacagaaaaagaaagaaaagaaaagaggaggaagggaggaagggaggaaaggagggagaaagaagaaccctaaaaatgaatagaggcaaagtgaatcactattgctgccctaggtcttaaaaaacatttttctctcactttaaaagcagcccctactacctttaaaactttctacatatcgaccattaaaaccgagactaaggcatcaaagaacattaatagcaaagtcatcctaaaaatctcaaacttgcaaaggtgtgtaaagattaggtaggttctttcacactgc

SEQ ID NO: 674884 - DNA, 1532 bp, Homo sapiens
tccagggtactgacacctcccaccctcaacccccagaactagccagtcatcttccggaccgcagtgatcggttctgggttgggcatgttgatccaggaactcggcctagggctttggatgtattactgcagaaaaataagctctttaaactaggataactaaattggaaggatataagcctacggtaacaaggaccaacagtgcatgccaatgaagccaactttgagggaagaaaagctgctggtgagagggtgatgtcccaccctctcaggaacctcaggaggtagatgtgtctgcagtgaactctacccttgaagccaataaatcctctctcttttatttcaagtcagtgtcagctgtgttttgtcacatgtctcagaggagccctgacttcttagtcccctggatctatcagcccaggcatcactgttaggatcctccacagaatcaaagagccccaccccacaaaaggcccaattccagttcttgctggaagaacagggatcctagaggtttgttcccacgatgatgttctccttcacaacttactcaaatccagcaaccccacacctgcaatccttagcttctttgtgttgattaaccactatgttacattctagtcaaaatgggccaggtgcagtggctcacacctgtaatcatgcctgaggcaggaggatctcttgaagccaggagtttaagaccaatctgggcaacatagtgagaccccactaacacaggaacagaaaaccaaacactgcgttttctcactcataagtgggagctgaacaatgagaacacatgaacacagkgaggagaacatcacatcagggaggaggggcctatcgggggttgtggggctaggggagggatctcattaggagaaatacctaatgtagatgatgggttgatgggtgcagcaaaccaccatggcacgtgtatacctatgtaacaaacctccacgttctgcacatatatcccagaacttaaagtataatacattaaataaagaaagaaataaaaataaaaatagccaggcatggtggcctgaacctgtaatcgcagttactctggaggctgaggcaggaagatcagttgagcccaggatttcaagactgcaatgagctgtgattgcaccactgcactccagcttgaagacagagcaagaccctgtcaccttgtcaaaaaagaagaggaagaggaagaagaaggaggaggaggaggaaaaagaaagaaagaaaagaaaaacagaaaaagaaagaaaagaaaagaggaggaagggaggaagggaggaaaggagggagaaagaagaaccctaaaaatgaatagaggcaaagtgaatcactattgctgccctaggtcttaaaaaacatttttctctcactttaaaagcagcccctactacctttaaaactttctacatatcgaccattaaaaccgagactaaggcatcaaagaacattaatagcaaagtcatcctaaaaatctcaaacttgcaaaggtgtgtaaagattaggtaggttctttcacactgc

SEQ ID NO: 674885 - DNA, 1257 bp, Homo sapiens
aattcaagtgaaagtgcctgcccttacatgacattaagacttccttttacctcaatactggcataaaactagaaataaaaaataaatgctttgtgaaccaggaaggaatagttaccactcgtggctgcccgtacaccatagttaagtggacactttcttgcaaagtccttttaatctaaagttgtatttaaaataaaaagctattaataagtctgttcatctaattttaccttaaactttcatttcagcttgttttagtagatagcagattgggaaatatgaagtaggtggctgctaaaagctgttggactaaaaatttgcaactgaaaacagtggaagaatcagtagaattactaactcaatatactctggcagtggcctgaaacctcaatattccctgacataatagtattaataattgatgttagttcaaatctaatgggtcaaattatatttaaaagattctgttaatacaaaatagagaagtagacatactttttaggaaaattcttatgcaaaactatttttaaggttataaattttagtgcttaggtggtaagcataggtatttggaaaattgtcttatactgagtactttatttgccagtaattactgataaaagcttgatgctcatagttagaatgtattcagtttatttctaagatattgtactagactatttttagggcagttttaggtttacagaaaaattatgcagaaaacacagagtcctgtatacccctctctccactcctgcagtttcactattattaatatcttgcattagtatgatacttttgtaacatttgatgagccaatattgagccatcatttagtgaaatatgttaagattcactattcatcatgctgtaaagtgctatgggtttgacaaatgcataatgccatgtatttatcattacaggatcacacagaatagttgccctgccctaaaaatgccctgtgttccacctacccatccytcctcatgtcttcccctgagcccctgacaaccactgatctttttattgtctctctagtcctgttattgttggaatcatagagtatgtatgtagtcttttttgtactggcttcttttatgcatatgcgcttaaagttccttcatgttttttcatggctcagtaactcatttctttatatagctgaacaatattctattgtatgtaccacaatttgtttatccattcacctattgaaggacatattggttgcttccaatttttggcaattatgaataa

SEQ ID NO: 674886 - DNA, 668 bp, Homo sapiens
caagcaaggagggagttaatttcaggaaggaactgttaccatctttgtgttamagctaaccaaggcagatagcttgtgaggttagaagccagatggagtcccttaggttagatttctgtcactgttataatttttaaaactacaaaggcagtttcacagttaatctgtcttttgtgagttcagcaagccttcagagggaaaaggggaggtttcccttggcccctacatcttttaagttaacgtgaaatgtacatgttttaagttaacgtgaaatgtacaaatgtacaaagtattaattgtcaatttcccactttagccactttcgcagttaactaaccaccagttctgattacaaaacaagagagttggccatgcctcaactattctgtttttggttaaaatttttgaagttatcgcctgaaagcctagaagataatgttcaaaatttaaattatttgcaacaccattttgtcagaagggaattatgacttcagttttcatttgaggagagttaatcaaattttagtgagtatattactctcatatttattttgaaataaaaagcatagccctcaaatttttctcttttcttctaaattatttatagaacaatagagctctctgaatctaccaaatgtctgcttcattactcttcctccaggctggct

SEQ ID NO: 674887 - DNA, 619 bp, Homo sapiens
aggcaaagtcttgaagaacgtgaggaatgcagccatgtgggggaatatcacagagggagcagtgaccctaaggtgaaaggtgcctagcatatatgaacagcaaggaagagagtgtgcctggatgaggtcagagagagaactattaaaagaacagtttgactgcccttctaaagatggcaggacaagagagggaccaatggtaaaagcagggagactagtaaacgactattggaataacaagtaggagattatgatttcccactcctgagtgatagcagasgagatgaggagtggccagttctagacatgtttagaagatagacccagcaagatttctttactataggtaaaaaagagaggtcaaggatgactccaaggtttttgtacctgacaactagaagaattgagttgccgtcaagtgaaatagaggagatagtttgaggagcaggtttatggagaaagatcaaatttagtactggacatatcaagctgggatttttattagacatccaagtagaaatgtcaagtcagcaattgcacgtatgagtccaaagttcagaagaattgttatcagcttatagactgctctgttcgtagaggagctgatgatcagccagtc

SEQ ID NO: 674888 - DNA, 632 bp, Homo sapiens
tatgcaatagactctaaaaatccaagatagattgaggggtgggaggcagtgtaggcaaaaagacatcaatatggtaaatagcacttaatgtatcctgttattgcatttctaccagattggattaaacactgttaatgaagaaactaatgtaaggagagaagatgagttacttgttaccaggtacaccccagctgaaggaaaagactgaaagcatttattatctttcttagctgttagtgctgcattgtggaacaaataaaacaatgtgtctgaaaaccataaagtactgcaggaagataagaatttatttcaagacacgcagaaaaatatttggctgaaatcacagctactttgttcgaggcaatgttctaaaaacaaagtgctaatcaaaatggccagaaagyatctgttttgaccctgagtgaccctcaactcccctaactatatttttaattgaatgatgcaaatatttgtccccttctaatcccccaagaaactttgactgtgaataaatagaccaaataagcatcagatcaaggacagagatccagaatcttaaagttaattctgtggcttttccccataatcatgtcatctcccaattcatgattaggtagttcactaaaaaatga

SEQ ID NO: 674889 - DNA, 632 bp, Homo sapiens
tatgcaatagactctaaaaatccaagatagattgaggggtgggaggcagtgtaggcaaaaagacatcaatatggtaaatagcacttaatgtatcctgttattgcatttctaccagattggattaaacactgttaatgaagaaactaatgtaaggagagaagatgagttacttgttaccaggtacaccccagctgaaggaaaagactgaaagcatttattatctttcttagctgttagtgctgcattgtggaacaaataaaacaatgtgtctgaaaaccataaagtactgcaggaagataagaatttatttcaagacacgcagaaaaatatttggctgaaatcacagctactttgttcgaggcaatgttctaaaaacaaagtgctaatcaaaatggccagaaagtatctgttttgacsctgagtgaccctcaactcccctaactatatttttaattgaatgatgcaaatatttgtccccttctaatcccccaagaaactttgactgtgaataaatagaccaaataagcatcagatcaaggacagagatccagaatcttaaagttaattctgtggcttttccccataatcatgtcatctcccaattcatgattaggtagttcactaaaaaatga

SEQ ID NO: 674890 - DNA, 561 bp, Homo sapiens
atgtctgttctacctcagaagcaaaagtcgacattgaaagaaaagcatctagcctgcaagctttaaaattttaacaaagtgcctggaatccagctatatgcttaacttgcatttctstacactcttgaggcgagtatgttccacgtgcgaaaatattttctaatggaaacaccaaagaaatattatgtacaggaaagctcactggtctcagcaaggatcccaaaattttccatgtattccaaatgttcagaaagctggttctactcaccttagttcttctgtctttcagagctatgcaattgcttctaaatagagtaacggattccacttacaaaatagactgtggtgcagtttatccctaagtgtatcctcatggcatcaagatcacatccataagaaaaaagaaaaaaaaaaaaaacaaccacaaggaattcagtcaagtctagtcatcaaaactgaagctcaaagaaagctgagtcaggaaagctagtttgtgcctataaattgatttgatcaaagacagctgagaaagaaaagtcagtattgcctctcccaacccct

SEQ ID NO: 674891 - DNA, 561 bp, Homo sapiens
atgtctgttctacctcagaagcaaaagtcgacattgaaagaaaagcatctagcctgcaagctttaaaattttaacaaagtgcctggaatccagctatatgcttaacttgcatttctctacactcttgaggcgartatgttccacgtgcgaaaatattttctaatggaaacaccaaagaaatattatgtacaggaaagctcactggtctcagcaaggatcccaaaattttccatgtattccaaatgttcagaaagctggttctactcaccttagttcttctgtctttcagagctatgcaattgcttctaaatagagtaacggattccacttacaaaatagactgtggtgcagtttatccctaagtgtatcctcatggcatcaagatcacatccataagaaaaaagaaaaaaaaaaaaaacaaccacaaggaattcagtcaagtctagtcatcaaaactgaagctcaaagaaagctgagtcaggaaagctagtttgtgcctataaattgatttgatcaaagacagctgagaaagaaaagtcagtattgcctctcccaacccct

SEQ ID NO: 674892 - DNA, 561 bp, Homo sapiens
atgtctgttctacctcagaagcaaaagtcgacattgaaagaaaagcatctagcctgcaagctttaaaattttaacaaagtgcctggaatccagctatatgcttaacttgcatttctctacactcttgaggcgagtatgttccacgtgcgaaaatattttctaatggaaacaccaaagaaatattatgtacaggaaagctcaytggtctcagcaaggatcccaaaattttccatgtattccaaatgttcagaaagctggttctactcaccttagttcttctgtctttcagagctatgcaattgcttctaaatagagtaacggattccacttacaaaatagactgtggtgcagtttatccctaagtgtatcctcatggcatcaagatcacatccataagaaaaaagaaaaaaaaaaaaaacaaccacaaggaattcagtcaagtctagtcatcaaaactgaagctcaaagaaagctgagtcaggaaagctagtttgtgcctataaattgatttgatcaaagacagctgagaaagaaaagtcagtattgcctctcccaacccct

SEQ ID NO: 674893 - DNA, 561 bp, Homo sapiens
atgtctgttctacctcagaagcaaaagtcgacattgaaagaaaagcatctagcctgcaagctttaaaattttaacaaagtgcctggaatccagctatatgcttaacttgcatttctctacactcttgaggcgagtatgttccacgtgcgaaaatattttctaatggaaacaccaaagaaatattatgtacaggaaagctcactggtctcagcaaggatcccaaaattttccatgtattccaaatgttcagaaagctggttctactcaccttagttcttctgtctttcagagctatgcaattgcttctaaatagagtaacggattccacttacaaaayagactgtggtgcagtttatccctaagtgtatcctcatggcatcaagatcacatccataagaaaaaagaaaaaaaaaaaaaacaaccacaaggaattcagtcaagtctagtcatcaaaactgaagctcaaagaaagctgagtcaggaaagctagtttgtgcctataaattgatttgatcaaagacagctgagaaagaaaagtcagtattgcctctcccaacccct

SEQ ID NO: 674894 - DNA, 870 bp, Homo sapiens
ccaatataatgacttgagattattgttgatgtttcttgaaatggaaaaaatattaattaagtcaggtggcagacacacaaatgtgctattatgtttccataaaacatatttccatggaccatattataaatacctaacaggcaagctgtaactttaatcttatatataaagctaattatgaaattgtaaattaaaaaataatgattagcaatccgttatgcattaactatgcaaagctatgtccgttaaatctgatatattttactcctaggaaagttctcatcagattccattaactcttattttagaaatttctaacaagtttaggtaactagtttactgcccaagagcaaaatgtaagtaataagcttgatataagcaggatctgattttgagacaagcacattaatggcagcaaattgcaatgaaataaagaggaatgtgagagaagaaaaaaaagctttggaaagcagaaatcagaactccaaaagtaaactagtttttcgccattagggagaaaggtaaacaactttttacatttcattagcctctraggacaaatgatcataaaataataatcaccaaaatggttaaatacagtaatatattgtgaaattcatttttaaagaatttaagaaagtaaacattggttaataatttgagaaaagtatgttttcattgttaataaattgtgcttatgcaaaatactttgttttctactaatgaacatcttcctgtaaaagaaaacccattagattagaaataaaaaggaatctctttaaagaccatttatgtcttcaattacaaagtacttattaattgaacctcagtttatctctgtgttatttagcactttttaatttccaccta

SEQ ID NO: 674895 - DNA, 870 bp, Homo sapiens
ccaatataatgacttgagattattgttgatgtttcttgaaatggaaaaaatattaattaagtcaggtggcagacacacaaatgtgctattatgtttccataaaacatatttccatggaccatattataaatacctaacaggcaagctgtaactttaatcttatatataaagctaattatgaaattgtaaattaaaaaataatgattagcaatccgttatgcattaactatgcaaagctatgtccgttaaatctgatatattttactcctaggaaagttctcatcagattccattaactcttattttagaaatttctaacaagtttaggtaactagtttactgcccaagagcaaaatgtaagtaataagcttgatataagcaggatctgattttgagacaagcacattaatggcagcaaattgcaatgaaataaagaggaatgtgagagaagaaaaaaaagctttggaaagcagaaatcagaactccaaaagtaaactagtttttcgccattagggagaaaggtaaacaactttttacatttcattagcctctgaggacaaatgatcataawataataatcaccaaaatggttaaatacagtaatatattgtgaaattcatttttaaagaatttaagaaagtaaacattggttaataatttgagaaaagtatgttttcattgttaataaattgtgcttatgcaaaatactttgttttctactaatgaacatcttcctgtaaaagaaaacccattagattagaaataaaaaggaatctctttaaagaccatttatgtcttcaattacaaagtacttattaattgaacctcagtttatctctgtgttatttagcactttttaatttccaccta

SEQ ID NO: 674896 - DNA, 625 bp, Homo sapiens
acaacatatagtcaatgcatggtttcccagtaagtagaatttgctaagcagatataatgtcttatatatatacatacacacacacacatattgacatctacatatatacacatatgtatctgaaaaaaaaatccaattttggacatgaaaatatatgcctcccaaacttttccatgtcattggacatgtagaaaccactcaaatttgtagcacacactggggcacatggaggaggtgaacctgtggcttctgtcactccaagccctgggagcagaggagatcaaaatatcagcagagcagtcagctacttctgcagtctgacatgggtgttctcccataggggatgagatatgacactgacaggttgaaatgaacagactgagctaggtaggcctcaaacagaaccragcttgggtccctaagaaaaggttccacagcatgggaaggggaaagagcaacgatttcacagggagcgattctgacctaaactgtccatctacttactcatcaaaatgcatattactcagacataatgaattgcagggttttcatttccttttggttttgtggggttggggggatgggattatatataaacttatgtttttgttaatactttatgatg

SEQ ID NO: 674897 - DNA, 982 bp, Homo sapiens
gcctcagcctccaaagtgctgggattacaggcgtgacgaccatgcccagcctccaccaagggagccctccaccaagggctccaccatgcccctttctccaccaaggggggaaaagaagtgaaaaagtacataaagttcacaatgtacaagtagactctaatccaaaagttgtttggaattagagaaggccttttctatagaaatcattattagagctggcagtttaattccctggacagctcctagccacatctttcacacatatcccaaccaaaacacagctgaaacacattcacaatcaattactaacaatgttggcatttaaattaaaaatcaaaaataaatactttcaaaataacaatctacctctcttgaatgctggagactgaggaaaaacagggaggcaaatgaaaatttttgtggaaatgctcaagattttcaggcacttccgttactttacagtttgctgttatttgtatattatactcaatttcacttccgaaggtggagtttatcttttcctctggtacagacatgttgtcagcgcctttctcctattaactcctcagcattcagaatgtgaaatagccctcagcaaatgtttgcagcatgactgagtgtggatagaattctcccccagcctgaggcaatgccactaaagttaraagatgaaggaggagaagtgttttgaagagggtatgaacgtgaatttgaggagattgacagaaggagacacaggaaggggagtgggtgcggtgatgctgaaaagagcactttcattccatttgaagaaatccaacgtaggcattaggaacctaaaggacctccaagaaggggcaggtggtccggagctgctcacagcaagtcagaggctcgtgtacctcaaggcatgcacacattgtcgaagcaccctgcctacggtagaaaagtttatcccacagtttctttctctagttaacactcccctaatgttttaaataat

SEQ ID NO: 674898 - DNA, 982 bp, Homo sapiens
gcctcagcctccaaagtgctgggattacaggcgtgacgaccatgcccagcctccaccaagggagccctccaccaagggctccaccatgcccctttctccaccaaggggggaaaagaagtgaaaaagtacataaagttcacaatgtacaagtagactctaatccaaaagttgtttggaattagagaaggccttttctatagaaatcattattagagctggcagtttaattccctggacagctcctagccacatctttcacacatatcccaaccaaaacacagctgaaacacattcacaatcaattactaacaatgttggcatttaaattaaaaatcaaaaataaatactttcaaaataacaatctacctctcttgaatgctggagactgaggaaaaacagggaggcaaatgaaaatttttgtggaaatgctcaagattttcaggcacttccgttactttacagtttgctgttatttgtatattatactcaatttcacttccgaaggtggagtttatcttttcctctggtacagacatgttgtcagcgcctttctcctattaactcctcagcattcagaatgtgaaatagccctcagcaaatgtttgcagcatgactgagtgtggatagaattctcccccagcctgaggcaatgccactaaagttagaagatgaaggaggagaagtgttttgaagagggtatgaacgtgaatttgaggagattgacagaaggagacacaggaaggggagtgggtgcggtgatgctgaaargagcactttcattccatttgaagaaatccaacgtaggcattaggaacctaaaggacctccaagaaggggcaggtggtccggagctgctcacagcaagtcagaggctcgtgtacctcaaggcatgcacacattgtcgaagcaccctgcctacggtagaaaagtttatcccacagtttctttctctagttaacactcccctaatgttttaaataat

SEQ ID NO: 674899 - DNA, 982 bp, Homo sapiens
gcctcagcctccaaagtgctgggattacaggcgtgacgaccatgcccagcctccaccaagggagccctccaccaagggctccaccatgcccctttctccaccaaggggggaaaagaagtgaaaaagtacataaagttcacaatgtacaagtagactctaatccaaaagttgtttggaattagagaaggccttttctatagaaatcattattagagctggcagtttaattccctggacagctcctagccacatctttcacacatatcccaaccaaaacacagctgaaacacattcacaatcaattactaacaatgttggcatttaaattaaaaatcaaaaataaatactttcaaaataacaatctacctctcttgaatgctggagactgaggaaaaacagggaggcaaatgaaaatttttgtggaaatgctcaagattttcaggcacttccgttactttacagtttgctgttatttgtatattatactcaatttcacttccgaaggtggagtttatcttttcctctggtacagacatgttgtcagcgcctttctcctattaactcctcagcattcagaatgtgaaatagccctcagcaaatgtttgcagcatgactgagtgtggatagaattctcccccagcctgaggcaatgccactaaagttagaagatgaaggaggagaagtgttttgaagagggtatgaacgtgaatttgaggagattgacagaaggagacacaggaaggggagtgggtgcggtgatgctgaaaagagcactttcattccatttgaagaaatccaaygtaggcattaggaacctaaaggacctccaagaaggggcaggtggtccggagctgctcacagcaagtcagaggctcgtgtacctcaaggcatgcacacattgtcgaagcaccctgcctacggtagaaaagtttatcccacagtttctttctctagttaacactcccctaatgttttaaataat

SEQ ID NO: 674900 - DNA, 615 bp, Homo sapiens
cctgcctcagcctcctgagtagctgggattacaggtgtgtgccaccacgcccggctaatttttgtatttttagtagggatagggtttcgccacggtggccaggctagtcttgaactcctgacctcaagtgatatgtctgccttggcctctgaatgtgctggaattacaggtgtgagccaccgcgccyggctagacacttctaaatgtttattagaggagagggaagacccagggaaaggttaaagactttggagaacaagaaagagagggcagaaatagaaaaggacacaaaataagatgggtttggatccctagtaagaatcatggccaatttagcatgaagaacccaagacagatataaaagagggtgagaaagacccgttagtaccttcattcctgctgcggctgcagggccactggggtctacagcctggatgtggcatggcttacttcctcgcaccacaaaaccccagccaaccgcgtcaccaacaatctagagaggaaaaccacaattagcaagcagccgactgtctccggcaatttgcttattcttctgagggagagaaaaccagcccaggattaagtatacactgtgacatattttcctccgtttct

SEQ ID NO: 674901 - DNA, 936 bp, Homo sapiens
tgacacaaagcaatgcaaagacaagattgccatgcaaatggatggttttggacatacgagtcttctccgcacatacatgtctraagttgagttttatacactgaatgtggaagaaccgggtatcatatcttttttaaaaaatgtcagtgtagaaaacatttgggaaaccattttcctacatgatagaactgccttactagatttctatttgtagctctcattcattgttttttatcttagtttgcagaaaggtgttgaaatgcttctctagcccaaacagcgacatgctaaagtccccttcttcagagtcaatagagtagttgttaaaggttttaaattgtactttctccaaaattagcatgcagctatttaatagggaatctagatttcaccaagattcaaatcaaagcaacatttaaaggaataagacctgttcactagcattttcaagggggttctaaagcattcaagtgcttaaaagccataaaaaatgacttcttaattcctgcctttagtgtcaacttttaagttaatacaggtttcaattgtggcattaggaaaaaaaaaaaccttgtgatgctatggttgggggtagttagggagagactacatgaaattgtgtgcccctattttctttctgatcctaaatcattttgttttataaatcagctatagcatctttctagaattaatcctgaatatgttgaatgttaaaatagagaagtttgtatatacacataattaaaaatcaacccttctggcaagatttcactttgaaggcgtctgtttttaagggaaggctaaaactttgctgatatgtgataaaacatgaaccctaaattgcctccttagcctgaatttttactagcgttctagtgtaacaaattctaaggacatgacatgctgcctatttggggggcttatttttcaccaaaa

SEQ ID NO: 674902 - DNA, 1972 bp, Homo sapiens
cccacctcggcctcccaaagtgctgtgattacaggcgtgagccaccacactcagccttgatggttttataaatgggagtttcgctgcacaagttttcttgcccacggccatgtatcttcctttgccttctgccatgattatgaggcttccccagccatgtggaactgacagtccattaaacctctctcttttataaattacctagcctcaggtatgcctttattagcagcatgagaatggactaatacaggggcctacttgagtgtggagggtgggaggagggtgaggacccaaaaaccacctattgcctactatgctcattacctgggtggcgaaataatctgtacgccaaacccctgcaatatgcagtttattcatgtaacaaacctgcacatgaattccctgaaacgaaaataaaagttggaaagaaaaaaataataaaataaaaataaatgaataaacaaacaaacaaaaggaatcatgatataataaagtgatttaggcctgttttaccgatagggtagattagccttaaaatactctccacccattgaaatgaccaaaaaaagtctttgtaatttttgaataaagggaaaagatgaaaacataaataaagtagcagccaaaaaaataagcaggagattttagagtggcaaggtaaggcaagtagactctcaccacccagaagccttgttgctaagtcaatgaaatcctcagaattttcattaagaaccccaaagtttgaaggaaaaaaaaccataaataactgagttttctgtcttctgattagggacagttgaaatggctgttggggaaagataggtgcaatgaaggagatgaagaactagaccttttctctaacagtgaagcctcccaaactcaataataaatttggggaccattgcagcagcaaaaatatccctccatagcagtgggatccatctctgactatgtgaaatgaaccctaggacaggaagttgaacaacacctcagaagcaagactctctccttccatcaccaggagcccttaagctgtaaaacaatggaacaaataattagctatcaaatttagctcagaggggaaaatgacattctgagatgacttaggaaggtgctaaggagatgtcacctgcctttatttccaagcacagatagagtatggacagattgaaagcatggacaaaactgtctgcattaagcataaacatcatggggaaaagcaaacagctatgtgatactgtgaagcaaaaataataccaaaaaaaaaaaagaaagaaaaaagaaaagaaaggaaaaacagagggaagggaaaaagagagcattcagtagataagaagaaccctgtctgaaagaaaacacaattcaagaaacaatttccttaaagtggtctgaactataaaaaattttaaaacaatttaaaaagaacataaagtcaagaaaataaggattcaaagataaaataattatgaagagggagatatagatcttggaaaataaatggatgtcagacagtttatcaagcaaattataaactgtcaggacaaataaatcacatagctgaaaaatgaaattcttattgaaaaaatacttcaataaagaagaaaaagcaattaaagcagataggctgggcatggtggctcacacgtataatctcaggactttgggaagccaaggcgggaggataacttgacctcaggagttcaaatcagcctgggcaacatggcaaaaccccatctctacaaaaatacaaaaattagctgggtgttgtggcacacagctgtaatcccagctacttgggaggctgaagtgggagcatcacttgagcctgggaggtggaagttgccgtgagccaagatcatgccactgcattccagcccgggcaccacagagagacctcatctcaaaaataaataaataaataataaacaaataaataaatacagcagatagargttaatagatgtggagattt

SEQ ID NO: 674903 - DNA, 1319 bp, Homo sapiens
gtagtacaggtcaagtctaattttttaaaaataaaagcttcagaacaaaagcatattcagctctaactgtatacacagaggcatgaacttactcttgtgagtgctgagatttgacctgaatccagggtcaggctttcccacatgtctttagccagcttgctgaaatgtgaaattagaagcctacaagctctccttaaaggagactgtcagaagcggacyacaatgaatgtagggagcaggtggatgaatcaccagcaccatgtaaaacgccagtgcctttaaaagctacagtaagccatctaaatatagatgagaaagaacgcaagtgagtaacagacaaatggtcttacaggaaagcattttaaacttgtgacagccacattcagcacatgtggctaaatataaatattccatcactgttgccattcagccaaccgtcctgaagtagctttctccagcttggaacaactaacacagacaggtattttgattccagcgtcgtttccacaggtcttaaatgctacatgggtgattggtgtggtttcaaacgtggcccaagtgacactgctatcagctactataacggccccacctctcaagacccatgcggaacaaccaaagttttgtaagaaaatggcaagaagtgaaaggaggaacgggagggttagcagcctttccttgcaatgcctcatccttcaattcacctattcaggtgggtcatgagcctctttagagataaaaagcaaactttctgtaaacaggatggaaaagcttttaacttctgtctctaaaatgcagagcattttcagtctatgattggtacttatgatcaactgtgtgtcacttgtcaccgaaaacccagaatatgagtacaagctgatgtcaggttgcagatgtccgtgtccctgtttaataaagaaaatgggattattcactatctgacgcttttatcaggtaggcagtaggtgcacagaacaaatccagctagtcattctcaagagaggcacggcgtttgtccaaggtaccagctcagattaaagacactcatccctagggtttatgcatcaacagagaatatgagccagtcgttcccagcaagtaaacaactgtttgtgtgtgcctcagtttcccgattcccaggccgcctctcccacagggaaccaacacaccctatgagaactagtccggcgcgcacggcaggggctacccaaacacttgtggagcgaatggaggaatgaatgggctcggcagggactcgcgagggacccaagtgccgcaccacatgcctcctccgcgggcgaagccctccagccgaccgc

SEQ ID NO: 674904 - DNA, 1459 bp, Homo sapiens
gcacaatttgtgcactgcataaagcaaggatagagtaccctccttgtctgcccagaaaaggtctccttttctaattcacacaaaagcagccccatggatgcatgcccagctttgcaaggyctaccccactttccttttccctgtgctccagcactgcctggaatactccacccgcttcctccaagtcctagttccagtgcctactgccccgtgcattggccaggatgaatctcaagttccccatgtgcccacagaattacaacttctgctttggtcatggttgtccagctgtggttctttgtctatctccctgtctggcctcagacaggttccacagggacagggggtgtatcaaagccagggagtgtatccgagccctcccaggccaggtggaggagatgcacaggtaggatctgcttggtgggtgggaaggaaacagcattgttctcattgctgccccagaccctctcccggctgttccctgcacatcctcaatgagaggctattggcctgatctatgcaccccctgtgtcacttctactagctgctagagacaaagctgaaaggaaggggtcttgaaagatgcacccgcagggccaccatccaaggctgggctccagacatcaagagcccttcttcaggaggcctcaggggaagagaaggtggctgggctccatctggcttcactgaggctgccaggcaattgctctagggctcagctctagctcctgatgaaaaccagatctgggagcttggagcctttggtgaaactggatacctgtcaacgtaggcaaaggaaatacactgtgggagagaggctggctggcagccggcagtgctaggctgggcagtaaggttgggctttccttctgaaaggccccgaggagcccttgccatgtggggtgatgacagccctaagaaacaggagccccatggagacgggaaaagcacacccacttctccgtcactttcctccctcttcccttctctttctctgtttcatttattcagatagaagacctggattcaatcccagtactaatttttattcactttgggtgaattatttaacctctctgagcctcagtttgatcatctgtaaagtgggagtgaaaacagtagctacctagttggcttactgtaggatgaaaggtgaaaatgcaaagtgcttagcacagggcctggaacatagtaagcccttattaaatgtcagtgatcattatgctttctccctccctccttttctatgaaaaagttatttcatagaaataacttttctatgaaataacttttttttattaagccataaacataatacttgatgaccatagtaaggaaaatattttgtgtccctaatggctgatgggatggcaagagcattggccctggagtcagacatcctgaggttgtaatcccagctctgccatttacaaactggataatttactcaaagcactta

SEQ ID NO: 674905 - DNA, 2510 bp, Homo sapiens
gtctggttgaaaatacactttcagctgggcacagtggctcatgcctgtaatcccagcattttgggaggccgaggaaggcagatcacctgaggtcaggagttcgagaccagcctggccaacatggtggaatcccgtctctactaaaaatacagaaattagccaggtgtggtggcaggtgcctgtaattccaactacttggtaggctgaggcaggagaattgctggaacccaggaggcagaggttgcagtgagccgagatcatgccactgcacttcaaaaaaaaaaaaaaaaaaaaaaaaagaagaaagaaagaaagaaaagaaaagaaaaataaaagaaaatacactttttaggtaggcacggtggcccatgcctgtaatcccagcactttgggaggctgagatgggaagattatttgagcccaggaatatgggaccagcctgggcaacatagagagacacgcctctacccccatctctacaatttcttttttctttaaattagcagggcgtggtggtacatgccaatagtcccagctactcaggaggctgaggtgggaggatctcttgataccaggagtttgaggtgagctatgaccacgccactgcactccagtctgagtaagagtgagaacctgtctcaaaaacaaaaaagaaaaacattttttaaaattacagattctagggccctgtcacaggccaggctctctgggaagcagaccccgagatggagtttagagttcagagttccgagggtttgtcagtgttgtgaggatctacacttgtggaagggcgggatggaaagcaggattggacagtctcaagagtggcctcagctgaccctacgggagctctgaagatgggatgctccttcagagttgctctaagttggggtgagggggccaggcctttatgccccatgttcatcagtcgttagatgcagttacctcagggaagggatctgactttgggcaaggccgctgtctccagctgaggcgcctctcaaagaggactgccagctagctgagggcttcctgccagcagcacgcccagtagctggggaggaagtcattcattcctacgggagggtctgggtggtggctcacagagtccactgaaggcttctactgcagaattattgtagctaaattcctgaatgcggtccagagtctgtcatttttaaagttctgtcaatgattcggatggtctgcctggtttggaagccctcaatttcaggtagtcagagctcgagagggctctgagatcatggagtctgagggacttggttcgaggctattcagccggtcagtggcagagccaggagggtgctgacctgaccttggccatggcctcgctccacttttaaatttcattcaacagatatttattgagaatctcccaccaccacgtgaggcactggggatgcactagtgagcaaaagaacacagtccctgccctcgtgatactcacagtcctgcgccccaaaattctctcagctgggcctgcatccactcaaacactgctcatgggactgtgagttggcaatctctatcaacgccataaatgtatctactcagcatttccactcctaggtatttatcctacagctaaacctccatgtgagtgaagtgacgtacgtacaagaatattcacatattcaccagaaattctttataatagcaaaaacctggaaataccctagaggttgatcaatggggttctggttgaataaaccatatcctgggtaaacaytaaaaataaaagaggtacctttctatacactgatatgaaaaaaaaaaaccccaaaaaaaaacaaaaacaaaactcccaaggcatatcggtgagcaaaaaaaggaagatacagataataccaattgtaacatgccaccatttgggtgaaaaaaaaggaaagatacatgtgaatttgttaagattttcagtgaaccaagagctttaacaaagagggaaacactcagtccaaatagaaaaacagaaaccactcaaggtttttcacacagagatcattcataatcaattcataattcaggaaattggttcagtaagtgatacaagagctgagaaaccaaatacacctatcagctgacccaagaccttgggaaataatagcctgtaagggcttagcctcccggaatacagagaagagaaggaagaggctgaggagtgaattgcaggtgaccataatagtgtccaggataatatgtttaataaatgcatagagtacgtcccagaggccacataagaaatagtcatggtgcttgtctctaggagttggagactgggaaggagatctagattatatagggtgccctttggcatgagtgtatgttgcctatttgaaacaagacacttgcctgacattcatatttagtatattggtaaaggcaacgcacttatattttttcactggaaaacatcctcctggaaacgaaatgccagcaaaatctccccacacatttcctgtaattatacccccgaagacagcataccaatt

SEQ ID NO: 674906 - DNA, 2510 bp, Homo sapiens
gtctggttgaaaatacactttcagctgggcacagtggctcatgcctgtaatcccagcattttgggaggccgaggaaggcagatcacctgaggtcaggagttcgagaccagcctggccaacatggtggaatcccgtctctactaaaaatacagaaattagccaggtgtggtggcaggtgcctgtaattccaactacttggtaggctgaggcaggagaattgctggaacccaggaggcagaggttgcagtgagccgagatcatgccactgcacttcaaaaaaaaaaaaaaaaaaaaaaaaagaagaaagaaagaaagaaaagaaaagaaaaataaaagaaaatacactttttaggtaggcacggtggcccatgcctgtaatcccagcactttgggaggctgagatgggaagattatttgagcccaggaatatgggaccagcctgggcaacatagagagacacgcctctacccccatctctacaatttcttttttctttaaattagcagggcgtggtggtacatgccaatagtcccagctactcaggaggctgaggtgggaggatctcttgataccaggagtttgaggtgagctatgaccacgccactgcactccagtctgagtaagagtgagaacctgtctcaaaaacaaaaaagaaaaacattttttaaaattacagattctagggccctgtcacaggccaggctctctgggaagcagaccccgagatggagtttagagttcagagttccgagggtttgtcagtgttgtgaggatctacacttgtggaagggcgggatggaaagcaggattggacagtctcaagagtggcctcagctgaccctacgggagctctgaagatgggatgctccttcagagttgctctaagttggggtgagggggccaggcctttatgccccatgttcatcagtcgttagatgcagttacctcagggaagggatctgactttgggcaaggccgctgtctccagctgaggcgcctctcaaagaggactgccagctagctgagggcttcctgccagcagcacgcccagtagctggggaggaagtcattcattcctacgggagggtctgggtggtggctcacagagtccactgaaggcttctactgcagaattattgtagctaaattcctgaatgcggtccagagtctgtcatttttaaagttctgtcaatgattcggatggtctgcctggtttggaagccctcaatttcaggtagtcagagctcgagagggctctgagatcatggagtctgagggacttggttcgaggctattcagccggtcagtggcagagccaggagggtgctgacctgaccttggccatggcctcgctccacttttaaatttcattcaacagatatttattgagaatctcccaccaccacgtgaggcactggggatgcactagtgagcaaaagaacacagtccctgccctcgtgatactcacagtcctgcgccccaaaattctctcagctgggcctgcatccactcaaacactgctcatgggactgtgagttggcaatctctatcaacgccataaatgtatctactcagcatttccactcctaggtatttatcctacagctaaacctccatgtgagtgaagtgacgtacgtacaagaatattcacatattcaccagaaattctttataatagcaaaaacctggaaataccctagaggttgatcaatggggttctggttgaataaaccatatcctgggtaaacactaaaaataaaagaggtacctttctatacactgatatgaaaaaaaaaaaccccraaaaaaaacaaaaacaaaactcccaaggcatatcggtgagcaaaaaaaggaagatacagataataccaattgtaacatgccaccatttgggtgaaaaaaaaggaaagatacatgtgaatttgttaagattttcagtgaaccaagagctttaacaaagagggaaacactcagtccaaatagaaaaacagaaaccactcaaggtttttcacacagagatcattcataatcaattcataattcaggaaattggttcagtaagtgatacaagagctgagaaaccaaatacacctatcagctgacccaagaccttgggaaataatagcctgtaagggcttagcctcccggaatacagagaagagaaggaagaggctgaggagtgaattgcaggtgaccataatagtgtccaggataatatgtttaataaatgcatagagtacgtcccagaggccacataagaaatagtcatggtgcttgtctctaggagttggagactgggaaggagatctagattatatagggtgccctttggcatgagtgtatgttgcctatttgaaacaagacacttgcctgacattcatatttagtatattggtaaaggcaacgcacttatattttttcactggaaaacatcctcctggaaacgaaatgccagcaaaatctccccacacatttcctgtaattatacccccgaagacagcataccaatt

SEQ ID NO: 674907 - DNA, 2510 bp, Homo sapiens
gtctggttgaaaatacactttcagctgggcacagtggctcatgcctgtaatcccagcattttgggaggccgaggaaggcagatcacctgaggtcaggagttcgagaccagcctggccaacatggtggaatcccgtctctactaaaaatacagaaattagccaggtgtggtggcaggtgcctgtaattccaactacttggtaggctgaggcaggagaattgctggaacccaggaggcagaggttgcagtgagccgagatcatgccactgcacttcaaaaaaaaaaaaaaaaaaaaaaaaagaagaaagaaagaaagaaaagaaaagaaaaataaaagaaaatacactttttaggtaggcacggtggcccatgcctgtaatcccagcactttgggaggctgagatgggaagattatttgagcccaggaatatgggaccagcctgggcaacatagagagacacgcctctacccccatctctacaatttcttttttctttaaattagcagggcgtggtggtacatgccaatagtcccagctactcaggaggctgaggtgggaggatctcttgataccaggagtttgaggtgagctatgaccacgccactgcactccagtctgagtaagagtgagaacctgtctcaaaaacaaaaaagaaaaacattttttaaaattacagattctagggccctgtcacaggccaggctctctgggaagcagaccccgagatggagtttagagttcagagttccgagggtttgtcagtgttgtgaggatctacacttgtggaagggcgggatggaaagcaggattggacagtctcaagagtggcctcagctgaccctacgggagctctgaagatgggatgctccttcagagttgctctaagttggggtgagggggccaggcctttatgccccatgttcatcagtcgttagatgcagttacctcagggaagggatctgactttgggcaaggccgctgtctccagctgaggcgcctctcaaagaggactgccagctagctgagggcttcctgccagcagcacgcccagtagctggggaggaagtcattcattcctacgggagggtctgggtggtggctcacagagtccactgaaggcttctactgcagaattattgtagctaaattcctgaatgcggtccagagtctgtcatttttaaagttctgtcaatgattcggatggtctgcctggtttggaagccctcaatttcaggtagtcagagctcgagagggctctgagatcatggagtctgagggacttggttcgaggctattcagccggtcagtggcagagccaggagggtgctgacctgaccttggccatggcctcgctccacttttaaatttcattcaacagatatttattgagaatctcccaccaccacgtgaggcactggggatgcactagtgagcaaaagaacacagtccctgccctcgtgatactcacagtcctgcgccccaaaattctctcagctgggcctgcatccactcaaacactgctcatgggactgtgagttggcaatctctatcaacgccataaatgtatctactcagcatttccactcctaggtatttatcctacagctaaacctccatgtgagtgaagtgacgtacgtacaagaatattcacatattcaccagaaattctttataatagcaaaaacctggaaataccctagaggttgatcaatggggttctggttgaataaaccatatcctgggtaaacactaaaaataaaagaggtacctttctatacactgatatgaaaaaaaaaaaccccaaaaaaaaacaaaaacaaaactcccaaggcatatcggtgagcaaaaaaaggaagatacagataataccaattgtaacatgccaccatttgggtgaaaaaaaaggaaagatacatgtgaatttgttaagattttcagtgaaccaagagctttaacaaagagggaaacactcagtccaaatagaaaaacagaaaccactcaaggtttttcacacagagatcattcataatcaattcataattcaggaaattggttcagtaagtgatacaagagctgagaaaccaaatacaccwatcagctgacccaagaccttgggaaataatagcctgtaagggcttagcctcccggaatacagagaagagaaggaagaggctgaggagtgaattgcaggtgaccataatagtgtccaggataatatgtttaataaatgcatagagtacgtcccagaggccacataagaaatagtcatggtgcttgtctctaggagttggagactgggaaggagatctagattatatagggtgccctttggcatgagtgtatgttgcctatttgaaacaagacacttgcctgacattcatatttagtatattggtaaaggcaacgcacttatattttttcactggaaaacatcctcctggaaacgaaatgccagcaaaatctccccacacatttcctgtaattatacccccgaagacagcataccaatt

SEQ ID NO: 674908 - DNA, 638 bp, Homo sapiens
aagaagtagaaaggccagctcttgtcgttgacaatcaaccctggtaaactgtaggaggcacgggaagtataactaacttgcccaaggtcacgctgccctacaatgacagaggtgggattcagcccagatctgggtgagatcatgagcccagccctctcactgtgcagacagggatacccggccactgagggtcacagaggcaccagcccgaggggctctgaccttccatgtcatctcccttgtcccttagggggtctcaaatcagactgccccaackctactacaactctcagagcctcagtcttctctgctatcaagtgggactttactacatatttaaaatattgttatgaggtttaaatttgtcaatgactataaagcatttagcacatagtgggctcaacaaatgcgagtccatttcttccttttgtttcagtatcttaattcctgctcctcgtactgaaacctcgcagggttactagaggctcagacaagaacactgacctctctacaaaagcctcggcgtgtaccggagtcccactgttgggcctgggagctgggctgtgatctgtggatccttctgccctgaaatccagatccatgtttgcttggcatgccgtcttccctcctaactcaag

SEQ ID NO: 674909 - DNA, 431 bp, Homo sapiens
attttgtaccaaatgaagtgcagcaaagacatgttcatggatttactggtcctaccatattctttatcattttgacatagctaaaccaataatagaatggtgggaggcctcttgtttattttttcttttaatattcaatgagtttcaaaatgtgatttagtttaggtaagttttagatttacagaaaatttgagagatagtacagagagttcccacatctcatttctcccattattaacatcttccatataatacatttgttacaatgaatgaactaatattaataaattactggtaactaaattcatgctttattcagatttccttatttattagcttcctcaagtgttttgtctttctgaatgacactagtggctggtgacactttgtgagactgaatcagcactgagaatrtggtgctcgtcctccca

SEQ ID NO: 674910 - DNA, 605 bp, Homo sapiens
aataaaataaaataaaaataaaaactatgccagagatctcaattaattagtacatactcctacagagcagaattctcttacattacttcaaataaagacctgcttttaaaattatttctcaaacatgttatagttttttacacaagccaactgagtttgtggagctggtttacctataaaaactggctgctgggaggatacacattcctggccaagttcaggtccacgagatgaaactcttaacttacagagagaactgtgctccaagtcatatcgcagcagtrctcaacccactgagaagccaagagcaacacgctctcaggatgaactctcctaaaacacggatcagttactaaatcattagagaaacctagatatgattgaaagtctgactctagccaaactaaccttcacctgcatttatctcgggttgctgcagggaacagcaactttaccagtaaggggtttcctttgcaggagatgaaaatgttttggaaccaaatggacgaggctgtataacactgtgagtgtattaaaatatcactgaattgttcactttaatttcatgttatgcaaacttcacctcgatacattaaaaaaaatca

SEQ ID NO: 674911 - DNA, 605 bp, Homo sapiens
aataaaataaaataaaaataaaaactatgccagagatctcaattaattagtacatactcctacagagcagaattctcttacattacttcaaataaagacctgcttttaaaattatttctcaaacatgttatagttttttacacaagccaactgagtttgtggagctggtttacctataaaaactggctgctgggaggatacacattcctggccaagttcaggtccacgagatgaaactcttaacttacagagagaactgtgctccaagtcatatcgcagcagtgctcaacccactgagaagccaagagcaacacgctctcaggatgaactctcctaaaacacggatcagttactaaatcattagagaaacctagatatgattgaaagtctgactctagccaaactaaccttcacctgcatttatctcgggttgctgcagggaacagcaactttaccagtaaggggtttcctttgcaggagatgaaaatgttttggaaccaaatggacgaggctgtataacactgtgagtgtattaaaatatcactgaattgttcactttaatttcatgttatgcaaacttcacctcgatacattaaaamaaatca

SEQ ID NO: 674912 - DNA, 1330 bp, Homo sapiens
gaacttttaaaacaacattattttaatcataatattccaactctggtttttcatattcagtttgtttctttttaatttttcaagtctaacaaagctaaatcaaaattttctactaaaattggggtttgggtaatggcttcttgcatttggatgttatatctaattggataaatgcttatgacaaaatattttcactctagagtaaaattttaatgtaagtgatataatccttttaatcttatttctttaacctggattactattttgaccattaatattggtttggtaatatggttttcctgatatggttgtgctaatccttttatgattatttttgtgtggattgcctcataattaccatatagatgcattttgtgttttgaacctttctttaaaaattttaggttaataaaaagttacttatacatgtatttcttaagtagcgaattcttctggaatgttgtaaaattcaaaagatacacaacggtatatatgaaaaaaaaaatctctctctctcctttctcccaggtacccattttgtgttcttagagataacactactacttcataactgtatatcatgtatgagatgatccacatatttacatacatttgtgcacatgtgttttttatatgatgagatgttccacgtatttacatacattcatgaacatgtgtttttttccccagattacagcctatttttatactatctgttcatatacaactacacaattcttttcagtgaaggtaaaataggccactgttttcctgtatcataatgtccgtcagttttctttcttccacttcacatattcagcgcccattttcttctttttcattgcatatgaattttggtgtaattaataactttgaagataattaaaattagtctaaaactaacacatgcataggaaaaatggaaatgcattttaaatcaacacttctattgagcgacataaccatgtaatcagattactgctacactctctacattgactatattgacttattgatgaatacatctagagatttattacaggaacatttgtttctttaggttctttctcagcamaggtgcaaccacagcattgattgggtcaagatacatgagaagtgtaatctattaccacttaggtacaaatacatgcatctttacactcagatatactctttgtgttactatttatttatttatttttatttatgtttttggagacggagtctcgctctatcaccagactggagtgcagtggcacgatcttggctcactgttacttccgcctcccggtttcaagcgattctcctgcctcagcctcccaagtagctg

SEQ ID NO: 674913 - DNA, 1330 bp, Homo sapiens
gaacttttaaaacaacattattttaatcataatattccaactctggtttttcatattcagtttgtttctttttaatttttcaagtctaacaaagctaaatcaaaattttctactaaaattggggtttgggtaatggcttcttgcatttggatgttatatctaattggataaatgcttatgacaaaatattttcactctagagtaaaattttaatgtaagtgatataatccttttaatcttatttctttaacctggattactattttgaccattaatattggtttggtaatatggttttcctgatatggttgtgctaatccttttatgattatttttgtgtggattgcctcataattaccatatagatgcattttgtgttttgaacctttctttaaaaattttaggttaataaaaagttacttatacatgtatttcttaagtagcgaattcttctggaatgttgtaaaattcaaaagatacacaacggtatatatgaaaaaaaaaatctctctctctcctttctcccaggtacccattttgtgttcttagagataacactactacttcataactgtatatcatgtatgagatgatccacatatttacatacatttgtgcacatgtgttttttatatgatgagatgttccacgtatttacatacattcatgaacatgtgtttttttccccagattacagcctatttttatactatctgttcatatacaactacacaattcttttcagtgaaggtaaaataggccactgttttcctgtatcataatgtccgtcagttttctttcttccacttcacatattcagcgcccattttcttctttttcattgcatatgaattttggtgtaattaataactttgaagataattaaaattagtctaaaactaacacatgcataggaaaaatggaaatgcattttaaatcaacacttctattgagcgacataaccatgtaatcagattactgctacactctctacattgactatattgacttattgatgaatacatctagagatttattacaggaacatttgtttctttaggttctttctcagcacaggtgcaaccacagcattgattgggtcaagatacatgagaagtgtaatctattaccacttaggtacaaatacatgcatctttacactcagatatactctttgtgttactatttatttatttatttttatttatgtttttggagacggagtctcgctctatcaccagactggagygcagtggcacgatcttggctcactgttacttccgcctcccggtttcaagcgattctcctgcctcagcctcccaagtagctg

SEQ ID NO: 674914 - DNA, 3050 bp, Homo sapiens
aagcaagccattaggagtttcagtaggtgcttaacacttgagtaataattaatttatgcagtttactaatccaactataaaacatctgtggtgggcaggaggtttacagctggagtctcattaagggagagcagatatggataaccagcaagaatgctggtgaggaagtgattctagaaccctacagatgatgccaagtggaatctttcaatgcctttttttaccttttggttagctttggtgtcaccaaatcttatgtaggaagttgaattattggtgtcaattcttcactctcttgtttggaaattttgcatctrcatccttgctatgtcctcatggtgaaatcacatgcctttttacttgcttttttcaatcaatgtgatgaaaaaaggtgactaggtgacttgcttttttcaatcaatgtgatgactgatttttgttggtaggagatttttaccaagtatcaaaaattcttgtatataattcttcaataacttttcaaattgctctgattccataatggaatactaatagtattaaaatataataagtcataatattatcattcatagtatttttatcttcacttgcattaatattctctccaaagccaaacatagtccatcatggctcagcagaccaagaatatatgcaatggactgggaattaagccctacctgaacaagtggcaataacatttacatctgctgacatagcattttcttaccctttatacctctaaatatccttcatgccactatatgggccttgctttcatgaaggtaagatatttgctttgaggttgagaaagtttctgaaaattcaagctgttactgcaagtaactgcatttcttgctgacagagtctcataaagagtggaagaaatttgaagatagaatttggtctagccaggaagaggatttcattttaggagttggagtagacttacgtagggtctcaaattataaggcagctgaacccatacccatatatagagataaatccttggtttcttatccttgattagggatttctttgcagaaacagggatgcattacttaaagaacttcagtggaaagaactggcttagtaaatgctaaggtctgaatgtttgtgtcctgccaaaatttcatttgttgaaatcctaacccctgaggtgatggtattaggagatggagcctctgggagatgataaggtcatgggagtgtagccctccaaatcagactagtgcccttataaaagtgatccaagaaagactcctcagcccttctgccatgtgaggttagagtgagaagatggctatatatgagaaagaggacctcgatgaacatgaaatctgctggcaccttgatcttgaacatccagcctccacaactgtgagaaataaatttctattatttataagccaccaagtctacagtactttgttatggcagcccaaattaagacacaaattcattggagagaatttagaaagtaattttgtatattctattttcctgaatctataaacacatttaaacttatatccattttgacttgaatctatataggaaaacaaataaaatgggcattatgtccacaaaaataaatctatattaaatatttttactcccgtgaataatttcattgtattatgggaatctgcaaaggaatattagagttgaaattgagcttaagctggaaaaatattccttgagtgtgggctagtaaattatcaggttacctaaagaaaattaaactaaatattgataggatgcatgaatatctagaaacaaaactttgcggaacaattttgataaatggaggaagagatagatctgttcaaccttctcagaaatgggagccagtagctatacataattttcttagtaattctttgtaaaattgtaattctcagtgattctttgctacattttaattttgcttaaatatgcaaggataatttattttaaattcataaatttaatctgagctattatttgtaatatatttatgctgaggtttttccactctctgaatttgccagactatataaaatcaaaccgtctcacatcaggtggccagtgaatgaagcgtgagaatatgccatacaatatctagaaaataacttgcatgtttcaaaacatccaagctatatactcatggaaatcatagtaatattgattgtaaattgtatcattgattgcagttttactatatgccaaacattgtgacaagcattctagattgtcatttaattattaaaagtatttgagtaggttctagtaatatcctcattttatagctgaggaaattaaggaaaaaatctatttttcttaaattcctaaagtcatattgaagcaaaaatgtctggtatcttctgtcaacataaggaaaatatgatctattgacaaataaactgatttaaattaagtgagtgctgcttcgtgttaggccatcacagaatggggtagggactggtgtgaccccatgtcccaccactactaccattgacattatgtcgaaggcttttcaaatatctgcctacccatctaataaatacagacttggccacattttttccttatttgttagtgattgatggtgttaaatggaacagcactgaaaatcttgttaacgtcaagatatatttaatctattgcttcaccttcatctcctaagtcactatcacatataaagaaattagactaatctaacatgattcatatttttatacagccttgtttattactccccaatacaggattgctggtgttcatctagctgttgccaattgattttcgatgacaaattctatcttctttttttttttttatcttgcattgaaatttagctaaaacgtgtcattactttctgaaccttatggttagttgaggaaatgatttaaatataagtaattgtgctgatcaactttatcaataattcttcatattaaatttcttgattctctaagcttaatatttcaaaaataacttatatcctcatctaattaatgccatctttatcagaggctattggttactaggataaacagatttgaacatat

SEQ ID NO: 674915 - DNA, 1089 bp, Homo sapiens
ttgaaataattatagaacttatagaaaactgcaatagcagcataatgggtgcctgctcccttcacccagctcccccagggcttctagttttgccatgtgtccccacctcgctgaccagccccagtagacggcaccaaaggcaggcaggatcacacactcctctttgctcaaaacactcagggatccttcctgccccacacaccctctccatgcacccacattctctgcccaagggtggcctggcccccaggcccagctcatccccagcatgtgactcctttcactcaggctgtggatctcatgtattgcaaatgtggtttaaactttgagaacagcaattctggtttgtagaaaaaaagtgaggatctaggcgtttgcagtcatgcacatgttcgtattttaaatacaggccaatgagctgctgcctagtgtgcctaccagagacacacctgttgttaaactacaactggatttactgttccattctgcaaraatacgccatggtgctgtggagggtgcagtgagaggcttggaagagccttgccacaggctgtgtgtgtgtgccagctggccatgggtggactaactggagaggggctggctctgagttgagcactgttaggaagcaggaggaggtaggtatacactggaatcttcataaacctcatccccggggaggcctgacacgggcaggacaggctatcaccaaggccaaagcggcagtcatcatgtgggctgggagaggacacggctggcactcctggcctgagagatgctcccatctgtctgtattcagacaggattctggagtggcttgtctttgtcttgatcagaccatctggggtcttgcctgctgctggtgtcctgagggacagtttgtgttctccaggagagccccacaacctcactgagggtgccagcccagctcctgggacacagccaccctcctccttctcaagctttaatgagaaacgggcaggaggttgccggagaaccactgcccatcttccggggtgctaggggtgtctgctggcagttgtggtctagggcaaaaagagaagggaagggaaaatctttcagaaaataacg

SEQ ID NO: 674916 - DNA, 1089 bp, Homo sapiens
ttgaaataattatagaacttatagaaaactgcaatagcagcataatgggtgcctgctcccttcacccagctcccccagggcttctagttttgccatgtgtccccacctcgctgaccagccccagtagacggcaccaaaggcaggcaggatcacacactcctctttgctcaaaacactcagggatccttcctgccccacacaccctctccatgcacccacattctctgcccaagggtggcctggcccccaggcccagctcatccccagcatgtgactcctttcactcaggctgtggatctcatgtattgcaaatgtggtttaaactttgagaacagcaattctggtttgtagaaaaaaagtgaggatctaggcgtttgcagtcatgcacatgttcgtattttaaatacaggccaatgagctgctgcctagtgtgcctaccagagacacacctgttgttaaactacaactggatttactgttccattctgcaaaaatacgccatggtgctgtggagggtgcagtgagaggcttggaagagccttgccacaggctgtgtgtgtgtgccagctggccatgggtggactaactggagaggggctggctctgagttgagcactgttaggaagcaggaggaggtaggtatacactggaatcttcataaacctcatccccsgggaggcctgacacgggcaggacaggctatcaccaaggccaaagcggcagtcatcatgtgggctgggagaggacacggctggcactcctggcctgagagatgctcccatctgtctgtattcagacaggattctggagtggcttgtctttgtcttgatcagaccatctggggtcttgcctgctgctggtgtcctgagggacagtttgtgttctccaggagagccccacaacctcactgagggtgccagcccagctcctgggacacagccaccctcctccttctcaagctttaatgagaaacgggcaggaggttgccggagaaccactgcccatcttccggggtgctaggggtgtctgctggcagttgtggtctagggcaaaaagagaagggaagggaaaatctttcagaaaataacg

SEQ ID NO: 674917 - DNA, 3461 bp, Homo sapiens
gatgcaatgcaaagttcacatataaggataattatttgtgataatggtgacaatgatccctatttcttttcctgctcttatgaatttgcaaatgtcctacaaactgtattaaatgagtctgtgaaagttcatctaagtccctagtattattattttttaactctctagaaagtcctagccacgtagctcaaagcaaaatagaaaagatccaaatcattcataggacaagtgttgaggcaactttcaattactaaatatatttttagccatttaaaactaaaagaaaagtaacgtctgtaatcccagcactttgggatgctgaggcaggcggaacacaaggtcaggcgatcgagaccatcctggctaacacggtgaaaccccgtctctactaaaaatacaaaaaattagccagcctggtggccggcgcctgtagtcccagctacccaggaggctgaggcaggagaatggcttgaacccgagaggcggagcttgcagtgagccgagatcacgtcactgcactctagcctgggcagcagagcgaaactccgtctcaaaaaaaaaaaaaaaaaaaagtaagaaaactcttttactcctttttatgatttaaattttattttaggtttgaaaagtgagctatatatcacttaacagtcaggaagcgtgcagtaaactcaatctctgaaccgacgttacctaaatcaaagatgttcgttttctcatactcatctctaaaacagaggtagacagagaaagtgcttctttttccgagattgtaatgaattcaaacctattcattaactttatagcagttattttggtttcacagtgaaacataaaaagttctattttattggaaagaaaaccaagtagctatctaagtagttcatgagaaggaatttgttctactgttttaagtgcatgagggataaagcaagacttagaaatatttttgttagaccatttcattttaatagtattttctattataacagaaatgacctacagtaaaataattcaaaatacccttacttctgaaggttatttccacataaaattgtaacattactatgatctaaatttaaataaattttctattgatgttaaaagtttgataatatacagtttgttaaagtggtttggtcactatttgggcacgatcgacttcaaaccataggtgtttaaatgaaccaaagtcttttgtttatttctatagctttttgcctagtttgattaataactagtataccagtcattcacatatagtcataactggccaaccaaggtttacttggtaggagggtgacagtttaccctttaataccacctgattaaaatacacaagatgttctacacaaataacaacaaattgtttatttctaagaacataattttccttttataggaagctctcaactttaatttggagtcacattttaattttataatgtaataattcaataaatggtcattagatattgggttatttggaaaactgcaaaaaatcaaacttctgacaatgtcctttaaaataattaactcagctggaaatagttaaacaagacttaaaaatacaaatcataatggccaggcatggtggctcacgcctgtaatcccagcactttgggaggctgaggcgggcggatcacgaggtcaggagatcgagaccacggtgaaaccccgtctctattaaaaatacaaaaaaacttagctgggagcagtagcgggtgcctgtagtcccagctacttgggaggctgaggacagagaatggcttgaatccgggaggcggaacttacagtgagccgagatcgcgccactgcactccagcctggggcaacagagcaagactccatctcaaaaaaaaaaaaaaaaaaaagaaaatacaaatcataacgtgaatattcaaatgattgtacagtgtaacaattgtatgcaaataattaagaatagtgactataataaaaaagtttaatagatttgacatcaacatttaaagaatataacttacatatacgaaaataagccatcaaaacttgaagctgtcaaattgtgaaaaacagtagtaaacaataaaaatcactgactcattggaaacactgcaaaatgtcatgaaaacatttcagaaatgaaggtacgttaatgaaaaataatcatagttttaaattcagtctcacctcacctttaagaaacagtgtaaaacagcaataaatgggataatttatattactgcaataaaatgcaaatatatatatattgtgtactagcaccctctcttcaatgtatactttaacccaatagctttctaccactggaaatttatcataagaaaataatggtggcttacacctataataccagcactctggtaggctgaggcagtaacgtcagttgagcctaggagttccagatcagcctgggcaaaatagtgggattctgtctctaccaaaaaaaaaaaaaaatgccagtcatagtggctggcacctgaatccttgctgcttgggagactcatatggacctaggctgatttgagcaggggtatcatttgagcacaggaggtcaagtctgcagtgagctatgatcattccatcgctgcagcctgggtgacagagcaagaccctgtcacacacgcaaaagaaaataattcagaatgcgcccaaaaatatataaatatatttctgaaagctgcatttgtaatactgcaaaatcaatgccacattgagacaggggtaccaagattaaggtagagtcaccaatgacaattaaaatctggagtcagaatgctgtatctaagtaggacaacaatttctctgctgcagcctaccattaccatgcagcaaagttgctctattacttctgaattttccacattcttaaagaaaagcagaaaatccagtttytaagacaaaaatcaagttataagtattgacagaaaaatcacttttaaataattgtaaaagtaacaacacactataacagtaaatctaattcagcctgataccaggctgtaccaatagatataatgaaactgcataatattggtaaaacaattgtatggtagaaaaatactggcataaaaatgttcatagcaaattcataaatggaaaaagtagtctgttttatttaaataaaaaggagctaaatgaatggcagacaactacaaattaatagtttatacctttcaagtttagaattaaggatatatttttctttattttttgttttcattattgtgatgtattatgctgaaattagcaaaaaaaaaaaaaaaaaaaaaaaaaaagagagtatctgaccaatacagaaatttgtattgagaagtaaggtgtgtccctaacaaacccacctatgagtcagtttgaaggtagcaagaaaatttttatcactgtcatatacttcagaagtatttgtgtacctaatgatttccagtgtcatcaaacataggtaagaacactgagtattagca

SEQ ID NO: 674918 - DNA, 3461 bp, Homo sapiens
gatgcaatgcaaagttcacatataaggataattatttgtgataatggtgacaatgatccctatttcttttcctgctcttatgaatttgcaaatgtcctacaaactgtattaaatgagtctgtgaaagttcatctaagtccctagtattattattttttaactctctagaaagtcctagccacgtagctcaaagcaaaatagaaaagatccaaatcattcataggacaagtgttgaggcaactttcaattactaaatatatttttagccatttaaaactaaaagaaaagtaacgtctgtaatcccagcactttgggatgctgaggcaggcggaacacaaggtcaggcgatcgagaccatcctggctaacacggtgaaaccccgtctctactaaaaatacaaaaaattagccagcctggtggccggcgcctgtagtcccagctacccaggaggctgaggcaggagaatggcttgaacccgagaggcggagcttgcagtgagccgagatcacgtcactgcactctagcctgggcagcagagcgaaactccgtctcaaaaaaaaaaaaaaaaaaaagtaagaaaactcttttactcctttttatgatttaaattttattttaggtttgaaaagtgagctatatatcacttaacagtcaggaagcgtgcagtaaactcaatctctgaaccgacgttacctaaatcaaagatgttcgttttctcatactcatctctaaaacagaggtagacagagaaagtgcttctttttccgagattgtaatgaattcaaacctattcattaactttatagcagttattttggtttcacagtgaaacataaaaagttctattttattggaaagaaaaccaagtagctatctaagtagttcatgagaaggaatttgttctactgttttaagtgcatgagggataaagcaagacttagaaatatttttgttagaccatttcattttaatagtattttctattataacagaaatgacctacagtaaaataattcaaaatacccttacttctgaaggttatttccacataaaattgtaacattactatgatctaaatttaaataaattttctattgatgttaaaagtttgataatatacagtttgttaaagtggtttggtcactatttgggcacgatcgacttcaaaccataggtgtttaaatgaaccaaagtcttttgtttatttctatagctttttgcctagtttgattaataactagtataccagtcattcacatatagtcataactggccaaccaaggtttacttggtaggagggtgacagtttaccctttaataccacctgattaaaatacacaagatgttctacacaaataacaacaaattgtttatttctaagaacataattttccttttataggaagctctcaactttaatttggagtcacattttaattttataatgtaataattcaataaatggtcattagatattgggttatttggaaaactgcaaaaaatcaaacttctgacaatgtcctttaaaataattaactcagctggaaatagttaaacaagacttaaaaatacaaatcataatggccaggcatggtggctcacgcctgtaatcccagcactttgggaggctgaggcgggcggatcacgaggtcaggagatcgagaccacggtgaaaccccgtctctattaaaaatacaaaaaaacttagctgggagcagtagcgggtgcctgtagtcccagctacttgggaggctgaggacagagaatggcttgaatccgggaggcggaacttacagtgagccgagatcgcgccactgcactccagcctggggcaacagagcaagactccatctcaaaaaaaaaaaaaaaaaaaagaaaatacaaatcataacgtgaatattcaaatgattgtacagtgtaacaattgtatgcaaataattaagaatagtgactataataaaaaagtttaatagatttgacatcaacatttaaagaatataacttacatatacgaaaataagccatcaaaacttgaagctgtcaaattgtgaaaaacagtagtaaacaataaaaatcactgactcattggaaacactgcaaaatgtcatgaaaacatttcagaaatgaaggtacgttaatgaaaaataatcatagttttaaattcagtctcacctcacctttaagaaacagtgtaaaacagcaataaatgggataatttatattactgcaataaaatgcaaatatatatatattgtgtactagcaccctctcttcaatgtatactttaacccaatagctttctaccactggaaatttatcataagaaaataatggtggcttacacctataataccagcactctggtaggctgaggcagtaacgtcagttgagcctaggagttccagatcagcctgggcaaaatagtgggattctgtctctaccaaaaaaaaaaaaaaatgccagtcatagtggctggcacctgaatccttgctgcttgggagactcatatggacctaggctgatttgagcaggggtatcatttgagcacaggaggtcaagtctgcagtgagctatgatcattccatcgctgcagcctgggtgacagagcaagaccctgtcacacacgcaaaagaaaataattcagaatgcgcccaaaaatatataaatatatttctgaaagctgcatttgtaatactgcaaaatcaatgccacattgagacaggggtaccaagattaaggtagagtcaccaatgacaattaaaatctggagtcagaatgctgtatctaagtaggacaacaatttctctgctgcagcctaccattaccatgcagcaaagttgctctattacttctgaattttccacattcttaaagaaaagcagaaaatccagtttctaagacaaaaatcaagttataagtattgacagaaaaatcacttttaaataattgtaaaagtaacaacacactataacagtaaatytaattcagcctgataccaggctgtaccaatagatataatgaaactgcataatattggtaaaacaattgtatggtagaaaaatactggcataaaaatgttcatagcaaattcataaatggaaaaagtagtctgttttatttaaataaaaaggagctaaatgaatggcagacaactacaaattaatagtttatacctttcaagtttagaattaaggatatatttttctttattttttgttttcattattgtgatgtattatgctgaaattagcaaaaaaaaaaaaaaaaaaaaaaaaaaagagagtatctgaccaatacagaaatttgtattgagaagtaaggtgtgtccctaacaaacccacctatgagtcagtttgaaggtagcaagaaaatttttatcactgtcatatacttcagaagtatttgtgtacctaatgatttccagtgtcatcaaacataggtaagaacactgagtattagca

SEQ ID NO: 674919 - DNA, 601 bp, Homo sapiens
ttgatttatttccacaatctgataaatgtattgtagaccaaaacatcaaaaaccataagtagggctgggcgcggtggctcaagcctgtaatcccaacactttggccaaggcaggcagatcatgaggtcaggagattgagaccatcgtggctaagatggtgaaaccccgtcgatacgaaaaatacaaaaaaattagccggacgtcgtggtgggcgcctgtagtcccagctaatcaagaggctgaggcagaagaatggcgtgaaccccggaggcggagcttgcagtgagcggagatggcgccactgcactccagcctgggcgacacagcgagactccrtctcaaaacaaacaaacaaacaaacaaacaaaccataagtagcctgtataatgtctttttattcgctgccatgtttttaatataaatatataagagcatcttaaattatttaaataagtcaattattttataagtgaatttagtattagaacatatatattcttttgcacaggaagcttttttaagtgtcagaaattatatacttatatagagacttttgttcacaaagtagttagttgtaggtacatacaacatacttgaaaaa

SEQ ID NO: 674920 - DNA, 1465 bp, Homo sapiens
tgggaatgagggcaaggaacacctggcctgctcagggcagaaaaccacttaagggcattcttaagccataaacaatagcatgagcgatttaggccttaaggacatgctcctgctgcagttaactagcccaacatattcctttaattcagcccatcccttcatttcccataagggatacttttagttaatttaatrtctatagaaacaatgctaatgactggtttgctgttaataaatatctgggtaaatctctgttcagggctctcagctctgaaggctgtgagacccctgatttcccacttcacacctctatatttctgtgagtgtctttaattcctctagtgccactgggttagggtctccccagctgagctggtcttggcaactgctaaattaaaactttaaatgatcacaaaatgatttgtcataaaagcatgtatatggccaggcacggtagctcatgcctgtaatccccgcactttgggaggccaaggtgggcagatcatctgaggttgggagttcgagaccagcctgaccaacatggagaaaccccatctctactaaaaatacaaaactagccagatgtggtggcacctgcctgcagtcccagctacttaggaggctgaggcaggaaaattgcttgaactcaggaagcagcagtcgtggtgagctgagatcatgccattgcacttcagcctgggcaataagaatgaaagtccatcaaaaacaaaacaaaacaaaaaaacacagttaaaatgcctttgaagagtgaaaataaaggactgattaagcagagagtttgacatggaaaaaggctggtcaattgtttgaaaattacattgctgctgggtgtggcggctcaagcttgtaatcccagcactttgtgaggtcaaggcaggcacatcacctaaggtcaagagttcaagaccagcctggctaacatggcaaaaccctgtctctactaaaaatacaaaaattagctgggtgtggtggtgggaacctgtaatcccagctactcaggaggctgaggcaggagaatcacttgaacccgagtggcagaagctgccatgagctgagattgcatcactgcaccccagcctgggaaacagatcaagacttcatctcaaaaacaaaacaggtggggcgtgggggctcacacctgaaatctcagcactttgggaggcagaagcaggcagatcatgagatcaggagttcgagaccagcctgaccaacatagtgaaaccccgtctctactaaaagtacaaaaattaggcatgatggcatgcacatgtaatcccagctactcaggaggctgaggcaggagaatcacttgaacctgggaggcagaggttgccgtgagccaagattgcaccaccgcggtctatcttgggtgacagagcaggactccatctcaaaaaaaaaaaaaaaaattattacattgcctgcatggactacaacttttaca

SEQ ID NO: 674921 - DNA, 1465 bp, Homo sapiens
tgggaatgagggcaaggaacacctggcctgctcagggcagaaaaccacttaagggcattcttaagccataaacaatagcatgagcgatttaggccttaaggacatgctcctgctgcagttaactagcccaacatattcctttaattcagcccatcccttcatttcccataagggatacttttagttaatttaatgtctatagaaacaatgctaatgactggtttgctgttaataaatatctgggtaaatctctgttcagggctctcagctctgaaggctgtgagacccctgatttcccacttcacacctctatatttctgtgagtgtctttaattcctctagtgccactgggttagggtctccccagctgagctggtcttggcaactgctaaattaaaactttaaatgatcacaaaatgatttgtcataaaagcatgtatatggccaggcacggtrgctcatgcctgtaatccccgcactttgggaggccaaggtgggcagatcatctgaggttgggagttcgagaccagcctgaccaacatggagaaaccccatctctactaaaaatacaaaactagccagatgtggtggcacctgcctgcagtcccagctacttaggaggctgaggcaggaaaattgcttgaactcaggaagcagcagtcgtggtgagctgagatcatgccattgcacttcagcctgggcaataagaatgaaagtccatcaaaaacaaaacaaaacaaaaaaacacagttaaaatgcctttgaagagtgaaaataaaggactgattaagcagagagtttgacatggaaaaaggctggtcaattgtttgaaaattacattgctgctgggtgtggcggctcaagcttgtaatcccagcactttgtgaggtcaaggcaggcacatcacctaaggtcaagagttcaagaccagcctggctaacatggcaaaaccctgtctctactaaaaatacaaaaattagctgggtgtggtggtgggaacctgtaatcccagctactcaggaggctgaggcaggagaatcacttgaacccgagtggcagaagctgccatgagctgagattgcatcactgcaccccagcctgggaaacagatcaagacttcatctcaaaaacaaaacaggtggggcgtgggggctcacacctgaaatctcagcactttgggaggcagaagcaggcagatcatgagatcaggagttcgagaccagcctgaccaacatagtgaaaccccgtctctactaaaagtacaaaaattaggcatgatggcatgcacatgtaatcccagctactcaggaggctgaggcaggagaatcacttgaacctgggaggcagaggttgccgtgagccaagattgcaccaccgcggtctatcttgggtgacagagcaggactccatctcaaaaaaaaaaaaaaaaattattacattgcctgcatggactacaacttttaca

SEQ ID NO: 674922 - DNA, 1044 bp, Homo sapiens
tgatgaatgagttatttttgcagttccctttttggtgtctttctggaatagaaagaatcatttattaggaatgtttggctttcccagaggggctctcagagtaaaaagactgatttgttttcctttggcaattttaaattatgctttttggcccattagtgactttacttacagaaaaacatctgagcaaaagaaaggaaacaggcgggatcttagatcacatgaatccctacaccaaagtcctgggagagcacctgcgctggctctgaagggcctatgccaccaggagcactgaaatactgatcaagagatcaggccgggctcggtggctcacgcctgtaatcccagcactttgggaggccgaggtgggcggatcacttgaggtcaggagctcgagaccagcctggccaacatggtgaaaccctgtctctatgaaaaatacaaaaattagccagacatggtgcctgtaatcccagctacttgggaggctgaggcaggagaatcacttgaacccaggaggtggaggttgcagtgagccaagatcgcaccactgcactccagcctgagtgacagagtgagactccgtctcacaaaaaaaaaaaaaaaaagaaagaaaraaaaaaaagagagatcagcagccacagaacacaccttggagtcacatgggtatagcagaagggcccccttccctcacaccgggcagcaggaggctggacttctcccatcagtttgccactttcttgctgtgtggccttagtgtcagaatcacacattctttggatttccttataatggatcaaaaaagaaagaaagaagaaagaaagaaagaggaaagaaagaaagaaaagaaagaaagagaaagtgtgagagagagaggaggaggaaaataatcagttctgctgcacttgcctcactgggtggttataaggaccgattcaattcagaatttattgagttgttgtgtgcccagcacagtgatgattggggtaaaagagtgcttgtgaaagtgctttgcaaatcaaaagagaaggtattgacccacac

SEQ ID NO: 674923 - DNA, 1762 bp, Homo sapiens
tgcctaggctggagtgaaatagcgggatctcggctcactgcaacctccacctcctgggttcaaccgattctcgtgcctcagcttcccgagtagctgggattacaggcgcccaccaccatgcccagctaatttttgtattttagtattgatgaggtttcaccatgttggccagactggtctgcaactcctgacctcaagtgatccacccgcctcagcctctgaaagtgctgggattacaggtgtgagccaccatgcctggcactgttcatttatttctaatggcaaaattatagaaatcacctaaatgaccaataatccagcagttttccaaatgatgcaagaaataggtaactatgttcttgttagaaatttaaatattataggcaaagctaaaatcctccttgaccactcagtctgtctttactcccaggcccctcctctggggtaaccacagtcacggatttgtcatatttctctccagatcttttttctcttcatctgcatacataagtctgtatatataaatagctattttgtttcacggagagattttaccatctgcattgtatcatactctacatattatctacaacttgctgttctgctcaatatttatatttaggttttcaaatctccctcttttttttttttttttttttttttgagacggagtcttgctctgtcactaggctagggtgcagtggtacaatcccagctctcaacaacctccgcctcccgggttcaagcgattctcctgtctcagcctcccaagtagctgggattacaggcatgtaccaccacacccagctaatttttgtatttttagtagacacggggtttcaacatgttacccaggctggtcttgaactcctgacctcaggtgatctgcccgcctcggcctcccaaagtgctaggattacaagcgtgagccactgtgcccagcctccctcattctttttaacagctccgtaatattccattggtgaatgtccccatagtttatctattccagtataaggtggtctctagtttcccacaatcacagtgctgcagttaaacgtgggcactcatggccatgtcacactgtttggttcccagaagagacaagagttcattcttttactaattcccatgtttctgtaacagggtgttccaggctcccactggccgtgtgccaaagggcctgtttcctgtagcctctccagctttcagtattgccagacatctacatttccccccatctgaggagtgggatacagtaacactttgttttaacttgcattttctgattacaagtgacattaagaactttctatattttaaatatttagtcatttatatctcctttcctgtgagctgctcaatcattctatattgcaaacactttctcccgacgtgtcccttgtcctttaaccttatttgtagcacctatcatcagacagatattttaatctttttttcacttttataatttgtgtttatgccacatttttaatgattttctctttgtttttattgtagtgaagtccattatttttctttttaactgtcttttatagttattgtaatgttgccttaataatacgttttcccaacattatccatccatggtctgatatgccattttcttcctcaggagaggttttctaccaatttttgccatttcccgtgttgctgctgatccatgcttcmtgcctgttttctgtttgtggtttcagataaaatctacgtggttgacttgagtaatgagcgagccatgtca

SEQ ID NO: 674924 - DNA, 977 bp, Homo sapiens
tcgccaaataagttcctatagtaagctagcaataatttgttagcattgccaactcatgtggctataaaatgatcttttagggctggctgtgttggcttgcttctataatctcagtgttttcggaggcaaaggtggcaggactgtttgcagccaggagttcaagaccaacctggacaacatagtgagmccaccatctctacaaaaaaataaaataaaataaaaattagctgggtgtggtggtgtgctcctatagtctcagctactcaggaggctaatattggaggttcatttgaacccagtaatttgaggttacaatgagctgcagtcatgccactgcactctagcctggttagcagagcaagacccggtctctaaaataaaaaataaatataaaataatatttcactgatgaatatatgactctgaaaaaatacttgattatagtttcttcaaatatacaatgaaaatgataaatgtatatatatcacatgatttttgtgagtaaaaatttgtaagtcaagtaggatgatacctggtacataaatagcctttagtagtagatagcattattatttcatttgttttttatcaaatgattattgaagagaataaacaaatatgaaatataattgagtacttttataatgtttttaaatacaaattaattataaatcttatgagattctgcaattataaaatattttaaaaagtagcatctaaatatttaaacatatacataacttgttaatacatgcatggatagaaatctaaaaaagaatttattttacccatattttaaaatgatcaggagatcaattatacagaaacatattttttataatgctgatttacacatagttaacatatagtaacaataatattcaataatttgttgataggtaaacatgtgataaatactattctaagggcttatatctttttatttatttacttttactttttattttttgagacag

SEQ ID NO: 674925 - DNA, 1855 bp, Homo sapiens
  misc_feature 250, 251, 252, 253, 254, 255, 256, 257, 258, 259, 260, 261,262, 263, 264, 265, 266, 267, 268, 269, 270, 271, 272, 273,274, 275, 276, 277, 278, 279, 280, 281, 282, 283, 284, 285,286, 287, 288, 289, 290, 291, 292, 293, 294, 295, 296: n = A,T,C or G
  misc_feature 297, 298, 299, 300, 301, 302, 303, 304, 305, 306, 307, 308,309, 310, 311, 312, 313, 314, 315, 316, 317, 318, 319, 320,321, 322, 323, 324, 325, 326, 327, 328, 329, 330, 331, 332,333, 334, 335, 336, 337, 338, 339, 340, 341, 342, 343: n = A,T,C or G
  misc_feature 344, 345, 346, 347, 348, 349: n = A,T,C or G
tatcttcttgtactggtaaatgaggaggggaagtgaaatatggaacaaatcgttactctggacaggaagcaatagaaaggcaaatcaacgttgttctcgatttggtcctttgcattgttgtcatatttctactggaaatgcttcacagcaatgcccttttagatcattatttagatgttcagtaaatatgtggcctgatatagctcataccccagctgagactgaatgtttctgttcccctggggagagnnnnnnnnnnnnnnnnnnnnnnnnnnnnnnnnnnnnnnnnnnnnnnnnnnnnnnnnnnnnnnnnnnnnnnnnnnnnnnnnnnnnnnnnnnnnnnnnnnnnaggtagcaaaacacaaatgattccaaacctcagacagtgaagcaaatgctcttctttcttggattgcttctcttgaccccacccacctgttcccctgccctttccttctgatgggaacttgggatgatccgtgctgcatgggggaggaagggcaggtgaggagggacgggacctgggctgaccagctagctgttctgagctgccatggggtctgtctggaatttatagacattaggtgttaacctggtatctctgtgcctcagtttcttcttctgcaaaatggggagctcatcaccccctcataggttgtgaggcttaaagagctactatatatgttaagcattcataacagtgcctgttgtataataaacacacatgtgtgaggctgttcttgaattgctataaagaaataggtgagactgggtaatttataagaaaagaggtttaattggctcatggttctgtaggctgtccaggaaacacagctccagcayctgcttctgggcaggcctcaggaagcttttactcatggtggaaggtgaagcgggagcaggcacttcacgtggccagagcaggagcaagagagtgtgggaagggaggggccacacacttttaaacgaccagatctcacgagaacccactcaccatcgtgaggacagcaccaaaccattcatgagggatctgccccatgatccaaacacctcccaccaggccccacctccagccctggggattgcaattcaacatgagatttggcaggaacaaatatccaaattctgtcaacatgaaaataagtaacccgaaaaaggagaactttgtttcctaagtgggcaagaaaaaccaggccgggcgcgggggctcacgcctgtaatcccagcactttgggaggccgaggcgggcggatcacctgagggcgggagttcgagaccagcctggccaacatggggaaaccccctctctactaaaaatacaaaaaaaattagccgggcgtggtggcacatgcctgtaatcccagctactcgggaggctgaggcaggagaattgcttgaacccagaaggcagaggttgcggtgaaccaagattgtgccattgtactccagcctgggcaacaagagtgaaactccatctcaaataaataaataaataaataatttttacaaaccacaaagttatttcaacaacctataaacttctgtcccttatgatgccgtgaagcctgaatatgaccccagttttctctgtctgagacttcatagcaagtaacccagagtcaacagaaatcagtgggttaaatagatatttggaagcccacagcaatcttctcttattttcttaagaattgacacttataaggaaactgagtacaatcgcttcagaaagaaacttgctaatttctgcctagaaagtaaaagatatttaggattttttgaggcaagggattaccggaatagggaaatcaacaacaaataaagctcactctgtctctgcaccatgtctgtcctctcc

SEQ ID NO: 674926 - DNA, 1855 bp, Homo sapiens
  misc_feature 250, 251, 252, 253, 254, 255, 256, 257, 258, 259, 260, 261,262, 263, 264, 265, 266, 267, 268, 269, 270, 271, 272, 273,274, 275, 276, 277, 278, 279, 280, 281, 282, 283, 284, 285,286, 287, 288, 289, 290, 291, 292, 293, 294, 295, 296: n = A,T,C or G
  misc_feature 297, 298, 299, 300, 301, 302, 303, 304, 305, 306, 307, 308,309, 310, 311, 312, 313, 314, 315, 316, 317, 318, 319, 320,321, 322, 323, 324, 325, 326, 327, 328, 329, 330, 331, 332,333, 334, 335, 336, 337, 338, 339, 340, 341, 342, 343: n = A,T,C or G
  misc_feature 344, 345, 346, 347, 348, 349: n = A,T,C or G
tatcttcttgtactggtaaatgaggaggggaagtgaaatatggaacaaatcgttactctggacaggaagcaatagaaaggcaaatcaacgttgttctcgatttggtcctttgcattgttgtcatatttctactggaaatgcttcacagcaatgcccttttagatcattatttagatgttcagtaaatatgtggcctgatatagctcataccccagctgagactgaatgtttctgttcccctggggagagnnnnnnnnnnnnnnnnnnnnnnnnnnnnnnnnnnnnnnnnnnnnnnnnnnnnnnnnnnnnnnnnnnnnnnnnnnnnnnnnnnnnnnnnnnnnnnnnnnnnaggtagcaaaacacaaatgattccaaacctcagacagtgaagcaaatgctcttctttcttggattgcttctcttgaccccacccacctgttcccctgccctttccttctgatgggaacttgggatgatccgtgctgcatgggggaggaagggcaggtgaggagggacgggacctgggctgaccagctagctgttctgagctgccatggggtctgtctggaatttatagacattaggtgttaacctggtatctctgtgcctcagtttcttcttctgcaaaatggggagctcatcaccccctcataggttgtgaggcttaaagagctactatatatgttaagcattcataacagtgcctgttgtataataaacacacatgtgtgaggctgttcttgaattgctataaagaaataggtgagactgggtaatttataagaaaagaggtttaattggctcatggttctgtaggctgtccaggaaacacagctccagcatctgcttctgggcaggcctcaggaagcttttactcatggtggaaggtgaagcgggagcaggcacttcacrtggccagagcaggagcaagagagtgtgggaagggaggggccacacacttttaaacgaccagatctcacgagaacccactcaccatcgtgaggacagcaccaaaccattcatgagggatctgccccatgatccaaacacctcccaccaggccccacctccagccctggggattgcaattcaacatgagatttggcaggaacaaatatccaaattctgtcaacatgaaaataagtaacccgaaaaaggagaactttgtttcctaagtgggcaagaaaaaccaggccgggcgcgggggctcacgcctgtaatcccagcactttgggaggccgaggcgggcggatcacctgagggcgggagttcgagaccagcctggccaacatggggaaaccccctctctactaaaaatacaaaaaaaattagccgggcgtggtggcacatgcctgtaatcccagctactcgggaggctgaggcaggagaattgcttgaacccagaaggcagaggttgcggtgaaccaagattgtgccattgtactccagcctgggcaacaagagtgaaactccatctcaaataaataaataaataaataatttttacaaaccacaaagttatttcaacaacctataaacttctgtcccttatgatgccgtgaagcctgaatatgaccccagttttctctgtctgagacttcatagcaagtaacccagagtcaacagaaatcagtgggttaaatagatatttggaagcccacagcaatcttctcttattttcttaagaattgacacttataaggaaactgagtacaatcgcttcagaaagaaacttgctaatttctgcctagaaagtaaaagatatttaggattttttgaggcaagggattaccggaatagggaaatcaacaacaaataaagctcactctgtctctgcaccatgtctgtcctctcc

SEQ ID NO: 674927 - DNA, 2329 bp, Homo sapiens
ctggcctattgactatgttatcttgtgtaaaaatgcagattcactgagccagataaaggcatgaatgactgttttcccctgctcccttctcacatgaaaattaagtatttttcaatatcccacccttttccctttaagtactgaagccctcaaaatcatctttggagaagcgcatagacctgtcttctgggcatgcaaccttagctttggcaaagaaacctccttaaatgattgagacttgccttggtattttccttgactgacaccrgttggatgaggtttttttcttcataaatagatactaaaagttatcaaatactttttgctaagtttttttgagatgatcatatgctttatctccttcattttgtttacatgatgaatgacaaagaaatgtccctttttgaaatggttatttttgttattgcattttacctcatttagtaggtgatatgtactttcttactattttttagtggttatcttacatattacatattttctcaatttattgatgtctaatgcaaatcaggactttcatctctttctgcaaaatgcaagaacttacaagttttgttttacctttgttctcctttccaacctatatgctttggtttcaagtattttaattctctatgagtaaaactcacaggcattactcatattttggccaataagtagatttgtccatatattcctttcttttagtatttcctttagtgaacaagtaatgttgacaattctcttagtttttatttgtgtgaacatgtctgagatggtttggctatgtcctcagccaaagtctcatcttgaattgtaatccccataaatcccacgtgtaaggggagagactaggcagaggtagttgaatcacgggggcagtttcccccatactgttcttataatagtgagtgagttctcataagatgtgatggttttataagtgtttggtagttcctgctgcattctgttgccttgtgaagaaggtgctttgcttctcctttgccttctgccatgattgtaagtttcctgagacctccccagccatgcagaactgcctttcctttctaaattacccagtcttgggcatttttttatagcagggtgagaatggactaatgcatgtctttatttcattttcattttacttgttatgcaattcttgctttgcaattatttttttcagaaatttgaagatacatttttttttccattgagaagtcagattttatattactgttactttttgaaagtattttgtcatttttctctagctacttttaagaatttatctttatctttgggttttagcaattttaccatgctgtgtgtaggtgtaattttcttatttattctacttactatttatattgcttcatgcatctgtggtttaatatttctcatttgttttggaaaattcttagccattatcatttcaaatattgcttttgcatattctctctctcctttcttctaggattttaattacactcaatcaatattttctctctgtattttctctattttgcataatttctcctatatttcccatcttcttctgtttcttacttcattcaggatattttcttctgagctaacttccagttgattaattctctaatcagttgtatcagatttactattaaactaatctattaatttttagtataagccaatttcttaaatacatgtctctatttatgtctccttttggttctgtttctctgaagagccctgacgcataagcttctagtttctggccttataattgattattgttttgctagctctcagatagtttgaaaaagatgattttaataatttgtccagtttttaaagttgctatttctcttgggtgtttcatctcaactacctaggccatctcaccagagatagaagttttatttcactctattttttttttcttagacatctgagtttcagttcttcaaacctttcctcctgtaaaagattttacccctagaagtaatttttaagatacgctatgggaaatgtgagaaactaaatgtaggagagagtcttggttttctacctaacaaatatattccttttcttgctaataagacctcaattttattcttgcagcaatgtactcaccccaaggcaatgagatcttaattaacataagccaaatagaacaatcctatttcctctgacagataacctagatttagtcaataggatacatgaagaagtcttctgggaaactagaattatccctccttctttactaccaccattaaaatacagagccacgtgagcttataccctttatgctccaatccactttcttgctttttgagatact

SEQ ID NO: 674928 - DNA, 2329 bp, Homo sapiens
ctggcctattgactatgttatcttgtgtaaaaatgcagattcactgagccagataaaggcatgaatgactgttttcccctgctcccttctcacatgaaaattaagtatttttcaatatcccacccttttccctttaagtactgaagccctcaaaatcatctttggagaagcgcatagacctgtcttctgggcatgcaaccttagctttggcaaagaaacctccttaaatgattgagacttgccttggtattttccttgactgacaccagttggatgaggtttttttcttcataaatagatactaaaagttatcaaatactttttgctaagtttttttgagatgatcatatgctttatctccttcattttgtttacatgatgaatgacaaagaaatgtccctttttgaaatggttatttttgttattgcattttacctcatttagtaggtgatatgtactttcttactattttttagtggttatcttacatattacatattttctcaatttattgatgtctaatgcaaatcaggactttcatctctttctgcaaaatgcaagaacttacaagttttgttttacctttgttctcctttccaacctatatgctttggtttcaagtattttaattctctatgagtaaaactcacaggcattactcatattttggccaataagtagatttgtcyatatattcctttcttttagtatttcctttagtgaacaagtaatgttgacaattctcttagtttttatttgtgtgaacatgtctgagatggtttggctatgtcctcagccaaagtctcatcttgaattgtaatccccataaatcccacgtgtaaggggagagactaggcagaggtagttgaatcacgggggcagtttcccccatactgttcttataatagtgagtgagttctcataagatgtgatggttttataagtgtttggtagttcctgctgcattctgttgccttgtgaagaaggtgctttgcttctcctttgccttctgccatgattgtaagtttcctgagacctccccagccatgcagaactgcctttcctttctaaattacccagtcttgggcatttttttatagcagggtgagaatggactaatgcatgtctttatttcattttcattttacttgttatgcaattcttgctttgcaattatttttttcagaaatttgaagatacatttttttttccattgagaagtcagattttatattactgttactttttgaaagtattttgtcatttttctctagctacttttaagaatttatctttatctttgggttttagcaattttaccatgctgtgtgtaggtgtaattttcttatttattctacttactatttatattgcttcatgcatctgtggtttaatatttctcatttgttttggaaaattcttagccattatcatttcaaatattgcttttgcatattctctctctcctttcttctaggattttaattacactcaatcaatattttctctctgtattttctctattttgcataatttctcctatatttcccatcttcttctgtttcttacttcattcaggatattttcttctgagctaacttccagttgattaattctctaatcagttgtatcagatttactattaaactaatctattaatttttagtataagccaatttcttaaatacatgtctctatttatgtctccttttggttctgtttctctgaagagccctgacgcataagcttctagtttctggccttataattgattattgttttgctagctctcagatagtttgaaaaagatgattttaataatttgtccagtttttaaagttgctatttctcttgggtgtttcatctcaactacctaggccatctcaccagagatagaagttttatttcactctattttttttttcttagacatctgagtttcagttcttcaaacctttcctcctgtaaaagattttacccctagaagtaatttttaagatacgctatgggaaatgtgagaaactaaatgtaggagagagtcttggttttctacctaacaaatatattccttttcttgctaataagacctcaattttattcttgcagcaatgtactcaccccaaggcaatgagatcttaattaacataagccaaatagaacaatcctatttcctctgacagataacctagatttagtcaataggatacatgaagaagtcttctgggaaactagaattatccctccttctttactaccaccattaaaatacagagccacgtgagcttataccctttatgctccaatccactttcttgctttttgagatact

SEQ ID NO: 674929 - DNA, 617 bp, Homo sapiens
tctttcaagtacatgaaagatgcttattggccattttaatttaaatataaccaaaattatctatctttgaatactggagttcttcatctttaatataaataaaatgagaatatttgaaggcaaggcatatatttgcataaatattttaaagtatattttatctttcatgtactagtgatttattagtcattgcaatgaattaaacacagatgtcggtyttatactataatttgacttgccatgtttaagaaaattctctttaagtataaagttggaatgcaaaacagcataagcttggattttctaattgcattttacaaaatattattctagccactatatttatgagtgatcacatacaaccaaatattgatcaagattatgtcccaactttataataatgatttaacttgacaaatggtgatgagtatgttatttttttaactgttcatttactctctgaaatttcaatttaaatatatactgctctggcatgagtctacccagcaatccgcccctaattttgctgtccctaagtgctctttccataggtggattatttatctaacataattttatatgaactcatctattttgtttaatttgataatacattt

SEQ ID NO: 674930 - DNA, 617 bp, Homo sapiens
tctttcaagtacatgaaagatgcttattggccattttaatttaaatataaccaaaattatctatctttgaatactggagttcttcatctttaatataaataaaatgagaatatttgaaggcaaggcatatatttgcataaatattttaaagtatattttatctttcatgtactagtgatttattagtcattgcaatgaattaaacacagatgtcggtcttatactataatttgacttgccatgtttaagaaaattctctttaagtataaagttggaatgcaaaacagcataagcttggattttctaattgcattttacaaaatattattctagccactatatttatgagtgatcacatacaaccaaatattgatcaagattatgtcccaactttataataatgatttaacttgacaaatggtgatgagtatgttatttttttaactgttcatttactytctgaaatttcaatttaaatatatactgctctggcatgagtctacccagcaatccgcccctaattttgctgtccctaagtgctctttccataggtggattatttatctaacataattttatatgaactcatctattttgtttaatttgataatacattt

SEQ ID NO: 674931 - DNA, 617 bp, Homo sapiens
tctttcaagtacatgaaagatgcttattggccattttaatttaaatataaccaaaattatctatctttgaatactggagttcttcatctttaatataaataaaatgagaatatttgaaggcaaggcatatatttgcataaatattttaaagtatattttatctttcatgtactagtgatttattagtcattgcaatgaattaaacacagatgtcggtcttatactataatttgacttgccatgtttaagaaaattctctttaagtataaagttggaatgcaaaacagcataagcttggattttctaattgcattttacaaaatattattctagccactatatttatgagtgatcacatacaaccaaatattgatcaagattatgtcccaactttataataatgatttaacttgacaaatggtgatgagtatgttatttttttaactgttcatttactctctgaaatttcaatttaaatatatactgctctggcatgagtctacccagcaatccgcccctaattttrctgtccctaagtgctctttccataggtggattatttatctaacataattttatatgaactcatctattttgtttaatttgataatacattt

SEQ ID NO: 674932 - DNA, 617 bp, Homo sapiens
tctttcaagtacatgaaagatgcttattggccattttaatttaaatataaccaaaattatctatctttgaatactggagttcttcatctttaatataaataaaatgagaatatttgaaggcaaggcatatatttgcataaatattttaaagtatattttatctttcatgtactagtgatttattagtcattgcaatgaattaaacacagatgtcggtcttatactataatttgacttgccatgtttaagaaaattctctttaagtataaagttggaatgcaaaacagcataagcttggattttctaattgcattttacaaaatattattctagccactatatttatgagtgatcacatacaaccaaatattgatcaagattatgtcccaactttataataatgatttaacttgacaaatggtgatgagtatgttatttttttaactgttcatttactctctgaaatttcaatttaaatatatactgctctggcatgagtctacccagcaatccgcccctaattttgctgtccctaagtgctctttccatargtggattatttatctaacataattttatatgaactcatctattttgtttaatttgataatacattt

SEQ ID NO: 674933 - DNA, 650 bp, Homo sapiens
ggtggaaaatttatttaatacaattttgatattactttgactactcttttatcataatctacaaattaaatatcatgttcctgcttcctaagtttatgagtcaggctattttacttaggtgaggtacaacgtatttcttgcctctctattcagtgagaactattcagtgaccataatgtcagatataccaaaacctgatastccaagtttgtgagcagattccagtattcctagaaagaaagatatgtactgagaagcaacataaattaattgaatttttgaaatttcaatctaatatgtactgagaagctcaaatttggcaataaaaatataaatccaaaccaaaataagtttccaaatgcttgagaagagtcttgacttgctactgaaaacataattaatcatcagtacttaataagtactttgaaatattttaatagttttttaccctacctaagagtttctgacccttccattcactgacagaacttagaaatttcacagatttaccaagctcctttgtgagcttgccaacatactgttgcattgtgagcttgccaacatactgctggaaatgacttatttttccttcacagctcaaataaatagttcttttccaaatatgcttttctcgtgtccccaaatagagg

SEQ ID NO: 674934 - DNA, 597 bp, Homo sapiens
tacctgaggtcaggagttcgaaaccagcctggccaacatggtgaaaccctatctctactaaaaatacaaaaattagccaggcatsgtggcacacgcctgtaatcccagctactcaggaggctgaggtagagaattgcttgagtctgggagacggaggttgcagtgagccaagatcatgctattgcactccagcctgggtgacagagcgagactctgtctcaaaaaaaaataaacaaataaataaaaacaaaaaaataaaaaaaataaaatcaatatgtaatattgttttttaatttgattcaaatagattttaaagataacttgctttaatggtaattttaaagtttttgcatatttcgtttatttaatatttatatgctaagccatagtaaacttattaatatggaggtgcctatatatgtattagtcagggttctccagtgagagagagccaataaaatagatacatatttatatttaggtttaatatattatatttatgtttatatatatacatatttatatatgttaaaactttgcccttgttggaaaattgctttcagtgtattttttgcttgtttgatctttaactttata

SEQ ID NO: 674935 - DNA, 1267 bp, Homo sapiens
ttacaatacagtatgtattttatgtattccatgagttttataaagttcaaaaacatgcaaaactaatatatgggttagcagtcaggttagtgattgtccttggtggcggggggttgagactaggattgggcaagaggaaacttctggggtactggtagcattctgtctcttgaccgtttgttcagtttctaaaaataaaatgagctgtacttttatgattcctgctattttatttatatgtgataaaattaaatgttcaattaaatcaattcaagtataaagagttacttgaaactatgttagtaaacctactgaagatctactcaaaatataattcaaatttgatgattacatgtgttggaaattcccaagtttttccttcagttgatttcaaattcctaaatagttttgtttgattcccatggctgctcccttttgtgattcaaggaaattttcttcatcatggcttcttatctcatcatactgtgtgtccaaggaatgtactcttcaatgatgagctcaattctgcattatctcaattatttcctttcgctgattctttccccttagcatataaacatgtctacattttgccatcttcaaaaacaaaatatacttctctgcttcttagctctcactagctagtatgctattatttttccacttttcacagcccggcttgcttggctccatatcttcatctcccaacaacatctcccatggcaacacataactccatgaaaattgtgctccctaaagtcacaggaagcctctatacagtaattcgcctttgtgttattccttggaacatttcaacttttaataactatttcttgkggggagctgaggtgtatgaaacaaaagtcctaacctaatgtgtaatggtaaaaggaaatcagtccaatacagtaactttagtcctatataataatttaaacaatatcattaggtctcattttttataggtaaaatttctagcttctcagacatttgttaccattccaaatacctctccaagacaatgtctatgtacaaagtacagtgtttcttattgtttcttcttcgtagtgagggaaaatggtgatcagagatttattaatccacattatatacttgtgctattttagcacttttctcttctcttgatgatatatcttttctatctaattactactgctcttaatggcattcgtggataaaatcagtggtttttcatgaaagcagtactgccatctagggaatgtttttgaactttgggggaagtggc

SEQ ID NO: 674936 - DNA, 902 bp, Homo sapiens
tatttggccatgtaaagcttgttttttctctcacctcgaggccatcaaagctccaaacaggcaggcagccagagcctcggactatggctccctttcgctggggatccttgggtagacttctgggaggaatccaactgccgctttcgttaaacaacggaaagactggtcgttgtscatatcctaatggcagttagatgtgcctcttcagaggggggaaatgatacagaacggcttggctcctggctaaaccccacccttaaacctggaaccacagccctgtgtgaaaacagctcaccccatttttgccctcaaatgttgctttttggcctgccatgctcctatcctgtgcccatataaaaaagacttcagctggcagagcaacacaagcggctgagcgccgggtatatgcgcagcaagcagagaagcagcaactgagtgtcagagactacagatagacgccgctaacttcagatggtgtggcttcagggaaaaatcactttctttccgcaccatcccctttccaactcccatcctgctgagagccattacccagtaaaatcttctacatacactacctttcaatccgtgtgggtgacctaattcttcctggatgccaaacaagaactcaggtgccgagaggacaggggcttggatgctgctgtagggcccgcacggaacctgcttccgccagagaagagtggccaggtccagggttcattctctccagttcccacactcccttgctggcacactctgtctcatgaggagtggccagtggcaggctaagtgaaatgagccacttccattcccacccacgaagtgggtcaagggaactatcctgtctcatttctataatcaagtttagaacatttttatcaccccaaaataatattctatgccca

SEQ ID NO: 674937 - DNA, 389 bp, Homo sapiens
aaaaaataaatttttcacttttactcaacattggccctggaagtaaacatacttactgtgctctaatctaaaggggtaaaacaacaaccaaaagctgttactatatttcagaactattaagagatctttggaatgacacatcagcaacactacttctttatttgcttgggctttgatgaaaatatcccatttactttgtaagaaatrttacagaactgggtgctctgaaatgctggtttttaagttacagaaataacaagcattttgcttaactctatggtggtcctcgttaagcaagttcagacattgaattccagtgaaaccttctctatgagctttggtggtttatttcatgactgactccaaagttcatgtatagaaaatagaca

SEQ ID NO: 674938 - DNA, 634 bp, Homo sapiens
atgattcaacacataattaacatattcacattatctgtcacgttaattttttaagaatcttatcattaatattagggagtagtaattgagcttggaatgtcagtctctgaagccataaagaaattgctatagagagcaagaaggtcagacttcccctgaatgggcttaggatttatctaggaaatgaaaagatrtattggaaaatatagctcccattatgagctagcatgtactaagtactaaacaggtggtagagctgatgaaggtcaccagaatttagtagtgagaagttaaaataaactgaagtaatttgtggaaagtctgattaaaacaggtaaaaataagatggtcctcaaaggaaaagtaagacctagagaagaattgacaaatagatttcaactgaagtgacaattctaattaataggtagtggcttcctagagtcatgttaaagactgtgagactatatacgtatgacaaaatattacctttattggcagaaaaatgggattgcagaatgaagttcttgtttgaagttagcatattacttcttactagttctcccttaaaatttaaggcataagacttgcccatggagagatggggacaaaacagatatttatctaaccagttgtg

SEQ ID NO: 674939 - DNA, 641 bp, Homo sapiens
ctttcagacatttcaattcaatttaaaaagaaataacttcacatagcaacccagaagcctgtattccttcatgcgaatttataagtaatcagcgtttcaggaaataatacttatccttactacatacatatcctttctattttgttttgttccatttttcagaatgctggtcatgagccactgaattgattttggactcacaactagattacagcccgaagtcaaaaagcactgttctgttattcttcaccattattgactatagagttttggctcattctctccsccctccccacctcccaccccacatccttttctgatctctattctgccatttgtactgattttaatctctccctggattttttttttcttagatggctggttctctaccaatatttggtagctcaaatgtcatgcatacctcaatggggccttctctgctcactgaacctcagttatccctcttttttcatttaatagcacatcactatgtttttcttcatggcacttgtcgatatgtgaaattaattatttgtgtattattatctgaattcttcatataccgtccccagtctgagtatggattccatgaggagagagagcttgtgtgtcttactcactactgtatttctagcccc

SEQ ID NO: 674940 - DNA, 641 bp, Homo sapiens
ctttcagacatttcaattcaatttaaaaagaaataacttcacatagcaacccagaagcctgtattccttcatgcgaatttataagtaatcagcgtttcaggaaataatacttatccttactacatacatatcctttctattttgttttgttccatttttcagaatgctggtcatgagccactgaattgattttggactcacaactagattacagcccgaagtcaaaaagcactgttctgttattcttcaccattattgactatagagttttggctcattctctcccccctccccacctcccaccccacatccttttstgatctctattctgccatttgtactgattttaatctctccctggattttttttttcttagatggctggttctctaccaatatttggtagctcaaatgtcatgcatacctcaatggggccttctctgctcactgaacctcagttatccctcttttttcatttaatagcacatcactatgtttttcttcatggcacttgtcgatatgtgaaattaattatttgtgtattattatctgaattcttcatataccgtccccagtctgagtatggattccatgaggagagagagcttgtgtgtcttactcactactgtatttctagcccc

SEQ ID NO: 674941 - DNA, 641 bp, Homo sapiens
ctttcagacatttcaattcaatttaaaaagaaataacttcacatagcaacccagaagcctgtattccttcatgcgaatttataagtaatcagcgtttcaggaaataatacttatccttactacatacatatcctttctattttgttttgttccatttttcagaatgctggtcatgagccactgaattgattttggactcacaactagattacagcccgaagtcaaaaagcactgttctgttattcttcaccattattgactatagagttttggctcattctctcccccctccccacctcccaccccacatccttttctgatctctattctgccatttgtactgattttaatctctccctggattttttttttcttagatggctggttctctaccaatatttggtagctcaaatgtcatgcatacctcaatggggccttctctgctcactgaacctcagttatccctcttttttcatttaatagcacatcactatgtttttcttcatggcacttgtcgatatgtgaaattaattatttgtgtattattatctgaattcttyatataccgtccccagtctgagtatggattccatgaggagagagagcttgtgtgtcttactcactactgtatttctagcccc

SEQ ID NO: 674942 - DNA, 602 bp, Homo sapiens
cctgcctaaagtagctgagcaccaggtgttttcaccctgcctcatttttcttatcagccagcctcccaggctgttaacttatgacagttgagactcttcaatattgaggtcagaggaaaactggtccaggactgaagctgaatattattagcatgctgctgataccatcctgaggtaccaaatcactgaccccagctttagaaaayattaaatagttttcaggcctaaggacaggacacatgatttgggtctttgaagttgatacttttatgtcaaatttagctttgggatacaagtgaactgacataactaattgccttagttgccgaaaatgtggctttaaagcaggaaaatatcagttactgtttaagtcaaattatactatgaaagctttgcacttacaaaatgatttcacatgcattgtctccactgattctcctaataatccagcagtgcaggccaggagatagtttcattctatttcacagatgacaaattggagagctataaaggctgagagattttcccatggatactgtggagttgatatctgatcttctggctcctagtccagcactctttccactgtgctacactgtctg

SEQ ID NO: 674943 - DNA, 900 bp, Homo sapiens
gaaaggcaggccagatggaaacgccattttacagttcatttccaatgttttgtgagtgtggtaggttgggagacagagtgagtttatactcagctgctggaagacccaatttccttctgaatcaaagaaagtttaaattttatttcgtgtttacctgcattgtaaaattacatttctttggaaactgttaatttatgacactaggaaatcaggaccagattgccagtgaataattttttttagtatgagtgtcctaagtattgtataggacatacatgggattaaaaaattatttgttgattatctgaaatttaaatttaactgggtagcttgtattttattttgtagccctgttaggacctgacaagagaagctgaaatacagactgtatgtaagttktaaaaagagtgctagcattgaaaacaacgtctaaagagcatctgtttattgccaatcagaataggtggtttttagattcactgaagtcagtgaatgtggtgaactaaggttctgaactatcaaagagaatttgataatgaatctaaataacaactaaggttgaggcttcttcctgtgtattttttggtaaaggaacctataagcaaaagatacgattagccctaagcttacggatggcaaaaccaatattttatacttggactgggagacataaggaagatttgggggatagacaaagaattttagagctagaaaagtgctttgaaaacctggtccagccctttctttaacagatgagaagactgagtcccaggtacacagcaacctaccccaagaccctgcagtaaggatcaaagcccagatctgactcccaccttagtgcctgttccactgttcaatgtttagctttcctaaaccgtgacaaaaggagtattcattcaa

SEQ ID NO: 674944 - DNA, 585 bp, Homo sapiens
tatttcattaaactttattctgggcatgtctgtgaaggctttctggatgggattagcattttaatcagattgagtaaagcagattgctatcccatatgtagatggggctcatccagtctgctaaagtcctaagtagaacaaacaggcaaagcgagggagaattgctctctccgtcctaccgtcttcaagctragacatcatattctcctgcccctgggcttaggcacagactaaaacttacatcaccagctctcccgagtctccagcttgctcactatagatcctaggacttgttagccactataactatacgagcaaattacttataataaatctagataaatagatagagagtgacagagatagaatagatttaagtatatatgtaaatctgtatctactgtactggagataagagtctccttcagggtgcacataagttttcagattatttatgcagtgcttgatctgggagtccaaatccttgagctcatccttttctttcaccactttgtccagtgacatcagtagcaaacagccaatctcattatctttgttagttttcgaaaatatttgaaagtatca

SEQ ID NO: 674945 - DNA, 585 bp, Homo sapiens
tatttcattaaactttattctgggcatgtctgtgaaggctttctggatgggattagcattttaatcagattgagtaaagcagattgctatcccatatgtagatggggctcatccagtctgctaaagtcctaagtagaacaaacaggcaaagcgagggagaattgctctctccgtcctaccgtcttcaagctaagacatcatattctcctgcccctgggcttaggcacagactaaaacttacatcaccagctctcccgagtctccagcttgctcactatagatcctaggacttgttagccactataactatacgagcaaattacttataataaatctagataaatagatagagagygacagagatagaatagatttaagtatatatgtaaatctgtatctactgtactggagataagagtctccttcagggtgcacataagttttcagattatttatgcagtgcttgatctgggagtccaaatccttgagctcatccttttctttcaccactttgtccagtgacatcagtagcaaacagccaatctcattatctttgttagttttcgaaaatatttgaaagtatca

SEQ ID NO: 674946 - DNA, 638 bp, Homo sapiens
ctgttgccaggctggagtgcagtgcactcagctcactgcaacctccgcctcctgggttcaagcgattctcatgcctcagctgggattacaggcatgcaccaccatatccagctaatttttgtatttttagtagagatggggtttcaccatgttggtcaggatagtctcgatctcctgactccgtgatcygcccgcctcggcctcccaaagtgctgggagtacaggcgtgagccaccacacccggcctattatgctattcttgatgtgcatggataactgaaagcagactactttctaaaaatattacttgagttgatttttttgtgtgttttgatttttagtaccaagtatactaatatttttccatttaagccttataatacacaaatatacataaacactgcaaataatttcttttattcaaaaaatgtggagactcatattgatacattctgaacatatgttaaattactttaaacacctaaaaaaattaaatttttaaaagtttaacagagaatcttaggtacctactttcttttgctctcccagaaaataaactactttgttttctcctattctattgttctatttaggcattttagaaacctttcatctttacagtaagtttcctagtaaaa

SEQ ID NO: 674947 - DNA, 634 bp, Homo sapiens
aatgcttttacactgttggtaggagtgtaaattagttcagccattgtggaagacagtgtggcaattcctcaaggatatagaaccagaagtaccatttaacccagcaatcccattactgggtacatacccaaaggattataaataattctactataaagacctatgcacacatatgtttattgcagcactatttacaatatcaaggacttggaacctacccaaatacccgtcaattatagactggataaagaaaatgtggcacatatacaccatggaatactatgcagccataaaaaagaatttttggggggagagagagcattaggacaaataccttatgcatgcagggcttaaaacctagatgatgagttgataggtgcagcaaaccaccatggcacatgtatacctacgtaacaaacctgcatattcagcacatgtatcccagaacttaaagtaaaataaaataaaataaattgtttatcaatatacctcctgcccccaagtaatttctgtcttaaaagacaccttggtggtcagtgttaagaaaatttatatttttatttcattacatggtgaaggtcttatatgcttatatatagtgtctgatctagtgcagtgaatacagtgygtagca

SEQ ID NO: 674948 - DNA, 1452 bp, Homo sapiens
caaggtctcacagctagagggtgttggactaggatcctattccatttctatttgattcccagaaggctgcctcaaaaaactacaaattcacttccttaatgacttctttactcttcggaattttctcaatctgtcatgtctctatgcttttcaaaggggtcagaaatatattatayatgtaatatatgtataaatataacaaatatgtttaacgacatttgaaagacaacttgatttttgaattaaaaacgttttcttcacatagaacctttaaatgcataattgccttgacttgagtggattatctgaattattggttggctccgaacactctgctttagagtttaagtcaaattattttgagtactttactatcgacttactgtaatatcaggccataatgtttgcattgtgggtgttaaaacataatcatgttgatttccatagatgtaaatgaatattggtggtgtatgccgacaattcattgtataatggctaaacgtttgctaagaaaaatggattcattgttttacaaagaaaatgaagttttcttctcataaatccttcttataaatttcaaatttacaactcaaaggaattttaggtcttaagcacagaataagaccctaaggaaaagaagtgcaccacagtgattaaggaaacagactgaaggcagaaagacctgagctgaagtgatttctgtctttgctaattacttgcatcatgactttgggtgtattacttatctttttcaagcctcagtttcctcattggtaaaataggcataataagagtgcctaccctataggattattgggagaatggaatggcatccatgtaaaagggttgagcatagtgcctgggcccctgctgagcatttaatagctattagctactgtttctcttcataactaagtcttaaacagttcaattatggctacctgaccatttaaaaaagctttaaattcccaaccagtatggacaagcctaaccactagagacatgtacagaggagtcaggaagcttggcccagctagactaggggcaattagggtgagtcccataccaaaggcaatgagtaaagtgaatcttaaagggagaagaactcattagaaaggaaaagaagaattggggtgggtgtgaggaggacaagctggcctaggaatattcctgggcactagagggtcagaaatttacttttgcttattagtttcaatctcatagcatttaaacattttatccctaaatagaatgatgaatagttactttttgaaactgtacaagaaatattgatgtcatagacaatatctcattacatataaaattttttgacataaaatgcacagaatgttagacaaatttatttaccaggcttcatgctgttttatgaggtctagaacaaataaaaagtttgttctggctctatttttttcaagcaggaatgagtctgag

SEQ ID NO: 674949 - DNA, 2284 bp, Homo sapiens
tgaactcctgacctcaggtgatctgcccacctcggccttccaaagtgctgggattacagccatgagccaccattccccacctgtcataaccatcttaattgtatttaacaaatgctcaaaacttcataagacagacaccattgttatgcatattttattttaccaaatagtgaggtttcactatattgcccaggctagtcttaaactcctgagctcaagagattctcccacctctgcctcccaaagtgctgggattataggcatgagatgccgcccttggccattattcctgttttatatagatgatgaaactgaaatccagagagtgagagtaatttgcccaaagacacacagctaaaagtggmagagctaggatttgaacccaggctggccggctggctctactcattacactcactgcattgcctcctgaagcgtgtgtcacgaccccactgttaaccacgaccttgatattccatctctccaaaaaacagttagacgtgcctctttgtggatcttgacctttagttacatttcttttcccagcatcttcaaagtctcatctgccttcctcatctcaaaaacgaaaaaagaaagtcacacaatctatgccgttctctctagtatttttcatttgctctactttttcctcttaacttttttcacctaatctgactcttaacaactaaaagccaaaatcagtccgtatttctgcatacctcagaataagatttccttttgcttcctgatagaagaaggtatgtgagtcccaaaatctcctgctctgaaaaccaaggctactatgaagcacccagcacagatgacagggcagcatggtttactgcagtgttttctactataccgagggtgaattgctgtgttgtctcacactttgggagatattcttggcttcatttagcagtggtcaatgttgactattgctaaaaataaaatatgaagaaccaaagatgaaaatgtacctttggcaagatcaggactccaggggttctgattgttaaaaataattgccctcatgttcagacacttttctatccaatcacttaactgaatccttttgattaagtggatgcataactttgctttcatttctgtctgtgggtcagacccaggaccatctggcttctctaatgaggggagatatttttccattcctgattgagctccctgttgaggttggtctggtctgccttactgtgtaccacctacgagtgtatgcaaatattcattttctatctggaacccattgtttagtggtctgaggctccttcagctggtgtgatggacctgggtgaattgaatgttaagcctgggctgggcacagtggctcacgcctgtaatcccaacactttgggaagccaaggcggatggatcacctgagacctggagttcaagaccagcctggccaacatggcaaaaccctatctctaccaaaaaatacaaaagttagccaggtgtggtggcgcacacctgtagtcccagctacttgggaggctgaggcatgagaattgcttgaacctggcggggcagggcaggggttgcagtgagctgagatcatgccactgcactccagcctgggtgacagagcaagattctgtctcaaaaaaaaaaaaaaaaaaaagttaagcctgttgtcgtatttgcccatagaaaatctgatagggccggctactcagtgggcaggagaccgcgcttttgtgtacagcagttctcgcttctccatggtttcactttctgcagtttcagttacccatgatcaaccagggtccaaaaatattacatactatattttgcaagagacagaccacagtcaaataatgttcattacagcatattgttataattgcttgatttcattattgttaatctcttactgtgcctaatttataaattaaactttatcataggtatgtatatataggggaaaaaaacatagcatttatacggttcagtactatttgtggtttgaggcatccaccggggctccctggagcatatccttgtggatgaaagggggctccatgcctgctctttgatccagaggcatctgatggacttacttgctgtatgtgtttcctggggctgtcataaacagtttaagccacaaactggatggcttcaaacaacagaaatgtactatctcacagttccgggggctggaagtctaaaatcaaagtgtcatttgggccatgctgccactgaaccctatagggaaggacgcttccttgcctcttccagcttctggtagttgtggccatctttggca

SEQ ID NO: 674950 - DNA, 2284 bp, Homo sapiens
tgaactcctgacctcaggtgatctgcccacctcggccttccaaagtgctgggattacagccatgagccaccattccccacctgtcataaccatcttaattgtatttaacaaatgctcaaaacttcataagacagacaccattgttatgcatattttattttaccaaatagtgaggtttcactatattgcccaggctagtcttaaactcctgagctcaagagattctcccacctctgcctcccaaagtgctgggattataggcatgagatgccgcccttggccattattcctgttttatatagatgatgaaactgaaatccagagagtgagagtaatttgcccaaagacacacagctaaaagtggcagagctaggatttgaacccaggctggccggctggctctactcattacactcactgcrttgcctcctgaagcgtgtgtcacgaccccactgttaaccacgaccttgatattccatctctccaaaaaacagttagacgtgcctctttgtggatcttgacctttagttacatttcttttcccagcatcttcaaagtctcatctgccttcctcatctcaaaaacgaaaaaagaaagtcacacaatctatgccgttctctctagtatttttcatttgctctactttttcctcttaacttttttcacctaatctgactcttaacaactaaaagccaaaatcagtccgtatttctgcatacctcagaataagatttccttttgcttcctgatagaagaaggtatgtgagtcccaaaatctcctgctctgaaaaccaaggctactatgaagcacccagcacagatgacagggcagcatggtttactgcagtgttttctactataccgagggtgaattgctgtgttgtctcacactttgggagatattcttggcttcatttagcagtggtcaatgttgactattgctaaaaataaaatatgaagaaccaaagatgaaaatgtacctttggcaagatcaggactccaggggttctgattgttaaaaataattgccctcatgttcagacacttttctatccaatcacttaactgaatccttttgattaagtggatgcataactttgctttcatttctgtctgtgggtcagacccaggaccatctggcttctctaatgaggggagatatttttccattcctgattgagctccctgttgaggttggtctggtctgccttactgtgtaccacctacgagtgtatgcaaatattcattttctatctggaacccattgtttagtggtctgaggctccttcagctggtgtgatggacctgggtgaattgaatgttaagcctgggctgggcacagtggctcacgcctgtaatcccaacactttgggaagccaaggcggatggatcacctgagacctggagttcaagaccagcctggccaacatggcaaaaccctatctctaccaaaaaatacaaaagttagccaggtgtggtggcgcacacctgtagtcccagctacttgggaggctgaggcatgagaattgcttgaacctggcggggcagggcaggggttgcagtgagctgagatcatgccactgcactccagcctgggtgacagagcaagattctgtctcaaaaaaaaaaaaaaaaaaaagttaagcctgttgtcgtatttgcccatagaaaatctgatagggccggctactcagtgggcaggagaccgcgcttttgtgtacagcagttctcgcttctccatggtttcactttctgcagtttcagttacccatgatcaaccagggtccaaaaatattacatactatattttgcaagagacagaccacagtcaaataatgttcattacagcatattgttataattgcttgatttcattattgttaatctcttactgtgcctaatttataaattaaactttatcataggtatgtatatataggggaaaaaaacatagcatttatacggttcagtactatttgtggtttgaggcatccaccggggctccctggagcatatccttgtggatgaaagggggctccatgcctgctctttgatccagaggcatctgatggacttacttgctgtatgtgtttcctggggctgtcataaacagtttaagccacaaactggatggcttcaaacaacagaaatgtactatctcacagttccgggggctggaagtctaaaatcaaagtgtcatttgggccatgctgccactgaaccctatagggaaggacgcttccttgcctcttccagcttctggtagttgtggccatctttggca

SEQ ID NO: 674951 - DNA, 1539 bp, Homo sapiens
aatcggccggggcggctcatatctgtaatcccagcaccttgggagactgaggtgggaggattgcttcagcccaggagttcaagaccagccttggcaacacagggggaccctgtctcttaaaaagaaaaaaaaagaaaataaatggaactatacatactaatctgtagtttcttttaccttggattttttcttttaataacaaaatctgggttcaatttcttagttrgaatatattttttattttaaaactttaatcatggaaaatttcaagcagatacaaatgtagagagaatagtatgatgaatcattatcgtccagcttcagtgttccccaagacagggccaatttttttttcatctatttccctttttttcccttccctttccacccttgtattattgtaaagcaaattctagacgtatttcatgcataaaattttcaacatgtatccctgaaaaattaggaccctcctctttttattaaactccagtaccattactatatctttaaaaaagtgcaatttagtagacaatattctcagaattttaaaacataagaccttggtatgaataatcacttccttggtacctgtctgtatctgtgagtgtgctaggggctttacattattgttattccttgtgataacactgctgggtacctattattgtcccatttcatgtgtcaagaaactgaagtttagaaataattgtctgaggttccagagctatccagtggttggttctgtgtggagaatgtgggctgcctgactataaaacatgtgccttttccactctaccacgtatttattatgtctgtgaccaccagtgatttttgcagaagaggaattcctcttatgtgcgaggcattttcttctggtttttcatttttgtagcctgaaatttctcacatgtggtgatgcaattttctgtctgttttagattaacaagtggtggaataacctaagtgatggccagcggactgtgacaggtttgtgttagcttacacgttttaaccattcaagggaagagaaatcaaaccaaaaggtacagtatgtcacaagcaatggctcttgtaccatgctcaccagtggtttagaagacagtctctgtactgataggctaatgtaatagtatataaagtggtgaggtataaaggtttacatgatgctctgggtccgttactttctaattttgatttagtatgatactgattgatcagttttgttgtagaattccagcttgtggaatagcttattaattattacttcccttattaaagaaactaatggaaacattaagtaccttctatattcaggatgctgtaatacacattctgtccctacttggagttgcttacagagtagttgtctccctttttacagataaggaaaccggctttcagagaaggaacttttgaaagtcaaactgctagtaagcaatagagcagagtttcaaaacccaagtctgtccattcgaaaaccagttttcgctcttctcccccatgctatttataaaaccccatttaaatgtaagcatgaca

SEQ ID NO: 674952 - DNA, 650 bp, Homo sapiens
tgtatatatgtgtgtatatatatgtatatatgtgtgtatatatatgtatatatgtgtgtatatatgtgtatatatatgtgtatatatatgtgtatatatgtatatatatgtgtatatatatgtatatatatgtgtatatatatakacacacacacacatatacatatgtgtgtatatccgtgcatgtatatgcatatatatgtatgtgtacttatacacttttatgaagaactgatcctggttctatagaaggggagaagcagagtccaatatagattgattttgtttataaaaagaattttttacaagatgtcttttatacacacctgtgaaatatttgttgctctgtagatgaatgtgttggcactctgccccacagagttttatatattttacaactaaaatgtcttcctaatttttttcattagataaaacgtttccatgctataacaacaacaacaaaattgtcaggggtctaactgtgcttctccatccccgctcctaaagcctatattttgggagcagaaatttaaaaaatgagtgcctccttcccgatgtcagagcaaaagccagatatctcagagagcaactccccacaagggtgaggatgtggttcactgtgtgtacagtgcatcaaggcaatttctgtg

SEQ ID NO: 674953 - DNA, 1087 bp, Homo sapiens
atcatcgggcattagattctcatgaggtatgcacaacctagatcccttgcatgctcagttcataatagggttcacattcctataagaatctaatgctgtagctgattcgacaggaggcagagctcaggtggtaatgctcactcacctgccgctcacctcctgctgtatgatctgattcctaacaagccatagctcataaccaagggttgaggaccactgtgttaaaagataaactaagacacaataaaattttaaatatgttatttacacaatgatttatgactcaggcagctccaaaccataaaagtggcttaagagcaccactgagggatcacagggggaggcttttagaggacaggcacagaagaaaactaaagatagtatttgactatttatagttgtacagttatttgtaccttatttggtaccaaagttgtacgttattaggtctatcccactggaaagtcttcagttgtatgattatgtgtgttggctacttctgattggttgaacttaagttctgtttttctttaatatagaaattgataagaatagctcaagtttcccttatatctgtagatcaaacaaggtttagatcacttatgatgcctaactggttttgtctgctcagaaattcttcasgcctggactccattttaatttactttaatgattgttactttaaatttggattaaacagtggattcatatgtactgagtgaaaaaaaatggaaatagatgttataaaatttatttgaaatcattcagccaggatgttttaaacagcataaattagcagaattaccaaaaacacattttgaaaaaaccttgaagcaattttaatgtattgcaaaatgtgaaggagactagtaggacaaaaacttaaaggttgagtttgagatatgatgcagggttttttgctccttagcccagctaggcctaagttctgaagaagtaggcacatggacactcaaagggtaagtgtagtagaatttatttagtgaaaggaaagctctcagcaaagagaggggtcctgacatgaagttcttggttgcccccttaacagttgaatacaagggcatttttt

SEQ ID NO: 674954 - DNA, 1373 bp, Homo sapiens
atagaattaaacaatatatattcttttctggatggcttctgttactcagaaatgtatttaggagagtcatcaaagctctcttgggtataccatttatccttcttgcttgataatactccatgtatgtatatatatgctatgatgtgtttattttactcttgatggataactgcaaaacttccaatttaagctgttgtgaataattctttaataaaaaattttgtacatttgctgaatatgtttatgtgttcctgttggatgatagtagcagaattattggtcacagggtatgcatatacttaattttaacagataagatcaaataccttccaaattcattttaacaattacagtcaacctgcattgttttagagccccgattgcagagtcattttggattagtttgtctttctcttattgattttaatggatagtgttaggctgtaaataatttatgcatagtaagaactttctcaacaaattttactcagacttctgctctacgctaagaactagctctggaaattaattcacagaaagaacatggttaggggccatcctgagggatttacctcactagggatatatatttacatttcaagagaagatgagacccagtagatgcatcccagaagttacaaagctggagactctagtgttatctttcccctagagagatttatttttatccaagtggttagagtaagaactcagacttttttccgttttgtgactatggagacacactcagaagggggtcagagcaactgggtcactcttccacaaaaatgctcaggttcttttttccagagttctttgcctacagcagatccccttacatgtaggacatctggttctcaccacatcaccaccacggtaagaattagtggaaaggagagctaggttaagggcagctgtttctttccttctctgcagcctctggtaccaagtactgcatgacatgtgtctcacaacattcctgcctctgcacctctgtgctacgacactggatgaatctatggagtgagcaatagaaagtctctgaactgccagaaacaacttcattttacatggaagtggctttaaatcaarcacattaacctcaatgaactgaaattaaatatgtctctattcaacttccccttagctgaatactaaaagtgctgtaggctggacccgcactacctgacagggagataaatgactaaaggcaaatgggagtcaaaacaggtgtggcttttcttatttttaattaagcatcttacatagcaaattttgcaaaactcgtatgaccccgagaaagacccatacacatgaaaggtcttaaagatttaactttcttagctttaacgtaagctttccactggattttc

SEQ ID NO: 674955 - DNA, 1373 bp, Homo sapiens
atagaattaaacaatatatattcttttctggatggcttctgttactcagaaatgtatttaggagagtcatcaaagctctcttgggtataccatttatccttcttgcttgataatactccatgtatgtatatatatgctatgatgtgtttattttactcttgatggataactgcaaaacttccaatttaagctgttgtgaataattctttaataaaaaattttgtacatttgctgaatatgtttatgtgttcctgttggatgatagtagcagaattattggtcacagggtatgcatatacttaattttaacagataagatcaaataccttccaaattcattttaacaattacagtcaacctgcattgttttagagccccgattgcagagtcattttggattagtttgtctttctcttattgattttaatggatagtgttaggctgtaaataatttatgcatagtaagaactttctcaacaaattttactcagacttctgctctacgctaagaactagctctggaaattaattcacagaaagaacatggttaggggccatcctgagggatttacctcactagggatatatatttacatttcaagagaagatgagacccagtagatgcatcccagaagttacaaagctggagactctagtgttatctttcccctagagagatttatttttatccaagtggttagagtaagaactcagacttttttccgttttgtgactatggagacacactcagaagggggtcagagcaactgggtcactcttccacaaaaatgctcaggttcttttttccagagttctttgcctacagcagatccccttacatgtaggacatctggttctcaccacatcaccaccacggtaagaattagtggaaaggagagctaggttaagggcagctgtttctttccttctctgcagcctctggtaccaagtactgcatgacatgtgtctcacaacattcctgcctctgcacctctgtgctacgacactggatgaatctatggagtgagcaatagaaagtctctgaactgccagaaacaacttcattttacatggaagtggctttaaatcaagcacattaacctcaatgaactgaaattaaatatgtctctattcaacttccccttagctgaatactaaaagtgytgtaggctggacccgcactacctgacagggagataaatgactaaaggcaaatgggagtcaaaacaggtgtggcttttcttatttttaattaagcatcttacatagcaaattttgcaaaactcgtatgaccccgagaaagacccatacacatgaaaggtcttaaagatttaactttcttagctttaacgtaagctttccactggattttc

SEQ ID NO: 674956 - DNA, 1373 bp, Homo sapiens
atagaattaaacaatatatattcttttctggatggcttctgttactcagaaatgtatttaggagagtcatcaaagctctcttgggtataccatttatccttcttgcttgataatactccatgtatgtatatatatgctatgatgtgtttattttactcttgatggataactgcaaaacttccaatttaagctgttgtgaataattctttaataaaaaattttgtacatttgctgaatatgtttatgtgttcctgttggatgatagtagcagaattattggtcacagggtatgcatatacttaattttaacagataagatcaaataccttccaaattcattttaacaattacagtcaacctgcattgttttagagccccgattgcagagtcattttggattagtttgtctttctcttattgattttaatggatagtgttaggctgtaaataatttatgcatagtaagaactttctcaacaaattttactcagacttctgctctacgctaagaactagctctggaaattaattcacagaaagaacatggttaggggccatcctgagggatttacctcactagggatatatatttacatttcaagagaagatgagacccagtagatgcatcccagaagttacaaagctggagactctagtgttatctttcccctagagagatttatttttatccaagtggttagagtaagaactcagacttttttccgttttgtgactatggagacacactcagaagggggtcagagcaactgggtcactcttccacaaaaatgctcaggttcttttttccagagttctttgcctacagcagatccccttacatgtaggacatctggttctcaccacatcaccaccacggtaagaattagtggaaaggagagctaggttaagggcagctgtttctttccttctctgcagcctctggtaccaagtactgcatgacatgtgtctcacaacattcctgcctctgcacctctgtgctacgacactggatgaatctatggagtgagcaatagaaagtctctgaactgccagaaacaacttcattttacatggaagtggctttaaatcaagcacattaacctcaatgaactgaaattaaatatgtctctattcaacttccccttagctgaatactaaaagtgctgtaggctggacccgcactacctgacagggagataaatgactaaaggcaaatgggagtcaaaacaggtgtggcttttcttatttttaattaagcatcttacatagcaaattttgcaaaactcrtatgaccccgagaaagacccatacacatgaaaggtcttaaagatttaactttcttagctttaacgtaagctttccactggattttc

SEQ ID NO: 674957 - DNA, 1373 bp, Homo sapiens
atagaattaaacaatatatattcttttctggatggcttctgttactcagaaatgtatttaggagagtcatcaaagctctcttgggtataccatttatccttcttgcttgataatactccatgtatgtatatatatgctatgatgtgtttattttactcttgatggataactgcaaaacttccaatttaagctgttgtgaataattctttaataaaaaattttgtacatttgctgaatatgtttatgtgttcctgttggatgatagtagcagaattattggtcacagggtatgcatatacttaattttaacagataagatcaaataccttccaaattcattttaacaattacagtcaacctgcattgttttagagccccgattgcagagtcattttggattagtttgtctttctcttattgattttaatggatagtgttaggctgtaaataatttatgcatagtaagaactttctcaacaaattttactcagacttctgctctacgctaagaactagctctggaaattaattcacagaaagaacatggttaggggccatcctgagggatttacctcactagggatatatatttacatttcaagagaagatgagacccagtagatgcatcccagaagttacaaagctggagactctagtgttatctttcccctagagagatttatttttatccaagtggttagagtaagaactcagacttttttccgttttgtgactatggagacacactcagaagggggtcagagcaactgggtcactcttccacaaaaatgctcaggttcttttttccagagttctttgcctacagcagatccccttacatgtaggacatctggttctcaccacatcaccaccacggtaagaattagtggaaaggagagctaggttaagggcagctgtttctttccttctctgcagcctctggtaccaagtactgcatgacatgtgtctcacaacattcctgcctctgcacctctgtgctacgacactggatgaatctatggagtgagcaatagaaagtctctgaactgccagaaacaacttcattttacatggaagtggctttaaatcaagcacattaacctcaatgaactgaaattaaatatgtctctattcaacttccccttagctgaatactaaaagtgctgtaggctggacccgcactacctgacagggagataaatgactaaaggcaaatgggagtcaaaacaggtgtggcttttcttatttttaattaagcatcttacatagcaaattttgcaaaactcgtatgaccccgagaaagacccatacayatgaaaggtcttaaagatttaactttcttagctttaacgtaagctttccactggattttc

SEQ ID NO: 674958 - DNA, 1137 bp, Homo sapiens
gttgcatttcaaaataaaatggctgccttaagtgatgcaaaattacatatttatacattctctgaattaagcaggattaattgaaaagtggatatgaaggcatgactgcaagctacaaattgatcctatttttagtaacttgctctagctgagatgttatatgttcagatttgttgacacgaagctttattgagaagcattacttattcccaataactcaaggaggagcctgttttgggaggaaaaaccacatcaagtatgttttgttgaatcaagaggattttatttttagaaaactactaatgattttttctgaaaatgtgactattttgaaatctaagaaaaatcaaatatttgatacttaacgtaatttgcaacttgacataaaactactcagtttagttggtcataatatactcattcctaacttattccactttacaaaaaaagtaaaagaaaagcataaataaataaataaggaaagagaaacaaacaaacaaaaaacattggaaactgacgaggtaacaatttatagaatcaaggattaatttccaccaattatggcatgaataaaactaatcaactaaaatatattttaaaaatcaagaagatagtaggaaaacagctccctgaggacccctggaacagtaattaggcaggcactctttgcctgttggacattaccattttctttaatgtttgtatgaaacgatgccaatttatctttaagcaatttatctttaagttgctaaagtgatgcaaacggctgtcatgtaacaatcaccaagagaggacccattctagttcacaaactgccctgatgctttttataaaaaacaatccacttcaggataatgtgttgttcctggtttctatgtctctttaacttctttaaatcagaagcattccatagtccttcttcaaccttcatagcatcctaaacattttttgaaggtaatattccaatggattctatttttagaatgtctcccaatttygatttgtctggtgttttctcataatgaggtgtcaagacatgcattattggcaataaaatcaccaacatgatgctatgctcttcttatcatatttcttcaggttatatatgaaattaatttttcccatcagtggtgattt

SEQ ID NO: 674959 - DNA, 1202 bp, Homo sapiens
cagttgggtttccagtagtcgtgatggatttgctctaatccaccctcaccctttcacccgtttccgcttgtgatgaatggacaccattacaaaatggcgacagggtgatgagtgcagcctgggggagctcacctccacaaggggatccaacgccggactgtggcctcttctgtatgatgctttaacttactgaactaataagccacagtaacaagccacgaggatgcttgtcaccgatttgccaaatagaagtgctgtgggaatattttttttagaaaaaaaaggaagagaaagattttagaagctttgcttccacagtaagacagctatttaaataccaactaatattattataagtcaggaacagaagcagtagcaataaaactgtttctctaagtcaacaactggctagagactacatgtgtctacaaaatgagtttcataagactatgcttattttagaaacatcaatactaaaacagcagtaacagaaagtgtttttctccttggtttaagcactgcttggatatgcattatattcagccaagcaataactgaacaaattcctctcttaaatttccccaagttcaagaatatggctttgagcatgccacagctttataaaacagccgagctgtaagtatgcaataatcgctcatttcctggccattaattcagacatcatgcaatcacccaaaggcatccattttcctttgctgctattttgggactgctgtcctattgtcatccctgcctcagacctctgacttaggygtcttttaattagagccagtgagaatgacaggcagagtcagcccgctgagggtgatccatcacacagctctctttgctccctggcctcttagatgactgtttataagcaggacatcttggatatcaagatagctgcttaaggaaacagaagaataaatggtgaccatcttgtaagctactttcctgagattataaactctagtctagggctgtatttactaacacggtatgtaggttaaatacccaaataaacttttccagtgataattctttggaagatgttttatatctgagcttgccctcaaatgaactgatgccataatctaagagttgcccaaggtattaactgatatacttacaatttaacagttgggactatttttaatagaccagcattttagctaaattctttccacattagtcaacag

SEQ ID NO: 674960 - DNA, 702 bp, Homo sapiens
gccagtaaagtgatttgtgtcaagtgtttttctcatcaataattgaggaatcaataccttcaaaatgcattcaatatgattaaaagagagtcatacttcacagaattctaggaagatgtgtgagagatggcagcctaatttttggatcctcccaaatccacacagagacaaacaaagcaattacttattgaggccagaaacccaaggaaaacatttaccatgagacaggtgtcaaggtaactccttgattcccaaaacaggattatgccagagatgccacaaacagctaagagttctttgtgtgactggtgtctatgtggaagaggcacatgggaatggaggaaggactaaacagatgcaccagagcctttgtgaaatctccccactgatcctacctattatcttgcctcaaggatgaaacctgagtccagtctccagacacagaggccaacttgcaggaacacagaaggatatgtggaatcacactgaaagggactttaaaagacatcacgtttaaaagaaaatgaacaagtgaaactgatgtccaaggatccaatcttgggcatgaaaaactatcaagaaatgcaaagaattgattacaatgaaaagtcactttggagggagggtgggggctgtgactgatgagacgtatggmggaacttctggggtgactggcaaagttttctttgatgacttttgtgg

SEQ ID NO: 674961 - DNA, 606 bp, Homo sapiens
gagttcctggtatataggtcaccaaaacatgtttgttgcttatttagcttattttactcatattcattgcatgccatgttgaatgttctttggaactaaagaattgtgagaatgtaggggtttactctagcttaacccattagatcaagcttgtccaaccctcaagccacaggctgcatgtggcacaggatggctttgaatacagcctaactcaaatttgtaaactttcttaaaacaatgattttttttttgcaatttttttggctcatcagctatcattagtgttagtgtatttcatgtgtgacctaagacaattcttattcttccaatgtggcccagggaagtcaaaagattggacacccatgcattagactatagattacctgagagtatgggcttacgtatccaatgctatatcatccacatctagattggtgcttggtccatgatggacactcagttaacattagtcctatgaatgaataaatgatctatgtatggggttttcttaaggtatgaaagctttgttttcaaagataaaatatttattttgtataagaaagataaaaaacraacactgattggtgagaataatccataattcag

SEQ ID NO: 674962 - DNA, 580 bp, Homo sapiens
ctgttcaatgagcatcagagcacagtatatactatatcttataagttagagatctgaagtcaaatctcagctttgctctttattgacttaaacaggcaactaacatctgaatcccagtcttaccatctgtaaaatgtaaacaataccttacaagatcttatacctgaagcacttagcacaatgcctggcatacataggtaataaaaaattgtagccattattgttatcactgccatgaattcttccaaatatatattaaataacatggaaataatgagcaaagaccagggaagaaagcaytggaatggatgagagagtaaaaaaagcttaagtcattgtccatttattcatcatctaccatcttggatgatgcctaatgacttacagaactgaatgtggaggtaggtcattccaatccagagtcctggacctgaagatggaggagctatggggcagatgagcttgatatttaatggtgatattgccagagtggttgaccttcataaataatctacctccttgttttgtggggcccagcaaaggtgcatggggccagattcaaatttgtcagaaacctaag

SEQ ID NO: 674963 - DNA, 3448 bp, Homo sapiens
gcagcgcagcttgaggaagaagggccaggagataaacaacacacattcaactgaggccccctagtggctgaggaaatgttaatcaaatacttttccagactaatttctaccaatttcgatagaagtttggtggaaacgctgctatctccaccccatatttcgttccatggatccttaccatttgctttcattcccgtttctacccttccaacgcagatctgcacattcctggggcatcctaaacatgtctgaagacctactgaataytgagtctaagatcatctccccttggtactggaagtaatacaaatagtgttatctctacatttatttccccaggctctttctataggtttaatagacaaggatgatatacacatttcatactatttgaaaatcacttcctgactacacttttacatacttgaaaatggattctcaacttcttttgcgtgatttctatctaactttgtcatttgggcttcaatacactccatacattcactagggtattataacacagtaattttatctttagtgtactgttgtggactttaatagctagatttctagttcaaacaaggattcaatagaacctgtgcttcaacctgaatggagtttgactgaacaaccctaatttgccatgaggaaaaaatattgagtgctatagcttcaaatggtaacatattcagaagatgagatttcttgtgcaaatgatttgtctccaaaagtttaccaacttctgcttaagagcaaatttcaagggataaagtaatttttaaggtattgatctttaagaaacatttcctgtattttaaaccaagcaaatatataacctaaacatctaaagatgtatgttctatgaatactaagttacagcatgattaaagacacattcattgtcagtgatttctatattttgcaatagcagagggagccataaaaggggaatggagcaatacagcctatattctaatacttgtcagacttctgccaggcagtgatcaacagtaaggattccatgacaatgttaccatgacaatcctaggaacagacagaatggaaatgaaagagactctagacactgataacaggacatctactactcccccaagtcctgcctgatcagtaaaccagtaacctcatgttaccaaatttttagcttagtggttagtacaggtgaacattagtgagttatgatcattctaagtattcttcaaccaactaagaacaacactacaatacgtcaaagttacatgtgttttctagatcaagctaaaatgtaaagatgatgtaggttctctgagaattcacattttactcttactgtaaatgactatcctgtaagtgtttaatgccctttccctaccattctaagaaaataactgaatccttattagcatatgtaggtgaatggttaatagtacataaaaaagaacttactttattcacaatttgttaatgaatccaaatcattttgagcatcaatgcctcaatcagtgtctttcaaaatccatctcaaaacttcccaacccaccatagcccctggggatttatgccctccctaaaccatcacttatgtgtcatgacagggtacacattacaactaaagctccttgtggatcccggcatctaaactgcaaagaacatcaaatgtctaagtgaaatttgtcacttgatatttttggacccacatcatcacacagtgttaaacctgagtggatctgaggtcatctagtttacttaccctcttcacataaagcttctttacatgtaaagtaagtgactttcctggggtcaaaagatcattgcacagcaaatgtatgctagaaatatagactcttggccctgaatagatggcaaatacttcattgtttctggatcagatcttatggaagcagccctctgtgttacctgatgatttttgcaatccatgactatgtcaacatgctacggagatgagaaacaaatttgctttgattttatacactgtttgtggcacagagattggtcacctgcttttcccagcccagtttgcaatgccagatttatggcatttttaaattctgcctgctaattccttgctactctgcttttccaaatcaaattcagtcagacttatctagctctgtctgaatgtgtcccttgattgagtgatgttagttcaagaaaaaacactcaaatcaatttaatgcaaattcccattcacagcctggttgacccatcaggatactgacaataatagattggggtacttaattcctaaggcatgtgactcatcgaaggcttagtaatcaatttccattgctgcgactgcataattcatctttggtgctcttaagctctggaataccaagtgtctgttcattttttttaaggcctacacattccttccgaatagcaaagcccttttcgtgtctctgcaatcatttccttatctaaatttccatatgccaccctggcaaggtgtcccacctgtgaaggctttagatcaataaaaataattggcatgttttccctccagttgcagatgcctgaaatagattacatgctgctctagcagacaataggaagatgaaatggaggctggtcactgcctctatccacattagctattaactctctacaggacagccagtagggattcttatagtttgaaccctgtttcccaagatccccaatctgttttattctctaagcattaaagtgaatgggaagcatatacaaataggcaacaagcagatgtcctttccatttcaagaaaggcatgctgtgttccatccagactgtacctgcatttgtcattttttgtgtcttttttcctgtgacaaaagccttatgttgagatcagattatgccctgggaattttctttggcaactaggtaaggttttgtctcaattcttaactctacaggcaagaaaattgttaagtcaaataaatctgtagaatagaagccattgttttactaacttttgtctacaggagccaagtgtttacccataactttgattttcctgaggcaggaaactaaattagtcatgtttcctctatgtacttgtattccccagataccgaagactatatgcaccaccaagtcattcatgagagctgcagtagacattccattcaggattatgtttctgtcactttctgagcaaataacaaaagtattaaaggagctaatcatgcctctgaaaacatagtatttcccttggccttatctcttctgatataaatctgtgtcctctcattttatagaattaaaaatcatttataagaaaataatgcctaaaaagaattagaaaaagataaggatgttagtgaatgtgtaagcttacgctctattctgagtaagtcgcaagaatgtgagaagttggaaaaaagtacttgtagaagtataaggaatgagagtacttctcaaagttgggtggatgccattagcagga

SEQ ID NO: 674964 - DNA, 1368 bp, Homo sapiens
aaactcctgcagctagcttggtgtctgcccaagcagccacctagttttgtgcttgaaacccaggtcccttgtggtgtaggcaccagagggaatctcctggtctgtcggtggtgaagaccatgggaaaagcctagtgcgtgggctggatagcaccatccctcatggcacagtccctcaccggcttcccttggctaggagagggagttccccatctccttgtgcttcctgggtcatgtgacgccccaccctgctttggctcgctctccgtgggctgcacccactgtctaaccagtcccagtgagatgaaccaggtaccttagttgaaaatgcagaaatcacctgccttctgaattggtcttgctaggagctgcagaccagagctgttcctatttggccatcttgcctgggaatccagtgtttgctacttctraagcaaaccactgtgaattgggctaaaacaatttcattcttaatatttgccttataaattttattaatgcatgaaattttacactgcacagaaaatcggaaatttgcctctcccttcaatatgagaatagcacataaataaataaaaatatgcctgggcgcggtagctcatgcctgtaatcccagcactttgggaggccgaggtgagtggatcacctgaggttgggagttcgagatcagcctgactaacatggagaaaccccatctctactaaaaatacaaaattagccgggcatggtggcacatgcttgtaatcccagctactcaggaggctgaggcaggagaatcgtctgaacccaggaggcagaggttgtggtgagctgagattgccccattgcactccatcctgggcaacaagagtgaaactttgtctcaaaataataaataaaaaaaaaaataaataaataaataaatgtattatttatttgtttatgtagagatgggatctctctgtcacccaggctggagcacagtggccttatcattactcactgctgccttgaactgggttaaagtgatcctcctatgttagctagcaccacagatatataccaccatgcctctacaaaatttttttaaattttttgtagagatggggtctccttatgttgctcaagctggtctcaaactggtagtctccagtgatccttctgtcttcgccttccaaagtgctaagatttcaggcctgagcacctggcccagttttcatcatttaagggcattggtagtgaggcatttgtttcttctatttgattaaaaaaaaatcttaagtctagatattttcttgtatctctttgattaggtgcctaaagcaatctgaaggtaaactagttcatttaaaaataacgtaagaggcagtcatcaagtatgctttaaaaa

SEQ ID NO: 674965 - DNA, 642 bp, Homo sapiens
caattaatttgaattttctatgcattcatcaaagagcacattttatattttctgatagctttataatttttattaaatactataaagtaatacaatatatttaaattggcttattatacatctgttgtctcataatttaccttttatatttattcatgtacatatataaatatgcatgtcaatttctgaatgtctctcatatcacaggaaagttattttcattaatttgaggcattgattgcccatcatttattttgcgcttgtgactatcctttctgacagcataatattttcaatacttttttattctcttcatatgttattatctagttcatatattattatttagcatttttatttctctactcttcaaggcatttgcaccttctcaaaactccaattttctcgtggtccaacttgagragacacctgcatgaagagtttctctttattacagtctgcctttaaattcataatatttataccatatttgcttatatcggcttatcaaccaagagtataattaccagattataagaatctgctggcatatagttggctttcaacaggtactggctaattgagtgaatgaatgaatatttgcactcagatataaagttatgttctacattaatgagaaca

SEQ ID NO: 674966 - DNA, 1147 bp, Homo sapiens
tgttgttgtttttttgttgttttttttcctgagacagggtctcactctgttgcccaggctagaatgcagtgacaccatcatggttcactgcagcctcaacctcccaggctcaagcattcctcctacctccacctcccaagtagctgggactacagacatgcgccactatgcccagataattttagtatttatagtagagatggtggtcccactatgttgcccagactggtctcaaactcctgggctcaagcaatccacccacctaggcctcccaaagtgctgggattatcggcatgagacagtctgcccagcctgagactgcctttgcctcctttagaattgttttacctaaaggaggccaggtgcagtggctcatgcctgtaatcccagtactttgggaggcagaggtgggcagatcatgaggtcaggaattccagaccaccctggccaatatggtgaaaccccatctctactaaaaattacaaaaattagccgggcatggtggtgcacacctgtagtcccagctactcgggaggctgaggcagaattgcttgaacctgggaggcggaggttgcagtgagccgagatcgtaccagygcactccagtctgggagacagagcaagactctgtcttaaaaaaaaaaaaaaaagaagaagaagaattgttttacctaaaggagatttttgacaaaagttaaaatgatgcacaagtttttgtgtgtacatttgttgtcttatccttggtaaatataaaggagaattgttagattatatgataactctatagttaacctttctgtgaactgtcagactgttttccaaagcagctacatcattttacattcccaccagcagtgtatgaagattcctgtctctccacatcctcaccaacacttgttattaactgtcttttttattatagccatcctagtaggtgtgaagaggtatcttgttgttttgatttgcattttcctgatgactaatgatgttgagcatattttcatatgcttgttaggcatttatagatcttctttggagaaatgtctattcagatcctttcccctgtttttaattgggttaattggtctttttatttatcgttaagttgcaatagtacttgatatattctagatacaggtcctttacc

SEQ ID NO: 674967 - DNA, 627 bp, Homo sapiens
gaaaggctctgtgcaatgacaatagtaatggtaatagaagcaaaatctccatctatcagggcctcccggggacaggagctttattttccaaatgttctgcctgtgggcattttacaagagaccctcggctatggcccctgcttctcccctgtcctccaaggactgcttcagccacacagctcttgcagctgccactggcctaacagagcccacgayaggagtcaatgaaaccctcaacccagaaaatgtcccatgcccgttgtattgggctgccccagtagtaaatgtgactagaaagcaaccacagcaccaggatctacagtgtccccatgactcacttcagaaagcccgagacccaagcactgaaaggacttggaagctaggacccctccatggcacaggcacacccagtgtcgggtcttgtttataaattcctctctcctctaaaaggtgccagagctccttggagaaatggctgattccagggctgggacagggaaaatacaagataacactaaagcatcttgtgccaaaagtaaagatgtgcacaaagaatgatggggacacctcaaagggacacagaaaccagcttgaagtgactcccactggccaaatgtgagacaactt

SEQ ID NO: 674968 - DNA, 666 bp, Homo sapiens
ctctgaacttggagccaactgacctttgtccttggggcagagacatggttcatgggcccaatccaggtcctcaaagggagggcaggtctgagtccttgccctctgaagtcagaaacctcatctcccactacagacctgccagggcccaggagagctcracccacccaggcacaccatagccccagagatggctggggacacagaagtgtggaagcaaatgtttcaggagttaatgcgggaggtgaagccatggcacaggtggaccctgagaccagacaagggccttcttcccaacgtcctgaagccaggctggatgcaataccagcagtggaccttcgccaggtgagggggaatgtgatggtacacgttccagaaaattcttgcacatttcttactaggtatacctgttacttttcttgttctattctgtgctttcaaattgaagactatgggtaataagatgcccatcatccaagaagttgtaacttcattaaagattgttttttcactattacaatgaaccccaaagcaagagcaggcctgagcacccttgtgagctaatgcctggatacagagaaatcagtctgtgggggtggggagagggagcagccaggaaaggggaggggaggaagggcagctgttgcacccacgggcggtgcatgtgcc

SEQ ID NO: 674969 - DNA, 599 bp, Homo sapiens
ccgttggcccagctgtaaaattcctctctttgtgctctttctctttatttctcagccagctgacacttatggaaaatagaaagaacctatgttgaaatatcgggggcgggttccccatactctaaggtttttgcaaatgcattttacatatgccacattccttgggttttaaattagatcatctcaatcatgtctcccaaatttggttttaaaatatccttccacatgttttctagtggtgtagtaataaataaaaccaaaaccaaaattttattttattgatatgggtaatgctctccattcatacattacagccctggtccctcagtcactaggttccacattttggcactattaaaaaaaaaaacaaaacttttattttcttcccttgaatatccaatcaggtgccatgttctatagtttttatttttaaaattattgttayatctgattattcctttctaatctcaatgttgtattctcccatctttcttcttcaggtctttgtaattaccccactacctggattattgcaatctccttccaacaggattctctctcacacctatcctctggacagccagttctctatgccgttg

SEQ ID NO: 674970 - DNA, 1082 bp, Homo sapiens
tttacatagagaaaaatcatgacgactatttaacaaaatattaacagaaatgggtggtgtgattttagcatattttcatggaattcattactctgcttatcgaatgagtaatatccttacagtgagtccatattttggaagtaattttataattttaaaattaaaatttattttactaataccttttaaaaataaatataccttccagtattcctactccaacttttctggggtactcatacacaaacaacttttctctacatacctggcaacaactacaactaacatagagataatatctaatgttctatgttatacctaaggttcttttcatcaacagcactaaatgaagaaaaaaaaaaaacttgcatattcagcgctacaaaccaaacaaaaaatcttactgttctacttaattataagaggcacagaactagctcttttcaatttgtcttgtttagaagaaatttaagagtaaaaaagagtacaagcccctcacatttcatagatgagaaagctgaatcacagggaagtaaactgacttgtccaaaatcatcaaatcaccagttggtatcaatgtcaggaacagaactaggtatcctaagtcctaaagttcagtgcccattctactaaaccaaacataaatatacagtttttattttatttatttatttatttttattttttttgaggtggagttttgctcttcttgcccaggctggagtgcaatggcacgatctcggcccatgcaacctcygcctcccgggttcaagcaattctcctgcctcagccacccgagtagctaggattacaggaacgtgccaccacgcctggctaattttgtatttttagtagagacggggtttttccatgttggtgaggctggtcttgaactcccgacctcaggtgatccgcccacctcagcctcccaaagtgctgggattacaggcatgagccactgtgtctggccaaatatacagttttaaaatctacctttactggcttgttcaatttcacattataggttgggcatcccacacccaaaaatcagaaaccaagacactcaaaggaaatgctcattg

SEQ ID NO: 674971 - DNA, 612 bp, Homo sapiens
ccttctcaggacacgtgggaattatgggatgtacacttcaagatgagatttgggtggggacamagccaaaccatatctccttttaaagaggtgactgtactaaccctaactagaagagatagctccatgaattaaataatggttgaaatgagacgaaaagtcagatgcagagattgtagggaaagagcatagacaggatacaacaattgagcggctataagagaagctcgtaagaaaggtgaggaatctagggcaattcccgggtttctgcttttgatgacctagtagcaactcacagtatattgagatagggaacgtataaggagaaatagaactggatgggaagttagcttggtttgggaaatgacttagaggagaatgaataacatgtaaatggagccagttgcaaagaatataattatatatgggaatgtgtaaatctgtagagccccaaggttaatattaaaaagacaagaactagccatcaaataagttgaaattttacaccatagatattactattgactaaaagaggtagctgttaggtgcccttctcacaatgcaaatgaggagtgtggatctgggtagctgtgattacccccataatggtga

SEQ ID NO: 674972 - DNA, 612 bp, Homo sapiens
ccttctcaggacacgtgggaattatgggatgtacacttcaagatgagatttgggtggggacaaagccaaaccatatctccttttaaagaggtgactgtactaaccctaactagaagagayagctccatgaattaaataatggttgaaatgagacgaaaagtcagatgcagagattgtagggaaagagcatagacaggatacaacaattgagcggctataagagaagctcgtaagaaaggtgaggaatctagggcaattcccgggtttctgcttttgatgacctagtagcaactcacagtatattgagatagggaacgtataaggagaaatagaactggatgggaagttagcttggtttgggaaatgacttagaggagaatgaataacatgtaaatggagccagttgcaaagaatataattatatatgggaatgtgtaaatctgtagagccccaaggttaatattaaaaagacaagaactagccatcaaataagttgaaattttacaccatagatattactattgactaaaagaggtagctgttaggtgcccttctcacaatgcaaatgaggagtgtggatctgggtagctgtgattacccccataatggtga

SEQ ID NO: 674973 - DNA, 612 bp, Homo sapiens
ccttctcaggacacgtgggaattatgggatgtacacttcaagatgagatttgggtggggacaaagccaaaccatatctccttttaaagaggtgactgtactaaccctaactagaagagatagctccatgaattaaataatggttgaaatgagaygaaaagtcagatgcagagattgtagggaaagagcatagacaggatacaacaattgagcggctataagagaagctcgtaagaaaggtgaggaatctagggcaattcccgggtttctgcttttgatgacctagtagcaactcacagtatattgagatagggaacgtataaggagaaatagaactggatgggaagttagcttggtttgggaaatgacttagaggagaatgaataacatgtaaatggagccagttgcaaagaatataattatatatgggaatgtgtaaatctgtagagccccaaggttaatattaaaaagacaagaactagccatcaaataagttgaaattttacaccatagatattactattgactaaaagaggtagctgttaggtgcccttctcacaatgcaaatgaggagtgtggatctgggtagctgtgattacccccataatggtga

SEQ ID NO: 674974 - DNA, 612 bp, Homo sapiens
ccttctcaggacacgtgggaattatgggatgtacacttcaagatgagatttgggtggggacaaagccaaaccatatctccttttaaagaggtgactgtactaaccctaactagaagagatagctccatgaattaaataatggttgaaatgagacgaaaagtcagatgcagagattgtagggaaagagcatagacaggatacaacaattgagcggctataagagaagctcgtaagaaaggtgaggaatctagggcaattcccgggtttctgcttttgatgacstagtagcaactcacagtatattgagatagggaacgtataaggagaaatagaactggatgggaagttagcttggtttgggaaatgacttagaggagaatgaataacatgtaaatggagccagttgcaaagaatataattatatatgggaatgtgtaaatctgtagagccccaaggttaatattaaaaagacaagaactagccatcaaataagttgaaattttacaccatagatattactattgactaaaagaggtagctgttaggtgcccttctcacaatgcaaatgaggagtgtggatctgggtagctgtgattacccccataatggtga

SEQ ID NO: 674975 - DNA, 612 bp, Homo sapiens
ccttctcaggacacgtgggaattatgggatgtacacttcaagatgagatttgggtggggacaaagccaaaccatatctccttttaaagaggtgactgtactaaccctaactagaagagatagctccatgaattaaataatggttgaaatgagacgaaaagtcagatgcagagattgtagggaaagagcatagacaggatacaacaattgagcggctataagagaagctcgtaagaaaggtgaggaatctagggcaattcccgggtttctgcttttgatgacctagtagcaactcacagtatattgagatagggaacgtataaggagaratagaactggatgggaagttagcttggtttgggaaatgacttagaggagaatgaataacatgtaaatggagccagttgcaaagaatataattatatatgggaatgtgtaaatctgtagagccccaaggttaatattaaaaagacaagaactagccatcaaataagttgaaattttacaccatagatattactattgactaaaagaggtagctgttaggtgcccttctcacaatgcaaatgaggagtgtggatctgggtagctgtgattacccccataatggtga

SEQ ID NO: 674976 - DNA, 647 bp, Homo sapiens
ccctatggctcttggtgcatttatgaaactttaattaaagttatctaaagcaaagtggctattcattattgaaaagttgaaaacttaaatctctgcaaaaaagaaacttcaaggattcattccttgatacttggggaaagaagaaaaaaatctcaaagagatggccctaatctttgtcataaaattgccacaaaacttagtttcaaaactaacttcattatatttttttctcatttttttttcctacatatcttcattgccccaacaacttctggttcttaaaagaaattttttaaaaaaatatttcttcatgtttgtcagtattcccctttttccattccactgaaaaatgttttgctgggacttatcctcgagaggcctattagttaagggaagaacacaaaagagatctttggaaagactttgtactcaaaggaggctggattttaattctttgagggaaagaatgtctcattcatttgtatacctcttccactgtcaccaaacatttggtccctggcacttagtaggcacmatgctaatagaatggaaaacaaataggcaatgggcctcatcttgattcttcatgctgttcatctgtgctccttttcaattctcttgtgttcctgtattgtcagagcacatct

SEQ ID NO: 674977 - DNA, 1176 bp, Homo sapiens
  misc_feature 763, 764, 765, 766, 767, 768, 769, 770, 771, 772, 773, 774,775, 776, 777, 778, 779, 780, 781, 782, 783, 784, 785, 786,787, 788, 789, 790, 791, 792, 793, 794, 795, 796, 797, 798,799, 800, 801, 802, 803, 804, 805, 806, 807, 808, 809: n = A,T,C or G
  misc_feature 810, 811, 812, 813, 814, 815, 816, 817, 818, 819, 820, 821,822, 823, 824, 825, 826, 827, 828, 829, 830, 831, 832, 833,834, 835, 836, 837, 838, 839, 840, 841, 842, 843, 844, 845,846, 847, 848, 849, 850, 851, 852, 853, 854, 855, 856: n = A,T,C or G
  misc_feature 857, 858, 859, 860, 861, 862: n = A,T,C or G
tgtgtgtgtgtgtgtgtgtgtgtgtgtgtatatattctcttaattggaagtccaaaacgtcgaatatatacattgaatttagaaaactgaccctatgtaaattagcttctttagtttctctagtatctacatgagacttatttttgttccttcaattgattatacatttttttcaaatcctgattaaaatataatatataactatttaaaatggaatcagaacatagcctacaaattagtttcttccaacttctaaaaatattttttatgaccatggtagaggtctttttgtacaatgatgatgctttatcatgaaggcatcatcatcatttcatttggaaggcaacatttcaaaacaacattccctattcaggcttctcctytcaccatatttctacctccacgtagtgtagtgaagaaaacgatagagcaggaaagaatagatgctgtggaaggtcatcacaacctatggttaaagttttcaaagctgccactcattcagaagaagggaacagagaataggcaaatcttgggcaggaatgaatactgggatgtacagatgttaactacgactttatttaagaaagttagacaaagccgttaggaaaagctgttgtctcacaagagcaggataagctaaatgaatccatgccatatgtatagaattaggctggctcttccagagtatgaaaaggggaaataaaataccatttgctcatgactgctatcaccagatactgattccagatctgagaaatggatnnnnnnnnnnnnnnnnnnnnnnnnnnnnnnnnnnnnnnnnnnnnnnnnnnnnnnnnnnnnnnnnnnnnnnnnnnnnnnnnnnnnnnnnnnnnnnnnnnnntcaatgattgggcgatattcattactttgtttcctaaattacatcactatgtgtgatgtataccaaattgaaaactgtacagtttctcaggtacattcaatagtacaaaacaatatatttgcagtccattcctggaacacctgtcatcgtaccaacaatgttacatcaaaactgtatcttgctttacataatcaatagcgcatcaaataaatatttttgaacttcaatttgcagaggactgatgaaactgaaccagaatataaacgtttaacctatttcctagcctgaaataactaaacaatgttaaataaaaa

SEQ ID NO: 674978 - DNA, 1459 bp, Homo sapiens
tctgcattttgtgtttgtctgtttttaattttttgttaaccaaagtctctgttccgttagtgtattggtcagcaaaaaattaaatgtctgaacccaataagcctctcagttctagtgtaagaacactgtttgtgtgttgaggctaagtcagctgggaagttggcaactctgccttagtcttcacttcctgcttaaagatcctcagatttagctaaaggtgggagctttgttccttctcaggttttcctgagcatgtgctaagcactgtatatgtgcacagccttacacaggtattccagattcataaggatattcaggagtttttgaaagtacctatggctgtggtctgagtgaatgatatattggccccaaaatatrctgtattaaatcaattcctcttctctaagaaaaaagcaaagggaaaaaaaggaaaaacaaacagaaaaactcctatgaggatttcatttctcaacttaaaaatgaaaacaaaaaagttttattattgtttgccccaaatgttatccactgacttaggcagccacaaagttcaacaattgcctctaattgttttggacaaactccctcagctaaaaagctccttccactggataagcttagatttcagtcaaataaacataagtgtggttttcaagggaaccgtcagacagatgaaatgctgacaattttctgggaatgtgacatttaaggagctgcaatcacattctgtcccctctggtggcttctgaggttttggttttcagggctaccatggagctgggaaaaaatgcaaattaaaatactacagacctcactcttgttaataatattaagctatttttcataaataaatacttgctggattgctgcacgagtttgacaggtttccagagttctaaaaaaggttattctggttattttctcacttttctcattgcttttatgtaggtgaagaattttgaaattatgtattccactttttgctgatgtcaccttttcttgttatatagattacatttgatcttatttttgatgtgtaaatttgtgtgaacgtgtatatgcatatataatatttctgttcttatttctacttatattactgtattagtttctcattgctgcagtacaaatttccacaaacttatttgatgtaaaaacaaatctattctcttacaggtctggatatcagacttctaacagcatttttttggcagggctgcatatcttctggaagattccacagaacagttgttacttttcctttcccaacttctagaaaccacctgtatcacctgtattccttggccaaagatttccttcctccatctccaaagcaagcaatgactgagcaaatctttctcacactgcatcgctttgacactattatagtaaaatctccctctgcctctctccaataaagacaattgtgattaagtaggacttactgaaaacattcagggta

SEQ ID NO: 674979 - DNA, 641 bp, Homo sapiens
ttattaccatgggacactttctaaatagaccaagggatcatcttccaaacaggaaaatatttgaatagccccaccaagtctgtagatcatctaaggctgatactattattagataaaagttaagcaattaatccctaaaaacttcctaagaactggggtcacatgggttccttcattagaatccaggtatggcttaatcaaaacttatcaggactcttgaagtcaagggtccccaacccctgggcaacagactgacactggtctgtggcctgttaggaactgggctgcacagcaggagatgggtggcaggccagggarcattaccacctgagctctgccccctgtcagatcagcagtggcattagattctcacaggagcacaaaccctattgtgaactgtacatgtgaggaatctaggttgcagctccatctgagaatctaatgcctaatgcttgatcatctgaggtggaaccgtttcatctcagaaccatcccccttgccccaactggtcagtggaaaaattatcttccacaaaaccagtctctggtgccaaaaaggttgggaaccattgtgctaagtcatgattcaactgcgtcatgaaactgaaaagcttagaggaagggtgacttcaggcatggctg

SEQ ID NO: 674980 - DNA, 1815 bp, Homo sapiens
ccagtagctagtttccagtgatgatgttggcaacaaaatcaagaagccaagaatctagaggtggtgtcatcagtagtaccggttataagaagaccatcccatgctgtgatttggatgtctgtcttgagcctagatctatgcctagttagttctccaacgttttcatcaattctatgatttacctgatgtccatctagtacataggttttcagctttaaataactktaattagtatctgtatcttatacacttacaggttgccagaactaaaggataatcatctacttacccttgcaccatattatttctctatgacttctttttactggcagtgattatagcattatcaattattttccaaaatccattcttccctttttccatgaattgcaaaacccctgattttaattaggccactcaatcaaagattatatttcccaaatttcctggcagctaggttagctcatacaactaatgggatgtgagtgaaatgatgggtggaatttctctgtcacgatattgatggaaaaaagcattgtctccacttcacctactccccttactgttggctagaaggcagacatgacagtgggagctgaggcagctattttagaccattaagatggaagccacaggttgagaacagcagaacaacaatgcgggaatttgggtcctggatgaagggtagccttcagctctgtctgcttacccttggactatttcttgtaaaataaatgaacttctgtcttttgaaagccaatgttacattgggattcactgcagagcaatcctgcattctaacatggctatcagcgttttggactacgtcacacaacagcttaccaggcgtccttactgttgaattctcttgaagctttcttatgagaaaagaagcattgcttcatgtgactcccaccttgagctttttgaaattcagtcattttttcagccaaatataatagctacacagtggtaacagaagtgagaaaaaactacagggggattgcttggccatttgggccacaatggcagaaatggaagccccagtgttgcatgaagagacacagcaaattcaaacgagcatgaaaaggtcaggccttagttttatatgctacttgaaaagtgatatgaggcagtacttaaataatatgatttttttttaataataagtgatttagcagtacttaaataatatgatcatgctggttttcattctgaaattcatgccaccctaactaaatagaagaataaatgaaagaacacaactgtgttgtgacttacgacacacttttataatcgacaaaagtgcagttgaggttatttttttattaatctcactgaacaaatgttccaaaactagacctctttttccaattaaacataatctctatttcataaattaaagttaacaaagtcaaatgcaatttagttatgaaaatctgtctttcttttctcagctcacagttgaccaatcccatgtgcataagataaaaggacagggaaacaagtggctttgctaaacattttggtatgcagagaaaccattacgccattgatgctgtgggactgcaatcacattcacatagaatgaaacatgctgcctgcaataaattactgggtatgttggagccttcgtttaacccaaagtgcttcataatgcgtgttttctgtgctaaaatctctgctttctttggagtaaaaagaaaaacctgaaatctttccccatctgtggctcatgatctatagctaaggaaaaaaaaatcctatttctgcattgttgcaagaatgtaaaactttactgttcccaggaagtgg

SEQ ID NO: 674981 - DNA, 1815 bp, Homo sapiens
ccagtagctagtttccagtgatgatgttggcaacaaaatcaagaagccaagaatctagaggtggtgtcatcagtagtaccggttataagaagaccatcccatgctgtgatttggatgtctgtcttgagcctagatctatgcctagttagttctccaacgttttcatcaattctatgatttacctgatgtccatctagtacataggttttcagctttaaataactgtaattagtatctgtatcttatacacttacaggttgccagaactaaaggataatcatctacttacccttgcaccatattatttctctatgacttctttttacyggcagtgattatagcattatcaattattttccaaaatccattcttccctttttccatgaattgcaaaacccctgattttaattaggccactcaatcaaagattatatttcccaaatttcctggcagctaggttagctcatacaactaatgggatgtgagtgaaatgatgggtggaatttctctgtcacgatattgatggaaaaaagcattgtctccacttcacctactccccttactgttggctagaaggcagacatgacagtgggagctgaggcagctattttagaccattaagatggaagccacaggttgagaacagcagaacaacaatgcgggaatttgggtcctggatgaagggtagccttcagctctgtctgcttacccttggactatttcttgtaaaataaatgaacttctgtcttttgaaagccaatgttacattgggattcactgcagagcaatcctgcattctaacatggctatcagcgttttggactacgtcacacaacagcttaccaggcgtccttactgttgaattctcttgaagctttcttatgagaaaagaagcattgcttcatgtgactcccaccttgagctttttgaaattcagtcattttttcagccaaatataatagctacacagtggtaacagaagtgagaaaaaactacagggggattgcttggccatttgggccacaatggcagaaatggaagccccagtgttgcatgaagagacacagcaaattcaaacgagcatgaaaaggtcaggccttagttttatatgctacttgaaaagtgatatgaggcagtacttaaataatatgatttttttttaataataagtgatttagcagtacttaaataatatgatcatgctggttttcattctgaaattcatgccaccctaactaaatagaagaataaatgaaagaacacaactgtgttgtgacttacgacacacttttataatcgacaaaagtgcagttgaggttatttttttattaatctcactgaacaaatgttccaaaactagacctctttttccaattaaacataatctctatttcataaattaaagttaacaaagtcaaatgcaatttagttatgaaaatctgtctttcttttctcagctcacagttgaccaatcccatgtgcataagataaaaggacagggaaacaagtggctttgctaaacattttggtatgcagagaaaccattacgccattgatgctgtgggactgcaatcacattcacatagaatgaaacatgctgcctgcaataaattactgggtatgttggagccttcgtttaacccaaagtgcttcataatgcgtgttttctgtgctaaaatctctgctttctttggagtaaaaagaaaaacctgaaatctttccccatctgtggctcatgatctatagctaaggaaaaaaaaatcctatttctgcattgttgcaagaatgtaaaactttactgttcccaggaagtgg

SEQ ID NO: 674982 - DNA, 605 bp, Homo sapiens
tggtgacattgtatattctgaagttttaagaaatttatattcaagtttccaatttmtattattcattttcatcagttgcttatagatgggtcaattttgatcatagtaagggtcaaaataattctctaaattatgttagaattaaacatttattaccattaaagataattgaaatgcaataattataattgcatttttcacttttgttttcttcacccattattagtggtgattatagcattgcttaggaatcaaagatgactagtattgattcttgttgacaaaatttcattcaaccatttgtttcaacatttatagaaatacttattgaaaagccagtcccccaaatggatgttttaagtatgtgaataattcttctcagctcttctgcactaattgtgctatgatctttttttaatccctgtgatattgtaataatccatagtaaatcacacttacactcttttctgtcttaaaagcaggtaattaaagtaggatatgacagagtgagacagaaagagagagagagagagacagagaaagggggaaagagacacatacagagagaagggaattggtctccactttttcctttaatccacatt

SEQ ID NO: 674983 - DNA, 605 bp, Homo sapiens
tggtgacattgtatattctgaagttttaagaaatttatattcaagtttccaatttctattattcattttcatcagttgcttatagatgggtcaattttgatcatagtaagggtcaaaataattctctaaattatgttagaattaaacatttattaccattaaagataattgaaatgcaataattataattgcatttttcacttttgttttcttcacccattattagtggtgattatagcattgcttaggaatcaaagatgactagtattgattcttgttgacaaaatttcattcaaccatttgtttcaacatttatagaaatacttattgaaaagccartcccccaaatggatgttttaagtatgtgaataattcttctcagctcttctgcactaattgtgctatgatctttttttaatccctgtgatattgtaataatccatagtaaatcacacttacactcttttctgtcttaaaagcaggtaattaaagtaggatatgacagagtgagacagaaagagagagagagagagacagagaaagggggaaagagacacatacagagagaagggaattggtctccactttttcctttaatccacatt

SEQ ID NO: 674984 - DNA, 715 bp, Homo sapiens
  misc_feature 390, 391, 392, 393, 394, 395, 396, 397, 398, 399, 400, 401,402, 403, 404, 405, 406, 407, 408, 409, 410, 411, 412, 413,414, 415, 416, 417, 418, 419, 420, 421, 422, 423, 424, 425,426, 427, 428, 429, 430, 431, 432, 433, 434, 435, 436: n = A,T,C or G
  misc_feature 437, 438, 439, 440, 441, 442, 443, 444, 445, 446, 447, 448,449, 450, 451, 452, 453, 454, 455, 456, 457, 458, 459, 460,461, 462, 463, 464, 465, 466, 467, 468, 469, 470, 471, 472,473, 474, 475, 476, 477, 478, 479, 480, 481, 482, 483: n = A,T,C or G
  misc_feature 484, 485, 486, 487, 488, 489: n = A,T,C or G
gaacataagcacagtcactaacagagaatctatcttgtttatttctgtatctccctccctaaatatagagtaaacatgacatacagaaggcattcaaaaatataattttagctttttttgttcctattttcattcctatttttaaaattccttctttattataaattacytttccatcaatttttaacttattatttgaatataagggattgattttttttggactctatttagaaataggatcattgatttgtgcatatgaaaggttgtattaccttagcaaattcactaatattatctaacagctttgtagttgacaatcaatctggaaataattactttgacagtttctatttaatattttgttatttattgttttaatagatggannnnnnnnnnnnnnnnnnnnnnnnnnnnnnnnnnnnnnnnnnnnnnnnnnnnnnnnnnnnnnnnnnnnnnnnnnnnnnnnnnnnnnnnnnnnnnnnnnnntttaattttgcttgactgccagtaaacttctccacattgtctccatatgggcttatattcctcagaacagttagccctgagtattctttagaaagatgtgtgtggcactgttctctttttatggctgctgtgcctgttgagagccccaggttggtaagacctgaaaattgtgtagcaagaggtgtgaagcaatcgttagggaaatcagtgaaagaaaaataaccta

SEQ ID NO: 674985 - DNA, 2183 bp, Homo sapiens
aattccatgtctttgctattgtgaatagtgctacagtgaacatatgtgtgtatgtatctttataatagaatgatttatatgcctttgaatctaaaagaaacataaacaaatttacaaaacaaacaaacaaaaacccaaacaacccctttaaaaagtgggcaaagtacatgaatagacacttctcaaaagaagacattcttgcaggcaacaaacatgaaaaaaaactcgacatcactgatcgttagagaaatgcaaatcaaaaccacagggagataccatctcatgccagtcagaatggcgattattaaaaagtcaagaaacaaaagatgctggtgcggttttgaagaaataggaacgcttttacactgttggtgggaatgtaaattagttcaagcattgtgggagacaatgtggcgattctttaaagatacagaaccagaaataccatctgactcagcaatcccattactgggcatatacccaaaggacatttttcaaaattgatatctaaagtgtggttaatgaatatttttccaagtaattcatttattcacataaacatattttatactgcatttgttcatttcaccaccattctagttgctaggagtaaaatcatacaatccctatttttggtcttttaaaaagatgcatgtcattgtctggattatttatttgtccaagtgaaaatatttctgtagacaaggtgacttgggagaacagaagaaggatgtattagtcaagcaggtatagcatccattcccagtgctatttctccagggtaataagaattaaattcagttccccatattaatctgtattcattttccaactattgatgaccttgaaaccatgaaaccacaattcaactgggggctgaacccagstgaaactcccttctaagaatatgctaaagccatagagaaaaataaattcaacccacttgcagccacatctttacaattcccacaactgtccctcttgcataaaaatgctgattctgatggggggatcaatgcattatctgttatttcttataacgtgcatcatcactcctctctatttatgggcaaaatggtggattgaaaacagcacaattaatattaaagatagtaacataatgactttcagaaattgatgctaagaatacaatttgttaacttcacacagccattgacttaactgtctataattgtaatacaggaaaggagggtgtgggtgtgtttctcggtttgggctccacagctcagaaaatacaccagtgaatcctggcccgtgaggacttactagagtgttcaaaaataatgaactcaaaaggacagtgaagaggacaaaatcaacagtatttattctgatttacttaaatcagaggtgtggtaaattaatgtttttttaattgaaaatatttatgaaattttatatgtatttaaaataaaaattgtattaaatgttcattctatagttcctcaaaaacaatgttagctaaatatatatatatatacacacacatatatacacacacaaacactctctttaaagtagctcaaagaatgttcacgtatattttcccatttatcttcataagagtccctatgagatacagagggattattattatcacctcctttgaaacagggaatgtgaaagaacaataggttaaattaatagtggcaaccataaattgatttatagctttgaaacctcgcaaaataaaatcatgcttagtttacaatttatttttagaaataatggcttcccgggtgttttaaaggcattatttatcagcttagactttatctgataattgtaaaatgtagaggtttttcaattaccctagaggctcatattttatttcttgagatataatccacataagaaaataatgcctgaatgatgtatgcaaatattaatagaattttggtcaataattaaccagtgaagaaaattcaacaatttctacataagcatgagtacttgaggaattaatttatggataaacgtcaaaaatgcaattcacgtttcctggtacagctttactattctaaacatacctcacaaaatcattcactttaaactgtgtcatattgaaagatttcatgaggatgtaaaatggctaatatacaattcagattacttttataatttggttcaaatggaaatatggggtggggggacgtccaata

SEQ ID NO: 674986 - DNA, 2183 bp, Homo sapiens
aattccatgtctttgctattgtgaatagtgctacagtgaacatatgtgtgtatgtatctttataatagaatgatttatatgcctttgaatctaaaagaaacataaacaaatttacaaaacaaacaaacaaaaacccaaacaacccctttaaaaagtgggcaaagtacatgaatagacacttctcaaaagaagacattcttgcaggcaacaaacatgaaaaaaaactcgacatcactgatcgttagagaaatgcaaatcaaaaccacagggagataccatctcatgccagtcagaatggcgattattaaaaagtcaagaaacaaaagatgctggtgcggttttgaagaaataggaacgcttttacactgttggtgggaatgtaaattagttcaagcattgtgggagacaatgtggcgattctttaaagatacagaaccagaaataccatctgactcagcaatcccattactgggcatatacccaaaggacatttttcaaaattgatatctaaagtgtggttaatgaatatttttccaagtaattcatttattcacataaacatattttatactgcatttgttcatttcaccaccattctagttgctaggagtaaaatcatacaatccctatttttggtcttttaaaaagatgcatgtcattgtctggattatttatttgtccaagtgaaaatatttctgtagacaaggtgacttgggagaacagaagaaggatgtattagtcaagcaggtatagcatccattcccagtgctatttctccagggtaataagaattaaattcagttccccatattaatctgtattcattttccaactattgatgaccttgaaaccatgaaaccacaattcaactgggggctgaacccagctgaaactcccttctaagaatatgctaaagccatagagaaaaataaattcaacccacttgcagccacatctttacaattcccacaactgtccctcttgcataaaaatgctgattctgatggggggatcaatgcattatctgttatttcttataacgtgcatcatcactcctctctatttatgggcaaaatggtggattgaaaacagcacaattaatattaaagatagtaacataatgactttcagaaattgatgctaagaatacaatttgttaacttcacacagccattgacttaactgtctataattgtaatacaggaaaggagggtgtgggtgtgtttctcggtttgggctccacagctcagaaaatacaccagtgaatcctggcccgtgaggacttactagagtgttcaaaaataatgaactcaaaaggacagtgaagaggacaaaatcaacagtatttattctgatttacttaaatcagaggtgtggtaaattaatgtttttttaattgaaaatatttatgaaattttatatgtatttaaaataaaaattgtattaaatgttcattctatagttcctcaaaaacaatgttagctaaatatatatatatatacacacacatatatacacacacaaacactctctttaaagtagctcaaagaatgttcacgtatattttcccatttatcttcataagagtccctatgagatacagagggattattattatcacctcctttgaaacagggaatgtgaaagaacaataggttaaattaatagtggcaaccataaattgatttatagctttgaaacctcgcaaaataaaatcatgcttagtttacaatttatttttagaaataatggcttcccgggtgttttaaaggcattatttatcagcttagactttatctgataattgtaaaatgtagaggtttttcaattaccctagaggctcatattttatttctygagatataatccacataagaaaataatgcctgaatgatgtatgcaaatattaatagaattttggtcaataattaaccagtgaagaaaattcaacaatttctacataagcatgagtacttgaggaattaatttatggataaacgtcaaaaatgcaattcacgtttcctggtacagctttactattctaaacatacctcacaaaatcattcactttaaactgtgtcatattgaaagatttcatgaggatgtaaaatggctaatatacaattcagattacttttataatttggttcaaatggaaatatggggtggggggacgtccaata

SEQ ID NO: 674987 - DNA, 2183 bp, Homo sapiens
aattccatgtctttgctattgtgaatagtgctacagtgaacatatgtgtgtatgtatctttataatagaatgatttatatgcctttgaatctaaaagaaacataaacaaatttacaaaacaaacaaacaaaaacccaaacaacccctttaaaaagtgggcaaagtacatgaatagacacttctcaaaagaagacattcttgcaggcaacaaacatgaaaaaaaactcgacatcactgatcgttagagaaatgcaaatcaaaaccacagggagataccatctcatgccagtcagaatggcgattattaaaaagtcaagaaacaaaagatgctggtgcggttttgaagaaataggaacgcttttacactgttggtgggaatgtaaattagttcaagcattgtgggagacaatgtggcgattctttaaagatacagaaccagaaataccatctgactcagcaatcccattactgggcatatacccaaaggacatttttcaaaattgatatctaaagtgtggttaatgaatatttttccaagtaattcatttattcacataaacatattttatactgcatttgttcatttcaccaccattctagttgctaggagtaaaatcatacaatccctatttttggtcttttaaaaagatgcatgtcattgtctggattatttatttgtccaagtgaaaatatttctgtagacaaggtgacttgggagaacagaagaaggatgtattagtcaagcaggtatagcatccattcccagtgctatttctccagggtaataagaattaaattcagttccccatattaatctgtattcattttccaactattgatgaccttgaaaccatgaaaccacaattcaactgggggctgaacccagctgaaactcccttctaagaatatgctaaagccatagagaaaaataaattcaacccacttgcagccacatctttacaattcccacaactgtccctcttgcataaaaatgctgattctgatggggggatcaatgcattatctgttatttcttataacgtgcatcatcactcctctctatttatgggcaaaatggtggattgaaaacagcacaattaatattaaagatagtaacataatgactttcagaaattgatgctaagaatacaatttgttaacttcacacagccattgacttaactgtctataattgtaatacaggaaaggagggtgtgggtgtgtttctcggtttgggctccacagctcagaaaatacaccagtgaatcctggcccgtgaggacttactagagtgttcaaaaataatgaactcaaaaggacagtgaagaggacaaaatcaacagtatttattctgatttacttaaatcagaggtgtggtaaattaatgtttttttaattgaaaatatttatgaaattttatatgtatttaaaataaaaattgtattaaatgttcattctatagttcctcaaaaacaatgttagctaaatatatatatatatacacacacatatatacacacacaaacactctctttaaagtagctcaaagaatgttcacgtatattttcccatttatcttcataagagtccctatgagatacagagggattattattatcacctcctttgaaacagggaatgtgaaagaacaataggttaaattaatagtggcaaccataaattgatttatagctttgaaacctcgcaaaataaaatcatgcttagtttacaatttatttttagaaataatggcttcccgggtgttttaaaggcattatttatcagcttagactttatctgataattgtaaaatgtagaggtttttcaattaccctagaggctcatattttatttcttragatataatccacataagaaaataatgcctgaatgatgtatgcaaatattaatagaattttggtcaataattaaccagtgaagaaaattcaacaatttctacataagcatgagtacttgaggaattaatttatggataaacgtcaaaaatgcaattcacgtttcctggtacagctttactattctaaacatacctcacaaaatcattcactttaaactgtgtcatattgaaagatttcatgaggatgtaaaatggctaatatacaattcagattacttttataatttggttcaaatggaaatatggggtggggggacgtccaata

SEQ ID NO: 674988 - DNA, 1725 bp, Homo sapiens
tgctaggcactattctgtgcctggaacttagttttgatgaagagagacagataaaatacaaattagccattcaatcagataatcttagatattgattatcatgaacattgatgtgttgaagcctattcacactgtatgtgagacccaataatgtgcattttgtctcaacatcactttcagttatatcacattggtatcttttgattgaccatggtggcagtatttaaaccattgggattggtaaatactctattccaatttttttttctccctctagagagccacttgttaaacatttaccagcataccacaaagtatatgatgacaataaaataggatgttgtgatgaaatatacagcagggaaagaggttactttagagtggtcagggaaaaagtcacattgtacttaatagaacattttttaaaataacaaatctgcactgcacttgatgtgtatgtactgactaggacacaggactagagatggagttagaagtaggagacattcatatttttatggagtttacaaaacaattggaaaataaaagcataaaattaattacaaaatgatatatcaataataaacaatactataaatttatatgtgttaaagggatacagaaataaaaaaggtaagtgtggattgtgatgactttctggaagcaatttatgttgacttccagaagaaacttagaaatatttactttcttgcatgtagataggagaatgttttacctttgagcagagagagctactctttgcaactttgaatcagaggattgctaagtagaccaggaacttcttcttcttcttcttcttttttttttttttttttgcattcctgtatgtgttttatttcatttttatttttataaaataaaaggaatctaaggaatttcataraaaactaaagaaagaggaggggcaaaatgaatataatagagtctcagtgtggctggggaatcttaccatggtgaagggacaacactgccacctgatacttggaaaggacattaatgatagctaggacttgtttgtttgggacgctggctttatttaaaacatggttaaaatggctttctcttgaggagcacctcaatatctgacttctatccctttaaatatagcttaacttactccttccaccagcaaaatttatctctaattttggtagtatggaattaatgaaagatattaggaagaaacagatgaacaggccatcttcaaattcttcacattcttacactgaacagtaattggggctagtaacagaatttactctaagtgtgctgggaaacatacatgtcagtaattagcaagtttaagagctaaatgcacaattagcatggacagcacattcagtagagaattccaaactctctttagttttatcctccaatgctctaatttggagcaaaaaatgctataattttagttagtttatatttaaatatcatctttctgggcccagcctaaaacatagagtgcccttttctcaaaactaattaggaggatcaaattatgctcctctaaaactgagttccttactctcaacttctgtggtttcctggcttttctggtcctggaggaactcttacactcttgcccctcaggtgggcctttctgaccctgtaatctccttataccattcctgagtctatgccattacacaaggcagatccacttcctgaaatgcagtatctctgagaagtttcctcttctaa

SEQ ID NO: 674989 - DNA, 1725 bp, Homo sapiens
tgctaggcactattctgtgcctggaacttagttttgatgaagagagacagataaaatacaaattagccattcaatcagataatcttagatattgattatcatgaacattgatgtgttgaagcctattcacactgtatgtgagacccaataatgtgcattttgtctcaacatcactttcagttatatcacattggtatcttttgattgaccatggtggcagtatttaaaccattgggattggtaaatactctattccaatttttttttctccctctagagagccacttgttaaacatttaccagcataccacaaagtatatgatgacaataaaataggatgttgtgatgaaatatacagcagggaaagaggttactttagagtggtcagggaaaaagtcacattgtacttaatagaacattttttaaaataacaaatctgcactgcacttgatgtgtatgtactgactaggacacaggactagagatggagttagaagtaggagacattcatatttttatggagtttacaaaacaattggaaaataaaagcataaaattaattacaaaatgatatatcaataataaacaatactataaatttatatgtgttaaagggatacagaaataaaaaaggtaagtgtggattgtgatgactttctggaagcaatttatgttgacttccagaagaaacttagaaatatttactttcttgcatgtagataggagaatgttttacctttgagcagagagagctactctttgcaactttgaatcagaggattgctaagtagaccaggaacttcttcttcttcttcttcttttttttttttttttttgcattcctgtatgtgttttatttcatttttatttttataaaataaaaggaatctaaggaatttcataaaaaactaaagaaagaggaggggcaaaatgaatataatagagtctcagtgtggctggggaatcttaccatggtgaagggacaacactgccacctgatacttggaaaggacattaatgatagctaggacttgtttgtttgggacgctgsctttatttaaaacatggttaaaatggctttctcttgaggagcacctcaatatctgacttctatccctttaaatatagcttaacttactccttccaccagcaaaatttatctctaattttggtagtatggaattaatgaaagatattaggaagaaacagatgaacaggccatcttcaaattcttcacattcttacactgaacagtaattggggctagtaacagaatttactctaagtgtgctgggaaacatacatgtcagtaattagcaagtttaagagctaaatgcacaattagcatggacagcacattcagtagagaattccaaactctctttagttttatcctccaatgctctaatttggagcaaaaaatgctataattttagttagtttatatttaaatatcatctttctgggcccagcctaaaacatagagtgcccttttctcaaaactaattaggaggatcaaattatgctcctctaaaactgagttccttactctcaacttctgtggtttcctggcttttctggtcctggaggaactcttacactcttgcccctcaggtgggcctttctgaccctgtaatctccttataccattcctgagtctatgccattacacaaggcagatccacttcctgaaatgcagtatctctgagaagtttcctcttctaa

SEQ ID NO: 674990 - DNA, 1725 bp, Homo sapiens
tgctaggcactattctgtgcctggaacttagttttgatgaagagagacagataaaatacaaattagccattcaatcagataatcttagatattgattatcatgaacattgatgtgttgaagcctattcacactgtatgtgagacccaataatgtgcattttgtctcaacatcactttcagttatatcacattggtatcttttgattgaccatggtggcagtatttaaaccattgggattggtaaatactctattccaatttttttttctccctctagagagccacttgttaaacatttaccagcataccacaaagtatatgatgacaataaaataggatgttgtgatgaaatatacagcagggaaagaggttactttagagtggtcagggaaaaagtcacattgtacttaatagaacattttttaaaataacaaatctgcactgcacttgatgtgtatgtactgactaggacacaggactagagatggagttagaagtaggagacattcatatttttatggagtttacaaaacaattggaaaataaaagcataaaattaattacaaaatgatatatcaataataaacaatactataaatttatatgtgttaaagggatacagaaataaaaaaggtaagtgtggattgtgatgactttctggaagcaatttatgttgacttccagaagaaacttagaaatatttactttcttgcatgtagataggagaatgttttacctttgagcagagagagctactctttgcaactttgaatcagaggattgctaagtagaccaggaacttcttcttcttcttcttcttttttttttttttttttgcattcctgtatgtgttttatttcatttttatttttataaaataaaaggaatctaaggaatttcataaaaaactaaagaaagaggaggggcaaaatgaatataatagagtctcagtgtggctggggaatcttaccatggtgaagggacaacactgccacctgatacttggaaaggacattaatgatagctaggacttgtttgtttgggacgctggctttatttaaaacatggttaaaatggctttctcttgaggagcacctcaatatctgacttctatccctttaaatatagcttaacttactccttccaycagcaaaatttatctctaattttggtagtatggaattaatgaaagatattaggaagaaacagatgaacaggccatcttcaaattcttcacattcttacactgaacagtaattggggctagtaacagaatttactctaagtgtgctgggaaacatacatgtcagtaattagcaagtttaagagctaaatgcacaattagcatggacagcacattcagtagagaattccaaactctctttagttttatcctccaatgctctaatttggagcaaaaaatgctataattttagttagtttatatttaaatatcatctttctgggcccagcctaaaacatagagtgcccttttctcaaaactaattaggaggatcaaattatgctcctctaaaactgagttccttactctcaacttctgtggtttcctggcttttctggtcctggaggaactcttacactcttgcccctcaggtgggcctttctgaccctgtaatctccttataccattcctgagtctatgccattacacaaggcagatccacttcctgaaatgcagtatctctgagaagtttcctcttctaa

SEQ ID NO: 674991 - DNA, 1081 bp, Homo sapiens
ttacaagagtttttgttttggaattttaaacataagacaatgcacatgtcaaacaattcaaaaggtactgcagaaacccactcaatcacaagtcatcaatgttaagaaggattttttttgtatatttaataccatatattgtatgaaatatatataacatatattacatgtgcacatatctttttaaaattccaagtagaattytactgtgcactatattttgcatatttatttattttattttagtgatattttcatatcaatacatatagatctatataattcttcttaactacttcataacatttcattaaaatagcctgtcataggtgtactctccggttgtttctaggcttttgctatctcaaacagggctatgaatgaaaatcagtcttgtttatagcatctttataaacatgaactccactcaattatgaccttgtcattttgaataatccagtgctaatgtggccattttcaatttgtgcttacagattataatacctgcgatggatttattcctgcttcattgcatgcattctttcatatgccatttgttaccacttatttataaaaatgtcatatttaattgaaattatcaaacctaaagggattaaaggcaaaaaactagtccccatagactgatgccaatttttccatttgaaatacgtggtatcatgcactatccagctgactattcagtaagtcaagagatcatgacaataattttctactaagaaacaaatggtatatatgtctgaaggaagataaaaattaaaagcctaaaagtaccgctttttgcagtgactcacgcctgtaatcccagcattttgggaggccaaggcgggcggatcacaaggtaaggagatacagaccatcctggccaacatggtgaaaccccgtctctactaaaaatacaaaaattagctgggcctggtggtgcacacctgcaatcccagctactcaggaggctgaggcaggagaattgcttgaacaggggagtcggaggttgcagtgagccgagatcgcgccactgcactccagcctggtggtgacagaccaagactccaactaggaaaaa

SEQ ID NO: 674992 - DNA, 1395 bp, Homo sapiens
caaaacggctaggcctggctggaggaacttgatctctcccacttctggttttcagacttccattggcttttaccacctgctgtgtatccctgacattatactgcaagacttccttggaggggtacccactagatggcttaaggggtacctcaagatggtttaggctccattgggcactgctttttagctgtctccctctgctcagacagagagggcaagcgggtcaccaagttcattgcctatgccacgaggaaagagatgctagcctcccttctttcaggcatgcccactagctacaattgtttctgtcagagccttccttacttagttgttggaagagaagcaaaagacctagtactgtgtcaaattaatgatttaacaattcttgaattttctcttatctcccaatgatcttttatgaggactgggaaaggcctgtggygtaatagaaaagggttggctcagcttttataagtcttaatggagacgtgtctggtttccttgatggctcttttttgaacaatatttttctcagcttttgatggtcttagaaatcatatggaagctaaaaaacaaaaattaaaaaaacaacaacttgtttagtagattccactcctagagattttggtttaattggtctgtggtagtaggtcaggttgaaaaatttcacgggtgattccaatgagcagcctttgctaacgaccgccttagcactaattgctgtcatctgtgggcttttatgaatcattctgaaactcctcaaagaatcccattcagcaccatgttacacactgtattaaagaataatagagagtacaagggtttctggaattctggaatgaaagaaacctaaaaaaatcatttcattcacttttctctctctggggtctgtaaactaacaatcactaagaatcactttgaacttgtgcttaaaaggcatattccggggtcttatcctcacaccttctgaatcaacatctctcaaatggggtaaggattaggcatctgcatttcaataagcttttctgggtgattcttaaacacattcgtgtttagaaccaataatatgtagcagaggttctcaaccctggctgcatattagaatcacacaggggatttaaaattacccatgcaaactagagcagtggtctcaaccttggctgcactttagcatcgcctgaagggctttaaaaagccccatgcccagccccccactctgtgccaatcacatcagaaattctccaggtgggaccgacctaggcatttgtgtttttttaaagcctctctggttgattttaatgtgcagttaaggttgaaaaccactgttctggagattctggtttaatttgtttgtcataggtctcaggcattaataacttctaaatgcaccctaga

SEQ ID NO: 674993 - DNA, 347 bp, Homo sapiens
aaagtgctgggattgcaggcgtgagccaccacgcccggccacagtaaattattttctaaggttgaactatcctacttttttggacactgatggttctcaactagatgggatagaactgcctttaaaagggaatgtggaaattcattgggtattttcagttaacacagtgtgattcaagctggcatttrgctcctgggaactaaggataccaaacctcttatatgacaaataaacttagcgccctaactaccaatggtgtctcagttgagaaaaactgctaactgtgaatttgtttttcatcatttttttaaaattatactttaagttctagggtacatgtgcacaat

SEQ ID NO: 674994 - DNA, 671 bp, Homo sapiens
gtgctaagagagatgaaccaggagacctaatttagatgggggatggtgtcagagatggtgctactaaagaagtggtttttaagctgttctgaagcaggagatgggggtaaagattgttgtgggcagtgggaacagcaggaaaaagcccccgaagtgggaacaagcttggtttgggtggagcatggtggtgagaggagagtggcatgagaggagtctggcaggatatgaagcaggggctaaaccttgcaggctcttgtaaatcatgtgaagattttggcatttttgtcctaagtgcatagaaatgatcataatatggattactctaayataattcatcaggcttgaattttttaaagataatcaagattcaattttttttttaaaagataattgattgctgtgtggtgctgtgtggaaaagggattggaaggggacaagagagaaggtgaggagagcagtcggacggctattgtaatagtccaggtgagagatagtggtacctgtatcatggagacagcagtgcaaatggagctatttcagagctattaataccacttacaggttttgctgctgcattggagtggaagaggggatgactcctaggtcagagcaatcctatacactatgcttagtgacaccaatcctaagtatcaccaaaactaaatacccat

SEQ ID NO: 674995 - DNA, 671 bp, Homo sapiens
gtgctaagagagatgaaccaggagacctaatttagatgggggatggtgtcagagatggtgctactaaagaagtggtttttaagctgttctgaagcaggagatgggggtaaagattgttgtgggcagtgggaacagcaggaaaaagcccccgaagtgggaacaagcttggtttgggtggagcatggtggtgagaggagagtggcatgagaggagtctggcaggatatgaagcaggggctaaaccttgcaggctcttgtaaatcatgtgaagattttggcatttttgtcctaagtgcatagaaatgatcataatatggattactctaacataattcatcaggcttgaattttttaaagataatcaagattcaattttttttttaaaagataattgattgctgtgtggtgctgtgtggaaaagggattggaaggggacaagagagaaggtgaggagagcagtcggacggctattgtaatagtccaggtgagagatagtggtacctgtatcatggagacagcagtgcaaatggagcyatttcagagctattaataccacttacaggttttgctgctgcattggagtggaagaggggatgactcctaggtcagagcaatcctatacactatgcttagtgacaccaatcctaagtatcaccaaaactaaatacccat

SEQ ID NO: 674996 - DNA, 1054 bp, Homo sapiens
ttcctcggggaccagctttactcaattaaaaatgatttatgactttggttctattttataatcattttggggagagttcatgcatccacatacatatccatctaactttggactgaaaaaaattttcaaaaattccataatctgattggctgacactgagaagtgaaagagatttaagagcttgatataatcaacataaatgttccactgattctcaaaaccaggagtacattccttgctgtcaggcctgtggaaccacaaccctgccactcactccacacatttgggcttctctctgtgggtccagagctgctccatcaatctcttgcttgtttgatatcaggaagtagtgacagaccattctgaaatttcaattaatcctatgcttttcagttaatgctgagtgcttatggattacaacatgttctatatatcctgcatcttaaatctgccctttaaaataaaatatggaaggaaaacatacattttttaactaaaaagatgctttgaactaaaaaaaaaaaagttgctctaaaaggaaaataactaaagggataaatgaactaaaaaattattgtctgaaatatttaagttctctcctttcataactttcaaccatttatccttcatttaattctttcagccatttatcttttacttaattctcccttcatatccacctcttgctctgtccccactgcctgtcacaggccttcatcagatcacgcttgtgcctctgcagtgatgttgcaactggctgccatctgactactctctcactctttctctccatcccaaagatcagggctaaagaaaccattcagcattacacttccctagtcaaaataactcccatattcccctccacacggccattgttaccaacctaggcccagggcagagagaacagctgagtagatggggttcgtgatgcccttctcacttcaagacacacttgcgttgctctgttaatagattgcatctccttgtttagtatactgacacttgcactttcatctgtttaayatattgccaaaatatcatttgaaaaagc

SEQ ID NO: 674997 - DNA, 663 bp, Homo sapiens
agtataaaataatatattccaacacagacattctgcttataactaatgtagctttccctaccatatgcaatagtatcctaaattttgaccactaggagaagcataatgaaccacatgacatttgggaatttcctccactctggaattgcagtaggtgtgtttgggagtgggaggattttaatcttgtcaagtcataagtaccatagttaatgaatacatttctgtttcagtatgttgatccatttagtgaaagtctcaatcccacttgccatgccaacttccttattagattttcaatttttataccatttgtgaataakcagataattataaccatagatttaatatttttccagatttccattcattagtaaccatggacatgctctattatgtgtctgcctattccaaaatatggtgctttaagaaagagatattttgctttggctcctagagctgtaacaagagcaccacagatttcctacaaatatacatctggcatcctgcctttgtagtccaggacaaatcagttccaggaaaaccaccaccaccttcaaatctgtggctgcttgcagaacactaactgggtttgagtctacttagcccattccatactcagatgaaagatcacggtaggacatattgctatatttctctttagat

SEQ ID NO: 674998 - DNA, 612 bp, Homo sapiens
aaagaagttgcttatttatcagtctatgctcatctagactagctgaagtaatttcccagttgccaagagcataggaaaaagcattatttgacaaggaggcctctttctgctaacgtacaagcaggcccacgcacaagggcaactctcaagtatacagttctaacacttctgttgggtcaaggttgactgagactcttggttggacagttttctgatacgtatcaagcattaagatgaaaaaagctccacaggatattccacctggaagtctgcttttcagatagacaaatcatggatgaaaataagtgaaacataaaaaataaatgactagwtcggaggaaaaaagtaataatattgctaaacacaagggaagagaaatccatggggcacttcggtggaattttgaagttcctgaatagggtacatgttttcttttttgtttgtttccttaagaggtccttaaaatatctagctcaaatttatgatatcttttgatcaatttcctctttgtttacagcacattgttttcctaggttttactttcttctgtatcttcacaaagttaagcctctttttaaattttgtatagtttataataagaatataagttgc

SEQ ID NO: 674999 - DNA, 616 bp, Homo sapiens
taaaaacaaaagcaaaagaatataaaatatctctgatgatttttgaatattgattaccagttgagaagataatattttggatatattggcataattaaaatatattattaaaaatagtttcacctttttttttaaacatggctacaaaaatatctaaaattacatatgtggcatgcattatctttctgttgtatagtgctggtctagaccttaattttctcaactgacttaccaaagaggaagcgtttgcataacaaaagcaagttaaggcaaaggataaagactggacaagtgttttggtaaaatactttagttgtgtagacatctgcaggcaatatctgttaggatgtatgcccccacaaccatgctctctactctatttttccctataacaatattaactcaattgggattgttataacttcttagtcattttaagataaagtttagaaggctgtttttttctgcatttctatctcaggaaatatttaaagagattgaacagtatgtttcttttctttctttttggggggattttttttagtttaacyatgatagtcctataacacagagtattggttgaatgggaatttctgtaagagggcttttagtaaac

SEQ ID NO: 675000 - DNA, 1114 bp, Homo sapiens
aaagttaatatcattgacattaatgattggcttgaggtaatatagcaataatgatctcaactcagtattgtggtactagtgatagattaagaggaagaaacgagctcttcgtattttcagaccaaggttctcctggcctattccacgccccggacacagagtgtgtgagtggcacttacgtgtggatatgttttcattcagtctcactctggagtccctgcgctgtgcttccggggctttgggactgtctggaacacagcaggaggcagcaccttgtggtggtgagtgaagctgccattcctctccattcatcctgaatttacctggagtcaaagtatcttgggagagatgctggatctaattggatttcactaatcagttgcctaagtggagtttggggatggggactcccaggggtgttctgagcaggacattttcatatctgtagcttagggacaccttgtggagattttatccatagctaactaaaacatccaaaaagaaaacaaaaccacaagtggtytgaaacttaagaattttcttggccaggcacggtggctcatgcctgtaatcccagcactttgggaggccccggcaggtggatcacttgagctcaggagttcaagaccagcctggccaagatggtgaaatcccgtctctactaaaaatacaaaaattagctgggcgtgatgacaggcccctgtaatcccagcaactcgggaggctgaggcagaagaattgctccaacctgggaggtggaggttgcagtgagccaagattgcacccctgcattccagcctgggcgacagagcgcgagactccatctaaaaaaaaaaaaaaaaaaaaaaaaaaagagcaaaattaacttaaaaagcctgtcatttgccccaaatgggatgcgaacttcacagagtgataaggaaattcacctctgcatctgcatatgttaccttgtcattttcaggcacgatctgcttaaaagaattattatcatttgaagtagacactgattcttcttcagcaaatttgtgtcttctattttttcatgtagtcaatgatattactacagccttcactggggatggtaaatgttgatattttgtgcaatttacac

SEQ ID NO: 675001 - DNA, 984 bp, Homo sapiens
tcctgaaccctggaggtggaggttgtggtgacccaagattgtgccattgcactccagccggggcaacaagagtgaaactctgtctcaaaaaaaaaaaaaccaaaaaaacaaaaacaaacaaacaaacaaaaaaaactagccaggcatggtggcatgtacctgtaatcccagctactcaggaggctgaggcaggagaatcacttgaactggggaggcagaggttacagtgagccaagattttgccactgcactccagcctgggtgacagagggagactctgcctcaaaaaataaaataaaataaaatagataaaatataaaataaaataaaattcgttacggactaaacatccgttcttgcctgactcagggtggaatcctcctaccctcctacctttgttatgctactgccttccttacaaacccctgttaaagatcaagtggaataatatttttaagggtctcaaattcaaatactgtcagggttcagataggcaagtgtgcgaagtggtgtaggtcactgggagtggtgcagactatggaagattgaggagtgcatgccctggctagaggtgttcacatgcaatttttatccagggagtgaactgacagtttgtgatactcaacaacaaataaataattcaaacttggatctggtctgacttcaaagctttttctactatgtcatttggtcttgtccgaaaccctagttccctttttcttttttttgagacagagtctcactctgttgcccaggccggagtgcagtggtgcgatctcaactcactgcaacctccgcctcctgggttcaagcgattctcctgcctcgtctcctgagtagctgggactataggygtgcgccactatgcctggcaaatttttgtatttttagtagagatggggtttcactgtgttggccaggctggtctcgaactcctgactttgtgatccgcccacctggcctcccaaagtatgggattaaagg

SEQ ID NO: 675002 - DNA, 618 bp, Homo sapiens
agacctttatggggaaaattatgcaactttattaaaatacacaaaagtagaccacactatttttaaaatggaaagaagctactacctagtaaaaataaataaatagtggtttgtctgtaatcaaatacttaatagcataacaacagggataaaattcaaaacctgttacattaaggggaaaaaaattgtgtataaatttgaaaacaataccatgtagtattaatgcataagttgtaaaattataaagctacrcatggtaatttaaccacccttttaattgttggtggggatagggaaaattctgtttttagtctgtaacatatttcttttaaacaaaaaacaaacatggcaaaatatgacattcactaaacctaagtaataggttcataagtttgttataatggtgtctttacttttctgtatgtttgaaatagtttaagtaaaaacagaccaacttaaatttacaagctctttgttttgttttgttttggtttgttttgacacagtctctctgtgttgcccagactggagtgcagtggcaatcttggctcactgcaacctctgcctgccaggttcagggtgttcctcatgcctcagcctcctgagtagctgggatta

SEQ ID NO: 675003 - DNA, 618 bp, Homo sapiens
agacctttatggggaaaattatgcaactttattaaaatacacaaaagtagaccacactatttttaaaatggaaagaagctactacctagtaaaaataaataaatagtggtttgtctgtaatcaaatacttaatagcataacaacagggataaaattcaaaacctgttacattaaggggaaaaaaattgtgtataaatttgaaaacaataccatgtagtattaatgcataagttgtaaaattataaagctacgcatggtaatttaaccaccyttttaattgttggtggggatagggaaaattctgtttttagtctgtaacatatttcttttaaacaaaaaacaaacatggcaaaatatgacattcactaaacctaagtaataggttcataagtttgttataatggtgtctttacttttctgtatgtttgaaatagtttaagtaaaaacagaccaacttaaatttacaagctctttgttttgttttgttttggtttgttttgacacagtctctctgtgttgcccagactggagtgcagtggcaatcttggctcactgcaacctctgcctgccaggttcagggtgttcctcatgcctcagcctcctgagtagctgggatta

SEQ ID NO: 675004 - DNA, 618 bp, Homo sapiens
agacctttatggggaaaattatgcaactttattaaaatacacaaaagtagaccacactatttttaaaatggaaagaagctactacctagtaaaaataaataaatagtggtttgtctgtaatcaaatacttaatagcataacaacagggataaaattcaaaacctgttacattaaggggaaaaaaattgtgtataaatttgaaaacaataccatgtagtattaatgcataagttgtaaaattataaagctacgcatggtaatttaaccacccttttaattgttggtggggrtagggaaaattctgtttttagtctgtaacatatttcttttaaacaaaaaacaaacatggcaaaatatgacattcactaaacctaagtaataggttcataagtttgttataatggtgtctttacttttctgtatgtttgaaatagtttaagtaaaaacagaccaacttaaatttacaagctctttgttttgttttgttttggtttgttttgacacagtctctctgtgttgcccagactggagtgcagtggcaatcttggctcactgcaacctctgcctgccaggttcagggtgttcctcatgcctcagcctcctgagtagctgggatta

SEQ ID NO: 675005 - DNA, 618 bp, Homo sapiens
agacctttatggggaaaattatgcaactttattaaaatacacaaaagtagaccacactatttttaaaatggaaagaagctactacctagtaaaaataaataaatagtggtttgtctgtaatcaaatacttaatagcataacaacagggataaaattcaaaacctgttacattaaggggaaaaaaattgtgtataaatttgaaaacaataccatgtagtattaatgcataagttgtaaaattataaagctacgcatggtaatttaaccacccttttaattgttggtggggatagggaaaattctgtttttagtctgtaacatatttcttttaarcaaaaaacaaacatggcaaaatatgacattcactaaacctaagtaataggttcataagtttgttataatggtgtctttacttttctgtatgtttgaaatagtttaagtaaaaacagaccaacttaaatttacaagctctttgttttgttttgttttggtttgttttgacacagtctctctgtgttgcccagactggagtgcagtggcaatcttggctcactgcaacctctgcctgccaggttcagggtgttcctcatgcctcagcctcctgagtagctgggatta

SEQ ID NO: 675006 - DNA, 583 bp, Homo sapiens
ccctgcactttgggaggctgaggtgggcagatcacctgaggtcagcagtttgagaccagcctggtcaacatggcaaaaccctgtctgtctctactaaaaatacaaaaattagccgggcatggtggtgggcacatgtaatgccagctgcttgggggaagctgaggtttgagaatcacttgaacccaggaggtggaggttgcagtgggccgagatcacgccactgcactccagcgtgagggatagagtgagactctgtctcaaaaaaaaaaaaaaaaaagaacatgctggggctacactccagcatttaagctaaagctagaaatacatggttgaaaggttgaaggcattcactgagctcaccaggagctttgacacaaagatagggtctttgcccccatctgaacaggagtgacaacagaagctttgggaattgatragtcactaaggaaaacagggcagggcacaagttgcaactggtggcccatgggctaaattggccccaggtgtgctttatttgggctacacagggttgtgattttttgaattaactatccacttttaaatgttggactatttcaccaaa

SEQ ID NO: 675007 - DNA, 1449 bp, Homo sapiens
actgtgggaaacacttaaatgtgttggttattagggttttcgtgtgttttccttttagcattacatcctcatatgcagtgttgttatagtagaggaggacattttttctagagggcagagagatctagggaatatgactgttaacatttgaacactttcaaatagcagtacgttttactgtggttttgataacctgacatagaataagctgctgagatgcaaggataccttggtatatagaaagagccttagacttcgtatgaaaaaaacttaggttttatcttcagcctagccatctaatgtctctgtaactttacagacatctggtgtttcacttaacctctctgagacttagtttccttttctgtaaattgatagttgtggccaggcaccatggctcatacctgtaatcccagcattttgggaggctgaggcaggaggatcacttgagcctgggatcctccaggatacttgagaccagcctgggcaacatagggaattaaaaaactttttaaaaatcagctgggcgtggtagtgtgcctctgtggtcccagctattgaggaggctgtgggaggatcacatgagcatgggagggttgaggcttcagatagccgtggccacaccactgcactacagcctggacaacagagcaagaccctgtctcaaaaaaaaaaaatggggccgggtgtggcggttcacaccgtaatcccagcactttcggaggccgaggcaggaggatcacctgaggttaggagttcaagaccagcctggccaacatggtgaaaccccgtctctactaaaaacacaaaaaattagctgggcatggtggcgggtgcctgtaatcccaagtattcgggaggctgaggcaggagaattgcttgaacccaggaggcaggggttgcagtgagccgagatggcaccattgcactccagcctggacaacaagagcaagactctgtctcaaaaaaaaaaaaaaaaagacagttgtgattccttccctatatggtttgtttacaagtgtcaaaacagtcttcaaaactgccatactgaatatgttatgtgagatacgaatttttattgatcttttttatccaaagagcagtgaaagtagtaactgaatagaagtagttacaaaattaaagatctcaaatgataagtgaatatagtagaaaataaaaggttgcccccacactccaaacatactctccagggtgtatctcaaacactcagacccttttccgtacgtaaacaygtgtttacacataataggtattctgcaacttttaaatttcttatttatgtctgcatagtaccccttcatggaaatgccataatttaaccatttgaggagcgtccatgttatttctttctaaataatgttttacaatattgcattgtacaactctgtaaatacctgagtattggtgaataatctttctcttgccttt

SEQ ID NO: 675008 - DNA, 672 bp, Homo sapiens
ttcttctgggatgtactctcctaagagcatttctgggctcagggacagccttcaggcttaatttttcttctgagaatcccaagggttggatgtttggctcatctcttttggtgtcctgtcttgacacaaccttgccaaacaggacatagcccataatttttcttccttgcttcccatctctcagtaaatgcacaattccaagcatttttgttgttgttgttgttgctgatagtaactactgagaaactgacatgggyaaaaacaaaaacaaaaaacaaacataggtcagttgctaagttacgtgctgtcttaaaagcttttgagaaatagctggtactgatcttggttgaaatctaaatggagcttctttcgactctacttaacccctttctgaccctttcactggtccatctactggagtttttgatcccttgatttctcttttgatttcctgggccagtgcttctctatctcccacctttctgagacctcccagcctctctcttctgcaggacctggtgaggtgaagaggggcagatgcagcaggagggctgtgcagatgacagtctcagaaaaagggctctgatccggttcacctccacctgtgaggaagctaccaagtatttatcctgtcctccaaatcacacatcactcaggaaggcttctttggaa

SEQ ID NO: 675009 - DNA, 591 bp, Homo sapiens
  misc_feature 195: n = A,T,C or G
tgaacaaatggggaggtgaatgagtatccaagaggtggcctggattgtaatctagttttagattaaccagttctgtgacctttgacaagttattttgtgtctctttatttttctcttctgtgaaattcagggggcagcgcggaaaaatcagaaattctctaaattccttggttcaccagctattttattttattntattttattttagtttattttattttattttattttatcttagagaaagagtctcactacattgcccaggctggtctcaaactccaggcctcaagaagaccgtgcgccttggcctcccaaagtgctgacatttcagatatgggctacccgtgcctggygtgaatcaccaactttttaagctgagagggcatttggtagatctgtcagttaataggttgttcatcaacttcacccagagtctaaaggtgtattgcaaagtcatccagctttgataaattagactgattcttaatgcagaaaacgatacccctaggcacatagtagactctcagtaagttgtgggttgaatgaatgaagcagtgaatcgtatgggattatctcatttaaaactgcttt

SEQ ID NO: 675010 - DNA, 3429 bp, Homo sapiens
  misc_feature 2225, 2226, 2227, 2228, 2229, 2230, 2231, 2232, 2233, 2234,2235, 2236, 2237, 2238, 2239, 2240, 2241, 2242, 2243, 2244,2245, 2246, 2247, 2248, 2249, 2250, 2251, 2252, 2253, 2254,2255, 2256, 2257, 2258, 2259, 2260, 2261, 2262, 2263: n = A,T,C or G
  misc_feature 2264, 2265, 2266, 2267, 2268, 2269, 2270, 2271, 2272, 2273,2274, 2275, 2276, 2277, 2278, 2279, 2280, 2281, 2282, 2283,2284, 2285, 2286, 2287, 2288, 2289, 2290, 2291, 2292, 2293,2294, 2295, 2296, 2297, 2298, 2299, 2300, 2301, 2302: n = A,T,C or G
  misc_feature 2303, 2304, 2305, 2306, 2307, 2308, 2309, 2310, 2311, 2312,2313, 2314, 2315, 2316, 2317, 2318, 2319, 2320, 2321, 2322,2323, 2324: n = A,T,C or G
tttttagcttatattaggtttgtctgttctagaattttgtatacatttatttatattataggacactttttagcttagctttccccactcggggttagaaagattatattgatccatgatcatgatgtcgattcatagagttgattattcccatttattgataaatattactccataatatgcatataatttatcaatttcctctcaatagacatttgagctgttcccaggcttcagctattgttaatagaactcaaggacacatttttaaaagaaaaaatttcaacccaaaatgtcctttccttttggctctcyaatattgtgtcagggttatatatttgttgtcttgaaaatccaattacattgaacaggaggtgtctctagaatcaaggttcagtatatggtggtctggctgtgtcctggaatgtagcccttattagttttattgagcattttcctatataaattgaaatcaagttgaagactcatttttccacagtaggacaaatagaacagtttaggactttggagagatagcaacttgctgcttgcctgtgcaacccacctcaaaagatacaactcctccaacttttgatttctggtgacttctccaaacaattagatgtgaattgaccttattcccttacattactacatgtcgatattctgcacctggccaaatacagtataaaactgatgagcatacatttcttttagtttcatattttctatttaaagctactctctttggctgggcactatggctcatgactgtaatcccagcagtttggaaggccaagataggtggatcacttgaggccaggggtttgagacctgcctgactaacatgatgaaagctgtcttcctgaaaaatacaaaaattttctgggtgtggtggcacgtgcctgtaatcccagctactcaggaggctgaggcaggagaatcacttgaacccaggaggcagaagatgcagtgagccaagatcccacctctgcattccatcctgggtgacagaattaacctccatctcaaaaaaataaaaagctaatctatacttttcttttggtgcattattagaacatagaaggcaataaggcaaaactattgtgggtatattagtgcgtatctgtagcacctagcacagtgcctagcccataacttgtgttgaaaattaagagaaccttcttcatgacagatcatttggagaacatgttatgggtgtgggagaaaaagattcctaactctccaccccagaaataattttgctgatacaaaaatcagccagacatggtggcacaggcctataatctcagctacttaggaggatgagtttgaggataaggatacattgtgaaaaaggtgggaaaatcacttgaacacaggaggcagagattgcagtgagccaagagtgccccactgcactccagcctaggcaacagagaaagactctgtctgaaagaaaaaaaaaagttgttgctatatagcacataatttcattgtcatctcatttaaaattgaatagcacatttgggttgaattcttgtgcctgcagatacatttgcttctggcttaaaatcactggctgtaggaggaaactccagcagagggcatcgtaaggatttcatagtgtctatggtcatcttggtaattcctcagataattcctggcaattctattaggtcttgaacttcacttacttcttacatgtttaataaaaagaagttcaaaacattgccatggctgttgaattcccacaggcttgtcttccctttaaaattcatcacatggtttgtactcttttgcagatataatacgtaagtttgcaggtggatgctttcagccaataagttcaaaagtactgctacaagggccaggcatggtggctcacaccagtaatcccaaccctttgggaggccaaagcaggtggatcacggtatcaggaaactgagaccatcctagccaacatggtgaaaccccatctgtactaaaaatacaaaaattagctgagtgtggtagtgtgtgcctgtcgtcccagctactcaggaggccgaggcaggaggattgcttgaacccgggaggcagaggttgcagtgagctgagattgcgccattgcagcacagcctggttacagagtgagattccgtcccccaccgccaaaaaaaaaaaaaaaagtacgctacatggacatccattggttcccagcatctctcccataaatagcggannnnnnnnnnnnnnnnnnnnnnnnnnnnnnnnnnnnnnnnnnnnnnnnnnnnnnnnnnnnnnnnnnnnnnnnnnnnnnnnnnnnnnnnnnnnnnnnnnnnatttctcgtgaggccagaaattgtcgccatccttcacatcggtgaatcgggaccctaacactcattacctcaggtttattgttattgccattaacagtgttggtggcattatcactaagatcatcattgttgttattattgtcatttatgattattagcaggtgtgttcatcattttgtctcactatgcattttttttttgtggggggtggggggattggttttgtatgacgttgaattgagcgtctttaatcttgaccagtgttgtcagatttctgaagagcattccggagacatctcctgcctttcagcacagccacagaatttcgtgggcacaggagagcacctagaatattcccctttcattgcacagcagctttgggaaatagttactgctggctctgagatgaggtagaaaagactggatactggggcaagtgttagcacctccactggtgtttttatgaagctaagagcactgtctcccacgtagacttagaataaaatctgatggctctaaagggccatggctgcccttcctgggacttcctgggaacctttaaaccttctgtggttcctggagtaggtaggttgccaagtctgtgcctcatatggtagcaccagtcttttctgggccaacaagggcacttagaatgtttccagaagctcaggcgtgctgtctctgttcctcccttctgttcaatggcaattccctgggtccctggctgatatagaacatcctgccgaaggttgggcttgggtgacttcctggccagccttcccaggcagtcatctttgaaaaccttgaagagactcacagaggctattcactggtatttcatgactgcaagtggggtttctggatccttgagtttacttagaatatttgaatggctctgaatggccaagaaaccctccctgatcttagaagctgccaaaagctattactgggccctgaagagactttaaaatttttccaagtacatttgggcataggaaacttttccgggtctagctgagccagctcaggttgagtcctgaaaaactggtgggtactgggggatctcaacttacgaaagagcaattggtggcaaacctgggtctcc

SEQ ID NO: 675011 - DNA, 3429 bp, Homo sapiens
  misc_feature 2225, 2226, 2227, 2228, 2229, 2230, 2231, 2232, 2233, 2234,2235, 2236, 2237, 2238, 2239, 2240, 2241, 2242, 2243, 2244,2245, 2246, 2247, 2248, 2249, 2250, 2251, 2252, 2253, 2254,2255, 2256, 2257, 2258, 2259, 2260, 2261, 2262, 2263: n = A,T,C or G
  misc_feature 2264, 2265, 2266, 2267, 2268, 2269, 2270, 2271, 2272, 2273,2274, 2275, 2276, 2277, 2278, 2279, 2280, 2281, 2282, 2283,2284, 2285, 2286, 2287, 2288, 2289, 2290, 2291, 2292, 2293,2294, 2295, 2296, 2297, 2298, 2299, 2300, 2301, 2302: n = A,T,C or G
  misc_feature 2303, 2304, 2305, 2306, 2307, 2308, 2309, 2310, 2311, 2312,2313, 2314, 2315, 2316, 2317, 2318, 2319, 2320, 2321, 2322,2323, 2324: n = A,T,C or G
tttttagcttatattaggtttgtctgttctagaattttgtatacatttatttatattataggacactttttagcttagctttccccactcggggttagaaagattatattgatccatgatcatgatgtcgattcatagagttgattattcccatttattgataaatattactccataatatgcatataatttatcaatttcctctcaatagacatttgagctgttcccaggcttcagctattgttaatagaactcaaggacacatttttaaaagaaaaaatttcaacccaaaatgtcctttccttttggctctccaatattgtgtcagggttatatatttgttgtcttgaaaatccaattacattgaacaggaggtgtctctagaatcaaggttcagtatatggtggtctggctgtgtcctggaatgtagcccttattagttttattgagcattttcctatataaattgaaatcaagttgaagactcatttttccacagtaggacaaatagaacagyttaggactttggagagatagcaacttgctgcttgcctgtgcaacccacctcaaaagatacaactcctccaacttttgatttctggtgacttctccaaacaattagatgtgaattgaccttattcccttacattactacatgtcgatattctgcacctggccaaatacagtataaaactgatgagcatacatttcttttagtttcatattttctatttaaagctactctctttggctgggcactatggctcatgactgtaatcccagcagtttggaaggccaagataggtggatcacttgaggccaggggtttgagacctgcctgactaacatgatgaaagctgtcttcctgaaaaatacaaaaattttctgggtgtggtggcacgtgcctgtaatcccagctactcaggaggctgaggcaggagaatcacttgaacccaggaggcagaagatgcagtgagccaagatcccacctctgcattccatcctgggtgacagaattaacctccatctcaaaaaaataaaaagctaatctatacttttcttttggtgcattattagaacatagaaggcaataaggcaaaactattgtgggtatattagtgcgtatctgtagcacctagcacagtgcctagcccataacttgtgttgaaaattaagagaaccttcttcatgacagatcatttggagaacatgttatgggtgtgggagaaaaagattcctaactctccaccccagaaataattttgctgatacaaaaatcagccagacatggtggcacaggcctataatctcagctacttaggaggatgagtttgaggataaggatacattgtgaaaaaggtgggaaaatcacttgaacacaggaggcagagattgcagtgagccaagagtgccccactgcactccagcctaggcaacagagaaagactctgtctgaaagaaaaaaaaaagttgttgctatatagcacataatttcattgtcatctcatttaaaattgaatagcacatttgggttgaattcttgtgcctgcagatacatttgcttctggcttaaaatcactggctgtaggaggaaactccagcagagggcatcgtaaggatttcatagtgtctatggtcatcttggtaattcctcagataattcctggcaattctattaggtcttgaacttcacttacttcttacatgtttaataaaaagaagttcaaaacattgccatggctgttgaattcccacaggcttgtcttccctttaaaattcatcacatggtttgtactcttttgcagatataatacgtaagtttgcaggtggatgctttcagccaataagttcaaaagtactgctacaagggccaggcatggtggctcacaccagtaatcccaaccctttgggaggccaaagcaggtggatcacggtatcaggaaactgagaccatcctagccaacatggtgaaaccccatctgtactaaaaatacaaaaattagctgagtgtggtagtgtgtgcctgtcgtcccagctactcaggaggccgaggcaggaggattgcttgaacccgggaggcagaggttgcagtgagctgagattgcgccattgcagcacagcctggttacagagtgagattccgtcccccaccgccaaaaaaaaaaaaaaaagtacgctacatggacatccattggttcccagcatctctcccataaatagcggannnnnnnnnnnnnnnnnnnnnnnnnnnnnnnnnnnnnnnnnnnnnnnnnnnnnnnnnnnnnnnnnnnnnnnnnnnnnnnnnnnnnnnnnnnnnnnnnnnnatttctcgtgaggccagaaattgtcgccatccttcacatcggtgaatcgggaccctaacactcattacctcaggtttattgttattgccattaacagtgttggtggcattatcactaagatcatcattgttgttattattgtcatttatgattattagcaggtgtgttcatcattttgtctcactatgcattttttttttgtggggggtggggggattggttttgtatgacgttgaattgagcgtctttaatcttgaccagtgttgtcagatttctgaagagcattccggagacatctcctgcctttcagcacagccacagaatttcgtgggcacaggagagcacctagaatattcccctttcattgcacagcagctttgggaaatagttactgctggctctgagatgaggtagaaaagactggatactggggcaagtgttagcacctccactggtgtttttatgaagctaagagcactgtctcccacgtagacttagaataaaatctgatggctctaaagggccatggctgcccttcctgggacttcctgggaacctttaaaccttctgtggttcctggagtaggtaggttgccaagtctgtgcctcatatggtagcaccagtcttttctgggccaacaagggcacttagaatgtttccagaagctcaggcgtgctgtctctgttcctcccttctgttcaatggcaattccctgggtccctggctgatatagaacatcctgccgaaggttgggcttgggtgacttcctggccagccttcccaggcagtcatctttgaaaaccttgaagagactcacagaggctattcactggtatttcatgactgcaagtggggtttctggatccttgagtttacttagaatatttgaatggctctgaatggccaagaaaccctccctgatcttagaagctgccaaaagctattactgggccctgaagagactttaaaatttttccaagtacatttgggcataggaaacttttccgggtctagctgagccagctcaggttgagtcctgaaaaactggtgggtactgggggatctcaacttacgaaagagcaattggtggcaaacctgggtctcc

SEQ ID NO: 675012 - DNA, 634 bp, Homo sapiens
gtgcagggaaaatcattccaggctgaagcagcaagtgcaaaggccgtgttgtggaaaaaggtttgaaagtccaagaaaacaaaaggaggccatagtggctgaaatagagtaggccaagggcaggagatagkagagggctggagaggtggcaggaacaggcagaagactcggggtctcgattttattctatgtaccatgggcaggaaaggcagggatgagactcaatggaagccttaagatcactgaagctgccaggtaggaaatggattgctgagcatggagagcaggtgcagagtaccagttaagaccagttaggaggctgctgtagcccagctgagatagtggtgtcctaggcaaagataatgacagtgaagctacagagagtggacaagttggataaagtttagaatcacaggacttgctgactgcagaagagggcaaaagcagagttagcacaacacatgagttatgaccaccttgagcagctcagcagggggtggtgccatttacagaacagagatggcatggacagagcccatggagaaggaggaggaaaaagagagtttggctttgtttttttttttttttaagacagggtctctggctgtgtcacccaggctggagtgcattggtg

SEQ ID NO: 675013 - DNA, 1139 bp, Homo sapiens
aggtctgctactgcctactaaggaatggcctctcgacatcctcatgtcaaaccctgcatgttcgggcccatctttaaaatccatcctaggccaggtgcggtggctcatgcctgtaatcccagcactttgggaggccgaggcagacggatcacctgaggtcaggagttcgagatgagcctggccaacatggtgaaactctgtctctactaaaaatacaaaaactaaccagacatggtggcatgtgcctgtagtcccagcttcttagcaggctaggcacgagaactgcttgaacccaggaggcagaggtttcagtgagccgagattgtgccacagtaatccagcctgggcaacayagtgagactctgtctcaaaaaaaatatataaataaataaataaataaataaataaataaataaataagtaaaaaataaaatccatcctatatcagtcaggaaagagctcattccagcaggatcaatgcagagaattcaccagaggaactagttccaaaggtatggcaagagctaaaacttccaacaggggtccgtggggcaacccagagacggacaagagcaggaaactccaaaccctttggtgggcaggacagagggtgtgggtgatggttccagtgctgtgggctggtccagcctggtaggaatgagaatccatatgctaggagctgaggccccagagaagcagctgctgtggaaaccccagagggcagactcagggagagatgctggcctccccttattcccaccctgcactgtctcccatgggtcacactcagctgcagccagttgcctggggagggccctgccatgctggggtttgcaaagcaggcccagggcctgggaaggacggagtgtgcagcacgccggtggctatgctgtccagctactgggcggacactgcctataactgacctttttgatgagttctgagagaaagcaccaggcatacttgactgacggcgggtgcttcacacacacaggatgcctcacagtctacggcaaaggacagaacgttggttgcttgagagcccgtcttaagtctcctatgagcttcaagccaacacagcagagggcaaactccaggctacccgatccctcagcaaagatgcagatggacacagcgtt

SEQ ID NO: 675014 - DNA, 1139 bp, Homo sapiens
aggtctgctactgcctactaaggaatggcctctcgacatcctcatgtcaaaccctgcatgttcgggcccatctttaaaatccatcctaggccaggtgcggtggctcatgcctgtaatcccagcactttgggaggccgaggcagacggatcacctgaggtcaggagttcgagatgagcctggccaacatggtgaaactctgtctctactaaaaatacaaaaactaaccagacatggtggcatgtgcctgtagtcccagcttcttagcaggctaggcacgagaactgcttgaacccaggaggcagaggtttcagtgagccgagattgtgccacagtaatccagcctgggcaacatagtgagactctgtctcaaaaaaaatatataaataaataaataaataaataaataaataaataaataagtaaaaaataaaatccatcctatatcagtcaggaaagagctcattccagcaggatcaatgcagagaattcaccagaggaactagttccaaaggtatggcaagagctaaaacttccaacaggggyccgtggggcaacccagagacggacaagagcaggaaactccaaaccctttggtgggcaggacagagggtgtgggtgatggttccagtgctgtgggctggtccagcctggtaggaatgagaatccatatgctaggagctgaggccccagagaagcagctgctgtggaaaccccagagggcagactcagggagagatgctggcctccccttattcccaccctgcactgtctcccatgggtcacactcagctgcagccagttgcctggggagggccctgccatgctggggtttgcaaagcaggcccagggcctgggaaggacggagtgtgcagcacgccggtggctatgctgtccagctactgggcggacactgcctataactgacctttttgatgagttctgagagaaagcaccaggcatacttgactgacggcgggtgcttcacacacacaggatgcctcacagtctacggcaaaggacagaacgttggttgcttgagagcccgtcttaagtctcctatgagcttcaagccaacacagcagagggcaaactccaggctacccgatccctcagcaaagatgcagatggacacagcgtt

SEQ ID NO: 675015 - DNA, 2441 bp, Homo sapiens
cagaagggctcatggccctttgaaggtgaagacccaggatgcagggtgatctgcacttggccctcaatgccaaggtcagcctgtgcttggccaggtggtgatcctggctctcacttgcatgcagatgcacttgagtccaaaccccaccctgggcaaagcaagggcccatttaggtctagaagagacaggagtgggcgggacaggcctcatgaatgcaaaaaagaaagtctctgagcatcyaccaaatgctagaagctgttttgcacctgtcatctctgtttttgctgtggatggtttaaaaacattccctagatttcccccctcttgcagaattttgtatattctgatgtcttttctaagtcttacatagaaaacgaaaccgtaggagctgtcggaggtgctgacacccttctgaagtgctgactcaatggttttgttctttgaagagggctgtttttaaagggtacaagcacacctgtgctgcttctctcaggtcttccggagagattcaggaggcaggatcatgagtcccagggactctgggattcttaccttctgcaaaatatcccgcagcagctcagaatctgatgagtctcttaactttgcctctaagctctgtgtggatgggagagagagaaatctcaagggcccattcacaggaacattaaacacgcaatagaatgtgttggcaaagctctatgtgatccctccctggggacgtggagccagttggaagtggaagccacagcggctgaaagcctgaccttcagatgtcgcagggtgcacctggatgagtcacaggaagaaggctgactcttggtcgcattagtcctggctactcagctgccacccaggtcatgggccagctccctggttacactggtcagccaggaattaccagggcagccatggcaccaaggtttgatgggcttgccatctgagtttaagtggaaatgcagaatgtgcccataccagcctgggttacattgtcctcttacaggggcctcaagcccagcagtgagctttggctcccgagttaggcagactgtctcggctggtatgtgacacatggcaaggcacttcattgcttcagagctccttctatgccataaaaggccctacaaggcctgctgctaatccccctctctggcctgttctccctcaccactggcccaccctgctcactccactccagccacactggctgccttgctgttgttcctcaaccacagctggcttatttccacaacagggcctttgcatatcttgttccccaaacccttcccatggctggctgcttcaccactcaggccccagttcaaatgccacctctttggggaaggcttccctgattccctgactttggtgacacttctccccagttgctccattcaccatttccctgttttattggctttaaagccactctcatctggtcttttcttgtttattcatttattctctggctctcccatgcaagcagagcctcatctatcatgggtactgccgatccatggtgcctggctcacggaaggcatttattaaacattttgagactgaagaaaacactagctaacaccgacacgcatttaccatgagccaggcactgatccgcaggcatttgtactcaatgctgagaacaaccctaagaggtaggtatcattatatcccccattttattaataagaaaacaatagcacagagagatacagtcacttgcccaaggtcacacagggccaggggttgggccaggattcgaagcaggcaggctgtctcctgggtctgaactctcaactacttcaccctaatcaaacaatccctctggtcaaatgtgagtgataataatagtacccacctggtgggtgttgagggtgagcccaagttagcattcagtgtgggcatgtgaacaattatagtcaatattgaatggagacctatgatgcttttatgaaggtttctattttgggttaaaaatgcacacatttctcctgaccagaaatgatctctgagtgctaaatattttatgtcaatggaataatgcaaatgattaagcaacaccccataaaatggggcagacccagggaggaatatatatcccaactgactcatccagtgagctcaatgcacatgaattacaaatggaacggggtgcattaagcccctctgctggcagaagggaggctgctgcctgccatgtgcctgtgctgagaatggcaggtccccagggagaggagaggccacccccttctctgtctcttccatcacaggcgtgaaagcctcagcgcatgagccgattctgtgcagtgctcgacatacagatgagaacactgaggcacgagggacagcctgtgacctggtcaccacgctcaggaggaggtggttacccgcgggcctgagggcgctgactttttagaatgggcgagtgcagctgtgtcccagtg

SEQ ID NO: 675016 - DNA, 2441 bp, Homo sapiens
cagaagggctcatggccctttgaaggtgaagacccaggatgcagggtgatctgcacttggccctcaatgccaaggtcagcctgtgcttggccaggtggtgatcctggctctcacttgcatgcagatgcacttgagtccaaaccccaccctgggcaaagcaagggcccatttaggtctagaagagacaggagtgggcgggacaggcctcatgaatgcaaaaaagaaagtctctgagcatctaccaaatgctagaagctgttttgcacctgtcatctctgtttttgctgtggatggtttaaaaacattccctagatttcccccctcttgcagaattttgtatattctgatgtcttttctaagtcttacatagaaaacgaaaccgtaggagctgtcggaggtgctgacaccctyctgaagtgctgactcaatggttttgttctttgaagagggctgtttttaaagggtacaagcacacctgtgctgcttctctcaggtcttccggagagattcaggaggcaggatcatgagtcccagggactctgggattcttaccttctgcaaaatatcccgcagcagctcagaatctgatgagtctcttaactttgcctctaagctctgtgtggatgggagagagagaaatctcaagggcccattcacaggaacattaaacacgcaatagaatgtgttggcaaagctctatgtgatccctccctggggacgtggagccagttggaagtggaagccacagcggctgaaagcctgaccttcagatgtcgcagggtgcacctggatgagtcacaggaagaaggctgactcttggtcgcattagtcctggctactcagctgccacccaggtcatgggccagctccctggttacactggtcagccaggaattaccagggcagccatggcaccaaggtttgatgggcttgccatctgagtttaagtggaaatgcagaatgtgcccataccagcctgggttacattgtcctcttacaggggcctcaagcccagcagtgagctttggctcccgagttaggcagactgtctcggctggtatgtgacacatggcaaggcacttcattgcttcagagctccttctatgccataaaaggccctacaaggcctgctgctaatccccctctctggcctgttctccctcaccactggcccaccctgctcactccactccagccacactggctgccttgctgttgttcctcaaccacagctggcttatttccacaacagggcctttgcatatcttgttccccaaacccttcccatggctggctgcttcaccactcaggccccagttcaaatgccacctctttggggaaggcttccctgattccctgactttggtgacacttctccccagttgctccattcaccatttccctgttttattggctttaaagccactctcatctggtcttttcttgtttattcatttattctctggctctcccatgcaagcagagcctcatctatcatgggtactgccgatccatggtgcctggctcacggaaggcatttattaaacattttgagactgaagaaaacactagctaacaccgacacgcatttaccatgagccaggcactgatccgcaggcatttgtactcaatgctgagaacaaccctaagaggtaggtatcattatatcccccattttattaataagaaaacaatagcacagagagatacagtcacttgcccaaggtcacacagggccaggggttgggccaggattcgaagcaggcaggctgtctcctgggtctgaactctcaactacttcaccctaatcaaacaatccctctggtcaaatgtgagtgataataatagtacccacctggtgggtgttgagggtgagcccaagttagcattcagtgtgggcatgtgaacaattatagtcaatattgaatggagacctatgatgcttttatgaaggtttctattttgggttaaaaatgcacacatttctcctgaccagaaatgatctctgagtgctaaatattttatgtcaatggaataatgcaaatgattaagcaacaccccataaaatggggcagacccagggaggaatatatatcccaactgactcatccagtgagctcaatgcacatgaattacaaatggaacggggtgcattaagcccctctgctggcagaagggaggctgctgcctgccatgtgcctgtgctgagaatggcaggtccccagggagaggagaggccacccccttctctgtctcttccatcacaggcgtgaaagcctcagcgcatgagccgattctgtgcagtgctcgacatacagatgagaacactgaggcacgagggacagcctgtgacctggtcaccacgctcaggaggaggtggttacccgcgggcctgagggcgctgactttttagaatgggcgagtgcagctgtgtcccagtg

SEQ ID NO: 675017 - DNA, 2441 bp, Homo sapiens
cagaagggctcatggccctttgaaggtgaagacccaggatgcagggtgatctgcacttggccctcaatgccaaggtcagcctgtgcttggccaggtggtgatcctggctctcacttgcatgcagatgcacttgagtccaaaccccaccctgggcaaagcaagggcccatttaggtctagaagagacaggagtgggcgggacaggcctcatgaatgcaaaaaagaaagtctctgagcatctaccaaatgctagaagctgttttgcacctgtcatctctgtttttgctgtggatggtttaaaaacattccctagatttcccccctcttgcagaattttgtatattctgatgtcttttctaagtcttacatagaaaacgaaaccgtaggagctgtcggaggtgctgacacccttctgaagtgctgactcaatggttttgttctttgaagagggctgtttttaaagggtacaagcacacctgtgctgcttctctcaggtcttccggagagattcaggaggcaggatcatgagtcccagggactctgggattcttaccttctgcaaaatatcccgcagcagctcagaatmtgatgagtctcttaactttgcctctaagctctgtgtggatgggagagagagaaatctcaagggcccattcacaggaacattaaacacgcaatagaatgtgttggcaaagctctatgtgatccctccctggggacgtggagccagttggaagtggaagccacagcggctgaaagcctgaccttcagatgtcgcagggtgcacctggatgagtcacaggaagaaggctgactcttggtcgcattagtcctggctactcagctgccacccaggtcatgggccagctccctggttacactggtcagccaggaattaccagggcagccatggcaccaaggtttgatgggcttgccatctgagtttaagtggaaatgcagaatgtgcccataccagcctgggttacattgtcctcttacaggggcctcaagcccagcagtgagctttggctcccgagttaggcagactgtctcggctggtatgtgacacatggcaaggcacttcattgcttcagagctccttctatgccataaaaggccctacaaggcctgctgctaatccccctctctggcctgttctccctcaccactggcccaccctgctcactccactccagccacactggctgccttgctgttgttcctcaaccacagctggcttatttccacaacagggcctttgcatatcttgttccccaaacccttcccatggctggctgcttcaccactcaggccccagttcaaatgccacctctttggggaaggcttccctgattccctgactttggtgacacttctccccagttgctccattcaccatttccctgttttattggctttaaagccactctcatctggtcttttcttgtttattcatttattctctggctctcccatgcaagcagagcctcatctatcatgggtactgccgatccatggtgcctggctcacggaaggcatttattaaacattttgagactgaagaaaacactagctaacaccgacacgcatttaccatgagccaggcactgatccgcaggcatttgtactcaatgctgagaacaaccctaagaggtaggtatcattatatcccccattttattaataagaaaacaatagcacagagagatacagtcacttgcccaaggtcacacagggccaggggttgggccaggattcgaagcaggcaggctgtctcctgggtctgaactctcaactacttcaccctaatcaaacaatccctctggtcaaatgtgagtgataataatagtacccacctggtgggtgttgagggtgagcccaagttagcattcagtgtgggcatgtgaacaattatagtcaatattgaatggagacctatgatgcttttatgaaggtttctattttgggttaaaaatgcacacatttctcctgaccagaaatgatctctgagtgctaaatattttatgtcaatggaataatgcaaatgattaagcaacaccccataaaatggggcagacccagggaggaatatatatcccaactgactcatccagtgagctcaatgcacatgaattacaaatggaacggggtgcattaagcccctctgctggcagaagggaggctgctgcctgccatgtgcctgtgctgagaatggcaggtccccagggagaggagaggccacccccttctctgtctcttccatcacaggcgtgaaagcctcagcgcatgagccgattctgtgcagtgctcgacatacagatgagaacactgaggcacgagggacagcctgtgacctggtcaccacgctcaggaggaggtggttacccgcgggcctgagggcgctgactttttagaatgggcgagtgcagctgtgtcccagtg

SEQ ID NO: 675018 - DNA, 647 bp, Homo sapiens
ccacgaagtgattccatttccctagggcctagctctgtgtacatttggatgtgtttgcattgtctgtataggaaagccccaggcatattccatatcactaactctgcaggatcttgatgtgtgttatattttaaaaggctgtgtggactcataaattttggaaacaccaggttaaaggagactcaatgggctttttagttcaggattttggggmctttactattttaatgagcactatgcgtcccctagagagggcagcatatggagcgctgcagaactctttcagcatggagcacgcttttctcggagcatctggactattattccgtgggaaaaactttggaaattctaacctacatcttttctctttgcatttatttcattacctcctggtgtctggtgtctattgtctaaagacaaacaacaaactgccttcttttaacatttaatttaattttcttttcattacagagggcaggattgttctgtttcgctgaagaaacaatcctaccattaatagagtctgaagtatcaaagaatattttgcaactatttgaatggaaatccccatttgtggttttagtgggcagtgtggcagcttggcattagaagagctgcattgcatttctttgattaatttctatcaa

SEQ ID NO: 675019 - DNA, 647 bp, Homo sapiens
ccacgaagtgattccatttccctagggcctagctctgtgtacatttggatgtgtttgcattgtctgtataggaaagccccaggcatattccatatcactaactctgcaggatcttgatgtgtgttatattttaaaaggctgtgtggactcataaattttggaaacaccaggttaaaggagactcaatgggctttttagttcaggattttggggactttactattttaatgagcactatgcgtcccctagagagggcagcatatggagcgctgcagaactctttcagcatggagcacgcttttctcggagcatctggactattattccgtgggaaaaactttggaaattctracctacatcttttctctttgcatttatttcattacctcctggtgtctggtgtctattgtctaaagacaaacaacaaactgccttcttttaacatttaatttaattttcttttcattacagagggcaggattgttctgtttcgctgaagaaacaatcctaccattaatagagtctgaagtatcaaagaatattttgcaactatttgaatggaaatccccatttgtggttttagtgggcagtgtggcagcttggcattagaagagctgcattgcatttctttgattaatttctatcaa

SEQ ID NO: 675020 - DNA, 512 bp, Homo sapiens
taatgtgctcatgatgaaagccaaaacactaatttaattgattggaagaaaacagaaattcaccaggagtcaaaatcccaaataagaggtccgtgttttcaaggcttattttaatagtattaactacttcaacaaattatttttctttgcttttttccattcacttaaaaatatttaatggttttattgaactatattttacatataaaattcgcccgttgaaaatatgcaacttgatgatttttagtaaaatttagaattgtgcaaatatgatagattccattttagataatttctgtcattctaaaaagatctttaatgtccatttttagtgaaatctgctcccacccccagtcccagcaaacactgatawaattttcatctacttatttttgcttttcctagaaatttcatataaaaagtgtggtttgcaaaataaaatcccctgcacttgtgaatgttatatcacattggaaaggggacttcgccaacgtaaattgcgtacaaatgcg

SEQ ID NO: 675021 - DNA, 2808 bp, Homo sapiens
ttgggtcagctctcagcatcaaaatttccttcacttaatgggcacaaattttcacattttgcttgagtgtgaatctgtttcttgtttaaattttttctggcctttcctgtgaagcacctctccagtgctttttttcttcccctctgcagacattggccctaggcccactcagagatttctctcctcacttttatccagaactgctggtctcagcatgaactcctctaccttgctgtctctgaaattcatacttcctccatctcttcccacccccagtccttccctccagtgcaatttagccttcttcccacctttctcctggggccagtaaaggctctactccattttgggcaaactcctaattcttatgaaaaaaaactctatgcaaaattattttgaaatgagatgctatgcatatcccattttaatttgttaaaatgttaaaattctcaaaagggaatgctgataaacaggctgatttacagggcagtttctcagcaaaatgcattatgtcagtaaaacagcaggaaaccaaagaagctattgtgcactaaattgactttaggtgctttatttcagacctaaaccttatactctgtcatgtagcaacacaaatatgtccagaaatatgttaatgagtttgttcaggaattgaatttctgagataaaagagaaaatacaacaacatacttcttttaaagttttattaataatttgtctaaaataaatttataccattttattaagtccccaagaacagttccaaaatgttagaaaagcagaggaaatggttataccagaaacatgggataagagtttttttccctgaaacataaatttagaggtatcttccttccagttagtaattagatgcaccaaaccttcctctccagctctaatccatttcaaaaatattatttaatatttgagatacaaacaaatatacatgacctacatgtaagttgtaaaacataataataataaaacactcatgaatccacctcccaacttttcctacttttacacctcatttcctgccatcctccatttgtttgagtcacaaatgatttgtgcagcttctttcaaatgcttctgctcacgctattttttttgggtgtcttctatttcttgttctttatccatttaaatttattccattcatcaaaggccacatcaaattctagcttttccattacaaccacatcccacaccacacttgctcagagcagttgtccctcttcttagcaaaggtaacacgtgtctgcaccatttactgtccactgtcctttctaaaggaataactcatcttaggtcatcatcaagtgctttctgttcatttgttcaacaactcatagagcacccaccaggtgtcggcggcaccagtctaggcagtggggcaagagctggaccatgttccrtatagccatcatctcaaacactttccacagtgaaccttgtggaaagtctaaacgatttgcttaatgtcacctggtatgactaaatggagaagctgagactggcttcagggcctgagtactcctaatgctgctgtcccaccgtcagactcttccccagcgcagtgaccacactggctgaatagagtcatgcttagtgcacagagcagtctcttggtctggagattactccttagcctcctgttcttggtcagttattttattttatgttatgttattttattattatactttaagttctagggtacatgtgcacaacgtgcaggtttgttacatatgtatacatgtgccatgttggtgtgctgcacccattacctcatcatttacattaggtatatctcctaatgttttggtcagagttattttaagtccttcctttctctgttcaggcaacatttttctttccattttgctaatttcagtcttttgttgactgacactgttttaaaactctcacattttctttgatttctctggtctaaatggctgcactttatagactcagtgtattttgtgcatttagtgtattttaatgaaaaagagaatgaccttttaatccctattgccttttccaaattatttactgatttcagttactaactgaaatagggaggcttcgttcaaatatgaataaagaattgacatattattgattcaaccatttcattttttcttcttggctctttctacttctcagtggctcaatgtcctttctcttgtgtccaggtaatatcagccttaccagtcttggcagaatgtctgtcccaagaggaaaagtggtctccacagacatttgcttaaaattcacctactctaagctctgttcccaagaatactggcctttccatgctgaaatgctggtgggtactggagggtttatgcattttccctttgagagatacctgtgtatttaaaaatatttgttaaattaatagtctaatctgattataaggataatatatgttaacccagaaaagtttggaaaattctggaagcacaattttcttccttcttttttgtttattttatttttacacaattggagtcatattgtttacatagtgttgaacttcagtattttctacttgatgtttttagtgagagtgtcaaaaggatatgaaaggagaaatctggtaggaaaacagtaagtgtggccatgtaaaattaaaaacctttgaatggtaaaaatgagatcaatacataaaaagacagtaaacgtcagaaaacatcttaaatctatgatagaaaaaggaactgtaacccaaatatacaaagagttcccacaaaggaggtgaataacctaattaaaaatcagcaaagaacatgagcaatc

SEQ ID NO: 675022 - DNA, 2808 bp, Homo sapiens
ttgggtcagctctcagcatcaaaatttccttcacttaatgggcacaaattttcacattttgcttgagtgtgaatctgtttcttgtttaaattttttctggcctttcctgtgaagcacctctccagtgctttttttcttcccctctgcagacattggccctaggcccactcagagatttctctcctcacttttatccagaactgctggtctcagcatgaactcctctaccttgctgtctctgaaattcatacttcctccatctcttcccacccccagtccttccctccagtgcaatttagccttcttcccacctttctcctggggccagtaaaggctctactccattttgggcaaactcctaattcttatgaaaaaaaactctatgcaaaattattttgaaatgagatgctatgcatatcccattttaatttgttaaaatgttaaaattctcaaaagggaatgctgataaacaggctgatttacagggcagtttctcagcaaaatgcattatgtcagtaaaacagcaggaaaccaaagaagctattgtgcactaaattgactttaggtgctttatttcagacctaaaccttatactctgtcatgtagcaacacaaatatgtccagaaatatgttaatgagtttgttcaggaattgaatttctgagataaaagagaaaatacaacaacatacttcttttaaagttttattaataatttgtctaaaataaatttataccattttattaagtccccaagaacagttccaaaatgttagaaaagcagaggaaatggttataccagaaacatgggataagagtttttttccctgaaacataaatttagaggtatcttccttccagttagtaattagatgcaccaaaccttcctctccagctctaatccatttcaaaaatattatttaatatttgagatacaaacaaatatacatgacctacatgtaagttgtaaaacataataataataaaacactcatgaatccacctcccaacttttcctacttttacacctcatttcctgccatcctccatttgtttgagtcacaaatgatttgtgcagcttctttcaaatgcttctgctcacgctattttttttgggtgtcttctatttcttgttctttatccatttaaatttattccattcatcaaaggccacatcaaattctagcttttccattacaaccacatcccacaccacacttgctcagagcagttgtccctcttcttagcaaaggtaacacgtgtctgcaccatttactgtccactgtcctttctaaaggaataactcatcttaggtcatcatcaagtgctttctgttcatttgttcaacaactcatagagcacccaccaggtgtcggcggcaccagtctaggcagtggggcaagagctggaccatgttccatatagccatcatctcaaacactttccacagtgaaccttgtggaaagtctaaamgatttgcttaatgtcacctggtatgactaaatggagaagctgagactggcttcagggcctgagtactcctaatgctgctgtcccaccgtcagactcttccccagcgcagtgaccacactggctgaatagagtcatgcttagtgcacagagcagtctcttggtctggagattactccttagcctcctgttcttggtcagttattttattttatgttatgttattttattattatactttaagttctagggtacatgtgcacaacgtgcaggtttgttacatatgtatacatgtgccatgttggtgtgctgcacccattacctcatcatttacattaggtatatctcctaatgttttggtcagagttattttaagtccttcctttctctgttcaggcaacatttttctttccattttgctaatttcagtcttttgttgactgacactgttttaaaactctcacattttctttgatttctctggtctaaatggctgcactttatagactcagtgtattttgtgcatttagtgtattttaatgaaaaagagaatgaccttttaatccctattgccttttccaaattatttactgatttcagttactaactgaaatagggaggcttcgttcaaatatgaataaagaattgacatattattgattcaaccatttcattttttcttcttggctctttctacttctcagtggctcaatgtcctttctcttgtgtccaggtaatatcagccttaccagtcttggcagaatgtctgtcccaagaggaaaagtggtctccacagacatttgcttaaaattcacctactctaagctctgttcccaagaatactggcctttccatgctgaaatgctggtgggtactggagggtttatgcattttccctttgagagatacctgtgtatttaaaaatatttgttaaattaatagtctaatctgattataaggataatatatgttaacccagaaaagtttggaaaattctggaagcacaattttcttccttcttttttgtttattttatttttacacaattggagtcatattgtttacatagtgttgaacttcagtattttctacttgatgtttttagtgagagtgtcaaaaggatatgaaaggagaaatctggtaggaaaacagtaagtgtggccatgtaaaattaaaaacctttgaatggtaaaaatgagatcaatacataaaaagacagtaaacgtcagaaaacatcttaaatctatgatagaaaaaggaactgtaacccaaatatacaaagagttcccacaaaggaggtgaataacctaattaaaaatcagcaaagaacatgagcaatc

SEQ ID NO: 675023 - DNA, 2808 bp, Homo sapiens
ttgggtcagctctcagcatcaaaatttccttcacttaatgggcacaaattttcacattttgcttgagtgtgaatctgtttcttgtttaaattttttctggcctttcctgtgaagcacctctccagtgctttttttcttcccctctgcagacattggccctaggcccactcagagatttctctcctcacttttatccagaactgctggtctcagcatgaactcctctaccttgctgtctctgaaattcatacttcctccatctcttcccacccccagtccttccctccagtgcaatttagccttcttcccacctttctcctggggccagtaaaggctctactccattttgggcaaactcctaattcttatgaaaaaaaactctatgcaaaattattttgaaatgagatgctatgcatatcccattttaatttgttaaaatgttaaaattctcaaaagggaatgctgataaacaggctgatttacagggcagtttctcagcaaaatgcattatgtcagtaaaacagcaggaaaccaaagaagctattgtgcactaaattgactttaggtgctttatttcagacctaaaccttatactctgtcatgtagcaacacaaatatgtccagaaatatgttaatgagtttgttcaggaattgaatttctgagataaaagagaaaatacaacaacatacttcttttaaagttttattaataatttgtctaaaataaatttataccattttattaagtccccaagaacagttccaaaatgttagaaaagcagaggaaatggttataccagaaacatgggataagagtttttttccctgaaacataaatttagaggtatcttccttccagttagtaattagatgcaccaaaccttcctctccagctctaatccatttcaaaaatattatttaatatttgagatacaaacaaatatacatgacctacatgtaagttgtaaaacataataataataaaacactcatgaatccacctcccaacttttcctacttttacacctcatttcctgccatcctccatttgtttgagtcacaaatgatttgtgcagcttctttcaaatgcttctgctcacgctattttttttgggtgtcttctatttcttgttctttatccatttaaatttattccattcatcaaaggccacatcaaattctagcttttccattacaaccacatcccacaccacacttgctcagagcagttgtccctcttcttagcaaaggtaacacgtgtctgcaccatttactgtccactgtcctttctaaaggaataactcatcttaggtcatcatcaagtgctttctgttcatttgttcaacaactcatagagcacccaccaggtgtcggcggcaccagtctaggcagtggggcaagagctggaccatgttccatatagccatcatctcaaacactttccacagtgaaccttgtggaaagtctaaackatttgcttaatgtcacctggtatgactaaatggagaagctgagactggcttcagggcctgagtactcctaatgctgctgtcccaccgtcagactcttccccagcgcagtgaccacactggctgaatagagtcatgcttagtgcacagagcagtctcttggtctggagattactccttagcctcctgttcttggtcagttattttattttatgttatgttattttattattatactttaagttctagggtacatgtgcacaacgtgcaggtttgttacatatgtatacatgtgccatgttggtgtgctgcacccattacctcatcatttacattaggtatatctcctaatgttttggtcagagttattttaagtccttcctttctctgttcaggcaacatttttctttccattttgctaatttcagtcttttgttgactgacactgttttaaaactctcacattttctttgatttctctggtctaaatggctgcactttatagactcagtgtattttgtgcatttagtgtattttaatgaaaaagagaatgaccttttaatccctattgccttttccaaattatttactgatttcagttactaactgaaatagggaggcttcgttcaaatatgaataaagaattgacatattattgattcaaccatttcattttttcttcttggctctttctacttctcagtggctcaatgtcctttctcttgtgtccaggtaatatcagccttaccagtcttggcagaatgtctgtcccaagaggaaaagtggtctccacagacatttgcttaaaattcacctactctaagctctgttcccaagaatactggcctttccatgctgaaatgctggtgggtactggagggtttatgcattttccctttgagagatacctgtgtatttaaaaatatttgttaaattaatagtctaatctgattataaggataatatatgttaacccagaaaagtttggaaaattctggaagcacaattttcttccttcttttttgtttattttatttttacacaattggagtcatattgtttacatagtgttgaacttcagtattttctacttgatgtttttagtgagagtgtcaaaaggatatgaaaggagaaatctggtaggaaaacagtaagtgtggccatgtaaaattaaaaacctttgaatggtaaaaatgagatcaatacataaaaagacagtaaacgtcagaaaacatcttaaatctatgatagaaaaaggaactgtaacccaaatatacaaagagttcccacaaaggaggtgaataacctaattaaaaatcagcaaagaacatgagcaatc

SEQ ID NO: 675024 - DNA, 616 bp, Homo sapiens
tgggccccagcaggctggactttgtggaatgcatttcccaggttcgtttgccctctggcttctgattggatttgacaaatggagttaccagcaagcaactgaagggcagagggaagaaattatgtgtttattccctggctccatccccactggacaatagttagacatggtctctgtttttctacccaaggtcacattgccttttgggaaggtcctctccagcagctatagctcttgccaacttcacatcaccactaaccctttgcctgtcaggaaaggcaatgtcttcccactgattttgatcctatagtgccttgctactctttgttagtgcccttcaccctatctacatctttgcaaacacctcttcgttaaattctcctaaattataattgcttgcaccatctgttccctgcaggactctgaccaatccaccactgttaagataaactgagcacaaagccacttcaacaaagtatttgagtagcaaacaacaacttttttcatatgttcatggagcaagctccaagttagaatgaatatctgtctccacattgcatactaggcttcctaattaatctatcgcatcatttccaatttgtrttatgaaagcttg

SEQ ID NO: 675025 - DNA, 612 bp, Homo sapiens
taaaagatcgctctatttttcttttcttcacataaacatattattttctttcaataaaccaaacttgagatgaaagaatgttggctgggagacaaatctggttataggtggttaaatcaagttgactgcttgcagctgtccactgatcaaatcaaaaaagaaggacttattttactaccctggtatatggaactaaaacattaaacagaaagagtatggaaagggcagatttatttgcttctatatattcataagagtcacctcagatttttataaaatacttcatgttttgaggcagatttattttctttaggcattagttattttaaacattgttatgtttaaaatacctaatattttaaaattcctacaatatgaatttattgtaggaagatgataaaatcatgacagatgtgatctacactcatacatctagctttatccattcagctttgtcttataataacatgattsaggacgacggaaagtatgaataaatgtactattttctaaaacagtatgttgatgtaaattaaggaattactcgtggatatgaaagactttcaaaaagcagcttatatttatttaccctgatagtaatatgctaaaata

SEQ ID NO: 675026 - DNA, 611 bp, Homo sapiens
ctaaacaaagggaacatcaatagtggtggtaagtggtggtaaaatgcaccccctttccttttttttttytttgagatggagtctcactgtgtcactcagactggagtgcagtggtgcgaaatcagctcactgcaacctctgcctccacggttctagtgattctcctgcctcagccccccgagtacgtgggattacaggcatgtgccaccacggctggctaatttttgtatttttagtggagacgggtttccccatgttcgccaggctggtctcgaactcctgacctcgggatccacccatctcagcctcccaaagtgctgggattcaagcgtgagccaccctgcctggccgcgtaatgttttatttcttgaactggatgttcactttggatttttccgtaaacagtacattttcatttagttaacttctaagtatatttcacaataaaaaagtttttaaaatttcctggcattcctctcttgttcctctaaggcttccttgaaagtttccagttaccactctcacctggaaatcactacaaattagtttcgtaattgagatttcacaagatgctagatcaaaatgctttaccgatagcccaattttgaata

SEQ ID NO: 675027 - DNA, 615 bp, Homo sapiens
aggcagagatagcaattatctggcaaaggagagccagaaagccataatatgtttacacaaatcctaagtgttccattgaaactggacatattgctgccaggaattatactgtggtcctattagcaaggactaaaggaaggtaatgcataatgtctgcagcattcactaattgtttcatgatatttaaatctcctatattctgattcttagcaggtagttggctaaaagacacttttaaatgagaaaacataaattttttataatcatatataaaggaggagagctacgaaaactctagccaaatcaaagctgtagtaatccaatggcaacttgcctgtgattctcttattctcattcaggaaaagtggtgttatctcagtccattatcttcactgagaagaacaagtatgggattcacaatgactgaactgmaaaacttgtttttactgagaaaaaaatgaattgtttctagtattcttataaagggatgagaaacctgtaaattgctcagcattattgaaccaagaacaagttatttttcaaatttttccaagtaacaatggttgtaaatggaatgctgtcctcagtgattttaagacacatttcttaaaaaaa

SEQ ID NO: 675028 - DNA, 615 bp, Homo sapiens
aggcagagatagcaattatctggcaaaggagagccagaaagccataatatgtttacacaaatcctaagtgttccattgaaactggacatattgctgccaggaattatactgtggtcctattagcaaggactaaaggaaggtaatgcataatgtctgcagcattcactaattgtttcatgatatttaaatctcctatattctgattcttagcaggtagttggctaaaagacacttttaaatgagaaaacataaattttttataatcatatataaaggaggagagctacgaaaactctagccaaatcaaagctgtagtaatccaatggcaacttgcctgtgattctcttattctcattcaggaaaagtggtgttatctcagtccattatcttcactgagaagaacaagtatgggattcacaatgactgaactgaaaaacttgtttttactgagaaaaaaatgaattgtttctagtattcttataaagggatgagaaacctgtaaattgctcagcattattgaaccaagaacaagttatttttcaaatttttccaagtaacaakggttgtaaatggaatgctgtcctcagtgattttaagacacatttcttaaaaaaa

SEQ ID NO: 675029 - DNA, 964 bp, Homo sapiens
ttaaaacagtcacaatccaatgaaaaggtgagatgacggcactcttcacattttttcacaaagctttcaagagtaaagattaaaatacgtataaaccacacccataagatgatattttaaatacagttaattctcattattcatggtagttatgtactataaattcacctggaactctcatttagcaaatactcaaccactgctcctaaggaaatactaggtaggttcctgcaagcctttggtcacaacatcttaatcactggggggagtggaggggctactttttattaggttaaagcgattcccatctattcttgatgcgttagtttttcttctttttaaaaatgatgaatattattggagttctttttatctattgagatcatggcataagtttcttaaggtggagaattacactaaaagattttctaatattaagccatccttgcatttctgggaaaaatccattttgtttatgtgacattttgtacacatcattgaatttcctgattttttgcgtagcatttttgcttccatgttaacaagcaagattctgctatgatttttgtattcatactttatcagattggacatcaaaattatgctaaattcattaaatgagtctctgtttacataaaatggtgtctawgactggaattacttgttttacaaatgtttgatagagcttactggctaaacccttggagcctgtgaccacacttgttggacaactcaagtttttacccactctgaacatgtccacaaatgactgtgaaagcatcacaactgttgatttgggagttacaaataaatttgtatcaagtaagtatattcacaaatatggaatctgcaaatagtaaagattgactctatctaacaagtggtagggtaagagcattaacaaaccagaagagttgcaaatcacattatttaagatcctagggactcctgatgtgccaggcaa

SEQ ID NO: 675030 - DNA, 964 bp, Homo sapiens
ttaaaacagtcacaatccaatgaaaaggtgagatgacggcactcttcacattttttcacaaagctttcaagagtaaagattaaaatacgtataaaccacacccataagatgatattttaaatacagttaattctcattattcatggtagttatgtactataaattcacctggaactctcatttagcaaatactcaaccactgctcctaaggaaatactaggtaggttcctgcaagcctttggtcacaacatcttaatcactggggggagtggaggggctactttttattaggttaaagcgattcccatctattcttgatgcgttagtttttcttctttttaaaaatgatgaatattattggagttctttttatctattgagatcatggcataagtttcttaaggtggagaattacactaaaagattttctaatattaagccatccttgcatttctgggaaaaatccattttgtttatgtgacattttgtacacatcattgaatttcctgattttttgcgtagcatttttgcttccatgttaacaagcaagattctgctatgatttttgtattcatactttatcagattggacatcaaaattatgctaaattcattaaatgagtctctgtttacataaaatggtgtctaakactggaattacttgttttacaaatgtttgatagagcttactggctaaacccttggagcctgtgaccacacttgttggacaactcaagtttttacccactctgaacatgtccacaaatgactgtgaaagcatcacaactgttgatttgggagttacaaataaatttgtatcaagtaagtatattcacaaatatggaatctgcaaatagtaaagattgactctatctaacaagtggtagggtaagagcattaacaaaccagaagagttgcaaatcacattatttaagatcctagggactcctgatgtgccaggcaa

SEQ ID NO: 675031 - DNA, 638 bp, Homo sapiens
acgtaactagatctttttcttccaggccctcccaatcctagagattaactaaaagtttagcaccttttaaagatctgaatatgaaatatttgccatctattatctctaagggcagccacaataagacttcaaaggaaccttggcctccataatcttttatcttaacccaaatatttcctttctgtcagtctcagatctttagacaaactcagccaattgtcaaccagaaaatgtttaaatttacctatagcctggaatcccacacccctgactttgagttgtatcatytttctggatcaaaccaatgtatttctaacatgtatttgattgatgtctcatgcccgcctaaaatgtataaaaccaagctgcaccccaaccttctgagggctgagggctgtgtcacaggtcatgatcactcatatttggctcagaataaatctcttcaaatattttatagagtttgactctttttgttgacaaagcttttaaattaagcttttaaatcaaaacattttagaagaagaaagctaaagtaaaccaaaagaaacatgaaagatgaaagtaaaaaaccatgaattacagaaaaaaaacagagagacaggactaataaatacatctaagaactgaatcttagaaaa

SEQ ID NO: 675032 - DNA, 1201 bp, Homo sapiens
gtctatcactgatgggcatttgggttggttccaagtctttgctatttccaccagtactttctaccttcagcttactgatgaataaggaaggaatgaaacaaaaaggaactatgagttgccctctattttcctttctttctgtgtcatcatttttagcataagtggttggctaatatggggaagtgatacaaacttttaaaaaagaatataatagtgtttcttggtcatacatgtttgctagaatatcattgcattccttctgtgtttgaaacaagttctggtttgagccttaagtgtggcctcttgggctgtcagctgtccctctcccctctaaagcacatgtagaagtaactctcttttcttgtactcactttgagtctcattgagctctcacgcactgtggtccaatggaattatttggtcactttgagcctcattgagctctcatgcactgtgggtctagtggaactatttggtcactttgagcctcattgagctctcgtgcactgtgggtccactggaattatttggttacagggcattgcaaatgctaactgcaaattgtttggcaagaaacagtgaacatgcatgtcacatgtatctcctctgatcaaacacatgctcttttataaaatgcaagtttgaagataaaattactaagattttcaagacaataactgcagagcatataaccagggtccttctgagtgtggggccctttttgactgcacaggtggcatacctctgacaccagccctggtgctaactcagatcatttatcactgtatcataaatgtcagatgtcaccgttgagttgtttggaagttgcattaaagttgcattagtcaagattctccagttaaacaacaaataggacacacacacacacacacacacacacacacacacacacasagagagagagagagagagagagagacagacagacagacagacagacagagagcaggggttggggggcggtggtagatttttttccccaaggaatgggcttatgtgattatgggtgccggggcttgcaagtccaaaatctacagggcaggccaacaggctggagacccagggaagttttgatttttcagtcttgaagctgaaggcaatctagaggtagaattctttcttccttgggaaacctcagtctttttttgtaaagccttcaactggttggatgaacccctca

SEQ ID NO: 675033 - DNA, 1201 bp, Homo sapiens
gtctatcactgatgggcatttgggttggttccaagtctttgctatttccaccagtactttctaccttcagcttactgatgaataaggaaggaatgaaacaaaaaggaactatgagttgccctctattttcctttctttctgtgtcatcatttttagcataagtggttggctaatatggggaagtgatacaaacttttaaaaaagaatataatagtgtttcttggtcatacatgtttgctagaatatcattgcattccttctgtgtttgaaacaagttctggtttgagccttaagtgtggcctcttgggctgtcagctgtccctctcccctctaaagcacatgtagaagtaactctcttttcttgtactcactttgagtctcattgagctctcacgcactgtggtccaatggaattatttggtcactttgagcctcattgagctctcatgcactgtgggtctagtggaactatttggtcactttgagcctcattgagctctcgtgcactgtgggtccactggaattatttggttacagggcattgcaaatgctaactgcaaattgtttggcaagaaacagtgaacatgcatgtcacatgtatctcctctgatcaaacacatgctcttttataaaatgcaagtttgaagataaaattactaagattttcaagacaataactgcagagcatataaccagggtccttctgagtgtggggccctttttgactgcacaggtggcatacctctgacaccagccctggtgctaactcagatcatttatcactgtatcataaatgtcagatgtcaccgttgagttgtttggaagttgcattaaagttgcattagtcaagattctccagttaaacaacaaataggacacacacacacacacacacacacacacacacacacacagasagagagagagagagagagagagacagacagacagacagacagacagagagcaggggttggggggcggtggtagatttttttccccaaggaatgggcttatgtgattatgggtgccggggcttgcaagtccaaaatctacagggcaggccaacaggctggagacccagggaagttttgatttttcagtcttgaagctgaaggcaatctagaggtagaattctttcttccttgggaaacctcagtctttttttgtaaagccttcaactggttggatgaacccctca

SEQ ID NO: 675034 - DNA, 640 bp, Homo sapiens
ttgcttcaaaccataattttcatgtagtaaagaagtaggcaatccatacttgtccacatctagacagctttaatacagcattacattttggtttmtagaacaatgtcaaatacaaatgaactataaacattaatcattctcagctatttgggctgggaactcttggtcccaggttagtgttccaaggcctttccatgatacggtggcagctgctgaaaggccaggtacaatatatacgtccatataaaaatgactaccttttagaacagtattctcagtctatctgtggtgatgggccagtctttttaattgtttgctctgtttggttgtttaatgttcagcccactgcaggctagaatgtagtgccactgcacatgagcagtatgtagcttgccctctatgcacctcaccatgggcagaacacaatacctgaaatttcccataccctattcagtgagataaggtcattgatcatctactaggatttcatggctaggttaaatggctataaaatgtctaaacactctcaatttctctactcaccttatcagactagaaacagttttcttactggtactggtctaccgacgtcactttgggaagcgctgtatagaagatgggccttgacaatctgaatcac

SEQ ID NO: 675035 - DNA, 640 bp, Homo sapiens
ttgcttcaaaccataattttcatgtagtaaagaagtaggcaatccatacttgtccacatctagacagctttaatacagcattacattttggtttctagaacaatgtcaaatacaaatgaactataaacattaatcattctcagctatttgggctgggaactcttggtcccaggttagtgttccaaggcctttccatgatacggtggcagctgctgaaaggccaggtacaatatatacgtccatataaaaatgactaccttttagaacagtattctcagtctatctgtggtgatgggccagtctttttaattgtttgctctgtttggttgtttaatgttcagcccactgcaggctagaatgtagtgccactgcacatgagcagtatgtagcttgccctctatgcacctcaccatgggcagaacacaatacctgaaatttcccataccctrttcagtgagataaggtcattgatcatctactaggatttcatggctaggttaaatggctataaaatgtctaaacactctcaatttctctactcaccttatcagactagaaacagttttcttactggtactggtctaccgacgtcactttgggaagcgctgtatagaagatgggccttgacaatctgaatcac

SEQ ID NO: 675036 - DNA, 1070 bp, Homo sapiens
  misc_feature 518, 519, 520, 521, 522, 523, 524, 525, 526, 527, 528, 529,530, 531, 532, 533, 534, 535, 536, 537, 538, 539, 540, 541,542, 543, 544, 545, 546, 547, 548, 549, 550, 551, 552, 553,554, 555, 556, 557, 558, 559, 560, 561, 562, 563, 564: n = A,T,C or G
  misc_feature 565, 566, 567, 568, 569, 570, 571, 572, 573, 574, 575, 576,577, 578, 579, 580, 581, 582, 583, 584, 585, 586, 587, 588,589, 590, 591, 592, 593, 594, 595, 596, 597, 598, 599, 600,601, 602, 603, 604, 605, 606, 607, 608, 609, 610, 611: n = A,T,C or G
  misc_feature 612, 613, 614, 615, 616, 617: n = A,T,C or G
tctctctgccatcagatttcctggrtaacacagaatatctcaaatcctaaaattagatttaggagatcctagattagtactgccaccaggcacataaaagaaacaagagtaaatcttccctggaggaattcacatcatcttaggcctcaaattatttctataaataattttttcaaatacactatgcagcacctaatcaaagataacgaaaaacatgaggaaacaagataaaatgaacaagatctggtacaaataacagtcagcagaaacatccataacttcttcagttagtaaagttgtcagaaacagaacataaaacaattaccatgtctatgaagtgaagctaaaaggccaacttttaagcttccaaaatgaactggaaactgtaaagagtaaacattgctaattttaaaaagaactaatttgatattgaacattcccacgacaaagaaatgataaatgtttgagatgacgagaaatgctaattacccgtaatctgatctgatgaactgattggnnnnnnnnnnnnnnnnnnnnnnnnnnnnnnnnnnnnnnnnnnnnnnnnnnnnnnnnnnnnnnnnnnnnnnnnnnnnnnnnnnnnnnnnnnnnnnnnnnnntcgaatctagtcatcactccttatctgagttttccatttaagtctccttaagggctttctgtacaggctgcttgccttgtgctgaaagataaaggggagcttgtgtgtatatcagagaccatttcatgagagaggatgcaagagagagaggagagagatgacaggctctttttaacaatcagctcttatgggaactaatagagttaaaactcacttactcacccctgcctcctcaaggaggacattaatctattcatgagggatcccctcccatggcccaaacacctcccatcaggccccacctcctacattgggaatcagattataaaatgaggtttggagggtcaaatatccaaactttggccatgaatagggaacagaaactgtaggtgagggactaaagatgagaatgaaattgagtctgagtaagagccagaagttcaagccaagaca

SEQ ID NO: 675037 - DNA, 637 bp, Homo sapiens
aaatcttctctggaccatcaaccacacaacacaccctctcatcagcggggtctttgttctccaaagtttgcatgtgggtgctgttgccacatttgttcagtgctttcctgttttaaaaaggcaagtgagtacaagggtgtgtgtgtctatgtgtgtgggaggtaaggcaagggttacagtcagaaggctcagggcatcrgccaagtgtgcagagggaaactgagcagactgattcagccctatattaaaaaccatgccaattctaactaaaccatttcagctttgattttacaaagctgaaaataaactaaaaatgcctcaagtcctaggttttctctgtacttctattacaaagcattattgttggccagctaagaccctgcatcttaattaccagttttgcagggcaaaacatgcatgaaatgaatttatgggaattcaaatgtggactatttggccttgactgtgagtaaccccagctttaataaggcaaaacgcctggcttgaaacaaccaaataattagtctaaacagtgggagtgagaaaggagctctaatacatacattttgttaattgctgtcccctgttgccagcaaaggtgaattggaagaggtcaaccggagccccctggaggcaa

SEQ ID NO: 675038 - DNA, 614 bp, Homo sapiens
ttccaaaagctaaacaaagtttctcagatcctggtccgttgcttctcctttaattctttctcttcccttgggctcggcatacccggggcaggcagaaccttacctcctcttctggagctccatgtcaagcactagggaaagttttgtggawagtttgcctgggtttggagggggctctgggtgtgtaaaatctccaggttctctcccctcccttgggtgggcattgctttgctgctcctggctcatgcctagacaccctgcctcgtttgggtttgcatgcttcaggctgtgtctctcccactcagatcaagaccaaagatgccaatctcattggctctccaataagaccctttggaagtctgtatggttctgcatggacccgccttccccaccaggcctccacatgggcactcagctggcacttacacactacagcctatatgctgggggcttcccaggacccctctttcaggagaggctccagacacccactccttctggtcaggagtcctctggaggcccattaatatatccatgaactcagctcgctgtccatatattggaagaccagatgttgcctgcacttctctctgtacagggattaactccatgcc

SEQ ID NO: 675039 - DNA, 614 bp, Homo sapiens
ttccaaaagctaaacaaagtttctcagatcctggtccgttgcttctcctttaattctttctcttcccttgggctcggcatacccggggcaggcagaaccttacctcctcttctggagctccatgtcaagcactagggaaagttttgtggaaagtttgcctgggtttggagggggctctgggtgtgtaaaatctccaggttctctcccctcccttgggtgggcattgctttgctgctcctggmtcatgcctagacaccctgcctcgtttgggtttgcatgcttcaggctgtgtctctcccactcagatcaagaccaaagatgccaatctcattggctctccaataagaccctttggaagtctgtatggttctgcatggacccgccttccccaccaggcctccacatgggcactcagctggcacttacacactacagcctatatgctgggggcttcccaggacccctctttcaggagaggctccagacacccactccttctggtcaggagtcctctggaggcccattaatatatccatgaactcagctcgctgtccatatattggaagaccagatgttgcctgcacttctctctgtacagggattaactccatgcc

SEQ ID NO: 675040 - DNA, 614 bp, Homo sapiens
ttccaaaagctaaacaaagtttctcagatcctggtccgttgcttctcctttaattctttctcttcccttgggctcggcatacccggggcaggcagaaccttacctcctcttctggagctccatgtcaagcactagggaaagttttgtggaaagtttgcctgggtttggagggggctctgggtgtgtaaaatctccaggttctctcccctcccttgggtgggcattgctttgctgctcctggctcatgcctagacaccctgcctcgtttgggtttgcatgcttcaggctgtgtctctcccactcagatcaagaccaaagatgccaatctcattggctytccaataagaccctttggaagtctgtatggttctgcatggacccgccttccccaccaggcctccacatgggcactcagctggcacttacacactacagcctatatgctgggggcttcccaggacccctctttcaggagaggctccagacacccactccttctggtcaggagtcctctggaggcccattaatatatccatgaactcagctcgctgtccatatattggaagaccagatgttgcctgcacttctctctgtacagggattaactccatgcc

SEQ ID NO: 675041 - DNA, 1170 bp, Homo sapiens
ggattcattgaggaaatgttgacaaaaagacaaggggagttttggtgggggtaagacatattgagcttaagatttaggaatgtaaagaagagggagcttcttataatggctcactgttgtctttagggcatcatgaggtgaaaggcactgcatatatgacccacaacataaaaccagagccagggaggtactcacagtggtgcacacctttaatcccagctacttgggaggctcaggtggaaagacggcttgagctcagaggtttgagactagcctgagcaacatagtgagacactatctctcctcttctcttttcctctcctctcctcttctctctctttggggttcaccagccctccctcccatcttctacacccttgcagataacacaaagattgaacaactctgccacatcttcctggtgtccttgagagagttgggattgtcagcaaactctgattctgccaataacaccctgtccattgtctctgtaaggctgctaatgggttccagacaggacttgaatctgcaaaaataaattccttcatgttactccttacaaagacctgccccgtgttctgcggagtggaagaaaagtgctgagtcccatgttcactcccaacccttcttgttttattaccagcactcctcccctttagctggaaagctatttagcctgtgggtgagaggaaaaggttgggaaatgggttaaggaagtgtggatgtgctagcagttcaccttcaggtgtgtgtgtgtgtgtgtctgtgtgtgtgyatgttacgactaagaaatggcccaccacaatttgagaatgcgagttaagaatttggtatttttgtcctccatcctgacctgagaattgccccttctccaagcccaaagaaattaatcatagaagaaagcatatggtgaccaataatttgaattattattgtgcccaatctgaatggcctccctgaaagtcagctctggaaattcctacttagtatatccatgttctctccttttcctgatccacatgcttctctccaaattttatttcccaggtcatgggcttattctgcctcatgaatgtggattagctggttccaaacaggaaaaatgaatgggaaattccacctacagctactagcgtgtgcctgctcagttcccgagtcaaactggctaac

SEQ ID NO: 675042 - DNA, 1170 bp, Homo sapiens
ggattcattgaggaaatgttgacaaaaagacaaggggagttttggtgggggtaagacatattgagcttaagatttaggaatgtaaagaagagggagcttcttataatggctcactgttgtctttagggcatcatgaggtgaaaggcactgcatatatgacccacaacataaaaccagagccagggaggtactcacagtggtgcacacctttaatcccagctacttgggaggctcaggtggaaagacggcttgagctcagaggtttgagactagcctgagcaacatagtgagacactatctctcctcttctcttttcctctcctctcctcttctctctctttggggttcaccagccctccctcccatcttctacacccttgcagataacacaaagattgaacaactctgccacatcttcctggtgtccttgagagagttgggattgtcagcaaactctgattctgccaataacaccctgtccattgtctctgtaaggctgctaatgggttccagacaggacttgaatctgcaaaaataaattccttcatgttactccttacaaagacctgccccgtgttctgcggagtggaagaaaagtgctgagtcccatgttcactcccaacccttcttgttttattaccagcactcctcccctttagctggaaagctatttagcctgtgggtgagaggaaaaggttgggaaatgggttaaggaagtgtggatgtgctagcagttcaccttcaggtgtgtgtgtgtgtgtgtctgtgtgtgtgcatgttacgactaagaaatggcccaccacaatttgagaatgcgagttaagaatttggtatttttgtcctccatcctgacctgagaattgycccttctccaagcccaaagaaattaatcatagaagaaagcatatggtgaccaataatttgaattattattgtgcccaatctgaatggcctccctgaaagtcagctctggaaattcctacttagtatatccatgttctctccttttcctgatccacatgcttctctccaaattttatttcccaggtcatgggcttattctgcctcatgaatgtggattagctggttccaaacaggaaaaatgaatgggaaattccacctacagctactagcgtgtgcctgctcagttcccgagtcaaactggctaac

SEQ ID NO: 675043 - DNA, 1170 bp, Homo sapiens
ggattcattgaggaaatgttgacaaaaagacaaggggagttttggtgggggtaagacatattgagcttaagatttaggaatgtaaagaagagggagcttcttataatggctcactgttgtctttagggcatcatgaggtgaaaggcactgcatatatgacccacaacataaaaccagagccagggaggtactcacagtggtgcacacctttaatcccagctacttgggaggctcaggtggaaagacggcttgagctcagaggtttgagactagcctgagcaacatagtgagacactatctctcctcttctcttttcctctcctctcctcttctctctctttggggttcaccagccctccctcccatcttctacacccttgcagataacacaaagattgaacaactctgccacatcttcctggtgtccttgagagagttgggattgtcagcaaactctgattctgccaataacaccctgtccattgtctctgtaaggctgctaatgggttccagacaggacttgaatctgcaaaaataaattccttcatgttactccttacaaagacctgccccgtgttctgcggagtggaagaaaagtgctgagtcccatgttcactcccaacccttcttgttttattaccagcactcctcccctttagctggaaagctatttagcctgtgggtgagaggaaaaggttgggaaatgggttaaggaagtgtggatgtgctagcagttcaccttcaggtgtgtgtgtgtgtgtgtctgtgtgtgtgcatgttacgactaagaaatggcccaccacaatttgagaatgcgagttaagaatttggtatttttgtcctccatcctgacctgagaattgccccttctccaagcccaaagaaattaatcatagaagaaagcatatggtgaccaataatttgaattattattgtgcccaatctgaatggcctccctgaaagtcagctctggaaattcctacttagtatatccatgttctctccttttcctgatccacatgcttctctccaaattttatttcccaggtcatgggcttattctgcctcatgaatgtggattagstggttccaaacaggaaaaatgaatgggaaattccacctacagctactagcgtgtgcctgctcagttcccgagtcaaactggctaac

SEQ ID NO: 675044 - DNA, 669 bp, Homo sapiens
cggattatgcctgaggacagagttgttgcttcagcaactagatttggaaattaatcaatctgaggttctgtgaaatttaatttggaaactgctggctttaaatatgaattttgcttttttttcagggggcagcgagtgaatttttttttactcaaggayaataattagcccttgcctgtcaaagaaggaaaattctgcttcattaatagacccaagagaggaggctctctgaacttgctttaacatccagctggtagagtcaggattcagcagagaaacatctgggctgcaaagggattgagggctttcctcccagggactaaaacactgcttattgtaaagatttctattatattagggtcaaggagaattgaaaaataagaggaaggaatcatttttgggcagccagattttatttctcctgtgggcacatatgatgcttgggaattattatgttaagcataaacttaataaatgctttttccagtcctccctattataattatatatgcaagagaaaggttgcatgttcactcaaggataatgggtttcagattaaggtgccctatcatccaacaattcaaaagacgctcctggaccaaactcatttctataagaacatagcaatgggttaaggcaaatggcagtttcaatgtttttctcttccct

SEQ ID NO: 675045 - DNA, 669 bp, Homo sapiens
cggattatgcctgaggacagagttgttgcttcagcaactagatttggaaattaatcaatctgaggttctgtgaaatttaatttggaaactgctggctttaaatatgaattttgcttttttttcagggggcagcgagtgaatttttttttactcaaggataataattagcccttgcctgtcaaagaaggaaaattctgcttcattaatagacccaagagaggaggctctctgaacttgctttaacatccagctggtagagtcaggattcagcagagaaacatctgggctgcaaagggattgagggctttcctcccagggactaaaacactgcttattgtaaagatttctattatattagggtcaaggagaattgaaaaataagaggaaggaatcawttttgggcagccagattttatttctcctgtgggcacatatgatgcttgggaattattatgttaagcataaacttaataaatgctttttccagtcctccctattataattatatatgcaagagaaaggttgcatgttcactcaaggataatgggtttcagattaaggtgccctatcatccaacaattcaaaagacgctcctggaccaaactcatttctataagaacatagcaatgggttaaggcaaatggcagtttcaatgtttttctcttccct

SEQ ID NO: 675046 - DNA, 669 bp, Homo sapiens
cggattatgcctgaggacagagttgttgcttcagcaactagatttggaaattaatcaatctgaggttctgtgaaatttaatttggaaactgctggctttaaatatgaattttgcttttttttcagggggcagcgagtgaatttttttttactcaaggataataattagcccttgcctgtcaaagaaggaaaattctgcttcattaatagacccaagagaggaggctctctgaacttgctttaacatccagctggtagagtcaggattcagcagagaaacatctgggctgcaaagggattgagggctttcctcccagggactaaaacactgcttattgtaaagatttctattatattagggtcaaggagaattgaaaaataagaggaaggaatcatttttgggcagccagattttatttctcctgtgggcacatatgatgcttgggaattattatgttaagcataaacttaataaatgctttttccagtcctccctattataattawatatgcaagagaaaggttgcatgttcactcaaggataatgggtttcagattaaggtgccctatcatccaacaattcaaaagacgctcctggaccaaactcatttctataagaacatagcaatgggttaaggcaaatggcagtttcaatgtttttctcttccct

SEQ ID NO: 675047 - DNA, 633 bp, Homo sapiens
gttggccaggttggtctcaagctcctgacctcaaatggtccacctgcctcggcctcctaaagtactggaattataggcatgagccaccacatccagcctgctttaagtcttcaaatgtctcctacatatgcagtcagtgtggaatgcaaggacttayatgaatctacttcttcaatttgaaggtgacaataatcatggtgataagaatgacaatagctatcacttgttgagcatcttcttcaactagatactatgagatattttagattctatttccttttagttttcacagacaccctagaaaataattattattctctcctttaaaatcataagactccgatacattaattaacatgttcaaagtcacctatttatttagtggtgggtcagatctttgagtcagagcttgtcttacttcaaagctcatgttctttcccctatgatcataacttacagcttatccagatgaatctatgtggagctccccagaagcttctcagggtttctactccctatgctatcttccatttgttctaactgtctgaaaactgtctctccttgatcacttggaaaatcattactcatccttcaaacaactaaaccctcttttctctctgaagctctccctgc

SEQ ID NO: 675048 - DNA, 1933 bp, Homo sapiens
  misc_feature 1890: n = A,T,C or G
tacactcaaggtagaatttataatagtttatgaatacttactatgagcctggcacagtgctagctgctgtaattactaaaataaataaaattaatttcctccctcaacaatctttggttatagttgatgaagcagacatgtatgtagataattatgacacaatgtagagacaactaaagtatgatatattattaccatgacaatcagtgcttccagaataatattgaaaacaaaaactaacatgttacaattcaatttcaaacccttgagtattttttttctattgtttaatagataaaggtcaacttcttcatgagctcttctgtgatctggacctggaatacttttctaaacctatttcttaaaagaaccattttaataccccatacttcaaccatgccaagatactatgtttgcatcttctcttgctctgaatttaattacatatgaaactattagatatatcagcatattgtggctatatatgtgtgtgtacgtgcatgaatgtttgtttatgatttttaactcccaactagattttaaatgatctgatcagaaaaacaaaacttagatttactgtgtcctgttctaatggataacagtgctaactacacatcaaatcactctataaaatttttagtgtaaaaaacaaaagaaagcaagaaaggaaaaattagagatggaaggtgagagagaatgggaatgatatttggctccaaatactgggactttctataacactgtttgttgttcattccagttgccactaggcacatgtggctatttaaatttaattaaggaattaaataaaaatttagctcctcagccaaactagtcacattttaggtgcttaatgtccatatgtgactaatggctacagtactgaaaaatacagaatatttccatcattggagaaaattgtattggaaagcattgatctatagaatgtaatcaatgcccctcttaggtgctaatatatctcaaaacttttatatggcaaaaactgcaatgacttttgcaccaacctaatagtaaccttcaggtattttaaaagctaataacattccaggttagtgttttaagtaatgttctaaaggaaccaaagcttagtgtgtccagaacagaagctcaatgtgtgttgatttaaccctattcttgtggtaacttttcccggcctctctattcgctatggaatgtaacattttaataaagcagacattttatctagtcacatgcatacctcttctcacacatgtccgctttgatctgcaaaataagacttgatggccaaaggaggattgctggtcaaaatgtatcacttataaccatcagttctttaagaggtacttagttatataaaatttaatacatcaaaaacatatagctaatgttagggtgacagatttcagacatacataccaagtttcctatttcttctattacaaagatcaaaatagacacttaatgcatcagaatcatctgtttgcaaacaagtaagagatagaaaattaaaagtatatttaaagtgccaagataattgtgattgcccttaaacrggtaaaatattaagccttataagaatcttgaaagaagtgtacctttacgcaggtattcattaaactagcatttttatttcataatgtattcaagctaatactatgtctgacagtggacatactttagagacatcaaaacagttaaaggacttagcagttttgataagaatgggctgaaatcttctatcatagcaagtgtcaaaacattcccaaagggttctcatcttacttgagaaaataagatttgaacatatgttaatgaagtgttcacgttcaagccattaggtgtttgaagtactcttcctttgcagggaattgttgtagatcaagttanagcaatatttaccctgttatttagatgagtgttctttcaagga

SEQ ID NO: 675049 - DNA, 1933 bp, Homo sapiens
  misc_feature 1890: n = A,T,C or G
tacactcaaggtagaatttataatagtttatgaatacttactatgagcctggcacagtgctagctgctgtaattactaaaataaataaaattaatttcctccctcaacaatctttggttatagttgatgaagcagacatgtatgtagataattatgacacaatgtagagacaactaaagtatgatatattattaccatgacaatcagtgcttccagaataatattgaaaacaaaaactaacatgttacaattcaatttcaaacccttgagtattttttttctattgtttaatagataaaggtcaacttcttcatgagctcttctgtgatctggacctggaatacttttctaaacctatttcttaaaagaaccattttaataccccatacttcaaccatgccaagatactatgtttgcatcttctcttgctctgaatttaattacatatgaaactattagatatatcagcatattgtggctatatatgtgtgtgtacgtgcatgaatgtttgtttatgatttttaactcccaactagattttaaatgatctgatcagaaaaacaaaacttagatttactgtgtcctgttctaatggataacagtgctaactacacatcaaatcactctataaaatttttagtgtaaaaaacaaaagaaagcaagaaaggaaaaattagagatggaaggtgagagagaatgggaatgatatttggctccaaatactgggactttctataacactgtttgttgttcattccagttgccactaggcacatgtggctatttaaatttaattaaggaattaaataaaaatttagctcctcagccaaactagtcacattttaggtgcttaatgtccatatgtgactaatggctacagtactgaaaaatacagaatatttccatcattggagaaaattgtattggaaagcattgatctatagaatgtaatcaatgcccctcttaggtgctaatatatctcaaaacttttatatggcaaaaactgcaatgacttttgcaccaacctaatagtaaccttcaggtattttaaaagctaataacattccaggttagtgttttaagtaatgttctaaaggaaccaaagcttagtgtgtccagaacagaagctcaatgtgtgttgatttaaccctattcttgtggtaacttttcccggcctctctattcgctatggaatgtaacattttaataaagcagacattttatctagtcacatgcatacctcttctcacacatgtccgctttgatctgcaaaataagacttgatggccaaaggaggattgctggtcaaaatgtatcacttataaccatcagttctttaagaggtacttagttatataaaatttaatacatcaaaaacatatagctaatgttagggtgacagatttcagacatacataccaagtttcctatttcttctattacaaagatcaaaatagacacttaatgcatcagaatcatctgtttgcaaacaagtaagagatagaaaattaaaagtatatttaaagtgccaagataattgtgattgcccttaaacaggtaaaatattaagccttataagaatcttgaaagaagygtacctttacgcaggtattcattaaactagcatttttatttcataatgtattcaagctaatactatgtctgacagtggacatactttagagacatcaaaacagttaaaggacttagcagttttgataagaatgggctgaaatcttctatcatagcaagtgtcaaaacattcccaaagggttctcatcttacttgagaaaataagatttgaacatatgttaatgaagtgttcacgttcaagccattaggtgtttgaagtactcttcctttgcagggaattgttgtagatcaagttanagcaatatttaccctgttatttagatgagtgttctttcaagga

SEQ ID NO: 675050 - DNA, 1644 bp, Homo sapiens
tgtagtttaagaataaattaatggtaataattatatttttgaaacttgactccccaaggctttgtgaaatttctaagcaagacatgagcaaaagaacaaaatttggtactgggattctacctcacctgtggagcgcctaccttaccttatctgccttacctgtgaagtgcctaccttgccttgccttacctacacacctgtggagtgccactaaagagatcttggagagaagacacgtttagggtgaccagcttcttcctgtttgcccagggctttccaacttttagctttgaaagtcttatgtccctggaaacctctctggtgatcctagatttatcttcctaacctgctccgggttcctaccgaaggcaaaatgtggcttattaggaggcagatgcatcaccctcacagcactatgcatgctgtatgtaattgtcctcttattataggtgaggaaagtgaggctcagacagatgccctaggtgactcagctgtgaaacagggatgatctgaatccgtgtctctcattctcagagtcatggtcttccctttacattgtgctccgggaaagacctcctggcctgagtgacctctgtgctcaagtagcatctgtcacacaagaccctagatcggtttcctctgaagggattcccagcagcaactatgatacaattgggaggtggttaatttggtgcagacgggacatggttaatgtggcaaagggtttccaactgcagggtgaagccatcatggtctgttgttttgggggaggagggtgggaagcttgcctggaaatggatgggaggggaagatgctttggagcctgcctgccccgctttattattaggttaattgaaaccataaaagcaaactccgatttgcattaaagccctgcatagcagatggcgacaagttctgaggatcataaaaggaggattgaaagttataaagcatcttgggctcatctgcgccagagtgctagacgaaaggcattgtgggagatgggctgcacccttctccaacccgcgagtcagcgcccgggactatgtgaccccagtcctgcaccctgcaccccctcctcgtgtggcacacaacttccccacctgggataggttgttttccccggggctcacaagtcccagaaatgtcaaatatctttccttttgctctctcttaaagcatgttttcacatccactttctttgggaaaaacaaggtttgcctttagtgcctcttcatctctactcatgggcatgagtcagttggcattgctataaaaaataccagggactgcgtggcttcaacaatgtgaatgcatttcccacagttctagaggctggaaggtctaagatccaggtgccagccagctgattctagtcctggttgagggttcactaccttgtttgcagacagccaccttctcgctgtgtccttacacgtggcagaagggctgaaggatctctctagaatcctttttttgaaggcactaatcccatttatgagagcaccaccctcatggcctaacaatgtcccagaggccccacctccaaataccctcacaygagagattagggcttcaacatataaatatgaatattcaacgtataaatatagatacaaaaattcaacatatgaattttggaat

SEQ ID NO: 675051 - DNA, 1644 bp, Homo sapiens
tgtagtttaagaataaattaatggtaataattatatttttgaaacttgactccccaaggctttgtgaaatttctaagcaagacatgagcaaaagaacaaaatttggtactgggattctacctcacctgtggagcgcctaccttaccttatctgccttacctgtgaagtgcctaccttgccttgccttacctacacacctgtggagtgccactaaagagatcttggagagaagacacgtttagggtgaccagcttcttcctgtttgcccagggctttccaacttttagctttgaaagtcttatgtccctggaaacctctctggtgatcctagatttatcttcctaacctgctccgggttcctaccgaaggcaaaatgtggcttattaggaggcagatgcatcaccctcacagcactatgcatgctgtatgtaattgtcctcttattataggtgaggaaagtgaggctcagacagatgccctaggtgactcagctgtgaaacagggatgatctgaatccgtgtctctcattctcagagtcatggtcttccctttacattgtgctccgggaaagacctcctggcctgagtgacctctgtgctcaagtagcatctgtcacacaagaccctagatcggtttcctctgaagggattcccagcagcaactatgatacaattgggaggtggttaatttggtgcagacgggacatggttaatgtggcaaagggtttccaactgcagggtgaagccatcatggtctgttgttttgggggaggagggtgggaagcttgcctggaaatggatgggaggggaagatgctttggagcctgcctgccccgctttattattaggttaattgaaaccataaaagcaaactccgatttgcattaaagccctgcatagcagatggcgacaagttctgaggatcataaaaggaggattgaaagttataaagcatcttgggctcatctgcgccagagtgctagacgaaaggcattgtgggagatgggctgcacccttctccaacccgcgagtcagcgcccgggactatgtgaccccagtcctgcaccctgcaccccctcctcgtgtggcacacaacttccccacctgggataggttgttttccccggggctcacaagtcccagaaatgtcaaatatctttccttttgctctctcttaaagcatgttttcacatccactttctttgggaaaaacaaggtttgcctttagtgcctcttcatctctactcatgggcatgagtcagttggcattgctataaaaaataccagggactgcgtggcttcaacaatgtgaatgcatttcccacagttctagaggctggaaggtctaagatccaggtgccagccagctgattctagtcctggttgagggttcactaccttgtttgcagacagccaccttctcgctgtgtccttacacgtggcagaagggctgaaggatctctctagaatcctttttttgaaggcactaatcccatttatgagagcaccaccctcatggcctaacaatgtcccagaggccccacctccaaataccctcacatgagagattagggcttcaacatataaatatgaatattcaacgtataaatatagatacraaaattcaacatatgaattttggaat

SEQ ID NO: 675052 - DNA, 2039 bp, Homo sapiens
tcacagaatacctcctgggggacacaggacctgagtgctgcatgcaggaggtggtggacaggtggggacagacagatgtgtggaagagtatgtggggcagatgaactaggctgaagagagaactgggcagagccttcttcacacagccttttaaacatttttttgcagctgggcacggtggctcacgcctgtaatcccagcaccttgggaggccaargcaggtggatcacaaggtcaggagattgagaccatcctgactaacatggtgaaaccccgtctctactaaaaatacaaaaaattagctgggcatggtggcgggcgccttgtagtcccagctacatgggcggctgaggcaggagaatggcatgaacccgggaggtggagcttgcagtgagctgagaccgcaccactgcactccagcctgggtgacagagtaagactctgtctcaaaaaaaaaaaataaataaataaataaaatataatatttgcatagataatctttttatggttaaaaaaaatctaaaacatatacagtgaaagcctttcccattcctgttctccctctaccctgttctttcctcccacccctaaaaccataataatttcctgtatattcttccaaatttctaaatgcatctacaacaaataccagtataaagattttcagctgggcgcagtggctcacgcctgtaatcccagcactttgggaggccgaggcgggcggatcacaaaggcaagagatcgagacctttctggctaacacggtgaaaccccatctctactaaaaatacaaaaaattagccgggcgtggtggcgggcgcctgaagtcccagctactcaggaggctgaggcaggagaatggtgtggacccaggaggcggagcttgcagtgagccgagatcgtgccactgcactccagcctgggtgacagagtgagactctgtcccaaaaaaaaaaaaataaaagatttttaaaatttcttccttatttattactttctctcctacaaaggcagtatatacacactgttctatatcttgttttggagaagatcttttcatttcagagcttcttcattcttttatttttattttttatagagacgggggtctcactgtgttgcccaggctggtcttgaactcctgggctcaagagatcttcctgcctcaggctcccaaattgctggggattacaggcgtgagccactgcgcccagcctcattctttttttttctattgcatattgttctagtgtatgaatgtaccttagtttacttaatcagcccagtatttaatgggtgctggggcctgtgttttcataaataaccttgtgtatgtggtcttttagttctgcgtagctatctctgttccataaactcccagaagcaaaattgccgagcaaaaggatagactaatatggaatgttcacagattattgcccatttacactccaccaggaatgtccttgtttcttagccttgccaactgatggtattagtgaacttttggatatttgctcatctgataggtggaaaatgggaacttcttattaaaagcctccttcagctggatccatgctgcatcagcggaaaagaaggtcccacgtgtttgggaccttctttccactcgccctgtgccctcgccttggttcaggtccctccagggttctcacccaccatggaaagagcaccagcgttgggtggtgttacggactgggcttggagccgacctagtttcgagtcctgttccaccacttacaagcccaggaaggtcaggcacattgtttgttagtcaaacaatataggagattgtctcgtagtcccagaaatggcttctgagcatattaggtggagttttcaaatgttaaatggaggaatttagatagaatacattggggaggaacagtgtctgcctcctgtgaccactgggaccatggcatgacaggcctgcagtgtgacccaggcacagggcatgacctaggttcactcacctgtcttagcccttcctgtgtgtctgcctcctctgcagaccagccagccat

SEQ ID NO: 675053 - DNA, 1243 bp, Homo sapiens
tcctgcctcagcttcctgagtggctgggactacaggcaggcagctaatttaaaaaatgtgtttgtagagacaaggtcttgctatgttgcccaggctagttttcctgccacttcagaggaaggactcaggtttcctttttctcctacttttaagagtttttattaggaattatctgttgaatgttatctaaaacagtcaataaaatgtattaagtgccagctgcatgcaagaccctaagttagatacagtcagccctcttcatcagcaggtccacatcttcagattcaactagatcaggctgaatatttgaagaaaaaaaaacaataaaaatacaaacagaaagtacaatataacaactgtcaccactgtacaatatgtatacattttattagtgatgacttaaattacatggggccaggcatggtggctcacacttgtaatcccaacacattgggaggccaacctgggcagcatagtgagaccttgtctttattaaaaattaaaaaaaaaaatagccaggtgtggtagtatgcacctgtagtctcagctactcaagaggctgaggtgggcggatcactggagcccaggaggttgaggctacagtgagctgtgatcatgacaccgcactccatcctgagtaacagaggatgacactgcactccagcgtaagcaacagagggcaatcctgtcgctaagtaaataaagtataggggggatgcgtgttggttataagcaaatactacaccattatgtgtaagggattgagcatccacagattctggtatggtgtgggggcggtatcctagaaccaatcccccgcaagatagcaaggatgactgaactatggaagaatcaaagcagtgttacacagtatgcaattcctgtcttcaaaaaagttacctcatcaggtagatgagacttataatgaataaaakgaatcaatacagatttggagatggtggttgttgtcatagataatcttaattgcgttttcttctaaaacagatgtgttgtcaccgaagtcattacaagaagatgaagaaggattctcaaggtaaatattagtctggtgatttttttttttcttttcttttcagacggagtttccctcttgttgccaggctggagtgcaatgacgcgatctcggctcacggcaacctccacttaccaggttcaagcgattctcctgcctcagcctcccgagtagctgggattacaggcatgcaccaccactagtctcgcg

SEQ ID NO: 675054 - DNA, 1243 bp, Homo sapiens
tcctgcctcagcttcctgagtggctgggactacaggcaggcagctaatttaaaaaatgtgtttgtagagacaaggtcttgctatgttgcccaggctagttttcctgccacttcagaggaaggactcaggtttcctttttctcctacttttaagagtttttattaggaattatctgttgaatgttatctaaaacagtcaataaaatgtattaagtgccagctgcatgcaagaccctaagttagatacagtcagccctcttcatcagcaggtccacatcttcagattcaactagatcaggctgaatatttgaagaaaaaaaaacaataaaaatacaaacagaaagtacaatataacaactgtcaccactgtacaatatgtatacattttattagtgatgacttaaattacatggggccaggcatggtggctcacacttgtaatcccaacacattgggaggccaacctgggcagcatagtgagaccttgtctttattaaaaattaaaaaaaaaaatagccaggtgtggtagtatgcacctgtagtctcagctactcaagaggctgaggtgggcggatcactggagcccaggaggttgaggctacagtgagctgtgatcatgacaccgcactccatcctgagtaacagaggatgacactgcactccagcgtaagcaacagagggcaatcctgtcgctaagtaaataaagtataggggggatgcgtgttggttataagcaaatactacaccattatgtgtaagggattgagcatccacagattctggtatggtgtgggggcggtatcctagaaccaatcccccgcaagatagcaaggatgactgaactatggaagaatcaaagcagtgttacacagtatgcaattcctgtcttcaaaaaagttacctcatcaggtagatgagacttataatgaataaaatgaatcaatacagatttggagatggtggttgttgtcatagataatcttaattgcgttttcttctaaaacagatstgttgtcaccgaagtcattacaagaagatgaagaaggattctcaaggtaaatattagtctggtgatttttttttttcttttcttttcagacggagtttccctcttgttgccaggctggagtgcaatgacgcgatctcggctcacggcaacctccacttaccaggttcaagcgattctcctgcctcagcctcccgagtagctgggattacaggcatgcaccaccactagtctcgcg

SEQ ID NO: 675055 - DNA, 1243 bp, Homo sapiens
tcctgcctcagcttcctgagtggctgggactacaggcaggcagctaatttaaaaaatgtgtttgtagagacaaggtcttgctatgttgcccaggctagttttcctgccacttcagaggaaggactcaggtttcctttttctcctacttttaagagtttttattaggaattatctgttgaatgttatctaaaacagtcaataaaatgtattaagtgccagctgcatgcaagaccctaagttagatacagtcagccctcttcatcagcaggtccacatcttcagattcaactagatcaggctgaatatttgaagaaaaaaaaacaataaaaatacaaacagaaagtacaatataacaactgtcaccactgtacaatatgtatacattttattagtgatgacttaaattacatggggccaggcatggtggctcacacttgtaatcccaacacattgggaggccaacctgggcagcatagtgagaccttgtctttattaaaaattaaaaaaaaaaatagccaggtgtggtagtatgcacctgtagtctcagctactcaagaggctgaggtgggcggatcactggagcccaggaggttgaggctacagtgagctgtgatcatgacaccgcactccatcctgagtaacagaggatgacactgcactccagcgtaagcaacagagggcaatcctgtcgctaagtaaataaagtataggggggatgcgtgttggttataagcaaatactacaccattatgtgtaagggattgagcatccacagattctggtatggtgtgggggcggtatcctagaaccaatcccccgcaagatagcaaggatgactgaactatggaagaatcaaagcagtgttacacagtatgcaattcctgtcttcaaaaaagttacctcatcaggtagatgagacttataatgaataaaatgaatcaatacagatttggagatggtggttgttgtcatagataatcttaattgcgttttcttctaaaacagatgtgttgtcaccgaagtcattacaagaagatgaagaaggattctcaaggtaaatattagtctggtgatttttttttttcttttcttttsagacggagtttccctcttgttgccaggctggagtgcaatgacgcgatctcggctcacggcaacctccacttaccaggttcaagcgattctcctgcctcagcctcccgagtagctgggattacaggcatgcaccaccactagtctcgcg

SEQ ID NO: 675056 - DNA, 619 bp, Homo sapiens
aaaaactaaagatatgagaacaattttgaaagcagcaagagaaaaacgagttatcatctacaagggatcttcaacaaggttatcagctgatttttcatcrgaaaccagggaggccagaaggcagtggaatggcatgttcaaaggttgaaataaaaatataattctgtatccggcaaaaatcacaagagcagcacctgctgttaccaccatgcagaatcttcttctcccagtgtctgtgtgcccctttccccctctgcccttcttcaggacccccgtgaccaatcctagttgacagtacacacagctccatatctgacttccctgcttttccatagttacatgtgtcacctttgatgttctctgcatgtttgccccttccctgaatagaatggagtctttctgagggcagtgaggtttgttcaaatcctttttttttgagacggggttccactgtgtctcccaggctggagtgcagtggcatgcttcagctcactgcaacctccacctcccaggctcaagtgatcctcccacctcagcctcccaagtagctgggactacaggtgcacgccaacacacctggctaatttatgtattttttgtagagatagggtttttccat

SEQ ID NO: 675057 - DNA, 619 bp, Homo sapiens
aaaaactaaagatatgagaacaattttgaaagcagcaagagaaaaacgagttatcatctacaagggatcttcaacaaggttatcagctgatttttcatcggaaaccagggaggccagaaggcagtggaatggcatgttcaaaggttgaaataaaaatataattctgtatccggcaaaaatcacaagagcagcacctgctgttaccaccatgcagaatcttcttctcccagtgtctgtgtgcccctttccccctctgcccttcttcaggacccccgtgaccaatcctagttgacagtacacacagctccatatctgacttccctgcttttccatagttacatgtgtcacctttgatgttctctgcatgtttgccccttccctgaatagaatggagtctttctgagggcagtgaggtttgttcaaatcctttttttttgagacggggttccactgtgtctcccaggctggagtgcagtggcatgcttcrgctcactgcaacctccacctcccaggctcaagtgatcctcccacctcagcctcccaagtagctgggactacaggtgcacgccaacacacctggctaatttatgtattttttgtagagatagggtttttccat

SEQ ID NO: 675058 - DNA, 508 bp, Homo sapiens
ctttgcaagtacacctggatcatttgctagaaaacagatcaaagcccacatattgggggatggggggaggtggtgctgggcggtgtgcacaggtctggctgcatggttgctaatgtggagatctgtctstgctatgggcaattctgtcccaggacactggcaagcaaggggcccccaggactgggctccagtgttatatttcagactgcctggcagcatgccataacattttttaaatttttagatattatccagttgggaggcccagagctccctcttcaagaacttccccatcatttccccccgctgtggcccctgaagttctccagggagaaccccagaagtctcattcacacctgggctgtgtacttcacccagcatcccttgtcagtatgcacagagcctgcttagttctggcagtgctgaagccagattgagaaccacagcagaaaaggctgagaggctgagtcctgagttggtagctggtggggaggtgggggggcggggg

SEQ ID NO: 675059 - DNA, 617 bp, Homo sapiens
agcatgtatccatcaggaagaaatacagcacccttttctccgccacactaagaggtgtatcacttagactgaaggacaaaacccaggcaacatgacactctggaaaagggtcaggcatccaggtgatgctaaggagataacacgtacccactaaggccttctttatttattgagttccagcaaatggaacttttttttttctctgcagaagtgtgcaagcagtttccagccttgctgagctacatgaattgatgaagaaaatacactctcattatctaatctcattastaagacttgtttgggtggaactggctctgtgggtcactgagtctttctgggtcttgttgttctgtctcctgatagcacagtcacttacatatggttatatttgccctacagaacatgctgcagtaactgcctctgatgagaggagcttctgcttcagttgttgcaattgagcagtgacccttgctgataaacctgtggattttggtatctgtgggaggtcccagaacaaatcccccatgggcatcaagggaaaactgtctatggtaccactatgatgtcttataggctatgtcaagcttgtgaaattaaagaacaaagtctgttgtgga

SEQ ID NO: 675060 - DNA, 665 bp, Homo sapiens
ttgtgactggcttcttttacttagcataggtaatgttttcaatatttatctctggtgtggcatatatcagtacttcattcctttttattttcattcataaattttgactttcatgattcatatcacgggaagattagccctgtaacctttctatgaatgtgcagtgataaaatcacaggtacactggtcacaggttggtggagagaggcccatctggacctcagaatctatctgcattctagattcattctaaaggaaaaacgatttggtaacgctatcaaatcaactaaattgtgccattctttgataccaggaaaaaagagttaagagacatccaatctgtcagggaatgttcacccccgtgtgcctcccctctgctccgagtcagcaggacacgtgctctaatgatggagaataaaacagtggaaggtgcctcatctttacagaaatgcctggcagaggaactggatgctatagcacagaaagcctccttagatggcagcaagggaaaaaagcaaaggaataaagtccaatattaagaaggggctgggggcrgaatttggccttctacttcttttactatcactgtatttttataaaatattcttttaaaaaatattctagtgtactctgaaatcatccccgaattctttcttttaaactca

SEQ ID NO: 675061 - DNA, 641 bp, Homo sapiens
taaaaaagtaatttcaaaaaaataaagacgtttaaaaatgtattggtcatcacatgactttattcttatttgtcctttgcaagaatccagattatatgacacatatatacttactcatgcacaaggcaaactgactgaccacatcactcctatgtagaggagaaggtacaggttttttgtctgtctctttgtttgttttgtagagagacagggtctctctatgtagcccaggctggtctcaaactcctgacctcacgtgatcctccagccttggcctcccaaagtgctagaattacaggcatgagccacagtgcccagccataaggtacaggtgtttttgttgttgttgttgttgttttgagacagagtcttgctctgtcgcccaggctggagtacagcggtgcaatcttggctcactgcaacctccgcctcccggattcaagcgaytctcctgcctcaacctcctgagtagctgggattacaggcacgtgccaccacaccagctaatttttgtatttttagtagagacagagtttcaccatgttggtcaggctggtctcgaactcctgacctcgtgatccacccgccttggcttctgaaagtgctgggattacaggcgtaagccaccgcgcctggccaag

SEQ ID NO: 675062 - DNA, 1494 bp, Homo sapiens
ttgatatttaaggttctcattaattttaaattctataaaatgagttattgtgatttttatttattcatttaactaataattatttggaaaattaaaagaaaataatttggaatttgggagggagcaggtgagaacagagcacaatccacacatacctctgcagccttacatggcctgggctgtcctccactgagtctagagccctgggacaaccacgtccattcctgaaggaccaggaggcatggagacctgaaggcaatgcaggtcttcatcccactagaccttgactttgtaatagaaaaatgagggaaagccaggaagtgcccatgttcctttgggaagattcactggccacttatagaaaggcttgtgtatataatgtgaaacaaacaaaagaactaccctcaacttttttcccaaagttttaaaaggaaacttattttgccacatctgggtcttttttatgtaatacagttagagacatatgataaagcagaattggaaaatcagacattttgtaaatgttcttttgttaaaaagaaaagaaaagaaatccctctggaaatgacctttggaaatgggattcctagaccacttctccaagtgacactgggagatgttagcagaggtgaagcagaggccgtgagaaggtacagaagagaagggctccatgtcatgcataaaaggcattttcagattataactattgttctctgtgtacattcttcctcgctactgcatatatagttgacaattctaagtacttcaaaaatatatacctaatatttctaaatgtcctgaagtatctggtgtatgttaaaagatgtagtaaaataagcaattgtaaatatccttttgttaaaatttatgtgaaataatattttttggatatggaactaccaagtgcaaacataccacaaatgcatgtatatatcagtaagwcccaactcatattttcccagttactctctattgggctagccaaccccactaagggctctgtccctcacatgctgccattactgcagtcaaccagagatgcctcacaagaagctggcattaacctggcaagaaggcttagagagctctgacctgaccccagtgagtccagtggtttaattttatggcttacttttaaactgttggtaaaaaatcagtatttccctgttatttgctatgtgggtatagtaatcatttcattgccatagcaacatttagctctgggctacatcagccatccttgaaagtatagaatttgttagatgccacgagtggtagccctaaaatttctaaatagaaaaggctggagaaacagctgagggttgatatgggtggatagagaatttttcttgtagctgaaattacattgtaaaacaaagcaaaccaaacacaaaaccacagattttgtgcttatttgtggtggattttgcaggggtgaggaagacaaaaaagacaaaaggcattcctaggcattgcataccttccattaacagc

SEQ ID NO: 675063 - DNA, 1494 bp, Homo sapiens
ttgatatttaaggttctcattaattttaaattctataaaatgagttattgtgatttttatttattcatttaactaataattatttggaaaattaaaagaaaataatttggaatttgggagggagcaggtgagaacagagcacaatccacacatacctctgcagccttacatggcctgggctgtcctccactgagtctagagccctgggacaaccacgtccattcctgaaggaccaggaggcatggagacctgaaggcaatgcaggtcttcatcccactagaccttgactttgtaatagaaaaatgagggaaagccaggaagtgcccatgttcctttgggaagattcactggccacttatagaaaggcttgtgtatataatgtgaaacaaacaaaagaactaccctcaacttttttcccaaagttttaaaaggaaacttattttgccacatctgggtcttttttatgtaatacagttagagacatatgataaagcagaattggaaaatcagacattttgtaaatgttcttttgttaaaaagaaaagaaaagaaatccctctggaaatgacctttggaaatgggattcctagaccacttctccaagtgacactgggagatgttagcagaggtgaagcagaggccgtgagaaggtacagaagagaagggctccatgtcatgcataaaaggcattttcagattataactattgttctctgtgtacattcttcctcgctactgcatatatagttgacaattctaagtacttcaaaaatatatacctaatatttctaaatgtcctgaagtatctggtgtatgttaaaagatgtagtaaaataagcaattgtaaatatccttttgttaaaatttatgtgaaataatattttttggatatggaactaccaagtgcaaacataccacaaatgcatgtatatatcagtaagtcccaactcatattttcccagttactctctrttgggctagccaaccccactaagggctctgtccctcacatgctgccattactgcagtcaaccagagatgcctcacaagaagctggcattaacctggcaagaaggcttagagagctctgacctgaccccagtgagtccagtggtttaattttatggcttacttttaaactgttggtaaaaaatcagtatttccctgttatttgctatgtgggtatagtaatcatttcattgccatagcaacatttagctctgggctacatcagccatccttgaaagtatagaatttgttagatgccacgagtggtagccctaaaatttctaaatagaaaaggctggagaaacagctgagggttgatatgggtggatagagaatttttcttgtagctgaaattacattgtaaaacaaagcaaaccaaacacaaaaccacagattttgtgcttatttgtggtggattttgcaggggtgaggaagacaaaaaagacaaaaggcattcctaggcattgcataccttccattaacagc

SEQ ID NO: 675064 - DNA, 1494 bp, Homo sapiens
ttgatatttaaggttctcattaattttaaattctataaaatgagttattgtgatttttatttattcatttaactaataattatttggaaaattaaaagaaaataatttggaatttgggagggagcaggtgagaacagagcacaatccacacatacctctgcagccttacatggcctgggctgtcctccactgagtctagagccctgggacaaccacgtccattcctgaaggaccaggaggcatggagacctgaaggcaatgcaggtcttcatcccactagaccttgactttgtaatagaaaaatgagggaaagccaggaagtgcccatgttcctttgggaagattcactggccacttatagaaaggcttgtgtatataatgtgaaacaaacaaaagaactaccctcaacttttttcccaaagttttaaaaggaaacttattttgccacatctgggtcttttttatgtaatacagttagagacatatgataaagcagaattggaaaatcagacattttgtaaatgttcttttgttaaaaagaaaagaaaagaaatccctctggaaatgacctttggaaatgggattcctagaccacttctccaagtgacactgggagatgttagcagaggtgaagcagaggccgtgagaaggtacagaagagaagggctccatgtcatgcataaaaggcattttcagattataactattgttctctgtgtacattcttcctcgctactgcatatatagttgacaattctaagtacttcaaaaatatatacctaatatttctaaatgtcctgaagtatctggtgtatgttaaaagatgtagtaaaataagcaattgtaaatatccttttgttaaaatttatgtgaaataatattttttggatatggaactaccaagtgcaaacataccacaaatgcatgtatatatcagtaagtcccaactcatattttcccagttactctctattgggctagccaaccccactaagggctctgtccctcacatgctgccattactgcagtcaaccagagatgcctcacaagaagctggcattaacctggcaagaaggcttagagagctctgacctgaccccagtgagtccagtggtttaattttatggcttacttttaaactgttggtaaaaaatcagtatttccctgttatttgctatgtgggtatagtaatcatttcattgccatagcaacatttagctctgggctacatcagccatccttgaaagtatagaatttgttagatgccacgagtggtagccctaaaatttctaaatagaaaaggctggagaaacagctgagggttgatatgggtggatagagaatttttsttgtagctgaaattacattgtaaaacaaagcaaaccaaacacaaaaccacagattttgtgcttatttgtggtggattttgcaggggtgaggaagacaaaaaagacaaaaggcattcctaggcattgcataccttccattaacagc

SEQ ID NO: 675065 - DNA, 652 bp, Homo sapiens
tttctcaccctggaagtttctcacattttttacctcagtttctacaagacagaaggtaaccgcaccgccccccagcccccacccaccccactcattgtcactgcacagtaargggaacacagaccccaaaccatctaatgccccccatcagtttgtctgcaatgactttctttattattattattattattattattattattatactttaagttttagggtacatgtgcacaacgtgcaggtttgttatatatgtatacatgtgccatgttggtgtgctgcacccattaacttgtcatttagcattaggtatatctcctaatgctatccctccccactactcccaccccacaatagtccccgatgtgtgatgttccccttcctgtgtccatgtgttctcattgttcaattcccacctatgagtgagaacatgcagtattttcatcacaggagattcggagaataaggaggaggaggagaagcagaaaatggaggaagaggagcccagagaagaagaggagaaagaggaggagggggagaagcagaagaaggtgaagaaggaggataaaaacccagcataaatatcactataaaaacccattcatggattgtatccataagcaaccagtgtattgccacaactgtgataaga

SEQ ID NO: 675066 - DNA, 1385 bp, Homo sapiens
tcaattctcaaatgatattctagcatttctttaatttttaaatgaagttggtacatctattttaaatagtactacaagatttataacaacagaaatgagcagaaagaaaaggagaggcaggatactgctcattctgttttgtcttactgtatttgagattatttgtgacstttgtgtgtttgattttcttcatcctgtgacttacttcgtctttcacttcatttttgaagtgaattgtgtttatctcctgcttcagaataagatcttacctttcacattttctttcttgacctatatgtttctgcattgtttttcccccagattcctgcctacttattttttagggataaataataagtttatgaagatagttattaatatttgttgatgttctttagcttgccttgataagaagttctggtcacccaaaggtttttcccaaacgtggcttccttttgtgattgctgcttgctgtgctgagtggcagtccccggtgttccagttcctataagtacactgcacttggcagctgcttcgtgctcctttcatcgcagttcttctaggttcagtcctgcctttgaagttgttcaagggtgcgagtgtgaccaagttaaaatgaaacaaaggaaaacccttgtgttttattctctctctcaagcctctaataatgcctcctggagtagtctgtaaccctattttccttaatgtccttgtgtaagtatatgaagataatgagaggcacacatttttgcatacaacttatatgaattggagatacacaaataagcaggatttttaggtaaactttaaatggctatctcaacatttttgtgtttattttttccgagcaactactattattggtggaggtgaggagacagacaagatcttaattatttattttaattaaaatactaaatgcttgcaatatgaaagaccaaggaccagttactataggagatacaagatgcttaagaccagcctctgacctcaagttatttacactatagcaggagagatgacagttacacaaatgaggatcataaaagagagtagaataagtactgtaagagagctctaaacaaagtagcgtggaaattcaaagggacgtgaacttaaaaccagtttttgaaatcaggaacagcattttggaatgccacagaacatttccaattgtaaatactcggtaggcaatgtgcctctgtgtatgtatgtatgcatagggtttgaggagtggaatctattttgttttatgtgtctcattttgatttaaaagttccttcccaaatgaggctcatagcataatggaaagaacatagaatcttttttccaatccccattctgctttcatttgtttggtttggatggtattggaatcactatga

SEQ ID NO: 675067 - DNA, 1076 bp, Homo sapiens
tcacaatagatgacatgtctttttttaagtgagaaaaccatatgcaatataaatattcttatacagaatataaatattcttacaagataaatttgtttttatatgtatattttcagtgaaagagtttctagccaaagccaaagaagactttttgaaaaaatgggagaatccaactcaggtaaggaatatttagatttttctaaaattaaaaatcttgtattaataaaatcaggattcttgcctaagaaatttattactttagaaattttaattttcatgtggtgttagtaaacagaagcttaaaatgggaattttgccatagttatactttgatgtattaattaataatcttaatgtatgcctaaattgcaggaaataatttccagtataatacctaattataaatttgatactgattccagttgctataaaatcttaatattttcaaatatattaattttgaattatgcctttgatagcatacttataatttttattaattacaaaaataagagtccttacrtacagtttaaaattctcagtcatagagaatttggctatcaacaacatccctgatacacaggcatcttttttatcatcattttgatgggttatgttctatataattaaagtattttagatcttaactaggatctaaaaactgtatataaaaaaccatctatactttacaaaaataatatttttggagttataaataatgaatgaattttaatagtaaattaaattttgttatacttcaagttctgggttgcatgtgcagaatgtgcaggtttgttacataggtataaatatgccatggtggttgctgcatccatcaacccgtcatctacattaggtatttctcctaatgctatccctcccctagccccccaccccgcgacaggccccggtgtgtgatgttcccctccctgtgtccatgtgttctcattgttcaactcccccttatgagtgagaacataaagaccaaaaaaaaaaaaaaaaagaggtcgttatttgaaaaagatacttgcacacgcatgcttatagtagcacaattcacaattgcaaaatagtgg

SEQ ID NO: 675068 - DNA, 1076 bp, Homo sapiens
tcacaatagatgacatgtctttttttaagtgagaaaaccatatgcaatataaatattcttatacagaatataaatattcttacaagataaatttgtttttatatgtatattttcagtgaaagagtttctagccaaagccaaagaagactttttgaaaaaatgggagaatccaactcaggtaaggaatatttagatttttctaaaattaaaaatcttgtattaataaaatcaggattcttgcctaagaaatttattactttagaaattttaattttcatgtggtgttagtaaacagaagcttaaaatgggaattttgccatagttatactttgatgtattaattaataatcttaatgtatgcctaaattgcaggaaataatttccagtataatacctaattataaatttgatactgattccagttgctataaaatcttaatattttcaaatatattaattttgaattatgcctttgatagcatacttataatttttattaattacaaaaataagagtccttacgtacagtttaaaattctcagtcatagagaatttggctatcaacaacatccctgatacacaggcatcttttttatcatcattttgatgggttatgttctatataattaaagtattttagatcttaactaggatctaaaaactgtatataaaaaaccatctatactttacaaaaataatatttttggagttataaataatgaatgaattttaatagtaaattaaattttgttatacttcaagttctgggttgcatgtgcagaatgtgcaggtttgttacataggtataaatrtgccatggtggttgctgcatccatcaacccgtcatctacattaggtatttctcctaatgctatccctcccctagccccccaccccgcgacaggccccggtgtgtgatgttcccctccctgtgtccatgtgttctcattgttcaactcccccttatgagtgagaacataaagaccaaaaaaaaaaaaaaaaagaggtcgttatttgaaaaagatacttgcacacgcatgcttatagtagcacaattcacaattgcaaaatagtgg

SEQ ID NO: 675069 - DNA, 662 bp, Homo sapiens
tctctatttgaacatcatgaaagtacatttgagtttatgaatattaactttcatggcctcattcacgatctcatctttgcgtcttgtccccacatttctgggccagacttggagcttccattaatgtcaaacggagctttgccctaaggcagggaactgaaaggttgtagtaacaaaatgaggatttgtcctactgggaatgagtaaaagaaaaggaagttcacttttgtcaaagaaagcaaaaaaaaaaaagcctatagaagttggaataaaaaataaaactttttcagatatctttgttgtttgagatataaaccaaggctatgttgaagttagcaatttaactttattcatttgcctttcagaaacagtgtcatctgtaagcagtagcatcctgtgatctctgcagtcttttctgaaatatctyttcttatcatgggtcatgaaaacttacgatagaaatttaacaaaacacttactgtttaagaaattaagattccatcttgggctttcctaaagggaaaaagaggaaaaaaagtttctgtgtactttagcaatacaacccatgcagaactggaaaacgactaaataaatgaaaataattttgtctctgtaaaagacagggcagagccagcttttggttgaatatctgtcaaaactaa

SEQ ID NO: 675070 - DNA, 662 bp, Homo sapiens
tctctatttgaacatcatgaaagtacatttgagtttatgaatattaactttcatggcctcattcacgatctcatctttgcgtcttgtccccacatttctgggccagacttggagcttccattaatgtcaaacggagctttgccctaaggcagggaactgaaaggttgtagtaacaaaatgaggatttgtcctactgggaatgagtaaaagaaaaggaagttcacttttgtcaaagaaagcaaaaaaaaaaaagcctatagaagttggaataaaaaataaaactttttcagatatctttgttgtttgagatataaaccaaggctatgttgaagttagcaatttaactttattcatttgcctttcagaaacagtgtcatctgtaagcagtagcatcctgtgatctctgcagtcttttctgaaatatctcttcttaycatgggtcatgaaaacttacgatagaaatttaacaaaacacttactgtttaagaaattaagattccatcttgggctttcctaaagggaaaaagaggaaaaaaagtttctgtgtactttagcaatacaacccatgcagaactggaaaacgactaaataaatgaaaataattttgtctctgtaaaagacagggcagagccagcttttggttgaatatctgtcaaaactaa

SEQ ID NO: 675071 - DNA, 2091 bp, Homo sapiens
atttggttttgcacagccaatgcctagggatttagatggggactcacccctgctacaccccgtacactaatcgcagttgaagtatgctgctaccaagtggagcatgacctccaatggttaattaagaaactacaaygtaaactgaatgacttatgtattaaaatgtagataacagaaatttctttaaagttattataaagtcataaatattttcctattatcaataaaatagcatagaatgacccaattgttgagtagaactaagtaactatgggtcttcctgaagcttgtccacctcattgattccagaactcttcatttactttgagctttaactcccttaaccaaagagttacttcaacaaaggctttcttaccagctttattaacatttactgcctagtatctctctaactcttttgcaaagagaagtcacattttgggccaggtgtggtggctcacgcctataatcccagcactttgggaggccaaggtgggtggatcatttgagatcaggagttcgagaccagccttgccaacatggtaaaaccccatttctactaaaaatacaaaaattagctgggcgtggtggcacgcacctgtaatctcagctatttgggaggctgaggcacgagaatcacttgaacccgggaggcggaggttgcagtgacccaagattgcatcactgcactccagcctgggcaacagagcgagactgtgtctcaaaaaaaaaaaaaaaaaaaaagagaaaccacatttttacccatgagactgtcaagagatcttggctatgttatgcatctgctcatcagcaacatgaatatttatttgtaggatgcatgtcttttaataaaagtaccatttatctccatgaggacactctgtccttcatattttgaagaaaactgctttaagttttctattctgtcttcaaagcaatggtttagctgagagtcattcgaagtaactttatatttttctgtttcctcagtaaccataatgagtaggattatgtgcttctcttccttttgatataaatcttctttgaggactagaaaatacatgtccaagatatatcagagcataattttgaaaacatattgaaagtataaaaaatctacatataaacaatttcttcataagtagtcatttcagaatctaagctctcagcaagatacattttcaccatcaaaaatatagtatcagctctgctttagatacaaataaattgagcctcagaaaagatttctgaacatatgacttgatgagcaactgtgacctctatatccatggaaatcctgccatgaccatcatgtccatatggggctcacagtaatagaccctctttataaatgagtcttggctgactaaaatattgtcagtataaatatcactattcagaaataaatatttagatttttaaaaatgtactcataaatatattttaggtttgttgttgttgttgttgtttttaattttagaaacatggctcccattctccagagaagaaaggaagaaagaaaagcagcaagcaagcaagcaagcaagaaaacctaaatgagtttgcatgcagacgcttcagttaaatatgtaagagcagaggtcaaaggagagggcacttccatttggaagccaggaggctacaaaggggccagatccaagaaactctaagaggaagagacagaggcagaactacagatggttcatgagaccaggtgccggctgccaggcccactgcctttgttctcttttagcccctttcctggtctggattctgccctctggtttctatctaaattcagctacatcctctatttgcagttttcatccaggatgtaactatttctctgttatcagcatctgtgttgcttcagatggtgcttcctcatgtccttgaagcatttcctgaggtacaattccaactgtttggattccaggtgtcattaatgccaaccattaatcagatatgtatatccttgtctcccacagagtactagactgtttgtttatggttttgtctaaaaggactcactgtaatgatgaagcagagctttaattgctcccaaaatgcataatcataccttacacattc

SEQ ID NO: 675072 - DNA, 670 bp, Homo sapiens
taagtttttagtctttattggaagaagtgaaaacagtctctgcagcaagactcaaaagtacctttgttttctaggcctgccagggatttttctatgaggccctaaaccatggtctctgccaacaactcctccatctccccatggctctcaagaaatagaactgctccatcctgaaggtaattgaatatcttacctaagtgatttcctcattgtttatttacattatggaacatttttcttgcagagttagagtataatctgtatgtaatactgaacaatattattgtaagctgcacaaaaacatacccataaatgagttcattaagtattagatatttaagtaaatgctgttttaaatggtttctactgtgtaaaaattgttggtggcttgttaaatagatgtttgaaaatgtttaaattgggaaaaattgsttggtgtttttctatgaatgaggaacagcttttttttaatatttaaaataatgaaatatccaacatattttcaggagcaaatcagatttggataataaagaaagtttattgtttaactacttttcttctctgtaaagagactttaataatgtcttcccattttaactgacaggccatcaatagatggatttgtttattgtttacccaattattagtctaaaaagcacttgctttaatt

SEQ ID NO: 675073 - DNA, 657 bp, Homo sapiens
tgggaaggtacaataaacagatgaacaattaaagaatcaggggctggctggtcttaaccatatcaaagaagtatgtatttagttattccatatatatagggagggcagacttggtagtacaagtgaaaggagaggaaaaagagggggggaacttttagtggtccttaggtgctagcctgggtatttgtattttattagaatgaagaaaggacccacttagaaatatgccaaatayttccctattgtattctaggtatacttactgtatattgtgcctttggaaaagcctttacattttacagattggttcactaatatttattgaagataaataacttcctcaatgtcataaggtagaaagtgggtgagtaaacttttaaattgtatctgtctggttcctgaaagaatccacacaacattataccatacagttttctgtagaaaatactcacttttatattctatgtcactactactctaagtattcttcacatattagctaattttatcttcataaggcacagaaagacaaatacttcatgatctcacttatatgtggactctaaagaagttgaaccagtggtactctttaccaagagtaaaatatgctgataaattaagggaggtgtgaaaaagaaaaaaggcctttagatcgat

SEQ ID NO: 675074 - DNA, 653 bp, Homo sapiens
ttttacatttgctgaggagtgttttacttccaattatgtggtcaattttagaataattaccatgcggtgctaagaagaatgtatattctgttgatttgggatggagagttctgtagatgtctgttaggtccacttggtccagagctgagttcaagtcctggatatccttgttaatttcctgtcttttgatctgtctaatattgacagtgggrtgttaaagtctcccactattattgtgtggaaatctaagtctctttgtaggtctctaagaacttgctttatgcgtctaggtgctcctgtgttgggtgcatatatatttaggatagttagctcttcttgttgcattgatctccttaccattatgtaatgcccttctttatctcttttgatctttgttggtttaaagtcttttatcagagactaggattgcaacccctgctttttttgctttccatttgcttggcagatcttaattcattgtgagtagccttccacgcccattacttttcctggctatgcagttccccaccatggaagtgtaccatagtatactcatttccttattgttggatgtgtgtatcactaaatttttgctattttaaagaatgtttgtatgcccttgactatttcttattcctgtgatgaaaggccta

SEQ ID NO: 675075 - DNA, 1014 bp, Homo sapiens
aatcatcattactactctgaaactgaatgcaaatcctcagagctatcccaacactttttagtaccaatatgacatcctctacttgtttctgatgtcctttccaactattccttagtatttgtgaataagaatctaccattaacttcacagaaagtgaattcccattcagatgtgtggttaatcatatttttttgtaatattttctcttgttttttctttccatcaaaaattatttactataacttggaactgagtgtttacaaaatcataactatacatgttgctctttcaaatgcagaaaattctatcattttatctgaaactggtaagtacactatacatattattttcttttgaaaacatcatccaagagatttggaattctactagcattaccagttcaggttatatgactgtgaaagaggtatggagggaaatgaaataaatttatttcttaataataagtgtgagttctattcacgaatttaggtggaaatgacarattgagaaggaaagataccagtttcggccaagatactgaaagactgaataattctgatagtacaattacttaagatacaattactataatttgaaatgggagaaggggtgcagaaaaatatgaaagatgtaactaatctttattaagcgtctatgatatgttagtttattatggatataatgtgggttctttaatcaggaagatggtgttcaaattcaggctcttcagcttactagttggtaaccttgactgagttatttatcatgtctgcatacctcagtttttcttaaccattaaatggaaataataataatacctactttataaaatgtctacatggattaaatttaaatgtataaaacacttagagcataccataggtatatttctacttttaaagaataggaaatgaaaatctgtgaaagttaagaaattctcaaggtcactgcaatcagtaagatggatcaaaactgggatccatctgcttttaagtcaatgctctttctgctgtg

SEQ ID NO: 675076 - DNA, 1381 bp, Homo sapiens
tcattctttcactcggcaacattttctcaactccatgctgggtgccaggccaatgacgaacaagacaggtgcgtttctggcctccaggaggtaacagccatgacttcctggtmcaagcagaaaggggcagataaggccaaactcccctgccctgtcatcccccaggctggagacctcttcttcctcttggctcagaaggcccagggtccctccttgtttgtagtgggtccatctgcccgctagactgagccccttgagggcagggctgagtcttgtctactttacaaatgaccataggtcctggaatcagatagactcgggtttaaatcctgttgtggctccttatcacctaggatgctaccaatccagcaagttctagtgagtctaatgcttgtgtcaagctctcagcccatcttgccacacactaagtgctcagtaaatagcagcagttcttcttatcattggcacaagtactattgttactctggcctctcccctggggcctgctcccacacagggcctgtgttagagccaaaccaaactggctaaaggtggctactcctgtttccccaggtcacaaaggctgggtctttctctgtctctccctagcttttccagagttgtaggttaaatgtaggggctcaggttccagcctctgggaaaggagacaccatgtccaggctctgtttccacccattgttgtagagagcattgtctttcttccatggcatcctcctccccactcaggttcctaagcccagctgctgcagcccctctcacccatgcctgagcagaggaggggcccctcccttgcttggaaccccttacctagtagagctgtgagagacatttgctttcttgtctctcatttcatctttttttagccttgtgacagtcccgtggggcagatagagcagggagcatatctctcttttacagaaggggaatccaaagcccaaagaggttcctcagcaaggactgtggtgtaggtctcatgactcccaggccagtgtgtctcactaagctggctccggcaggccctgggcagagtaagacggagagaagaggctttctggaaagtcaagaaggttcagggggatttgaaagggctctttcccaggatattctggaaccactggcaggcagattctttcagggggaagccagggaagtttacaacttgtccactgggtctagggagaaaggttaaagccagggtatggctccaggctacctttgggactgggctgacccaggcctccgggccgttcctgaacagggaatgggagggtggccttcctgctttgtgggatgtgcactgctgaccattggtggccagggctgaggccactttgcccagggagaaatggaggcagggggt

SEQ ID NO: 675077 - DNA, 1381 bp, Homo sapiens
tcattctttcactcggcaacattttctcaactccatgctgggtgccaggccaatgacgaacaagacaggtgcgtttctggcctccaggaggtaacagccatgacttcctggtacaagcagaaaggggcagataaggccaaactcccctgccctgtcatcccccaggctggagacctcttcttcctcttggctcagaaggcccagggtccctccttgtttgtagtgggtccatctgcccgctagactgagccccttgagggcagggctgagtcttgtctactttacaaatgaccataggtcctggaatcagatagactcgggtttaaatcctgttgtggctccttatcacctaggatgctaccaatccagcaagttctagtgagtctaatgcttgtgtcaagctctcagcccatcttgccacacactaagtgctcagtaaatagcagcagttcttcttatcattggcacaagtactattgttactctggcctctcccctggggcctgctcccacacagggcctgtgttagagccaaaccaaactggctaaaggtggctactcctgtttccccaggtcacaaaggctgggtctttctctgtctctccctagcttttccagagttgtaggttaaatgtaggggctcaggttccagcctctgggaaaggagacaccatgtccaggctctgtttccacccattgttgtagagagcattgtctttcttccatggcatcctcctccccactcaggttcctaagcccagctgctgcagcccctctcacccatgcctgagcagaggaggggcccctcccttgcttggaaccccttacctagtagagctgtgagagacatttgctttcttgtctctcatttcatctttttttagccttgtgacagtcccgtggggcagatagagcagggagcatatctctcttttacagaaggggaatccaaagcccaaagaggttcctcagcaaggactgtggtgtaggtctcatgactcccaggccagtgtgtctcactaagctggctccggcaggccctgggcagagtaagrcggagagaagaggctttctggaaagtcaagaaggttcagggggatttgaaagggctctttcccaggatattctggaaccactggcaggcagattctttcagggggaagccagggaagtttacaacttgtccactgggtctagggagaaaggttaaagccagggtatggctccaggctacctttgggactgggctgacccaggcctccgggccgttcctgaacagggaatgggagggtggccttcctgctttgtgggatgtgcactgctgaccattggtggccagggctgaggccactttgcccagggagaaatggaggcagggggt

SEQ ID NO: 675078 - DNA, 1381 bp, Homo sapiens
tcattctttcactcggcaacattttctcaactccatgctgggtgccaggccaatgacgaacaagacaggtgcgtttctggcctccaggaggtaacagccatgacttcctggtacaagcagaaaggggcagataaggccaaactcccctgccctgtcatcccccaggctggagacctcttcttcctcttggctcagaaggcccagggtccctccttgtttgtagtgggtccatctgcccgctagactgagccccttgagggcagggctgagtcttgtctactttacaaatgaccataggtcctggaatcagatagactcgggtttaaatcctgttgtggctccttatcacctaggatgctaccaatccagcaagttctagtgagtctaatgcttgtgtcaagctctcagcccatcttgccacacactaagtgctcagtaaatagcagcagttcttcttatcattggcacaagtactattgttactctggcctctcccctggggcctgctcccacacagggcctgtgttagagccaaaccaaactggctaaaggtggctactcctgtttccccaggtcacaaaggctgggtctttctctgtctctccctagcttttccagagttgtaggttaaatgtaggggctcaggttccagcctctgggaaaggagacaccatgtccaggctctgtttccacccattgttgtagagagcattgtctttcttccatggcatcctcctccccactcaggttcctaagcccagctgctgcagcccctctcacccatgcctgagcagaggaggggcccctcccttgcttggaaccccttacctagtagagctgtgagagacatttgctttcttgtctctcatttcatctttttttagccttgtgacagtcccgtggggcagatagagcagggagcatatctctcttttacagaaggggaatccaaagcccaaagaggttcctcagcaaggactgtggtgtaggtctcatgactcccaggccagtgtgtctcactaagctggctccggcaggccctgggcagagtaagacggagagaagaggctttctggaaagtcaagaaggttcagggggatttgaaagggctctttcccaggatattctggaaccactggcaggcagattctttcagggggaagccagggaagtttacaacttgtccactgggtctagggagaaaggttaaagccagggtatggctccaggctacctttgggactgggctgacccaggcctccgggccgttcctgarcagggaatgggagggtggccttcctgctttgtgggatgtgcactgctgaccattggtggccagggctgaggccactttgcccagggagaaatggaggcagggggt

SEQ ID NO: 675079 - DNA, 651 bp, Homo sapiens
tgcttcaccttgggggcccctggtggggggtgtctcaccaaccttgcttgtgggtgccaaaagcagctgcctgaatggtgtgatgccatgagaggcaaagggaaggcctttgtgcactaaacatcctccctgtggccctgacagcatttctgaaatgcccttgccccatactcagctgagattttgaaagctcctaataaaacccacagaatcagagactccttggagcccatatggtggggcctttcctgactcagaaatcccctctacaatgtggtccactctttgctcaccctctcccagtggcaaggagctcactacctcctaagacagcacattggctggaaaatrctggctatctttcagttgtctgctgtcttccagcagcctgttcctcatcctgcctctaggtacacacctttctttcctcttcctgtggcaaaaagccttctgggagggtaggggcagggactgtgcctcaatacctcatctcagtatctccagtgactagcatagtgtctgactggcagaaagcatttgttcactatatgtatgatgagtgactgcaaagttgggtgaaaagatggatggatggatgaatggatggaagaatgaaaggatggatgaatggatggaaggaaggatgatgga

SEQ ID NO: 675080 - DNA, 587 bp, Homo sapiens
  misc_feature 510: n = A,T,C or G
gtcattccggtactgaatataaaccaaatgtgggtcacttatccatacccaaatgaaatgccattggcccaccctggagccacagggactgaaaatgggaagagaaaggatgtctgacagaggaaaatggggtactgaaaactataagaaggaatttcagctactcaggagattgaggtgggaggatcgcttgagtccagcagttcaaggatgtagtgtggtatgattacacctgtgaatagccactgcaacccagcctgggcaacatagtgagaccccatctctatagaaaaaaaaaactacaagaaagaagaatgattctggacgtcaaaagaaaagatatttgttacgagtattcaaaaaatactgccatactccatgacttayctggtgaaactatcccttttattcttagcaacagtttagttcttcacttagggctgagagaattatgaatcgtactttctgggaggaaatatcatcacagtcaccattcattaacccaatatntgagcacctgctatctactatgtgtttggcagtatctgggcatttgggatacatcagtaaacaaaacagacccagat

SEQ ID NO: 675081 - DNA, 621 bp, Homo sapiens
atcaaacaaagcaaacgccaaagtggggatggagggagggactaacagaaaccatggaaaccgcggagccagccgggaagaaggcaccacccggacaccagcatggggctgtcgtgtgatggccatgactcccctccatgttgtcattgtcaatgttctctataggtgtggcagctgaggtgcaaaaggtatagtaacccactcaaagttgtaccactagtgaggttttgagtaaggatttccctccaagactgcccgaccctaaaactccatggcgcaaaaggataggttttattttgcttttcttttttttcccttaagaaagtaaatttggtcaggtgcggtggctcatgcttgtaatcccagcactttgggaggccgaggtgggtggaktgcttgaggccaggagttcgagaccagtctggccaacaaggtgaaaccccatctctactaaaaatacaaaaattagccgggcgtggtggtgcgcgcctgtagtcgcagctactccggaggctgaggcaggagaatcacttgaacctgggaggcagaggttgcagtgagctgagatcacgccactgcactccagcctgggtgacagagtgagactccatctcaaaaaaa

SEQ ID NO: 675082 - DNA, 613 bp, Homo sapiens
tttaaaaatatcactttaattagctgggcgtggtagcgggtgcctgtaatcctagctgctagagaggctgaggcaggagaatcacttgaaaccgggaggcagaggttgcagtgagccgagatggtgccactgctctccagcctaggtgacagagtgagacactatcttaagaaaaaaaaatatatatatatatacatatwtatttatttatttatttattttatttatttatttaatggctgtaccctatattcttcttgatttctagccttttattggctctcagattgccagagttgggactcaatagtaagtaaccattttgttgaggtggtagtgattctaccagggtgagttatcatgacagcagaatcactgcgtttttctctctactctgtggcatagactctatgccatagagtgacgtgtgaaaggcttgaggctccctacctacgagacaccctggtccattctagcagtatggcacgtgctgactgggttttgagtctcttgctgtaaaatcacattactgcacttccctgcattttctcatccaaaaatggggattacctgctttgtggatcggtttgcagatgaaataacacacgcaggg

SEQ ID NO: 675083 - DNA, 989 bp, Homo sapiens
agaaaataagtgtgtctgctaataaaagacattttcttttttttctccctgatagcatcttggtagatatggcctgattcaatatttgaatggaatggttggcctgaaaataagacttcagacaaaaataaatgagattgatggaaatacatcatcagtgcacaaaatccaaggcatctggtagaattctattacccattttttccacttggggagaaagattagtttctgctgctttctgtaagtgcagcagagggaaggttgtggttttggttgagaaagcattcttattatccaccactatttttagaagttttagacgtctatcttattgacttgagtttataatttagacttgtaaccattagaaaaaataggccttcccccttgaaatttctcatgcatgcttttagtccagaggagaatttttttgaaagtttaccaacctttccttatcatcagggttatagagctactcaaagagaaaagagtgctattttatccataatgtcctgggacactccctagattyccactccctacccgaaattcatggtatccctgaggatctgtgggtcactgaggatccacagtatatgaattcaagagttggagaagttctgagtagtacatactgaacattcattcatccaacttatattacttgctgtctattttctgtttagaggtcgtatttggagtatatagggtgggggtcggaggtgctcatgtgagacattacagagatggactctttggaaaaattgagggtagctttagtagatgctgctggccccatagagtgttacactccccttctcactgctctaggtattacccgataagagcttgctgtggtctgaagtttgtgtcccctcaaaatttataggttgagatgtaattaccaagtgcagtagtattaagaagtggtacctttgggaggtgattaggtcatgagggccccaccctcatgaatgggagtagtatcc

SEQ ID NO: 675084 - DNA, 989 bp, Homo sapiens
agaaaataagtgtgtctgctaataaaagacattttcttttttttctccctgatagcatcttggtagatatggcctgattcaatatttgaatggaatggttggcctgaaaataagacttcagacaaaaataaatgagattgatggaaatacatcatcagtgcacaaaatccaaggcatctggtagaattctattacccattttttccacttggggagaaagattagtttctgctgctttctgtaagtgcagcagagggaaggttgtggttttggttgagaaagcattcttattatccaccactatttttagaagttttagacgtctatcttattgacttgagtttataatttagacttgtaaccattagaaaaaataggccttcccccttgaaatttctcatgcatgcttttagtccagaggagaatttttttgaaagtttaccaacctttccttatcatcagggttatagagctactcaaagagaaaagagtgctattttatccataatgtcctgggacactccctagattcccactccctacccgaaattcatggtatccctgaggatctgtgggtcactgaggatccacagtatatgaattcaagagttggagaagttctgagtagtacatactgaacattcattcatccaacttatattacttgctgtctattttctgtttagaggtcgtatttggagtatatagggtgggggtcggaggtgctcatgtgagacattacagagatggactctttggaaaaattgagggtagctttagtagatgctgctggccccatagagtgttacactccccttctcrctgctctaggtattacccgataagagcttgctgtggtctgaagtttgtgtcccctcaaaatttataggttgagatgtaattaccaagtgcagtagtattaagaagtggtacctttgggaggtgattaggtcatgagggccccaccctcatgaatgggagtagtatcc

SEQ ID NO: 675085 - DNA, 989 bp, Homo sapiens
agaaaataagtgtgtctgctaataaaagacattttcttttttttctccctgatagcatcttggtagatatggcctgattcaatatttgaatggaatggttggcctgaaaataagacttcagacaaaaataaatgagattgatggaaatacatcatcagtgcacaaaatccaaggcatctggtagaattctattacccattttttccacttggggagaaagattagtttctgctgctttctgtaagtgcagcagagggaaggttgtggttttggttgagaaagcattcttattatccaccactatttttagaagttttagacgtctatcttattgacttgagtttataatttagacttgtaaccattagaaaaaataggccttcccccttgaaatttctcatgcatgcttttagtccagaggagaatttttttgaaagtttaccaacctttccttatcatcagggttatagagctactcaaagagaaaagagtgctattttatccataatgtcctgggacactccctagattcccactccctacccgaaattcatggtatccctgaggatctgtgggtcactgaggatccacagtatatgaattcaagagttggagaagttctgagtagtacatactgaacattcattcatccaacttatattacttgctgtctattttctgtttagaggtcgtatttggagtatatagggtgggggtcggaggtgctcatgtgagacattacagagatggactctttggaaaaattgagggtagctttagtagatgctgctggccccatagagtgttacactccccttctcactgctctaggtattacccgataagagcttgctgtggtctgaagtttgtgtcccctcaaaatttataggttgakatgtaattaccaagtgcagtagtattaagaagtggtacctttgggaggtgattaggtcatgagggccccaccctcatgaatgggagtagtatcc

SEQ ID NO: 675086 - DNA, 622 bp, Homo sapiens
tggacgtagaagaatatgtctaccataacttgacatagcccctatcctgtttattttatgctacatacttatttaactaaatatttactgtctattctttatctggtttataactagatataaacttcatgagggcaagaatatatttttgttcactactgcrgcttcagtgtccagataagtgccaggcacatggtttataaatatccacggaattaatgaatgtggttcccagacaagcagcatcagcaccactggggagctggttagagatacagattcttcaactccatctcaggcctactgaatcagaaactctgggagtaaagcccagcaatctatatttaacaagtccacctggtgattttgatgcaaataaagcttgagacccactgctcttattcttacaccccttatgtacagataatagggttggaggggctaaattaatctctggggtgacacacctggattgtaaccacacatatgtctgtttcctgaggctgcccactcaaccacaatactgtgatggttgcattcgaggttatttttctctcaaagaaacgttcgtattttcctccttggaaggaggcaacctgcgcaatttcctactctcaaggca

SEQ ID NO: 675087 - DNA, 622 bp, Homo sapiens
tggacgtagaagaatatgtctaccataacttgacatagcccctatcctgtttattttatgctacatacttatttaactaaatatttactgtctattctttatctggtttataactagatataaacttcatgagggcaagaatatatttttgttcactactgcagcttcagtgtccagataagtgccaggcacatggtttataaatatccacggaattaatgaatgtggttcccagacaagcagcatcagcaccactggggagctggttagagatacagattcttcaactccatctcaggcctactgaatcagaaactctgggagtaaagcccagcaatctatatttaacaagtccacctggtgaytttgatgcaaataaagcttgagacccactgctcttattcttacaccccttatgtacagataatagggttggaggggctaaattaatctctggggtgacacacctggattgtaaccacacatatgtctgtttcctgaggctgcccactcaaccacaatactgtgatggttgcattcgaggttatttttctctcaaagaaacgttcgtattttcctccttggaaggaggcaacctgcgcaatttcctactctcaaggca

SEQ ID NO: 675088 - DNA, 1218 bp, Homo sapiens
tttatcattattctttttcaattctactttcattaggttttaaaccgatctagttccaaagacatatggctttattaaaagacattgcaaattttcttatkatgataaacagataataagatgccttataacaaaggcaaaaaattattcagttatatttgtaattgtgaatctattatgaaggtatgatgaaacagtcaagtttaagcaatataagttgggtattgcattaaattttcttaaagtgctccaaattaaaatgaatcacatttaaaaatccatatatccatggtattccctttttggcttctttttttttttttttttttttttgagatggaatctcgttatgttgctcaggccaggctgaagtgcaatggtgcgatcttggctcactacaaactccacctcctgggttcaagcgattctcctgcctcagcctcccgagttgctgggattataggcgcccaccaccacacctggctaatttttgtatttttagtagaaacggggtttcttcatgttggccaggctgatcttgacctggcctcaggtgatccacctgccttggcctcccaaagtgctgggattacaggcatgatccaccacacccgacccccttttggcttctaatagcaatgatagaacatatcttgggagaaaaactctccagaatttgtttgtaaaaataacccttgtttgtgcctaaagccactctttgtttactagtattccaaaataatttccaagaaataagtcaggcttcaattagaagcacctactaatccacaaactgtgaataacacataactccaagtacaaatcagattagctggtactgtcatgcttttttccacaaaggatggagggtgctaaatgtcacagcatatgtagaggtatttagaatcagtatttagaattagtagactgcatttttccccaataggtttcatagaatgggcaatattatcaaagatgtcaatagatagtctctgaaaaataaagtttcatggccacatatatttgggaaactcagaatgtacaattttttatatttggagaatgttgacacctattactatattaaagactctgagatgtactataagaaagaaatctgttgaccttgtttgttgacctcagtgttttcctcactctttacatggaatacaattgaggaaagctgttttagctatgtggttggaaatgaggaacacc

SEQ ID NO: 675089 - DNA, 1218 bp, Homo sapiens
tttatcattattctttttcaattctactttcattaggttttaaaccgatctagttccaaagacatatggctttattaaaagacattgcaaattttcttattatgataaacagataataagatgccttataacaaaggcaaaaaattattcagttatatttgtaattgtgaatctattatgaaggtatgatgaaacagtcaagtttaagcaatataagttgggtattgcattaaattttcttaaagtgctccaaattaaaatgaatcacatttaaaaatccatatatccatggtattccctttttggcttctttttttttttttttttttttttgagatggaatctcgttatgttgctcaggccaggctgaagtgcaatggtgcgatcttggctcactacaaactccacctcctgggttcaagcgattctcctgcctcagcctcccgagttgctgggattataggcgcccaccaccacacctggctaatttttgtatttttagtagaaacggggtttcttcatgttggccaggctgatcttgacctggcctcaggtgatccacctgccttggcctcccaaagtgctgggattacaggcatgatccaccacacccgacccccttttggcttctaatagcaatgatagaacatatcttgggagaaaaactctccagaatttgtttgtaaaaataacccttgtttgtgcctaaagccactctttgtttactagtattccaaaataatttccaagaaataagtcaggcttcaattagaagcacctactaatccacaaactgtgaataacacataactccaagtacaaatcagattagctggtactgtcatgcttttttccacaaaggatggagggtgctaaatgtcacagcatatgtagaggtatttagaatcagtatttagaattagtagactgcatttttccccaataggtttcatagaatgggcaatattatcaaagatgtcaatagatagtctctgaaaaataaagtttcatggccacatatatttgggaaactcagaatgtacaattttttatatttggagaatgttgacacctattactatattaaagactctgagatgtactataagaaagaaatctgttgascttgtttgttgacctcagtgttttcctcactctttacatggaatacaattgaggaaagctgttttagctatgtggttggaaatgaggaacacc

SEQ ID NO: 675090 - DNA, 1551 bp, Homo sapiens
tatggatccacagggcaactagttcacctgggagtcgattgcaacgaacacctgtaggggagtagggaaatgagacaaggaagggaaggagccagcagagggttcaatatcagtcaagttaccactgggggcaactggagcaggagttgctgagtaactcagggagccagtgtaggacacatgcttcagttatcccagtgaaggggtaaaacagaaatataatttatatgtcaactcccctcagtcattgggagagagctgctgtgaagtggaggagtggtgaatccttcaaaatttttgaccacctggcaggtacgcaaagcaatctttggggcgagagaaagatgttagaaaaaaaaattgctggcattttgaaggcaaacagatgcagggtggaggaaagggtgcattaggggtactgacggtgtctgctacaaagctaaaactcaatttgaaagaacaaaagtaaaaaagggttaacggaatcagaaaagacagatagaaagatgccagtcagaaaaaaaaaaaagctctgtgatagaatctcagcttagctaatccattcctaatttccagcacagaccattcacaaattatactgaaatgttgcttgttaaaaagaaggcactaccctccacatttcatggttgaagaagaattgaacccaacttttgcacagtttccataattttccaactcacacctcttttcttcagtttagacccatctccctgccacccaacgtgctcatgccaggctcactttaactgctatgcttttctcatgctgcttagccttcctggaatcctctccacatcatggaaaacttccccatctgtaagatctacctcagactctcctctgctcagtgagttcctgccaacactccacacttcctgattgccctctcctcttcttatctggccaatggttgtggtaggcagaaaaacggcacctgtcctaatccctgaaacctgtgaacatgttaccttccttggtaaaggggattccacagatgtgattaaactgagatgagatattccttttctccaagtgagcccaatgtaatcacaagtgtctttaagaaayggaagagggaggatgaagattcagagtcaaagagagatctgaagaggctatactgctggctttgaagatggaggaagaggccacaggccaagggatacagatggcctgtagacctcaaaaaagtcacaggaacagattccctctagagcctgccaacaccagtggaacctgttttggacttctgacctccagaactgcaagataataaatttgtgttgttttaagtgactatgcttgttgtaatttgttacagcaacaagaagaaactaataaagtggtttttaaggcatgctcctcagcattctgcatatttttagagcccttctgcaacaaattcaactagagaactctatatttttcagatttacaacatggacttctatcatatttcatttgaagaaaatatttgcccttaaaaataggtgaaatcctataacatatcacatatcatagtttacgtat

SEQ ID NO: 675091 - DNA, 1551 bp, Homo sapiens
tatggatccacagggcaactagttcacctgggagtcgattgcaacgaacacctgtaggggagtagggaaatgagacaaggaagggaaggagccagcagagggttcaatatcagtcaagttaccactgggggcaactggagcaggagttgctgagtaactcagggagccagtgtaggacacatgcttcagttatcccagtgaaggggtaaaacagaaatataatttatatgtcaactcccctcagtcattgggagagagctgctgtgaagtggaggagtggtgaatccttcaaaatttttgaccacctggcaggtacgcaaagcaatctttggggcgagagaaagatgttagaaaaaaaaattgctggcattttgaaggcaaacagatgcagggtggaggaaagggtgcattaggggtactgacggtgtctgctacaaagctaaaactcaatttgaaagaacaaaagtaaaaaagggttaacggaatcagaaaagacagatagaaagatgccagtcagaaaaaaaaaaaagctctgtgatagaatctcagcttagctaatccattcctaatttccagcacagaccattcacaaattatactgaaatgttgcttgttaaaaagaaggcactaccctccacatttcatggttgaagaagaattgaacccaacttttgcacagtttccataattttccaactcacacctcttttcttcagtttagacccatctccctgccacccaacgtgctcatgccaggctcactttaactgctatgcttttctcatgctgcttagccttcctggaatcctctccacatcatggaaaacttccccatctgtaagatctacctcagactctcctctgctcagtgagttcctgccaacactccacacttcctgattgccctctcctcttcttatctggccaatggttgtggtaggcagaaaaacggcacctgtcctaatccctgaaacctgtgaacatgttaccttccttggtaaaggggattccacagatgtgattaaactgagatgagatattccttttctccaagtgagcccaatgtaatcacaagtgtctttaagaaacggaagagggaggatgaagattcagagtcaaagagagatctgaagaggctatactgctggctttgaagatggaggaagaggccacaggccaagggatacagatggcctgtagacctcaaaaaagtcacaggaacagattccctctagagcctgccaacaccagtggaacctrttttggacttctgacctccagaactgcaagataataaatttgtgttgttttaagtgactatgcttgttgtaatttgttacagcaacaagaagaaactaataaagtggtttttaaggcatgctcctcagcattctgcatatttttagagcccttctgcaacaaattcaactagagaactctatatttttcagatttacaacatggacttctatcatatttcatttgaagaaaatatttgcccttaaaaataggtgaaatcctataacatatcacatatcatagtttacgtat

SEQ ID NO: 675092 - DNA, 1551 bp, Homo sapiens
tatggatccacagggcaactagttcacctgggagtcgattgcaacgaacacctgtaggggagtagggaaatgagacaaggaagggaaggagccagcagagggttcaatatcagtcaagttaccactgggggcaactggagcaggagttgctgagtaactcagggagccagtgtaggacacatgcttcagttatcccagtgaaggggtaaaacagaaatataatttatatgtcaactcccctcagtcattgggagagagctgctgtgaagtggaggagtggtgaatccttcaaaatttttgaccacctggcaggtacgcaaagcaatctttggggcgagagaaagatgttagaaaaaaaaattgctggcattttgaaggcaaacagatgcagggtggaggaaagggtgcattaggggtactgacggtgtctgctacaaagctaaaactcaatttgaaagaacaaaagtaaaaaagggttaacggaatcagaaaagacagatagaaagatgccagtcagaaaaaaaaaaaagctctgtgatagaatctcagcttagctaatccattcctaatttccagcacagaccattcacaaattatactgaaatgttgcttgttaaaaagaaggcactaccctccacatttcatggttgaagaagaattgaacccaacttttgcacagtttccataattttccaactcacacctcttttcttcagtttagacccatctccctgccacccaacgtgctcatgccaggctcactttaactgctatgcttttctcatgctgcttagccttcctggaatcctctccacatcatggaaaacttccccatctgtaagatctacctcagactctcctctgctcagtgagttcctgccaacactccacacttcctgattgccctctcctcttcttatctggccaatggttgtggtaggcagaaaaacggcacctgtcctaatccctgaaacctgtgaacatgttaccttccttggtaaaggggattccacagatgtgattaaactgagatgagatattccttttctccaagtgagcccaatgtaatcacaagtgtctttaagaaacggaagagggaggatgaagattcagagtcaaagagagatctgaagaggctatactgctggctttgaagatggaggaagaggccacaggccaagggatacagatggcctgtagacctcaaaaaagtcacaggaacagattccctctagagcctgccaacaccagtggaacctgttttggacttctgacctccagaactgcaagataataaatttgtgttgttttaagtgactatgcttgttgtaatttgttacagcaacaagaagaaactaataaagtggtttttaaggcatgctcctcagcattctgcatatttttagagcmcttctgcaacaaattcaactagagaactctatatttttcagatttacaacatggacttctatcatatttcatttgaagaaaatatttgcccttaaaaataggtgaaatcctataacatatcacatatcatagtttacgtat

SEQ ID NO: 675093 - DNA, 621 bp, Homo sapiens
tgacaagagtcatcttttccccagtacaagccaagggcacttgaaataatgaggctcacagttaaaaacagaaacattcatactatccatgatagtatgcttatgtatgtaaaatgtaatttatcatacaaccatgcaaatgatcaaaaatagagcctgctttgggaagagctacgaggctggccaagcctttatgaccttctttaactttctttacacagctttcttccttccaactcagtcctagctccctttttcccggaagcccagaaatgagaaatatccaamcttggtcagaggtccttgctgctctttctgttcctgttaccattttcttttcctaatgcatatactcagcccttgaatagaaaatgaaaattcaaaaatctctccagggatggtgggaggagagtagttgtggagatggtaatttctattgacggtatatctttagaaaatgagaattactcattgttcctctgcagttacaaatcacaacagatctaaatttataaaggtagtattttgaaactgttatcaagtcaaaagagcaagtagttgaataattttacttgtgactcataagaaaaactccttgaaatgggagaagtagaagaaaaa

SEQ ID NO: 675094 - DNA, 646 bp, Homo sapiens
atccagctgtcgcctgttttgtaaataaagttttattggaacagttggaaaacagccacacccgtttgtttacagatgggttgggttatatttgctccacaacagcagcgctaagtagctgggacagagagcatctggcctgcaaagctgaaaatattttactgtacaacaccacagaaaaagtttgcagacscctgctttaagagttttgcagcactgaggccttaactttagacaagatgcaatattgaagaatgagcagaggaaggggatgctcattaaaaaggatgagaaggagccatcagagatagcgccagagaaccaggaatgaggaggacaacctggaggcaaacagaagagagattttctttttcaagagaaatgatatgaatgacagtgtcttgtgtcatcaaagtttaagtaaggtaagggttgaaaactctcttttgaatttagcacctggaaactcattggagttaccatcactatcagttacttaccttcattaaatttgtacatacatggagacctattacatcatattctaaattcctaaagtttgtgagttcacgggaaatgaggaaagggaagaggtgggactttggagagctgttttaaggagacgtgaacacacccaggtgcagtg

SEQ ID NO: 675095 - DNA, 661 bp, Homo sapiens
ccctccccccatcttggaaatccttgtatcaggtttttgagtcatgatgcaagaatctgggactgagacaaaaagtaacggttcagccatccagaatgggtcgggcggcagcaaccacttactagagtgcggcggtcttcgggaggggcggtccaacggagagacgccggccgtggacatcggggcagctgacctcgcccacgcccagcagcagcagcaacaggtactgggctttggagtcttgggaggtggaggtggtgggtgcgaatttyactgctgaattttacacttaatcgcgatctcgcgatcagtgttttgcgttcacctgtctgtccatctgtctttctgtctgtcagtggcatctcataaaccatcagccctctaggagtcccagcagttggcttaagagactaatttcaagcccttgggagttggaagtcctgcaggtccccttgtggggagcagttgctgagacgaagatgagtggacctgtgtgtcagcctaacccttccccattttgaataaaattattctttggagaaatggttcccactgctttcatgcaaaaataaaaattaaacgaaaaacaggcttaagcctgtgaagaaggaaataagagctaaggaataaaagagagaaaaagagtagatgagtaaggaga

SEQ ID NO: 675096 - DNA, 661 bp, Homo sapiens
ccctccccccatcttggaaatccttgtatcaggtttttgagtcatgatgcaagaatctgggactgagacaaaaagtaacggttcagccatccagaatgggtcgggcggcagcaaccacttactagagtgcggcggtcttcgggaggggcggtccaacggagagacgccggccgtggacatcggggcagctgacctcgcccacgcccagcagcagcagcaacaggtactgggctttggagtcttgggaggtggaggtggtgggtgcgaattttactgctgaattttacacttaatcgcgatctcgcgatcagtgttttgygttcacctgtctgtccatctgtctttctgtctgtcagtggcatctcataaaccatcagccctctaggagtcccagcagttggcttaagagactaatttcaagcccttgggagttggaagtcctgcaggtccccttgtggggagcagttgctgagacgaagatgagtggacctgtgtgtcagcctaacccttccccattttgaataaaattattctttggagaaatggttcccactgctttcatgcaaaaataaaaattaaacgaaaaacaggcttaagcctgtgaagaaggaaataagagctaaggaataaaagagagaaaaagagtagatgagtaaggaga

SEQ ID NO: 675097 - DNA, 1806 bp, Homo sapiens
ccgcctttcctgattcctcggaatcaggaaatattattaggctttgttaataataatagatggtttatgaccggttttgttcttgatttacttattcaaaacatagttatggcgccactcagaaacaggtgaattaaaaagaatgaagtatctttgggcctttctgaaagctgcaggaactcttgtggggaggaagaagatagggacaaagtgctcaaaccattttcttggaatctgtgtcagagaagctaagcttgtttgggatgcaacttggagacaagctmtaaagcatgttttattttctccttgcgaagagttttttaaggaataaggaatgattagactgttagctccttacaaggtggtggaaccaacatgagcctgtggaacctgttgggagaaagatgcaacaaagcgaaagaaaggaaaagtaacagaccagcaaaagtcttaattcagaggacttcctgcaagtgatttgatctttctttcattggcagcccaaacccatttgtgcctgcaccactggctcacttcagctggaatttgtgatgcttgttgtgtataaactttgtgcatttaagttagtgcagatggccaaattccaaccagtgaggttgttagcaaaacccagcagtagatagtaaaagggtctccgtgtatttgtgcaagtacatgttcatgtgatgttctcagccattttattcagaacaaatagttaatgttgctgaatgctatcttctgtgcccttaccagacaagtgtcaagattgcccatttctttatgaagcacttgagcacttgatatggggctactactgactgatgtgatactaaataattaatatttagagtacattaattacataaatgggaaattctgattttttttgaggagctaaaaatcattcaggatctcaaagtagtaagccagccaaaaaactttacatataaaccatcaaaacatgtgcacacacacatgcgcccacacacacaacagtgataacaaattggctacatagaataaaattataaaagcatatttcaccaacatcttccttaaaaagtatcagttgcaaacatatttatccacatcttcctttggctgtgaccactttggaaaatttgttgttatgggttattgacacaaaggtcaagaaatgtattatgattagacttttatactgtttttaaatgtttttatgacagttttttctccgtatgtcgttgacacattttgggaagaaacaaagcagtggggtctatcactgtggctaaaaccccctgtattgtgattagcaaagccttttgaagtcttttaaaatataacattgacagctgttcaactcccctaagtatatgataaggcttttaacaggttgttggggaaaagggaaatctgtagatgaaataagaaaaactacaggcctgaaaatatttctacaggactagagttatcagagttttcttccagactgaaaactgtgacaattagacagtttggagaaatgtgagcattctacaatggactatggttgttttcatcatttttattctacaggtttttacttgaagtgagaataccagcagtgagaaaatcatagccatgctgaattcattactgcggtagtcacacaaaaccacggataaaatttcaataactgcaggccacagttgagtaaacagttgcactgaaatttaattcctgttgacttttcccccattcctcgccaggggcacattcagattccgtagtacaaagacaacaggggttacagctttgattaatgtaggacagtggaagaga

SEQ ID NO: 675098 - DNA, 1806 bp, Homo sapiens
ccgcctttcctgattcctcggaatcaggaaatattattaggctttgttaataataatagatggtttatgaccggttttgttcttgatttacttattcaaaacatagttatggcgccactcagaaacaggtgaattaaaaagaatgaagtatctttgggcctttctgaaagctgcaggaactcttgtggggaggaagaagatagggacaaagtgctcaaaccattttcttggaatctgtgtcagagaagctaagcttgtttgggatgcaacttggagacaagctctaaagcatgttttattttctccttgcgaagagttttttaaggaataaggaatgattagactgttagctccttacaaggtggtggaaccaacatgagcctgtggaacctgttgggagaaagatgcaacaaagcgaaagaaaggaaaagtaacagaccagcaaaagtcttaattcagaggacttcctgcaagtgatttgatctttctttcattggcagcccaaacccatttgtgcctgcaccactggctcacttcagctggaatttgtgatgcttgttgtgtataaactttgtgcatttaagttagtgcagatggccaaattccaaccagtgaggttgttagcaaaacccagcagtagatagtaaaagggtctccgtgtatttgtgcaagtacatgttcatgtgatgttctcagccattttattcagaacaaatagttaatgttgctgaatgctatcttctgtgcccttaccagacaagtgtcaagattgcccatttctttatgaagcacttgagcacttgatatggggctactactgactgatgtgatactaaataattaatatttagagtacattaattacataaatgggaaattctgattttttttgaggagctaaaaatcattcaggatctcaaagtagtaagccagccaaaaaactttacatataaaccatcaaaacatgtgcacacacacatgcgcccacacacacaacagtgataacaaattggctacatagaataaaattataaaagcatatttcaccaacatcttccttaaaaagtatcagttgcaaacatatttatccacatcttcctttggctgtgwccactttggaaaatttgttgttatgggttattgacacaaaggtcaagaaatgtattatgattagacttttatactgtttttaaatgtttttatgacagttttttctccgtatgtcgttgacacattttgggaagaaacaaagcagtggggtctatcactgtggctaaaaccccctgtattgtgattagcaaagccttttgaagtcttttaaaatataacattgacagctgttcaactcccctaagtatatgataaggcttttaacaggttgttggggaaaagggaaatctgtagatgaaataagaaaaactacaggcctgaaaatatttctacaggactagagttatcagagttttcttccagactgaaaactgtgacaattagacagtttggagaaatgtgagcattctacaatggactatggttgttttcatcatttttattctacaggtttttacttgaagtgagaataccagcagtgagaaaatcatagccatgctgaattcattactgcggtagtcacacaaaaccacggataaaatttcaataactgcaggccacagttgagtaaacagttgcactgaaatttaattcctgttgacttttcccccattcctcgccaggggcacattcagattccgtagtacaaagacaacaggggttacagctttgattaatgtaggacagtggaagaga

SEQ ID NO: 675099 - DNA, 632 bp, Homo sapiens
tttaatgcaaaggcaaaacagatttacaaaatttatggtatattctcaatgtttaactcaaataagttaatgtttacacacacacacacacacacacacacacacacacacwctctctctcccataaaatgcagcgtgataataatgtgactcacaggatttattcaaaacattacttctgatgtattgaggtgatgtggcccaataatggatctgcaggttcaagttctttgatgaaggattaaattcactcctgtcactgtgtatctgtgatgggaggttaaatctgatttggagagagcattgaaagtccaaaactgcagccataaaaagaatgaaatcatgtttcttactgcaacatggatggagctggcggccattatcgtaagtgaaataactcagaaacagaaaatcaagtaccacatgttctcacttacaagtgggagctaaacattgggtacacacgaacataaagatggaagtaatagacactggagaccccaaaaagggggaaggtgagggttaaaaaattacttagtggatacagtggtccctatttgggcagtgggttcactagaagcccaaacttcagcattatgcaataaatctatgcaacaaacctgtacatatac

SEQ ID NO: 675100 - DNA, 664 bp, Homo sapiens
acctatgtactctctttctctcttcctggcttgcttgctgtgttaactcttcatccatttttgcagcgctagcaaattcttccttagtggtaaaacttgaacccaccatctgatgggtttcgggaccaggcaccattcccgcactgtgtgcctggttggtcaagacracaccaagtcattagaccgggatggcctcttgcactttggaggtttgctctcaacttttggcatccttgtttcctgaggtgtgaaatgagctcctgccttttgatacctgaaatgtgaccttcacttttcgcgccccctcctacgtgattccaatgaggtttgtctttgggtgattgtcacttggttctcagtttccttcatactcttatcagttcttttggagtcggtccagcgcgtcatgtgcccatgcctgttgctgtaaattatcactgcaccgtgaacatgtgtacattactagggcaagagctagcctgggaaacctaagtctgcacattttccgccgtgttgcatgttttctgttctctgcctctgtgtgtgtgcaagacagagagataggctatttgtcaagtcagctagttgcctaggtatctttgtctcacatctggctgtttcctcctagggaaccatccagttggctttccaggcctggaggtga

SEQ ID NO: 675101 - DNA, 664 bp, Homo sapiens
acctatgtactctctttctctcttcctggcttgcttgctgtgttaactcttcatccatttttgcagcgctagcaaattcttccttagtggtaaaacttgaacccaccatctgatgggtttcgggaccaggcaccattcccgcactgtgtgcctggttggtcaagacgacaccaagtcattagaccgggatggcctcttgcactttggaggtttgctctcaacttttggcatccttgtttcctgaggtgtgaaatgagctcctgccttttgatacctgaaatgtgaccttcacttttcgcgccccctcctacgtgattccaatgaggtttgtctttgggtgattgtcacttggttctcagtttccttcatactcttatcagttcttttggagtcggtccagcgcgtcatgtgcccatgcctgttgctgtaaattatcactgcaccgtgaacatgtgtacattactagggcaagagctagcctgggaaacctaagtctgcacattttccgccgtgttgcatgttttctgttctctgcctctgtgtgtgtgcaagacagagagataggctatttgtcaagtcagctagttgcctaggtatctttgtctcacatctggctgtttcctcctagrgaaccatccagttggctttccaggcctggaggtga

SEQ ID NO: 675102 - DNA, 505 bp, Homo sapiens
  misc_feature 2, 3, 4, 5, 6, 7, 8, 9, 10, 11, 12, 13, 14, 15, 16, 17, 18,19, 20, 21, 22, 23, 24, 25, 26, 27, 28, 29, 30, 31, 32,33, 34, 35, 36, 37, 38, 39, 40, 41, 42, 43, 44, 45, 46,47, 48, 49, 50, 51, 52, 53, 54, 55, 56, 57, 58, 59, 60,61: n = A,T,C or G
  misc_feature 62, 63, 64, 65, 66, 67, 68, 69, 70, 71, 72, 73, 74, 75, 76,77, 78, 79, 80, 81, 82, 83, 84, 85, 86, 87, 88, 89, 90,91, 92, 93, 94, 95, 96, 97, 98, 99, 100, 101: n = A,T,C or G
annnnnnnnnnnnnnnnnnnnnnnnnnnnnnnnnnnnnnnnnnnnnnnnnnnnnnnnnnnnnnnnnnnnnnnnnnnnnnnnnnnnnnnnnnnnnnnnnnnncacacaaacctatacttaaaataaaagcaagtaagaaattttaccttgtttctacagttctagtttttataagtggttacaaagccacagttgatatttatacattttttcttccacaacatatttcctctttctcttatctttaccaggtccttagcagggttggagttacttgtcttctagagtgacccacacctttatttgttagatctgaatggctctgtgtctctgtctttaratgtttgtgatctgccattcacttttcccattggacatggaagtactaaaagagccctacagaatcttctgtgtttcaaacatagtcttctcagagtctcatattttaaaatcctgattgcaagcattacatcagtaagtgcctagtaaagaaaaaaatatggctt

SEQ ID NO: 675103 - DNA, 1386 bp, Homo sapiens
tgtctctctttgaagttcatgcctgcttttctgttcataacaggtacaacagttgattgctaaataggattcttctgaagcactgtctgttttaaaacggtgatccctcttagtagagctcccatagaatgccttccgaagttctcttctgctctgtactctctggctgaaagtttyagaaacagagcgactagagtggtctagagtcagaatacagtgtaaggaagcaaaggggatgaaaattgagaaaatcgtgaagtctgtattcttcatgagattttgcagctgaataggactcagaatagttgtagttctcttgggctagataattgtttgaactgataaataatttagataccggaattttctctctcctttttcaggagccacctcctagataatcttcctcttcagctggtactgttttataaatgaagcctctgaattgttcattagtattttcagacctcttttatctagtaagttttatgagagaagacatttttcctgatgaattggaatgttttgattaaaattttttttttatgttttaagttaatttattagacattagtaagcacttaatttttggggcacagtatgtgtggagactaatgctcaactacaaagttagtttctccatagatgttatgtagaaacttctgtaatcttcagtacctagtttaaaaaaaattagaattaggaaatgatctatatagaagtgaataaatttagtacacagtgactagattgatccctagattgggggatttttgctaatttaatattagatttaatcctaatagttaaatcaactggtaatgccatgaataattttgatccttttgtggttttgaaagatgtattttcagaattaattttattaccctcataacatgctcagagaactttggtgtaaagataatgcgttgtttttcttggtggccaatacaatcttttaaagtgtactttttagcttaggtatccctggaagtttttgttctcagtttaatgatcttgtcaagtaaataccacctaattatctattcctattccgctatcatttatccaggcaatagagttttatattaaataatgctttaggaatgagagatttatttgtaattcctattcagctatcttgtctataaagcaaaattcatacttacagtagtttgtattctcttaacttctcggttaataggcagtgtggtgaagtggaaaaaccctacaaactaacacaatgacaaatacatcttggatatttttgtgtagttcccttgtcattttaactttttctaatctgctaatgaatcagactttagaggaaagagataagagctgaccttctgacttcctccatataactgagtaaacctatcggga

SEQ ID NO: 675104 - DNA, 1212 bp, Homo sapiens
  misc_feature 754, 789, 807: n = A,T,C or G
caatcaagttcctagcgtaaagagcacaaactcctcaataaatacttattatttttaaaaattaaaggatcatacctttaagtcttgttaagaaatagkcaatgttttccctatgacaacaattgttgagggagtttagattcaacgatattacctttccaaactcatgaaactttggcttaagaaggctattatgagaaataaatgagataaaatatgaagtacttggcacagagcctgtacctggtaagtactcagtagctattcttataggaccaggtgggagacagaactaagtatttttctcaaaaccactacttaagtctataccaaactattctattagtaccaatgggagagttactttttaaatcttaggatacaaatcagatgaaaagagcaggcacattaaaaccaaagtagctcatgaaaattttcttataaacaggcaattccctaaactagtttttaagaacatcataagtcaggtgactgttcattggctttgggttgactgctagaaagctgagtgccaaataagtggccagactcgacaaaggccttgagacatatattctttatatcatctccattcttggctcagtttttccctctcttgctctaatcttcccttcctgttgttttttttgtttcacttaaatttcattttgactcatggaaatctgtgagccaccttggattattttctggaacaagatgggttgtaaacaaacacataaacttgggaaataantttcaaaattacatactgtgctcctgacttagagntttcaaatttgccatgtngagttgtaccttgatttaaaatttaagctacaagcagctgtctttggataatactaatttacttttggctcacacatccctatttcaaatcattttctaataaattacttcaacatattttccactttggagaaacaagtggcatggtgacagaaacaagggcgaaccccattcacataagtagttaccaacaacacatcaaccagtgttctctgagcacctgctgcaagctgggtgttgcctctgcactggtttgcaaaccagattccctcaatatcatgtttggtttggggctctgggctgattaacattcataataatcaaggcataatgataaagaaccaaacctaggattgaaaactgcatagattcaataatgtctgaagttcagcaaaaatggtgaat

SEQ ID NO: 675105 - DNA, 593 bp, Homo sapiens
gattacctgtggtcagacagcagctgtaaaagttggggaaagctccactgactgattctttgaagaggagcttgcccagtgaaactccacaggcagaaaaataacatgatgcccctggagatgggggaggtgataaaaaacaaaagaaggcctggtgcagtggcccatgcctgtaatcccagactttgggrggctgaggcaagcagatcacttgaggtcaggaatttgagaccagccttgccaccatcatgaaaccctgtctctactaaaaatacaaaatttagttgggcgtcctggcaggcacctgtaaccccagctacttgtgagcctgaggcaggagaatcgcttgaaacctgggatgcagtgagccaatatcatgtcactgaactccagcctgggcgacagaatgagaatccatcttaaaaaataaataaataaaataaagaacaaaagaagagcttgagtctgtcaggcagggaggacaggtgccagggaaacatgttctaccatagaactttatcaaagtctggtattaacctggaccataggaggcaccacatgctcattttttaagcaccacaaactcatgaaca

SEQ ID NO: 675106 - DNA, 526 bp, Homo sapiens
gctgtccaagaactgcccaggagtgctgagccggcactagtaacccagatacttccgatgaatggatgagtgaacaaatgaaaaatactcagcaaagtgcctcaaaaactagacaaaacagaaaagaacaaagcacccaggtaatctaaaaacctcgtcaactgacgactctatcagagcttaagaaaatactcaatagcattaatttktcttttgggcaattagataaactctcctctaagtctcaactgattcatttgaaaaatgggcatgacaatgtctccctctcttatctctcagagaactaaatgggtatgacaaataaaaacatgttggaaattattattaacatctgaaataacatgtcaatgtcacttccattcttcccccataattttgtaagcattaaaaatattccagcacattaagatgttctcatcctttataggaccacatctgacgataaccatgatttattgactagaacagccaatggtgatattttcaaattttattaaaagtgact

SEQ ID NO: 675107 - DNA, 636 bp, Homo sapiens
tttcttagtattggtcaaatcatagaaaccatgctaagaatttataacttcataagcattttgaatagaaaaaaaacaatgtcaaaagccaacacaacaaactagaaaaagatacttccaacaagtactttaagtgtgactgctattcatttttactgtataaagaactttttatgtatcagaaaacaaaccaacaggaaaaaataggcgtaaacaaagcttacagacaaataagaaactaaaatttgtcttttaaatatttgaaaaggtgctaagctctacttatatatagatacacagacacactcacacacacacacatataaactacattgagacatcacttttcatttatcaatgaagatatagaggaaaaaaactctcytttattgttgtgacagtttaaattgcaaaacttttgcaaaggtcagcttgactacaaatttgataacacacaccacaatttaaaatgtaggtatgttttaatttagcaaatttactcctaggtatttttttcttcaggtactctagtatttaataggtataaacaaagacatatatacaagaacaatcactgaaaaattgtttgcaatacttaaaacacttcaaatgttcaataatagaaaactgaattca

SEQ ID NO: 675108 - DNA, 624 bp, Homo sapiens
caagccccatgatgtctctgtctctctctcctaatcctccataaaaataagacaacwgtatttctggttatgttggggaatatacattcctgaaaaatcccaaatcacttaaaacgttatgggtaagcctgtggaatacatgactaaatgttgaccaagatttgctaaatttagtatgttaaaaatactgaaatctaagttctgtcacagaaataacagcctgtttgaacacatttaccaataacacaagagtgagaagaggtaggactggggagtggtcaaagaggcctgtccaccgagcaatggcactcgaatcagctcggcagcctctctccatatgagcgagtacagtgtgagttcccccattctctccacccagactccccacatgagaattcatctcaccttatcactctccctctccctctctccttgtccctttcattattattaatatgtaattactgttttcaatcataatggctttgctcatgcctgaggccaaagagggctgtgaaaggtggccagaggtctagatggttcctgaaaagtggcggaaacaggtgacttatgtgttatggaaaaacatctcagctggaaattcagagattcctgaggtgactg

SEQ ID NO: 675109 - DNA, 1404 bp, Homo sapiens
ttatccaactgtgtgttgttgaatcaacttttagttaaaatgttagagagggacaaataagtacagtgtgtcgatgtgcggtgctgtgagggcacagaccagtgatcagaacacaacacctgcggcctctcccatcctgacaaagtctctgcatgccaactccagcgacagggtgctaggacagygcagggatgaaatactgaagggacacgtcttcatgaagcagatcaaaatgcaccatcttgttattcacaatatctgggaagagaaaagccatgattttagagacctagtgcagcacacacattttgatctctactttttcagaacagccttcccagcctgcacctcctgttttaggcatctgtcttccctgaggcagctgcagagaccacagtctctcactctcactgccacagctgaggctacatcacggccccagcactggcggctccctgtgcgaggagaggaaaagtgaagcggcccaagcccttggcaaaacacccagcaggctggcttcctggcaaaccacattcacccacatgagcatccttctgcagcgaagagcagctcctcaccagtgagtggaggaactgtgctgagaagagccaagagccaggatcccccaacacctggggcaggctgtgtcacacactgctacatgggatggatccctgcatctcaacggtcctgccaatcccgtgagggccatgggtgatggctaaaatccaaggcatcaggcatgcaaccaagcagggaagtaaagagcacatgagggtgggcaggagcacacagtgtgacaaccaccgagagctcggggagctcagcacagcagccgaggatagctctccagcagatatgagtgagtgacaagaaaccatgtgtgagcaggctgcagagaggccaatcccaggagatgggaggttggggaaaggaccagaaaggacaagcaggagacaaacattctttaggagaggtgtgcaagggcacaggagaggcagagactgagggtggcaggacctagctagaggaggggacaattgagccgacacctgaaggagactaacagagacagaaaaggggctttgggaagttaagaaggtatgagaagttcaacccacggtgttttaaaaaaaatttttgctacatcacaatttgctggtcttcctttctctgctacacgtggagacaccaaagtgaatgttgggaagacacttggcttagtcaaccacctttgataagaactcttccatgttcctcaacagccttggattcagaaagtccccaaaataccaagttcaaagactgatgttgtgcagcgcaggggccccccacaccctgtgtttccacactctgcagacaggaggggtatttcactctctcaccattcacactgtgcttgtc

SEQ ID NO: 675110 - DNA, 1404 bp, Homo sapiens
ttatccaactgtgtgttgttgaatcaacttttagttaaaatgttagagagggacaaataagtacagtgtgtcgatgtgcggtgctgtgagggcacagaccagtgatcagaacacaacacctgcggcctctcccatcctgacaaagtctctgcatgccaactccagcgacagggtgctaggacagcgcagggatgaaatactgaagggacacgtcttcatgaagcagatcaaaatgcaccatcttgttattcacaatatctgggaagagaaaagccatgattttagagacctagtgcagcacacacattttgatctctactttttcagaacagccttcccagcctrcacctcctgttttaggcatctgtcttccctgaggcagctgcagagaccacagtctctcactctcactgccacagctgaggctacatcacggccccagcactggcggctccctgtgcgaggagaggaaaagtgaagcggcccaagcccttggcaaaacacccagcaggctggcttcctggcaaaccacattcacccacatgagcatccttctgcagcgaagagcagctcctcaccagtgagtggaggaactgtgctgagaagagccaagagccaggatcccccaacacctggggcaggctgtgtcacacactgctacatgggatggatccctgcatctcaacggtcctgccaatcccgtgagggccatgggtgatggctaaaatccaaggcatcaggcatgcaaccaagcagggaagtaaagagcacatgagggtgggcaggagcacacagtgtgacaaccaccgagagctcggggagctcagcacagcagccgaggatagctctccagcagatatgagtgagtgacaagaaaccatgtgtgagcaggctgcagagaggccaatcccaggagatgggaggttggggaaaggaccagaaaggacaagcaggagacaaacattctttaggagaggtgtgcaagggcacaggagaggcagagactgagggtggcaggacctagctagaggaggggacaattgagccgacacctgaaggagactaacagagacagaaaaggggctttgggaagttaagaaggtatgagaagttcaacccacggtgttttaaaaaaaatttttgctacatcacaatttgctggtcttcctttctctgctacacgtggagacaccaaagtgaatgttgggaagacacttggcttagtcaaccacctttgataagaactcttccatgttcctcaacagccttggattcagaaagtccccaaaataccaagttcaaagactgatgttgtgcagcgcaggggccccccacaccctgtgtttccacactctgcagacaggaggggtatttcactctctcaccattcacactgtgcttgtc

SEQ ID NO: 675111 - DNA, 1404 bp, Homo sapiens
ttatccaactgtgtgttgttgaatcaacttttagttaaaatgttagagagggacaaataagtacagtgtgtcgatgtgcggtgctgtgagggcacagaccagtgatcagaacacaacacctgcggcctctcccatcctgacaaagtctctgcatgccaactccagcgacagggtgctaggacagcgcagggatgaaatactgaagggacacgtcttcatgaagcagatcaaaatgcaccatcttgttattcacaatatctgggaagagaaaagccatgattttagagacctagtgcagcacacacattttgatctctactttttcagaacagccttcccagcctgcacctcctgttttaggcatctgtcttccctgaggcagctgcagagaccacagtctctcactctcactgccacagctgaggctacatcacggccccagcactggcggctccctgtgcgaggagaggaaragtgaagcggcccaagcccttggcaaaacacccagcaggctggcttcctggcaaaccacattcacccacatgagcatccttctgcagcgaagagcagctcctcaccagtgagtggaggaactgtgctgagaagagccaagagccaggatcccccaacacctggggcaggctgtgtcacacactgctacatgggatggatccctgcatctcaacggtcctgccaatcccgtgagggccatgggtgatggctaaaatccaaggcatcaggcatgcaaccaagcagggaagtaaagagcacatgagggtgggcaggagcacacagtgtgacaaccaccgagagctcggggagctcagcacagcagccgaggatagctctccagcagatatgagtgagtgacaagaaaccatgtgtgagcaggctgcagagaggccaatcccaggagatgggaggttggggaaaggaccagaaaggacaagcaggagacaaacattctttaggagaggtgtgcaagggcacaggagaggcagagactgagggtggcaggacctagctagaggaggggacaattgagccgacacctgaaggagactaacagagacagaaaaggggctttgggaagttaagaaggtatgagaagttcaacccacggtgttttaaaaaaaatttttgctacatcacaatttgctggtcttcctttctctgctacacgtggagacaccaaagtgaatgttgggaagacacttggcttagtcaaccacctttgataagaactcttccatgttcctcaacagccttggattcagaaagtccccaaaataccaagttcaaagactgatgttgtgcagcgcaggggccccccacaccctgtgtttccacactctgcagacaggaggggtatttcactctctcaccattcacactgtgcttgtc

SEQ ID NO: 675112 - DNA, 1404 bp, Homo sapiens
ttatccaactgtgtgttgttgaatcaacttttagttaaaatgttagagagggacaaataagtacagtgtgtcgatgtgcggtgctgtgagggcacagaccagtgatcagaacacaacacctgcggcctctcccatcctgacaaagtctctgcatgccaactccagcgacagggtgctaggacagcgcagggatgaaatactgaagggacacgtcttcatgaagcagatcaaaatgcaccatcttgttattcacaatatctgggaagagaaaagccatgattttagagacctagtgcagcacacacattttgatctctactttttcagaacagccttcccagcctgcacctcctgttttaggcatctgtcttccctgaggcagctgcagagaccacagtctctcactctcactgccacagctgaggctacatcacggccccagcactggcggctccctgtgcgaggagaggaaaagtgaagcggcccaagcccttggcaaaacacccagcaggctggcttcctggcaaaccacattcacccacatgagcatccttctgcagcgaagagcagctcctcaccagtgagtggaggaactgtgctgagaagagccaagagccaggatcccccaacacctggggcaggctgtgtcacacactgctacatgggatggatccctgcatctcaacggtcctgccaatcccgtgagggccatgggtgatggctaaaatccaaggcatcaggcatgcaaccaagcagggaagtaaagagcacatgagggtgggcaggagcacacagtgtgacaaccaccgagagctcggggagctcagcacagcagccgaggatagctctccagcagatatgagtgagtgacaagaaaccatgtgtgagcaggctgcagagaggccaatcccaggagatgggaggttggggaaaggaccagaaaggacaagcaggagacaaacattctttaggagaggtgtgcaagggcacaggagaggcagagactgagggtggcaggacctagctagaggaggggacaattgagccgacacctgaaggagactaacagagacagaaaaggggctttgggaagttaagaaggtatgagaagttcaacccacggtgttttaaaaaaaatttttgctacatcacaatttgctggtcttcctttctctgctacacgtggagacaccaaagtgaatgytgggaagacacttggcttagtcaaccacctttgataagaactcttccatgttcctcaacagccttggattcagaaagtccccaaaataccaagttcaaagactgatgttgtgcagcgcaggggccccccacaccctgtgtttccacactctgcagacaggaggggtatttcactctctcaccattcacactgtgcttgtc

SEQ ID NO: 675113 - DNA, 1404 bp, Homo sapiens
ttatccaactgtgtgttgttgaatcaacttttagttaaaatgttagagagggacaaataagtacagtgtgtcgatgtgcggtgctgtgagggcacagaccagtgatcagaacacaacacctgcggcctctcccatcctgacaaagtctctgcatgccaactccagcgacagggtgctaggacagcgcagggatgaaatactgaagggacacgtcttcatgaagcagatcaaaatgcaccatcttgttattcacaatatctgggaagagaaaagccatgattttagagacctagtgcagcacacacattttgatctctactttttcagaacagccttcccagcctgcacctcctgttttaggcatctgtcttccctgaggcagctgcagagaccacagtctctcactctcactgccacagctgaggctacatcacggccccagcactggcggctccctgtgcgaggagaggaaaagtgaagcggcccaagcccttggcaaaacacccagcaggctggcttcctggcaaaccacattcacccacatgagcatccttctgcagcgaagagcagctcctcaccagtgagtggaggaactgtgctgagaagagccaagagccaggatcccccaacacctggggcaggctgtgtcacacactgctacatgggatggatccctgcatctcaacggtcctgccaatcccgtgagggccatgggtgatggctaaaatccaaggcatcaggcatgcaaccaagcagggaagtaaagagcacatgagggtgggcaggagcacacagtgtgacaaccaccgagagctcggggagctcagcacagcagccgaggatagctctccagcagatatgagtgagtgacaagaaaccatgtgtgagcaggctgcagagaggccaatcccaggagatgggaggttggggaaaggaccagaaaggacaagcaggagacaaacattctttaggagaggtgtgcaagggcacaggagaggcagagactgagggtggcaggacctagctagaggaggggacaattgagccgacacctgaaggagactaacagagacagaaaaggggctttgggaagttaagaaggtatgagaagttcaacccacggtgttttaaaaaaaatttttgctacatcacaatttgctggtcttcctttctctgctacacgtggagacaccaaagtgaatgttgggaagacacttggcttagtcaaccacctttgataagaactcttccatgttcctcaacagccttggattcagaargtccccaaaataccaagttcaaagactgatgttgtgcagcgcaggggccccccacaccctgtgtttccacactctgcagacaggaggggtatttcactctctcaccattcacactgtgcttgtc

SEQ ID NO: 675114 - DNA, 1550 bp, Homo sapiens
gattgcaccactgcactccagcctgggtgacagaatgacatcctgtctcaaaaaaaaaaaaattaccttttatacatataaatacacaattcctggatcaattcaatcaagccaccttaggtggcattatgtgagcaagaatgtgaaaccactccttgccttccagctctaatattgataagcccaccattgatgtttcccagccagactcaatcactttaaaatttgctccgcagctcagcaaagtgccctgagccaagcataaaaggaacatttataagtattttttcctagttctacctctttgaatggagttcttcactctgtgaagtggaacttctttctgtggtcctaaactttccacactgcaatttcaaaggcatgtcccttgctcttgtattttctgagtcctgtttgtggggctctggcaagcacagtgggaacacagcccattgaagaaaggtaggagtgacccacaggtcagactagatgatatgatattctcaaaagggctatacaagggactggggacttggtgaaggtttattcatctaatcctctccrtgggacatagatataaattatatttcctctcacctttcattctcttcccaatttctctgttcaccacaagttaccaaaacaacactaagaaaagggtccttgggccgggcacggtggctcacgcctgtaatcccagtactttggaggccgaggagggaggatcacttgagcccaggagctgaagtccagcctgggcaatatagcaagaccctgtctctccaaaaaaataaaaataaaaattagccaggcatggtgatgtgcacatgtagtcctagctacttgagaggttgaggctggaagattgctggaatccaggaggtagaggcttcagtgagctgtgatcacactactgcaccccagcctgggcaacagagcacgatcctttctcaaatcaaaaagaaagaaagaaaacggtccatagcctgcccagtgctattgaaaactatttttttaagtcatctatgatctatgtttctccctttctgaaagaatccatttgactgaaggattgctgcaaaacctttgccattcagtcatttctaatttagaattggaaaagtgattaactatgatgtgttatcctctcgcaacaagagactgagttttattcagctgcaaagacaatatgaacctatttagaaagttggacagaaagtaggccttttaccacaagttgagtctttatccaaataatttctacactgaaaatattacattgtcacacttgatatgatatggaacattacactttggctatttccaatacaaaagtaaaatgtcaataaaagaaggaaagaatgttcctgggttatatattcaggaagaagaaatataccttgggcctaatgaatgatctccagatctatttaccttcttcaaaagagaaatctctgttctctaaggatggagcatttcttcccttcaatacttcaagcaaaaaatttccaagcagatgttcttcatataaagtgttggttggaaggata

SEQ ID NO: 675115 - DNA, 303 bp, Homo sapiens
gatggtacatcaaagacctactaataaggtactgtaaaatacaagcaatgacattcatgacttaagcctccttgtggaaggaagcaggagaggacatccaggctcrtgatggccacaagaacaagggaaactcagaacattggtgctcactgaaaagtatcacggactgaatgtaaattatttcaaccatcatggaagatagtgtaacaattcctcaaagatctagaggcagaaatactatctgacccagcaatcccattactaagtatatactcaaaggagtataaatcattctattataaa

SEQ ID NO: 675116 - DNA, 1394 bp, Homo sapiens
gactgtggacagtttattttctctctagaaactcaatttcctcaccaggaaaatggggataataatatttcctttgtaaagatcaagatgtttgtaaaatgcccaaccaaacatctcaccgcaggtgctcaaaaattgcaaaaggcttttagtcattaataatacattctctgaaagtggactggatggtagtcagcattagcttaattatttattacgttcaggagatttacttctttgctctttgaataggcagaaaatggtagatatctatcaagcacaaaaactagaggtctctttatagttgagcaataaacaaagtcatatttaacactcactgatcatttactacaaaccaggtactataccaagaattattattattattattattattattatttttgcgacagagtctcactcttttcacccaggctggagtgcaatggtgcgatctcggctcactgcaacctctgcttcccgggttcaagagattctcctgcctcagactcctgagtagctggcattacaggcatgtgccaccatgcccggctaatttttgtatttttagtagagacagggtttcaccatgttggccaggttggtctcgaacttctgacctcaggtgatctgcccaccttggcctccctaagtgctaagattacaggcatgagccactgtgcctggcttgttttatataatttttcatttaatctttactacagtgaatattctttttgtttttgtttttgtttgtagagatggggtctcactctattgcccaggctggagtgcagcagtgagtgatgtaattataactcactgcagtgttgaactcctgggctccagtgatcgtcctgccttagcttcctaaggagtagctgggatcacaggcttgtaccaacacacctggctaatttttaactctttttgtaaagacatggtctcactatattgcccaggctggtcttgacctcctggctttaagtgatccacccgccccagcctcccaaagttctgggattacagkcatgagccaccacacctagcccacggtgaatattctattagaatgattttataaatgaggaaactatggtacaaagaggttaagaaacttgccaaagatcacacagctgatgctgccagatttaagcccaaatacgttcattcttaagctcgtgatttttatttacgatacatgcagttcacttctcaaacttaatgtgaacatcaattacctggagagctcatgaaagtgctgattttgattttggtgcttgttacaatgtagatccacatgtgcgtgcctgtacctgtgtgtgtgtgtgcactgagattctgtgtttctgacaatctctggatgatgatgatggtgctgacccgtaggtcac

SEQ ID NO: 675117 - DNA, 1394 bp, Homo sapiens
gactgtggacagtttattttctctctagaaactcaatttcctcaccaggaaaatggggataataatatttcctttgtaaagatcaagatgtttgtaaaatgcccaaccaaacatctcaccgcaggtgctcaaaaattgcaaaaggcttttagtcattaataatacattctctgaaagtggactggatggtagtcagcattagcttaattatttattacgttcaggagatttacttctttgctctttgaataggcagaaaatggtagatatctatcaagcacaaaaactagaggtctctttatagttgagcaataaacaaagtcatatttaacactcactgatcatttactacaaaccaggtactataccaagaattattattattattattattattattatttttgcgacagagtctcactcttttcacccaggctggagtgcaatggtgcgatctcggctcactgcaacctctgcttcccgggttcaagagattctcctgcctcagactcctgagtagctggcattacaggcatgtgccaccatgcccggctaatttttgtatttttagtagagacagggtttcaccatgttggccaggttggtctcgaacttctgacctcaggtgatctgcccaccttggcctccctaagtgctaagattacaggcatgagccactgtgcctggcttgttttatataatttttcatttaatctttactacagtgaatattctttttgtttttgtttttgtttgtagagatggggtctcactctattgcccaggctggagtgcagcagtgagtgatgtaattataactcactgcagtgttgaactcctgggctccagtgatcgtcctgccttagcttcctaaggagtagctgggatcacaggcttgtaccaacacacctggctaatttttaactctttttgtaaagacatggtctcactatattgcccaggctggtcttgacctcctggctttaagtgatccacccgccccagcctcccaaagttctgggattacagtcatgagccaccacacctagcccacggtgaatattctattagaatgattttataaatgaggaaactatggtacaaagaggttaagaaacttgccaaagatcacacagctgatgctgccagatttaagcccaaatacgttcattcttaagctcgtgatttttatttaygatacatgcagttcacttctcaaacttaatgtgaacatcaattacctggagagctcatgaaagtgctgattttgattttggtgcttgttacaatgtagatccacatgtgcgtgcctgtacctgtgtgtgtgtgtgcactgagattctgtgtttctgacaatctctggatgatgatgatggtgctgacccgtaggtcac

SEQ ID NO: 675118 - DNA, 621 bp, Homo sapiens
tttatatagaaaacaataaatcatgacctctatctacctcctactctggaattgtaaaaatccattccaggtaggttgtatacttgtagatggttctgtttcttgccacaactgttaccttagaaaaggtacaaaaaagtacaaaaaaaaaaattctgaagaaaaaagggggtagatggcctgaaaaagaactgagcaataaaagagggaaacaaatttgaagataaatccaggagacttaacagccacatagaaggagttcatttattcatctgtgcaatacatgtattatatggacctactctatggaaacagtgctctaggcacttaggatagacaaaaatccctctacttttagagcttatatcctaaatgaatttcagaaagagaaaagagagacaacaggggaaagaaataattttattacttctttctgggaaaataatatatyttcccacaaaagaaaaacattagtttccagattaaataacccaccaagacccagatcaaggccaccatgccacatcaacgaatatcaatgcaaaatttcaaaccatcaaagaaaaagacaagtaagagtattccaacagggaaaaacacacacacacaaaaaagaatcca

SEQ ID NO: 675119 - DNA, 658 bp, Homo sapiens
gatgtgtaaggcacagcccatgcatgaggaatgcttcagagacgctggaggaacatcgaatctagaaggcatcatagctgccatgtgcagagcacttcctgggccggggccacactaaaggcagcccttttcctgctttactctcggcaaccctgagaaagaggggccatccacaggtgaaaactggaacacccagggagtgggtgtgacggacgaagcagaggctgctgcgcggggggtccagggggccacacaccaaagctgtgtggcctaggaagggtgctctctccccactgccacccccatctcactgcagggccatttgatgtccctggagctgtctcagtcccctgttctcagttcctctgatgaccaggagaaaccctggatgcccaggcctggcctgctgcagacactcagagcagaggagtggccaatgcaggaaagccatggcctcctgccaccccaccctgtgcccacagccaccgcctcccacattggattctggcaggatactcggttgccccacagccactttcaatccgcactggatggggcagcgccaacacaggcaccaaagcggacsccggagctccacctgcatctgcctggaaacctcttgcctgaggaccctgatgggtccacaaggcgggggaga

SEQ ID NO: 675120 - DNA, 664 bp, Homo sapiens
tgctggcctcacgagcgccgctgggtgcctgagcacctgccccaccagagcgccactgctggcctcacgagcrccgctgggtgcctgagcacctgccccaccagagcgccactgctggcctcacgagcgccgctgggtgcctgagcactcgccccaccagagcgccactgctggcctcacgagcgccgctgggtgcctgagcacttgccccaccagagcgccactgctggcctcacgagcgccgctgggtgcctgagcacctgccccaccagagcgccactgctggcctcacgagcgccgctgggtgcctgagcacctgccccaccagagcgccactgctggcctcacgagcaccgctgggtgcttgagcactgccccaccagagcgccactgctggcctcatgagcaccgctgggtgcctgagcacctgccccaccagagcgccactgctctgacttccacgctggatacccagccccatttacactcacggaggagcgttgggaagccagatgggtggtgtctctctatgtggcttccaagggctccagaaccttcactgggatcaatgaggctgcctcctcaataggagcagttgttaacgctggggaaggggaacaggtgtcagaaaccttttgaagatggcaactgctctctggagaaa

SEQ ID NO: 675121 - DNA, 664 bp, Homo sapiens
tgctggcctcacgagcgccgctgggtgcctgagcacctgccccaccagagcgccactgctggcctcacgagcgccgctgggtgcctgagcacctgccccaccagagcgccactgctggcctcacgagcrccgctgggtgcctgagcactcgccccaccagagcgccactgctggcctcacgagcgccgctgggtgcctgagcacttgccccaccagagcgccactgctggcctcacgagcgccgctgggtgcctgagcacctgccccaccagagcgccactgctggcctcacgagcgccgctgggtgcctgagcacctgccccaccagagcgccactgctggcctcacgagcaccgctgggtgcttgagcactgccccaccagagcgccactgctggcctcatgagcaccgctgggtgcctgagcacctgccccaccagagcgccactgctctgacttccacgctggatacccagccccatttacactcacggaggagcgttgggaagccagatgggtggtgtctctctatgtggcttccaagggctccagaaccttcactgggatcaatgaggctgcctcctcaataggagcagttgttaacgctggggaaggggaacaggtgtcagaaaccttttgaagatggcaactgctctctggagaaa

SEQ ID NO: 675122 - DNA, 664 bp, Homo sapiens
tgctggcctcacgagcgccgctgggtgcctgagcacctgccccaccagagcgccactgctggcctcacgagcgccgctgggtgcctgagcacctgccccaccagagcgccactgctggcctcacgagcgccgctgggtgcctgagcactcgccccaccagagcgccactgctggcctcacgagcrccgctgggtgcctgagcacttgccccaccagagcgccactgctggcctcacgagcgccgctgggtgcctgagcacctgccccaccagagcgccactgctggcctcacgagcgccgctgggtgcctgagcacctgccccaccagagcgccactgctggcctcacgagcaccgctgggtgcttgagcactgccccaccagagcgccactgctggcctcatgagcaccgctgggtgcctgagcacctgccccaccagagcgccactgctctgacttccacgctggatacccagccccatttacactcacggaggagcgttgggaagccagatgggtggtgtctctctatgtggcttccaagggctccagaaccttcactgggatcaatgaggctgcctcctcaataggagcagttgttaacgctggggaaggggaacaggtgtcagaaaccttttgaagatggcaactgctctctggagaaa

SEQ ID NO: 675123 - DNA, 664 bp, Homo sapiens
tgctggcctcacgagcgccgctgggtgcctgagcacctgccccaccagagcgccactgctggcctcacgagcgccgctgggtgcctgagcacctgccccaccagagcgccactgctggcctcacgagcgccgctgggtgcctgagcactcgccccaccagagcgccactgctggcctcacgagcgccgctgggtgcctgagcacttgccccaccagagcgccactgctggcctcacgagcrccgctgggtgcctgagcacctgccccaccagagcgccactgctggcctcacgagcgccgctgggtgcctgagcacctgccccaccagagcgccactgctggcctcacgagcaccgctgggtgcttgagcactgccccaccagagcgccactgctggcctcatgagcaccgctgggtgcctgagcacctgccccaccagagcgccactgctctgacttccacgctggatacccagccccatttacactcacggaggagcgttgggaagccagatgggtggtgtctctctatgtggcttccaagggctccagaaccttcactgggatcaatgaggctgcctcctcaataggagcagttgttaacgctggggaaggggaacaggtgtcagaaaccttttgaagatggcaactgctctctggagaaa

SEQ ID NO: 675124 - DNA, 2848 bp, Homo sapiens
gcataggctactgctatgaattgaaattcttaaattccaaagattaattaaaatgtttctcaagacacataaactgttagaatctgcttataatgaggctgaagttgagtaagaagagaactggcatttaggacgctacttttcttctgtcgagtactgtcaagttttggttctgcctggaagtagatgcacctcaagggagggttgcatgtaaaggggtgtgtgtgtgtgtgtgtgtgtgtgtgtgtgtgtgtgtgtggtagtttccaaagatgggtacaactttctgcaaatgttcgtgcagtataattgaaccaatctttccttaaagagggaaaatttatactcctctacatgaatctgggctgcctatgacttgctttggtcagtggaatgctgccaaattgatggtgaccaacttctagccgtaaaaggaaaataaaccttggggccccaagatcactaagctaggctgggctccgtggctcacgcctgtaatcccagcactttgggaagctgaggcgggcagatcacctgaggtcaggagttcaagaccagcctggccaacatgacaaaaccccatctctactaaaatatatgaaaattagccaggcgtggtggcaggcgcctgtaatcccagctacttgggatgctgaggcagggaaacttcttgaaccctggagttggaggttgcaataagccgagatcgtaccactgcactccagcctgcacaacagagcgagactctgtccgcccacccaaaaaaaagttactaagctaaagagaaaagtcaagctgggaactgcttaagggaaacctgcctcccattctattcagttaaccctttgcttactgagatgaatgtatatctgattgcctcatttggagaggctaatcaggaactcacaacaatgcaaccatttgtctcttaactaccaatgacctggaagccccttccccttgtctcaccttcactttcacctggagttgtcccgcctttccagactgaaacaatgtacatcttacacatattgattgatgtctcatgtctctctaaaatgtatcaaaccaagctgtgtccccaccaccttaggcccatgttgtcaggacctcccgaggctgtgtcacaggcgtgagtccttaaccttggcaaaataaactttctgaattaactgagacctcatatttttggggtgcaaatagtcttaggccttgagagccctctcgtagtttccatatttttgccctcttggatgctggcaccaagcaaaccttggctatcctgcttaaagggccatttggagaggggctctggagggcgaggggccacatggaggaaaacaaggttccccggctgacaaccagcaccaactgccaggcacatgcatgaggccgtcctggatgctccgcccagctggccctccagctgcaggtagccacacaaatgagcccaggttaaaccagccaggaagtccccatgcaactcacagggtcatgagcaataatggcttctggtggtttaaagtttctaattttaggtgcaataggtaactgaaacagcccacaagggtgtgagcctgtggagggtgcatttcccacctgctgaagcttctcaattcccaggatccaatccagataagactcttgttctcagtgtccttgatggaaatggcaatgaactttttgcagattggaccatctcgggaatcccaaagatcggaaactattttctttctcagaatcttccacaaagcattgagccttaggaatttctaagaaggatctggaatgaaaaaaaatcttttgaaaaggtatttgtatagcttcagttcagcaagattcatggtgggtgttagagtaagtgctggtgttaagccaarccatgtttttcaaagactcatctggcctcaacgttggcaggatcagagtggcctcccaggatctatcacatcctcagaagagttggttcaactggcatgtacccagatctctttgagctagtatgatactcccttaagtcaaaggctgccacatcacatctcctttaagtccccctaagtatgaccccagaagtattgacaaaatagtgcaattcctgaagatttcaggaggacataaatgaagagactaaactgcaaggtaccaaaacttccatctttgctaaagaccctcatccagactgggcacggtgactcacgcctgtaatcccagcaatttgggaggccaaggcgggtggatcacctgaggtcgggagttcaagaccagcctgaccaacatggacaaaccccatctctacaaaaaatacacaattagccgggagtggtggtacatgcctgtaattccagctactagggaggctgaggcaggagaatcgcttgaacctgggaggcatatgttgcggtgagctgagatcgtgctattgcactccagcctgggcaacaagagtaaaactccatctcaaaaaccaacaaacaaaaagcccttatccaatggtcatgccactctatctggccatgtaatttctcctcctgtctttctgtagcaacagccttctgaagaacctcactctgcctttcaaaaccccttcaacttgtacccttcatcagcaaagtacttagctcaacatgtatgcctctgggggtactcatccacatgccatttaaggatatttccagcatcatcatcttcactaccccaggatggcattttagagtggattacgtgcctgctggatgtgttgtacttgaacgagctagagaaaatgccacactttaagacgaattaagagtctgttcatttagctggcggctaagaaatggctaacgtttaaagttctctcggcctcgaa

SEQ ID NO: 675125 - DNA, 2848 bp, Homo sapiens
gcataggctactgctatgaattgaaattcttaaattccaaagattaattaaaatgtttctcaagacacataaactgttagaatctgcttataatgaggctgaagttgagtaagaagagaactggcatttaggacgctacttttcttctgtcgagtactgtcaagttttggttctgcctggaagtagatgcacctcaagggagggttgcatgtaaaggggtgtgtgtgtgtgtgtgtgtgtgtgtgtgtgtgtgtgtgtggtagtttccaaagatgggtacaactttctgcaaatgttcgtgcagtataattgaaccaatctttccttaaagagggaaaatttatactcctctacatgaatctgggctgcctatgacttgctttggtcagtggaatgctgccaaattgatggtgaccaacttctagccgtaaaaggaaaataaaccttggggccccaagatcactaagctaggctgggctccgtggctcacgcctgtaatcccagcactttgggaagctgaggcgggcagatcacctgaggtcaggagttcaagaccagcctggccaacatgacaaaaccccatctctactaaaatatatgaaaattagccaggcgtggtggcaggcgcctgtaatcccagctacttgggatgctgaggcagggaaacttcttgaaccctggagttggaggttgcaataagccgagatcgtaccactgcactccagcctgcacaacagagcgagactctgtccgcccacccaaaaaaaagttactaagctaaagagaaaagtcaagctgggaactgcttaagggaaacctgcctcccattctattcagttaaccctttgcttactgagatgaatgtatatctgattgcctcatttggagaggctaatcaggaactcacaacaatgcaaccatttgtctcttaactaccaatgacctggaagccccttccccttgtctcaccttcactttcacctggagttgtcccgcctttccagactgaaacaatgtacatcttacacatattgattgatgtctcatgtctctctaaaatgtatcaaaccaagctgtgtccccaccaccttaggcccatgttgtcaggacctcccgaggctgtgtcacaggcgtgagtccttaaccttggcaaaataaactttctgaattaactgagacctcatatttttggggtgcaaatagtcttaggccttgagagccctctcgtagtttccatatttttgccctcttggatgctggcaccaagcaaaccttggctatcctgcttaaagggccatttggagaggggctctggagggcgaggggccacatggaggaaaacaaggttccccggctgacaaccagcaccaactgccaggcacatgcatgaggccgtcctggatgctccgcccagctggccctccagctgcaggtagccacacaaatgagcccaggttaaaccagccaggaagtccccatgcaactcacagggtcatgagcaataatggcttctggtggtttaaagtttctaattttaggtgcaataggtaactgaaacagcccacaagggtgtgagcctgtggagggtgcatttcccacctgctgaagcttctcaattcccaggatccaatccagataagactcttgttctcagtgtccttgatggaaatggcaatgaactttttgcagattggaccatctcgggaatcccaaagatcggaaactattttctttctcagaatcttccacaaagcattgagccttaggaatttctaagaaggatctggaatgaaaaaaaatcttttgaaaaggtatttgtatagcttcagttcagcaagattcatggtgggtgttagagtaagtgctggtgttaagccaaaccatgtttttcaaagactcatctggcctcaacgttggcaggatcagagtggcctcccaggatctatcacatcctcagaagagttggttcaactggcatgtacccagatctctttgagctagtatgatactcccttaagtcaaaggctgccacatcacatctcctttaagtccccctaagtaygaccccagaagtattgacaaaatagtgcaattcctgaagatttcaggaggacataaatgaagagactaaactgcaaggtaccaaaacttccatctttgctaaagaccctcatccagactgggcacggtgactcacgcctgtaatcccagcaatttgggaggccaaggcgggtggatcacctgaggtcgggagttcaagaccagcctgaccaacatggacaaaccccatctctacaaaaaatacacaattagccgggagtggtggtacatgcctgtaattccagctactagggaggctgaggcaggagaatcgcttgaacctgggaggcatatgttgcggtgagctgagatcgtgctattgcactccagcctgggcaacaagagtaaaactccatctcaaaaaccaacaaacaaaaagcccttatccaatggtcatgccactctatctggccatgtaatttctcctcctgtctttctgtagcaacagccttctgaagaacctcactctgcctttcaaaaccccttcaacttgtacccttcatcagcaaagtacttagctcaacatgtatgcctctgggggtactcatccacatgccatttaaggatatttccagcatcatcatcttcactaccccaggatggcattttagagtggattacgtgcctgctggatgtgttgtacttgaacgagctagagaaaatgccacactttaagacgaattaagagtctgttcatttagctggcggctaagaaatggctaacgtttaaagttctctcggcctcgaa

SEQ ID NO: 675126 - DNA, 2848 bp, Homo sapiens
gcataggctactgctatgaattgaaattcttaaattccaaagattaattaaaatgtttctcaagacacataaactgttagaatctgcttataatgaggctgaagttgagtaagaagagaactggcatttaggacgctacttttcttctgtcgagtactgtcaagttttggttctgcctggaagtagatgcacctcaagggagggttgcatgtaaaggggtgtgtgtgtgtgtgtgtgtgtgtgtgtgtgtgtgtgtgtggtagtttccaaagatgggtacaactttctgcaaatgttcgtgcagtataattgaaccaatctttccttaaagagggaaaatttatactcctctacatgaatctgggctgcctatgacttgctttggtcagtggaatgctgccaaattgatggtgaccaacttctagccgtaaaaggaaaataaaccttggggccccaagatcactaagctaggctgggctccgtggctcacgcctgtaatcccagcactttgggaagctgaggcgggcagatcacctgaggtcaggagttcaagaccagcctggccaacatgacaaaaccccatctctactaaaatatatgaaaattagccaggcgtggtggcaggcgcctgtaatcccagctacttgggatgctgaggcagggaaacttcttgaaccctggagttggaggttgcaataagccgagatcgtaccactgcactccagcctgcacaacagagcgagactctgtccgcccacccaaaaaaaagttactaagctaaagagaaaagtcaagctgggaactgcttaagggaaacctgcctcccattctattcagttaaccctttgcttactgagatgaatgtatatctgattgcctcatttggagaggctaatcaggaactcacaacaatgcaaccatttgtctcttaactaccaatgacctggaagccccttccccttgtctcaccttcactttcacctggagttgtcccgcctttccagactgaaacaatgtacatcttacacatattgattgatgtctcatgtctctctaaaatgtatcaaaccaagctgtgtccccaccaccttaggcccatgttgtcaggacctcccgaggctgtgtcacaggcgtgagtccttaaccttggcaaaataaactttctgaattaactgagacctcatatttttggggtgcaaatagtcttaggccttgagagccctctcgtagtttccatatttttgccctcttggatgctggcaccaagcaaaccttggctatcctgcttaaagggccatttggagaggggctctggagggcgaggggccacatggaggaaaacaaggttccccggctgacaaccagcaccaactgccaggcacatgcatgaggccgtcctggatgctccgcccagctggccctccagctgcaggtagccacacaaatgagcccaggttaaaccagccaggaagtccccatgcaactcacagggtcatgagcaataatggcttctggtggtttaaagtttctaattttaggtgcaataggtaactgaaacagcccacaagggtgtgagcctgtggagggtgcatttcccacctgctgaagcttctcaattcccaggatccaatccagataagactcttgttctcagtgtccttgatggaaatggcaatgaactttttgcagattggaccatctcgggaatcccaaagatcggaaactattttctttctcagaatcttccacaaagcattgagccttaggaatttctaagaaggatctggaatgaaaaaaaatcttttgaaaaggtatttgtatagcttcagttcagcaagattcatggtgggtgttagagtaagtgctggtgttaagccaaaccatgtttttcaaagactcatctggcctcaacgttggcaggatcagagtggcctcccaggatctatcacatcctcagaagagttggttcaactggcatgtacccagatctctttgagctagtatgatactcccttaagtcaaaggctgccacatcacatctcctttaagtccccctaagtatgaccccagaagtattgacaaaatagtgcaattcctgaagatttcaggaggacataaatgaagagactaaactgcaaggtaccaaaacttccatctttgctaaagaccctcatccagactgggcacggtgactcacgcctgtaatcccagcaatttgggaggccaaggcgggtggatcacctgaggtcgggagttcaagaccagcctgaccaacatggacaaacmccatctctacaaaaaatacacaattagccgggagtggtggtacatgcctgtaattccagctactagggaggctgaggcaggagaatcgcttgaacctgggaggcatatgttgcggtgagctgagatcgtgctattgcactccagcctgggcaacaagagtaaaactccatctcaaaaaccaacaaacaaaaagcccttatccaatggtcatgccactctatctggccatgtaatttctcctcctgtctttctgtagcaacagccttctgaagaacctcactctgcctttcaaaaccccttcaacttgtacccttcatcagcaaagtacttagctcaacatgtatgcctctgggggtactcatccacatgccatttaaggatatttccagcatcatcatcttcactaccccaggatggcattttagagtggattacgtgcctgctggatgtgttgtacttgaacgagctagagaaaatgccacactttaagacgaattaagagtctgttcatttagctggcggctaagaaatggctaacgtttaaagttctctcggcctcgaa

SEQ ID NO: 675127 - DNA, 2848 bp, Homo sapiens
gcataggctactgctatgaattgaaattcttaaattccaaagattaattaaaatgtttctcaagacacataaactgttagaatctgcttataatgaggctgaagttgagtaagaagagaactggcatttaggacgctacttttcttctgtcgagtactgtcaagttttggttctgcctggaagtagatgcacctcaagggagggttgcatgtaaaggggtgtgtgtgtgtgtgtgtgtgtgtgtgtgtgtgtgtgtgtggtagtttccaaagatgggtacaactttctgcaaatgttcgtgcagtataattgaaccaatctttccttaaagagggaaaatttatactcctctacatgaatctgggctgcctatgacttgctttggtcagtggaatgctgccaaattgatggtgaccaacttctagccgtaaaaggaaaataaaccttggggccccaagatcactaagctaggctgggctccgtggctcacgcctgtaatcccagcactttgggaagctgaggcgggcagatcacctgaggtcaggagttcaagaccagcctggccaacatgacaaaaccccatctctactaaaatatatgaaaattagccaggcgtggtggcaggcgcctgtaatcccagctacttgggatgctgaggcagggaaacttcttgaaccctggagttggaggttgcaataagccgagatcgtaccactgcactccagcctgcacaacagagcgagactctgtccgcccacccaaaaaaaagttactaagctaaagagaaaagtcaagctgggaactgcttaagggaaacctgcctcccattctattcagttaaccctttgcttactgagatgaatgtatatctgattgcctcatttggagaggctaatcaggaactcacaacaatgcaaccatttgtctcttaactaccaatgacctggaagccccttccccttgtctcaccttcactttcacctggagttgtcccgcctttccagactgaaacaatgtacatcttacacatattgattgatgtctcatgtctctctaaaatgtatcaaaccaagctgtgtccccaccaccttaggcccatgttgtcaggacctcccgaggctgtgtcacaggcgtgagtccttaaccttggcaaaataaactttctgaattaactgagacctcatatttttggggtgcaaatagtcttaggccttgagagccctctcgtagtttccatatttttgccctcttggatgctggcaccaagcaaaccttggctatcctgcttaaagggccatttggagaggggctctggagggcgaggggccacatggaggaaaacaaggttccccggctgacaaccagcaccaactgccaggcacatgcatgaggccgtcctggatgctccgcccagctggccctccagctgcaggtagccacacaaatgagcccaggttaaaccagccaggaagtccccatgcaactcacagggtcatgagcaataatggcttctggtggtttaaagtttctaattttaggtgcaataggtaactgaaacagcccacaagggtgtgagcctgtggagggtgcatttcccacctgctgaagcttctcaattcccaggatccaatccagataagactcttgttctcagtgtccttgatggaaatggcaatgaactttttgcagattggaccatctcgggaatcccaaagatcggaaactattttctttctcagaatcttccacaaagcattgagccttaggaatttctaagaaggatctggaatgaaaaaaaatcttttgaaaaggtatttgtatagcttcagttcagcaagattcatggtgggtgttagagtaagtgctggtgttaagccaaaccatgtttttcaaagactcatctggcctcaacgttggcaggatcagagtggcctcccaggatctatcacatcctcagaagagttggttcaactggcatgtacccagatctctttgagctagtatgatactcccttaagtcaaaggctgccacatcacatctcctttaagtccccctaagtatgaccccagaagtattgacaaaatagtgcaattcctgaagatttcaggaggacataaatgaagagactaaactgcaaggtaccaaaacttccatctttgctaaagaccctcatccagactgggcacggtgactcacgcctgtaatcccagcaatttgggaggccaaggcgggtggatcacctgaggtcgggagttcaagaccagcctgaccaacatggacaaaccccatctctacaaaaaatacacaattagccgggagtggtggtacatgcctgtaattccagctactagggaggctgaggcaggagaatcgcttgaacctgggaggcrtatgttgcggtgagctgagatcgtgctattgcactccagcctgggcaacaagagtaaaactccatctcaaaaaccaacaaacaaaaagcccttatccaatggtcatgccactctatctggccatgtaatttctcctcctgtctttctgtagcaacagccttctgaagaacctcactctgcctttcaaaaccccttcaacttgtacccttcatcagcaaagtacttagctcaacatgtatgcctctgggggtactcatccacatgccatttaaggatatttccagcatcatcatcttcactaccccaggatggcattttagagtggattacgtgcctgctggatgtgttgtacttgaacgagctagagaaaatgccacactttaagacgaattaagagtctgttcatttagctggcggctaagaaatggctaacgtttaaagttctctcggcctcgaa

SEQ ID NO: 675128 - DNA, 2848 bp, Homo sapiens
gcataggctactgctatgaattgaaattcttaaattccaaagattaattaaaatgtttctcaagacacataaactgttagaatctgcttataatgaggctgaagttgagtaagaagagaactggcatttaggacgctacttttcttctgtcgagtactgtcaagttttggttctgcctggaagtagatgcacctcaagggagggttgcatgtaaaggggtgtgtgtgtgtgtgtgtgtgtgtgtgtgtgtgtgtgtgtggtagtttccaaagatgggtacaactttctgcaaatgttcgtgcagtataattgaaccaatctttccttaaagagggaaaatttatactcctctacatgaatctgggctgcctatgacttgctttggtcagtggaatgctgccaaattgatggtgaccaacttctagccgtaaaaggaaaataaaccttggggccccaagatcactaagctaggctgggctccgtggctcacgcctgtaatcccagcactttgggaagctgaggcgggcagatcacctgaggtcaggagttcaagaccagcctggccaacatgacaaaaccccatctctactaaaatatatgaaaattagccaggcgtggtggcaggcgcctgtaatcccagctacttgggatgctgaggcagggaaacttcttgaaccctggagttggaggttgcaataagccgagatcgtaccactgcactccagcctgcacaacagagcgagactctgtccgcccacccaaaaaaaagttactaagctaaagagaaaagtcaagctgggaactgcttaagggaaacctgcctcccattctattcagttaaccctttgcttactgagatgaatgtatatctgattgcctcatttggagaggctaatcaggaactcacaacaatgcaaccatttgtctcttaactaccaatgacctggaagccccttccccttgtctcaccttcactttcacctggagttgtcccgcctttccagactgaaacaatgtacatcttacacatattgattgatgtctcatgtctctctaaaatgtatcaaaccaagctgtgtccccaccaccttaggcccatgttgtcaggacctcccgaggctgtgtcacaggcgtgagtccttaaccttggcaaaataaactttctgaattaactgagacctcatatttttggggtgcaaatagtcttaggccttgagagccctctcgtagtttccatatttttgccctcttggatgctggcaccaagcaaaccttggctatcctgcttaaagggccatttggagaggggctctggagggcgaggggccacatggaggaaaacaaggttccccggctgacaaccagcaccaactgccaggcacatgcatgaggccgtcctggatgctccgcccagctggccctccagctgcaggtagccacacaaatgagcccaggttaaaccagccaggaagtccccatgcaactcacagggtcatgagcaataatggcttctggtggtttaaagtttctaattttaggtgcaataggtaactgaaacagcccacaagggtgtgagcctgtggagggtgcatttcccacctgctgaagcttctcaattcccaggatccaatccagataagactcttgttctcagtgtccttgatggaaatggcaatgaactttttgcagattggaccatctcgggaatcccaaagatcggaaactattttctttctcagaatcttccacaaagcattgagccttaggaatttctaagaaggatctggaatgaaaaaaaatcttttgaaaaggtatttgtatagcttcagttcagcaagattcatggtgggtgttagagtaagtgctggtgttaagccaaaccatgtttttcaaagactcatctggcctcaacgttggcaggatcagagtggcctcccaggatctatcacatcctcagaagagttggttcaactggcatgtacccagatctctttgagctagtatgatactcccttaagtcaaaggctgccacatcacatctcctttaagtccccctaagtatgaccccagaagtattgacaaaatagtgcaattcctgaagatttcaggaggacataaatgaagagactaaactgcaaggtaccaaaacttccatctttgctaaagaccctcatccagactgggcacggtgactcacgcctgtaatcccagcaatttgggaggccaaggcgggtggatcacctgaggtcgggagttcaagaccagcctgaccaacatggacaaaccccatctctacaaaaaatacacaattagccgggagtggtggtacatgcctgtaattccagctactagggaggctgaggcaggagaatcgcttgaacctgggaggcatakgttgcggtgagctgagatcgtgctattgcactccagcctgggcaacaagagtaaaactccatctcaaaaaccaacaaacaaaaagcccttatccaatggtcatgccactctatctggccatgtaatttctcctcctgtctttctgtagcaacagccttctgaagaacctcactctgcctttcaaaaccccttcaacttgtacccttcatcagcaaagtacttagctcaacatgtatgcctctgggggtactcatccacatgccatttaaggatatttccagcatcatcatcttcactaccccaggatggcattttagagtggattacgtgcctgctggatgtgttgtacttgaacgagctagagaaaatgccacactttaagacgaattaagagtctgttcatttagctggcggctaagaaatggctaacgtttaaagttctctcggcctcgaa

SEQ ID NO: 675129 - DNA, 1575 bp, Homo sapiens
tgctcactacaagctctgcctcccgggttcacgccattctcttgcctcagcctcccgagtagctgggactacagacrtccactaccacacctggctaattttttgtatttttagtagagacggggtttcaccgtgttagccaggatggtctcgatcacctgacctcgtgatctgcctgcctcgacctcccaaagtgctggaattacaggtgtgagccaccgcgcctgcaggtctgcctttttttgaaagagttcattgcatagtaaaaagattaacaccttgtctgagatataagaggcaaatagttcctcctgttttgccttttgatttttcttatggccatgtaaaacactttaaagtcattcataaatttaatatttttttattgcttctagattttgaatcatacagaaaagctttctccaggttatacaataatccatctgattctactatggtcatgtaaaacactttaaaatcattcataaatttaattttttttattgcttctagattttgaatcatatagaaaagctttctccaggttatacaataatccatctgattctactatctatatgattttttcaacattcagcatttagctcgctcatccatttggaaattattctgacatatatacaagctaacagacgtttcacatcttttttttttttttgaaacaaggtctcacaatgtcatgcaggccggggtgcagtgacatgatcacagctcactgcagcctcaaactcccaggtccaagcaacccttccacctcagcctcccaagcagttgtgactacgggcacatgccactacaactagctaattttttttatttcttgtagagatggggtttcactatgttgctgagcctggtcccaaacttctggcctcaagaaatcctcccatcacgtcagcctcccaaagtgctgggattacagggtgagccactgcactcagccaacataatttatttttagagtcccttttaaactccaggtcttcagagtccacctttaatatatatgaaattcctacatattcttagaattttattctgttgcaagggtctttgtctcatcatgagccagtactacagttttaattagagataccttgtggtatggttcaatatgtgggagtcttgacagagcaagactccgtctcaaaaaaaaaaaaataggcagacctggctgggtgtggtggctcatccttctcatcactactttcaccagggttttcataactattattccatgtttattttttccacatgaatagatcaatctagatctaagagtctagaggacctactagaatttttattgggattccatcaaacttatatattaagagaactgacatctttaccattctgagtcactctacctaaaacaaggaatgtctttccatttgttcgagtccactttgatgccattcaggaatgttttaaagttttccaacgtaggtttaagacacttctttttaaattaatctgtaggtaggccaggtgtggtaactcatgtgtgtaatcccagcaccacaggaggccaaggcgggcagatcacctgag

SEQ ID NO: 675130 - DNA, 1575 bp, Homo sapiens
tgctcactacaagctctgcctcccgggttcacgccattctcttgcctcagcctcccgagtagctgggactacagacatccactaccacacctggctaattttttgtatttttagtagagacggggtttcaccgtgttagccaggatggtctcgatcacctgacctcgtgatctgcctgcctcgacctcccaaagtgctggaattacaggtgtgagccaccgcgcctgcaggtctgcctttttttgaaagagttcattgcatagtaaaaagattaacaccttgtctgagatataagaggcaaatagttcctcctgttttgccttttgatttttcttatggccatgtaaaacactttaaagtcattcataaatttaatatttttttattgcttctagattttgaatcatacagaaaagctttctccaggttatacaataatccatctgattctactatggtcatgtaaaacactttaaaatcattcataaatttaattttttttattgcttctagattttgaatcatatagaaaagctttctccaggttatacaataatccatctgattctactatctatatgattttttcaacattcagcatttagctcgctcatccatttggaaattattctgacatatatacaagctaacagacgtttcacatcttttttttttttttgaaacaaggtctcacaatgtcatgcaggccggggtgcagtgacatgatcacagctcactgcagcctcaaactcccaggtccaagcaacccttccacctcagcctcccaagcagttgtgactacgggcacatgccactacaactagctaattttttttatttcttgtagagatggggtttcactatgttgctgagcctggtcccaaacttctggcctcaagaaatcctcccatcacgtcagcctcccaaagtgctgggattacagggtgagccactgcactcagccaacataatttatttttagagtcccttttaaactccaggtcttcagagtccacctttaatatatatgaaattcctacatattcttagaattttattctgttgcaagggtctttgtctcatcatgagccagtactacagttttaattagagataccttgtggtatggttcaatatgtgggagtcttgacagagcaagactccgtctcaaaaaaaaaaaaataggcagacctggctgggtgtggtggctcatccttctcatcactactttcaccagggttttcataactattattccatgtttattttttccacatgaatagatcaatctagatctargagtctagaggacctactagaatttttattgggattccatcaaacttatatattaagagaactgacatctttaccattctgagtcactctacctaaaacaaggaatgtctttccatttgttcgagtccactttgatgccattcaggaatgttttaaagttttccaacgtaggtttaagacacttctttttaaattaatctgtaggtaggccaggtgtggtaactcatgtgtgtaatcccagcaccacaggaggccaaggcgggcagatcacctgag

SEQ ID NO: 675131 - DNA, 600 bp, Homo sapiens
tgatggcgtctttccaatatttcttatattgaacatagcaagtgctttcacatcataccaatctttcttagaaaattgatcaatcactttcttcttggctccctttttgctgcctttcataaagcacttgttcttgccaactgccatggtgctggtcagagccaaaaggctttttwatttttttttagacagagtcttattgtctgcagtacagtggcacaatcatggctcacggtagcctcaactttctgagcttaagtgatcctcccacttcagcctcctaagtagctgggaccacaggcacacaccaatatgcctggctgattttcaaatattttacagagacatggtctccctatgttccccaagctggtcttgcacttctgggctcaaggaatcctcccaccttggccctcctaaagtgccgctttcttttctttttattagtgttagcatagtccatctttcttattattttagttttactctgtgtcttcatatttaaggtggctttctggtaagcagtgtttagttgggttttgatattttatccgctctgacatatctgtcttttaattggtgcatttagaccattcacat

SEQ ID NO: 675132 - DNA, 600 bp, Homo sapiens
tgatggcgtctttccaatatttcttatattgaacatagcaagtgctttcacatcataccaatctttcttagaaaattgatcaatcactttcttcttggctccctttttgctgcctttcataaagcacttgttcttgccaactgccatggtgctggtcagagccaaaaggctttttaatttttttttagacagagtcttattgtctgcagtacagtggcacaatcatggctcacggtagcctcaactttctgagcttaagtgatcctcccacttcagcctccyaagtagctgggaccacaggcacacaccaatatgcctggctgattttcaaatattttacagagacatggtctccctatgttccccaagctggtcttgcacttctgggctcaaggaatcctcccaccttggccctcctaaagtgccgctttcttttctttttattagtgttagcatagtccatctttcttattattttagttttactctgtgtcttcatatttaaggtggctttctggtaagcagtgtttagttgggttttgatattttatccgctctgacatatctgtcttttaattggtgcatttagaccattcacat

SEQ ID NO: 675133 - DNA, 956 bp, Homo sapiens
tgaatatgtatcttgggggagctgccaacgtgcttcctatgaaaccagcatgttgcttttggtacatagccatcaggaaaaaccctgggggtggagtattttgccacaagagactattagcatatctratcctgttatagcttaaattattgggaaatgcctcctgtattattcatctggatttaaaaatacataacttccgttattaaataagccatttattagagaaattcataagattggtcatttagtagataaaattaatattcttaatttgacatatattttaaattgaatacaaattcagtagcttattttggggggtgctgtggattttgatttgtactcctaggtgtcactgacatgatcacctgaggttttgtttgtttttaataacctgggtttaacaactttttaaaattttaattatggatatgtaatagttgtacatatataaagggtgcctgtgacattttgatacaagcatacaatgtgtcatgattaaatcggtagcctcggttttagccggttgcagtggtcccagcagtggttgtagtcctagctacttgggaagctgaggtaggatgattgattacttgagcccaggagttctagtccagcctgggcaacatagtggaccccatctctaaaaacactactactactactaataataataataatctgggttttgaattgtattcttttctcattttgaagggttggatttttcataatttagcttaagttcagatttttactgaaaattcagtttgaaaaggaaatatgccttttacttctgatttattaaggtggggagctcttttaaagttaagtttgctatactccactaactgttgctgtcttcactttcctttccttttctcatgcccaaagtattttccttacttccacatgcttggtcctacccattctaccttttcttggattgtatc

SEQ ID NO: 675134 - DNA, 578 bp, Homo sapiens
ttttgaattgttcctaatattaggaaggaagcatttggtctttcatcatcaagaatgatttagatgaagtgggtttttttgtagattctctttatcaaatggaggaattttctctccctagtttgctgaatttttaacataaaagagtactgtaagtactcattataaaacaaaatatggctgtggaagatgaaagagagtttcaagcatgctggcttgataggccagatccaagctggcaaaaataattatctctttcttctttttttctatccatggaataaaaaattaagaggaaagaatgttaatagaatcgcattatttcttcaaaatacgttgtgagttttaaaagtattayctaccttttttattatactttttttagggtacatgtgcacaacgtgcaggtttgttacatatgtatgcatgtgccatgttggtgtgctgtactcattaactcatcatttaacattaggtataactcctaatgctatccttcccccctctccccaccccacaacaggccccagtgtgtgatgttccccttcctgtgtccatgtgttctcattgtatatttt

SEQ ID NO: 675135 - DNA, 2873 bp, Homo sapiens
cactcggtgctagaagcaaaaagagaaattttattgacagaaagtgactcgtgaagtcagaagttaatcagaagtgcagtcctcaacctcccttctgagaatatagccccttggagaccagaaatctgatgggtgttgcctgagtcaccagtgaaaaggaatatccatctaaatccttggaaagcaggatgttttcctgaaacaaatctggctaaaatgttcaattgctttttggtcttttccctggtcctaactgcatacccatgaagaagtcctgggccttttattcttctgtcttcttcatcaccaatgtccacaaagattattctcctgacatttccagaacttgtcagcagctttggtgggagcactttcaaatactgcaacattccccaaatctrtacaatcttcagtgacacctgggttaccccttcttgcccccctgacctgcagatatcttttggctggactccagggctcatgaaggcaaagctgagttagccagccttgcagcctcaattcccagagaagacctctgttcactcgaggctgtcagagggctcaaatgtaacacacactacacttcagcaggtggcctgataggaccttttgttggagaatgtgtaaaataatagccttgtacttgaaatgactctttaccaatctatgatctagagaaagcataataccaataaaatgtatttccaaacagtaatgtttatcctttgacaatttattgaagggaagtgctgtgataaggttttatctgaataatatttatgtcatggcatactaattcttgtgcctgatatcaaattttaagtgctctctctgactcattctcatatctccttcctcaaactccactttctgcattcctaccaaatgaattatcttgctctaaacataagtactctttatgttaaaatctttctctaaaaacatacagggaagtgcaccgatcatatgtatatttctaaaaaattatgaaaactaaacatcctcctataactaccaccacgttttaccttttgtgtctctttgaggcgaccttcttttatctgttttacagattttgttagaaaacttataacttttcttggaaacacagtgatatttaatgcttcaagaattggggtaaggaatggaaagacttctgtagaaaaaaaaaaccaacagaaaacgaaaccattgtgaacatacaaaatttacctggagcaattctaattttctctaccaatcagaagagtgaaatacatcagtgttctcaactggaagccattccttctatgacttttgcccctcttccaggccagtggctgagcaagggaaggtctgtgcatagggaccaccactacagcagtgagatcagcagccccttctgcatcttttgaatgatgaaaggaacaaaattcaatgccctaatctctttgcctttatgtattgggctagggtctcttaggataacccaaatcataatttgctgcttaaattaatcatgctcttcaagaaatcagatagaaataacacagtgtatctctgtcacctatcataggataaagctaaaatcaataaggtaacgaaaattgggaaactcacacatacgtggaagttaaacaataaacttttaagcaaccaataagttgaagtagaaattaaaagggcaaatagaaactgttttgagctgagcaaaaattaagatgtgataggccagaatgtcatgttatttagcaaacaagtgcccagagggaaatttatagttgtaatgtctaaatttagaggaaaaaaacccacaaatcaataatctacattcatgccacaacacagtaaacggagaagggcaaactaagcctgaagccagcagaagaaagaaaataatacagactaaagtacaaattcatgaactagagaattaaaaaaaccctgaaaaattaatatcatttctatgaagtgtccagaataggcaaatctatagatgcagaaagttgactagtggttatatacgacaacaggatttctggcagggggttgatagctaaacatgtatgaggtttctagaatgacagaagtgttttaaagtttacaatggtgatggtcgtacatatcttcaaatgtactacaaaccattaaactgtacattttaagtggatgaattacatggtgatttacatctcaataaagcagttatttttaagagagagggagagaaaaggaaatagtagtccacatacttattgagagaacgaatggatctaatggattaaatcttaaaagcttcttggtgttttccacaaaggggtcttgtggattgttgagagagtcgatgctcactccaaatgatgtgctagtgatcacatccatgctgtaggccccaaagacgctgagtggagaaagatgtggaaaattaaaatcagcacctctttaccatccttcctctatgcgtgcagcaggaaatccacatgtccagtcaagacagacaaacagccacagactttcagaactatttactggagcatctcccatcacactccctcagaaggtgattatcaggtgtcagtgacacagctggctctccgctgggggtgatggagacactcaactgagttagacttacctctgaggtcaaggagcctagtcatagaaagacagagatccactatcagacaactgcagtagcatgtgttaattgtggatgatacaagatgggtaagcactgtgcttcagcagaacaagagtagaaaaattcactctcttctacacggggctcaagacaggtgacattgcctgactacagactctatgcccagagccgattcctcttcagcactttacaaagcaacagtaccatgtcctgagctcctagaaatatcatc

SEQ ID NO: 675136 - DNA, 2873 bp, Homo sapiens
cactcggtgctagaagcaaaaagagaaattttattgacagaaagtgactcgtgaagtcagaagttaatcagaagtgcagtcctcaacctcccttctgagaatatagccccttggagaccagaaatctgatgggtgttgcctgagtcaccagtgaaaaggaatatccatctaaatccttggaaagcaggatgttttcctgaaacaaatctggctaaaatgttcaattgctttttggtcttttccctggtcctaactgcatacccatgaagaagtcctgggccttttattcttctgtcttcttcatcaccaatgtccacaaagattattctcctgacatttccagaacttgtcagcagctttggtgggagcactttcaaatactgcaacattccccaaatctgtacaatcttcagtgacacctgggttaccccttcttgcccccctgacctgcagatatcttttggctggactccagggctcatgaaggcaaagctgagttagccagccttgcagcctcaattcccagagaagacctctgttcactcgaggctgtcagagggctcaaatgtaacacacactacacttcagcaggtggcctgataggaccttttgttggagaatgtgtaaaataatagccttgtacttgaaatgactctttaccaatctatgatctagagaaagcataataccaataaaatgtatttccaaacagtaatgtttatcctttgacaatttattgaagggaagtgctgtgataaggttttatctgaataatatttatgtcatggcatactaattcttgtgcctgatatcaaattttaagtgctctctctgactcattctcatatctccttcctcaaactccactttctgcattcctaccaaatgaattatcttgctctaaacataagtactctttatgttaaaatctttctctaaaaacatacagggaagtgcaccgatcatatgtatatttctaaaaaattatgaaaactaaacatcctcctataactaccaccacgttttaccttttgtgtctctttgaggcgaccttcttttatctgttttacagattttgttagaaaacttataacttttcttggaaacacagtgatatttaatgcttcaagaattggggtaaggaatggaaagacttctgtagaaaaaaaaaaccaacagaaaacgaaaccattgtgaacatacaaaatttacctggagcaattctaattttctctaccaatcagaagagtgaaatacatcagtgttctcaactggaagccattccttctatgacttttgcccctcttccaggccagtggctgagcaagggaaggtctgtgcatagggaccaccactacagcagtgagatcagcagccccttctgcatcttttgaatgatgaaaggaacaaaattcaatgccctaatctctttgcctttatgtattgggctagggtctcttaggataacccaaatcataatttgctgcttaaattaatcatgctsttcaagaaatcagatagaaataacacagtgtatctctgtcacctatcataggataaagctaaaatcaataaggtaacgaaaattgggaaactcacacatacgtggaagttaaacaataaacttttaagcaaccaataagttgaagtagaaattaaaagggcaaatagaaactgttttgagctgagcaaaaattaagatgtgataggccagaatgtcatgttatttagcaaacaagtgcccagagggaaatttatagttgtaatgtctaaatttagaggaaaaaaacccacaaatcaataatctacattcatgccacaacacagtaaacggagaagggcaaactaagcctgaagccagcagaagaaagaaaataatacagactaaagtacaaattcatgaactagagaattaaaaaaaccctgaaaaattaatatcatttctatgaagtgtccagaataggcaaatctatagatgcagaaagttgactagtggttatatacgacaacaggatttctggcagggggttgatagctaaacatgtatgaggtttctagaatgacagaagtgttttaaagtttacaatggtgatggtcgtacatatcttcaaatgtactacaaaccattaaactgtacattttaagtggatgaattacatggtgatttacatctcaataaagcagttatttttaagagagagggagagaaaaggaaatagtagtccacatacttattgagagaacgaatggatctaatggattaaatcttaaaagcttcttggtgttttccacaaaggggtcttgtggattgttgagagagtcgatgctcactccaaatgatgtgctagtgatcacatccatgctgtaggccccaaagacgctgagtggagaaagatgtggaaaattaaaatcagcacctctttaccatccttcctctatgcgtgcagcaggaaatccacatgtccagtcaagacagacaaacagccacagactttcagaactatttactggagcatctcccatcacactccctcagaaggtgattatcaggtgtcagtgacacagctggctctccgctgggggtgatggagacactcaactgagttagacttacctctgaggtcaaggagcctagtcatagaaagacagagatccactatcagacaactgcagtagcatgtgttaattgtggatgatacaagatgggtaagcactgtgcttcagcagaacaagagtagaaaaattcactctcttctacacggggctcaagacaggtgacattgcctgactacagactctatgcccagagccgattcctcttcagcactttacaaagcaacagtaccatgtcctgagctcctagaaatatcatc

SEQ ID NO: 675137 - DNA, 2214 bp, Homo sapiens
gggatctacaaatcaaaacaattgagctaatgtctgggtcttagtcaattttgtaccctaagtacagggagcacagccattagaatacatgatgaatgctttaatacaggaatgaataggtgagaggcacagggtggttgggtgttcttctgatacatagtatcttccttgacacattcagtacaactctcaacaggtaagtctcttcatgtatgttaccttctgaggaattaagtggcagaacatgccttctattattttcctttgcagaacaagaccaattgcattagttgggaaacagtgctggctgcatctgagccccaagcaaccattagtctattgctatcaccacagactcagaggggatgacacacaggggcccagcaatctcacccaagtcaactccaccaacatttctggtcacccaccatgtgtacagtaccctgctagggtccagggtcatgaaagtaaataataccagactgtgcccttgaggaactcacctctgctaagggaaacaggcacagaaacccacaagggtggtcgagaggaaataggacaataggactgtgtgagggggataggaggcacccagaggaggaaatggttacatctgtgtgaggaggttggtaaggaaagactttaacagaaggggtctgtctggctgggcgtgcaaggatgtgtaggagtcatctagggggcacaagtacactccaggcagagggaattgcatgggtaaagatctgcagttgtggcttgtggggatggatttcaagtattctggaatgaagacagccatggaaacaagggcaggtgagaggatatttaagaggcttcatgccaatggctccacttcagtttctgataagaactcaggttccgtggactccctgataaaactgattaagttgtttatgattccccatagaatatgaactcaaaggaggtaagcaaaggggtgtgtgcgattctttgctactggctgcagctgcagccccgcctccttctccagcacataaacatttcagcagcttgacctaagactgctgtgcagggcagggatgctccaggcagacagcccagcaaacaacagcacacagctgaaagtaagactcagaggagacagttgaagaaggcaagtggcgatggacctcatcccaaatttggcggtggaaacctggcttctcctggctgtcagcctkgtgctcctctatctgtcagtaactgtccagattcctctcctctgttaacttggacttggggtgctactcaggcccctgttccctcatctgttttaaagatcaaaagagatgttcaaggaggagtagcttcttggatgctacaaacacatagaggttattattgatcttatgcagatttatgaagaaataaataagcatttgtcccagccaccttctaattttggtgactaggagggtttggggacagcatttgttagtgggaatgatttgattagcttagatttgacctatactaatcaatgaaaatgaaaacccagcaaaggcagattacaaactgctgaacaagacgagaagtgtgatcctcatccccttcccaggttctcgggattctgggggcaggagggagcagcttgggtttttgtctcattaccttcattttctgggttctctgtctgctggaagagatgtgtagaagtttttcctctgtggacctggtggttcctgctcccctaacttccaccccaggatatcatttacataacacaccggggaacaccaagacttcacgggaagctgtcccccggctcttccctctttcctgtgccatgtcccaaaacatcccctccctcctatgactcactcctcaccctgtcatacacagaactatttaccttgcaatgattaatctccagagcaaaggagacttggaggaagttttgaggatttatctttgctttaatctttttcctcccgtctctgggaggctagcattaatatagagctttgtttctcagctaatgggaatctgctagcagcctgaaaaggcaggagctgtgaaagccaatttggattttacacattttttcccctttgtgttacagtaaaggaggatgaaccctctcactggtgggattcctggcatcctagagcaggtggagagaagagttactttccactgtggttagtggaggctccacctgtcccattaacttctacctcaatttgactttta

SEQ ID NO: 675138 - DNA, 707 bp, Homo sapiens
tgtgcgattttgcgaaagggatggtgtgtcctacataattaaatgtgcctttagagccagtatcatattatggaatttgaatggcttatattcaaagaaattgattcctgcctgggaaggttatgatgaggttgataacttcttttacgggttcccaaactggaccaagagcccacctacatatgatttatctggggtggatgaaaaaaaaatgtatagatttcacagttaaggaataggggtgagtgccacktacaaagttcaccaggggtttctgatgagctgcaagatttgagagccactggattccagttcactccacatcttaacagctaacacctttgtaacttctccacttaaaaataaccaaacaaaaaatcggagggttttctcctagtttctggctttagtttccagtaactgcaattttaaaaagttccagatgatgattcttaggtctccttcaaatgtggttacacacacaaaaggtccaatcctaaagaatccactctctggatttcagtaatgcctattgagttttgtttgtataacaatatcagctccgtgcctggataggattacacagagtcagggagagcaagcacgttctgaggaaagcagcttgcccttcaataatctgataaacaggcgttaacagaagcaccacaagtactggatgccccggtctgcgagcctttgttgaacca

SEQ ID NO: 675139 - DNA, 1404 bp, Homo sapiens
aaggaatgagatccttcattcacatcctttgcagggatgtgaatgaagctggaagccatcatcctcagcaaactaatgcaggaacagaaaaccaaacactgcatgttcttacttaaagagggagctgaacacatggacacagggaaaagaacaacacacactggggcctggagagcagggaggggcgagggagagcatcaggaagaatagctaatgcatgctgggcttaatacccaggtgatgggttgataggtgcagcaaatcaccaggcgcactttmcctttgtaacaaacctgcacatcctgtacaagtacccctgaacttaaaataaaatgtaaaaaaacaaaggaatgggttgcagagtataatacatatcccaaaaccctaccaagtcaggcctatcactctgaaattccctccaagtcatgataagcagaaatgaaacttaaatcatttaacaaatcagagataataatcagtcacagcagatggtacagagtgggtttacaggtctaaggtaggatttttaaaaggtcccaaaataagagaaggagtttccagggcagcgagaaagggggaacaaaagggattgggccaagtatttatttaaagattttaaacaatctgtatggttataccagaccagcacttacaatgagccataacttttgaactaggatactattttccttcattttaaaaccaattctaggaattattataccctttgtcatttttcaaatcacagatatagtttgattatatggcacaaaacaagaggcttttcaatcctgccaaaatggtgatatctcctacagaaagacttattttgccatattggaaagccagctgtactactgcttagataaaatttttctttaaactggcccactttttataaaatctcaaatatgacttaataggaaatgtaacacatcaaaacggaaaactaacatggcttgccagacatgaagggtaccagggtataatgaaatccacgagatcaaattctaagatactctcccagcagactgaggtcagtcctatctcttcttgataaaaagaggtatgagcaagtgacagagagatgttaaagacctattagtacaaaactcactttctccttgatttaaaaaaaaaaaacctcaagaagaaatgactttattatgtgaaagtcaaatatttgtatcacaggagagtcatagagtcatttttcacatgacataaaaatgccaatgaatactacactcaaggaatacattgttagtattcttattattattatttttgagacagggtctcactctgccacgcaggctgggaatgcagtggtgtgatcagggttcactccagccttgactgggttcaggcgatcctcccacctcagccttccgagtagctggg

SEQ ID NO: 675140 - DNA, 623 bp, Homo sapiens
ttgacaaaaatgcataactgtactccagtcctgggatgacatcatacaccttcagattgagggatattctacagtaagtgatctgtactcctttgtcaagatcatgagagacaggagactgaagaactttttatagattggggagggctaaggagaaataacagctaaatgtaatgtgggatcctggataagatgctggaattgaaaaaggacattaagggaaaatctagtacaattcaaataagatttttcattcagttkatgagttaattctgtcacgctcgtgtcaatttcctggttttgatcattgtactgtggctgtgggccacagtcaacatttggggaagctgggtcagggatatattctttgtactgttttagcagcaacttctctataaatctaaacttctctcaatacaaacttatttttttaaaaagtaataattagtatgcataacaaaactaggttaaacaatttcttttccgggctgggcgtggtggctcacatctgtaatcccagcactttgggaggccgaggcgggcggatcccctgaagtcgggagtttgagaccagcctggccaacatgatgaaacccgtctctaaacaagaaggtataagccct

SEQ ID NO: 675141 - DNA, 656 bp, Homo sapiens
caaaattgggggcattatagtgaaagtcctatagtatatatttagggtcatatgtagaattcaatttataactttcagtcaggagactctacctgcacctcaggctaactctactccacccttcaaataaaaagaaggagaaygaggtaatgctcataaatcaacacgtggataaagaaactgtgtacacacacacacacacacacacacacacacacacacacacaatggaatactactcagacataaaaagggatgaactaatggcattcacagcaacctggatggaatgggatactattattctaagtgatataactcaggaatggaaaaccaaacatcatatgttttcactcataagtgggagccaagctacgagaatgcaaagacataggaatgataacgctggactttggggactcagcggggaaagggtgggaagaggacgagggataaaaagctacatattgggttcagtgtatactgctcaagtgatggatgcagcaaaatctgatgaatcaccactaaagaacttactcatgtaaccaaataccctgttccccaaaaacctactgaaatacaaactagaaataaatattttttttaaaaaagtaagtaaaaaccaaagatcagagcagcatatcctgcatctcagt

SEQ ID NO: 675142 - DNA, 656 bp, Homo sapiens
caaaattgggggcattatagtgaaagtcctatagtatatatttagggtcatatgtagaattcaatttataactttcagtcaggagactctacctgcacctcaggctaactctactccacccttcaaataaaaagaaggagaatgaggtaatgctcataaatcaacacgtggataaagaaactgtgtacacacacacacacacacacacacacacacacacacacacaatggaatactactcagacataaaaagggatgaactaatggcattcacagcaacctggatggaatgggatactattattctaagtgatataactcaggaatggaaaaccaaacatcatatgttttcactcataagtgggagccaagctacgagaatgcaaagacataggaatgataacgctggactttggggactcagcggggaaagggtgggaagaggacgagggataaaaagctacatattgggttcagtgtatactgctcaagtgatggatgcagcaaaatctgatgaatcaccactaaagaacttactcatgtaaccaaataccctgttccccaaaaacctactgaaatacaaactagaaataaatattttttttaaaaaagtaagtaaaaaccaaagatcagagcagcatatyctgcatctcagt

SEQ ID NO: 675143 - DNA, 1929 bp, Homo sapiens
tggtggtgcacatttgtgatcccaacactttggaaggctgaggtaggagaatcacttgaggctaggagctcaagaccagcctggtcaacatagcaagaccccttcgctacaaaaaaattaaaaaattagttgggtgtggtcgtgtgtgcctgtagtcccagctactcgggaggttgaggcaagaggatcatttcagcctaggagttagaggctgcagtgatctctgattgcaccactgccctccagcctggaagacagagcaagaccttgtctcaaaaaaaacaagttaaaaaagaaaaagatttaaaaatggtgtctagcacacacacagtaagttttcaattaagatgatctagctaagagctatgtattttttttgtatcttattattttatatcttaggtgctctaacatatttgaaaacccatatgcttaaaaggaccagggagcaggcctggtggctcatgcctttaattccaacactttgggaagctgagatggaaggcttgcttgagcccacgagtttgagcccagtctgsgcatcacagtgagacctaatctgtgccggaaaaaaagcacataaagaaagaaagaaagaaactaattagctggacatggtggcatgttcctgtagtcctggttacttgagagtttgagatgggaggatcgcttgagtttgggaggttgaggctgcagtgggccgagattgcaccgttgtgctccagtctggacggcagagagagaccctgtctcaaaaagacaaacaaacaaacagacaaaaaggaccagggaggctccctgtaagtagctaaaggggcttacagaattaaatacaggagcaagggtaatctgatatctggcatcccagctgaggggagaatagtgattagtaggggcagtggtgaaggggagaacatttgcactaagtgaagatggcccacaactgtgcatccgggccagttgttgccgtatgtttcaggatggcttgataccaacatttttaaagggaagagtaaagtctgattgtcctgtgttctttcccctttgtaaaggttggcaactgattgacatttaaaaaccgctatatttttgggtttcatagagtaggctatcagtttgccgtgtttgctctgggttgatttaggttactcaacaataaaggtaaatagttaatttagaccttgtaagaccttgtgaccatagcaatcattttcccagtcctctgctttcacagacaagggagtagctttgggcaaagttacatggcccgttagtgacagtacttttactttttatgaaaatgagctttacttttacacattctttgatttggggagttatatggtttaacatactcattttttaacaattcaccatgcatttaaaacatgagcctagtgattgttagaacaaaggagggaaatacactgaaatttgaacagtggttatggttatttttattttcttgtttatgctttttatgtactctcttgcctatttaatgtactctgctcattaatgtactttgcctaatgtgcttctatagtgaatatttattgctttcattatcagaaaaagcaataaatgccattaaaaaaagaattcatcatggaaatgcctagatatgtgataatataatgattgattagtttcatggctcccaagattgttgcccataacgtggtggttcatttcgtttgctccatgaaaatgatagtgcgtcttattttgcacctgagatatgtttagatgggtcttccttaggtctgctgcgatttctttgactgaaggggtttgtgaccaccacggggcatgtaagttgctggtgccactcctgggcagcttgcctgtaagggataccgtctgtgttggcagaaccaggggcttgtcctgctgggctggagcccaccaactgttgcagctacagtg

SEQ ID NO: 675144 - DNA, 1929 bp, Homo sapiens
tggtggtgcacatttgtgatcccaacactttggaaggctgaggtaggagaatcacttgaggctaggagctcaagaccagcctggtcaacatagcaagaccccttcgctacaaaaaaattaaaaaattagttgggtgtggtcgtgtgtgcctgtagtcccagctactcgggaggttgaggcaagaggatcatttcagcctaggagttagaggctgcagtgatctctgattgcaccactgccctccagcctggaagacagagcaagaccttgtctcaaaaaaaacaagttaaaaaagaaaaagatttaaaaatggtgtctagcacacacacagtaagttttcaattaagatgatctagctaagagctatgtattttttttgtatcttattattttatatcttaggtgctctaacatatttgaaaacccatatgcttaaaaggaccagggagcaggcctggtggctcatgcctttaattccaacactttgggaagctgagatggaaggcttgcttgagcccacgagtttgagcccagtctgcgcatcayagtgagacctaatctgtgccggaaaaaaagcacataaagaaagaaagaaagaaactaattagctggacatggtggcatgttcctgtagtcctggttacttgagagtttgagatgggaggatcgcttgagtttgggaggttgaggctgcagtgggccgagattgcaccgttgtgctccagtctggacggcagagagagaccctgtctcaaaaagacaaacaaacaaacagacaaaaaggaccagggaggctccctgtaagtagctaaaggggcttacagaattaaatacaggagcaagggtaatctgatatctggcatcccagctgaggggagaatagtgattagtaggggcagtggtgaaggggagaacatttgcactaagtgaagatggcccacaactgtgcatccgggccagttgttgccgtatgtttcaggatggcttgataccaacatttttaaagggaagagtaaagtctgattgtcctgtgttctttcccctttgtaaaggttggcaactgattgacatttaaaaaccgctatatttttgggtttcatagagtaggctatcagtttgccgtgtttgctctgggttgatttaggttactcaacaataaaggtaaatagttaatttagaccttgtaagaccttgtgaccatagcaatcattttcccagtcctctgctttcacagacaagggagtagctttgggcaaagttacatggcccgttagtgacagtacttttactttttatgaaaatgagctttacttttacacattctttgatttggggagttatatggtttaacatactcattttttaacaattcaccatgcatttaaaacatgagcctagtgattgttagaacaaaggagggaaatacactgaaatttgaacagtggttatggttatttttattttcttgtttatgctttttatgtactctcttgcctatttaatgtactctgctcattaatgtactttgcctaatgtgcttctatagtgaatatttattgctttcattatcagaaaaagcaataaatgccattaaaaaaagaattcatcatggaaatgcctagatatgtgataatataatgattgattagtttcatggctcccaagattgttgcccataacgtggtggttcatttcgtttgctccatgaaaatgatagtgcgtcttattttgcacctgagatatgtttagatgggtcttccttaggtctgctgcgatttctttgactgaaggggtttgtgaccaccacggggcatgtaagttgctggtgccactcctgggcagcttgcctgtaagggataccgtctgtgttggcagaaccaggggcttgtcctgctgggctggagcccaccaactgttgcagctacagtg

SEQ ID NO: 675145 - DNA, 1929 bp, Homo sapiens
tggtggtgcacatttgtgatcccaacactttggaaggctgaggtaggagaatcacttgaggctaggagctcaagaccagcctggtcaacatagcaagaccccttcgctacaaaaaaattaaaaaattagttgggtgtggtcgtgtgtgcctgtagtcccagctactcgggaggttgaggcaagaggatcatttcagcctaggagttagaggctgcagtgatctctgattgcaccactgccctccagcctggaagacagagcaagaccttgtctcaaaaaaaacaagttaaaaaagaaaaagatttaaaaatggtgtctagcacacacacagtaagttttcaattaagatgatctagctaagagctatgtattttttttgtatcttattattttatatcttaggtgctctaacatatttgaaaacccatatgcttaaaaggaccagggagcaggcctggtggctcatgcctttaattccaacactttgggaagctgagatggaaggcttgcttgagcccacgagtttgagcccagtctgcgcatcacagtgagacctaatctgtgccggaaaaaaagcacataaagaaagaaagaaagaaactaattagctggacatggtggcatgttcctgtagtcctggttacttgagagtttgagatgggaggatcgcttgagtttgggaggttgaggctgcagtgggccgagattgcaccrttgtgctccagtctggacggcagagagagaccctgtctcaaaaagacaaacaaacaaacagacaaaaaggaccagggaggctccctgtaagtagctaaaggggcttacagaattaaatacaggagcaagggtaatctgatatctggcatcccagctgaggggagaatagtgattagtaggggcagtggtgaaggggagaacatttgcactaagtgaagatggcccacaactgtgcatccgggccagttgttgccgtatgtttcaggatggcttgataccaacatttttaaagggaagagtaaagtctgattgtcctgtgttctttcccctttgtaaaggttggcaactgattgacatttaaaaaccgctatatttttgggtttcatagagtaggctatcagtttgccgtgtttgctctgggttgatttaggttactcaacaataaaggtaaatagttaatttagaccttgtaagaccttgtgaccatagcaatcattttcccagtcctctgctttcacagacaagggagtagctttgggcaaagttacatggcccgttagtgacagtacttttactttttatgaaaatgagctttacttttacacattctttgatttggggagttatatggtttaacatactcattttttaacaattcaccatgcatttaaaacatgagcctagtgattgttagaacaaaggagggaaatacactgaaatttgaacagtggttatggttatttttattttcttgtttatgctttttatgtactctcttgcctatttaatgtactctgctcattaatgtactttgcctaatgtgcttctatagtgaatatttattgctttcattatcagaaaaagcaataaatgccattaaaaaaagaattcatcatggaaatgcctagatatgtgataatataatgattgattagtttcatggctcccaagattgttgcccataacgtggtggttcatttcgtttgctccatgaaaatgatagtgcgtcttattttgcacctgagatatgtttagatgggtcttccttaggtctgctgcgatttctttgactgaaggggtttgtgaccaccacggggcatgtaagttgctggtgccactcctgggcagcttgcctgtaagggataccgtctgtgttggcagaaccaggggcttgtcctgctgggctggagcccaccaactgttgcagctacagtg

SEQ ID NO: 675146 - DNA, 656 bp, Homo sapiens
atccaaacagctatttgcttgccctaagcaatgcctacaggaggccactaataatgcagtgcttttgtcagatttgcaaaaggtaatggttttatagggattgctctagtttttgtacctatataatctttttctcctttgtttattctgcttatttattttatcttttyctccctatttcagcacagctagatttgatccatgagaccctagaaaacagaacttgggtcagtggatgaagatatgggggaaggactctctagctaacctgagttactaagtaatatattatctgtcagtattaatgttaagattggaggaccactggtgggagtgttgcagtggggaacataaacactggatcttaatttttgatgtccttaggctaactgattcttttaccagcctttatagggataggaggacagaaaatatactaaaaacaatatactcattaatattcatggaaggcaaggaagccatagctttttattgatattcatgatttttcacctttggtagactatgaaccagtcaaggtcagtgagtgcatttgataaccctggacaataatattggttgtgatacttatgctaatgatgcagtgatgacaagatttatcttttaagtagattaagagcaagggctctgaaatc

SEQ ID NO: 675147 - DNA, 656 bp, Homo sapiens
atccaaacagctatttgcttgccctaagcaatgcctacaggaggccactaataatgcagtgcttttgtcagatttgcaaaaggtaatggttttatagggattgctctagtttttgtacctatataatctttttctcctttgtttattctgcttatttattttatctttttctccctatttcagcacagctagatttgatccatgagaccctagaaaacagaacttgggtcagtggatgaagatatgggggaaggactctctagctaacctgagttactaagtaatatattatctgtcagtattaatgttaagattggaggaccactggtgggagtgttgcagtggggaacataaacactggatcttaatttttgatgtccttaggctaactgattcttttaccagcctttatagggataggaggacagaaaatatactaaaaacaatatactcattaatattcatggaaggcaagraagccatagctttttattgatattcatgatttttcacctttggtagactatgaaccagtcaaggtcagtgagtgcatttgataaccctggacaataatattggttgtgatacttatgctaatgatgcagtgatgacaagatttatcttttaagtagattaagagcaagggctctgaaatc

SEQ ID NO: 675148 - DNA, 656 bp, Homo sapiens
atccaaacagctatttgcttgccctaagcaatgcctacaggaggccactaataatgcagtgcttttgtcagatttgcaaaaggtaatggttttatagggattgctctagtttttgtacctatataatctttttctcctttgtttattctgcttatttattttatctttttctccctatttcagcacagctagatttgatccatgagaccctagaaaacagaacttgggtcagtggatgaagatatgggggaaggactctctagctaacctgagttactaagtaatatattatctgtcagtattaatgttaagattggaggaccactggtgggagtgttgcagtggggaacataaacactggatcttaatttttgatgtccttaggctaactgattcttttaccagcctttatagggataggaggacagaaaatatactaaaaacaatatactcattaatattcatggaaggcaaggaagycatagctttttattgatattcatgatttttcacctttggtagactatgaaccagtcaaggtcagtgagtgcatttgataaccctggacaataatattggttgtgatacttatgctaatgatgcagtgatgacaagatttatcttttaagtagattaagagcaagggctctgaaatc

SEQ ID NO: 675149 - DNA, 1441 bp, Homo sapiens
aataattgtttcaaaacaacttatgtaacatcctcattttttctttaaagtcacttgtcttcctttacttctgtgaatatctccattgtttactacattgcaatgcccactcctgaataaacttattatccttggagcatctcttcttgcctgttatgtaggttgacaaagtgaatgtctaaagtagagcaaaatagtagctcattgaaggatgaggtgaggacaggttacctgcacatataatgaagtcatggaaactgttggtgggcttgtgtcaatgatttgataaataggaagtaactatggccaggtttatatctgtgggatgaacagctatgcttctcctaaattttactaacatttgaaagatgaactaaacaattattttagcactgaaaaatttgagaatataatttttaaatgtctagcacttcatgtgcatatactctactacaataatataattttaaatatcatcattaacctactttaaagatgaaagtattgaaggttgagtaacttgcccaagtcacaaatattcccagaggctgaactgttagtcaaacacaaatctcttgactctagttcctgcaaccccaagcctaatctaaactagatgccctctacaaactgaattgcacatgtctagctcatttggttcaacatcagactcaccttgaatggttgatgaatatggcccccacatgaggagtgatacttataaaaagcatacagagcaggaatatgaagtcccttctaaatttgatgttccatcatttgaatgtcctaacatgccttttgtaatgaataagtttaataaccttgatcattttctatgttcctaagaaaaatctaggcccagatatttcctgaggcccttaataatacaatcgataatatctcagtgaaacatcctcagaaacagaataaatgtaatagaaacatgtatatcactaaatttataggttattttttgacatcacacactagagtttaattttttattggactattttcaaaatcgtatgttgaaagagaagaaatgtgatcttggtccactgaggaaaatgattcgacactcagaattagattccttactttgcataaatcctattttgtaagagtgaattaattayccataaaaagaaatgagtagctttagttgtattttaaagcttgatataccctcaccagcactggaaattgaaaagatcaatcttgcaaagaatgggaagttgtcttcaagccataaaagatgttttcagaatgactatctcaaggaggcatgagagaaagaaagatgaacggaatgtcaaagcaaattggcatttgtcccatactttcttgggtaatgttctcatggaaagaaagaatttttagtctttttccatcaatctgtagattttaaaggcttgaaggttatcatagtccatttcactca

SEQ ID NO: 675150 - DNA, 1169 bp, Homo sapiens
aatgattgttagttgaccactacgaaaacagttgagaattgcttcagccacttggaaagtaaaaaaaaaaaaaaaaaaaaaaaaatcaagaatgccaagtaactcacgctgtcagcgatgtggtgggacgcacaaagagtttataaaatcagcctgccagcatttgcccctcacccacatataagatacatgagggaaggttagggaaattgttccagaggcttcaaagttaatctgtacttttggcatttacccaaatagtagctgggggaaattggccctaaccaactgacagaaattaccctatgtggtctgggtaattactgatcatgttctctgatgtacctgtggttattgcctactgggagaatcaaatgggtagtgattgctttcctcaaggaaaaagtttaaggaaaaaaaaaaggagcttgcagtgtcatgaagaaaaaagtgcaaggtagaatcactcctaaaaatgtaaaggaaatgtacaggtattagacttgataagataacgggtccatctggaaatctgtgaggagaaaacaaaaatttggactttcaactacagacacatggaggtgagaagagatatgaggaaagcatgtggaaatgatatcctttatcgagtttttctttcattccattattgcctgaggtcccaaaagtaggaaagaaattcaagaatgccaataacttgcactcacctcttagggaggggctagatcccatatacaaaactgctattgagaggtgacagcctgctagcagccctggcagccctcgctcgctctgggcacctcctcagccttggcgccaactctggccgcccttaaggagcccttcagcccggccctgcactgtgkgagcccctttctgggctggccgaggccggagccggctccctcagttgcggggaggtgtggagggagaggcacgggcgggaaccgaggctgcgcgcggcgcttccgggccagcgcgagttccgggtgggcgtgggctccgcggcccagcactcagagcagccggcggagccgccccgcccggggcagtgaagtaaggcttagcacccgggccggcagctgcggagggtgcgccgggtcccccagcagtgccggcaggcgctcaaattctcacctggcctcagatgcctccccgcggggcagggc

SEQ ID NO: 675151 - DNA, 292 bp, Homo sapiens
aatttcaggcattgtttatcattaatattaatcatttattgttttctttagtataactatttaatattaattatcattatcggtattgattttaaaaattatagtatcagtttttaatattgataattattagtatcaattaataattgatattattaattgcgatacgtaatattgcgacattcctcacmatatcgcagaaaatatacacccccctgtgatgttgttcctgacagccaggggtagacgatgagattactccaaatatcgaactgagtgtacatcccttctg

SEQ ID NO: 675152 - DNA, 630 bp, Homo sapiens
ttttttattatctttttaatgtctatgggatctgtagtgatgtccctctttcattttcgatattagtaatttatatcttctctctctttttcttagttagcttgggtagaagtttatccattgcttttggttctgttgattttcactactgacttatttttaattcatkggtttttgctctagtttttatggtttattttttctgcttacttaaaatttaatttgctcttcttttactagtttcctaaggtggaagcttagattattgattttagagctttctccttttctaatatatacattcaatgctataaatttctctctaagcattgatttcactgcacccacaaaatttgatggtgtccaagtctccaggggcttacagagtgtaaatgtgtatgaacaggtgagtcatgggcccctggatttccagggagcctacatttcctgctttctgtagcatgtggtccagagtcctactgagaaacctgctgcagacacacccttcccagtaaccagctaactaaccaaccaaaacccaagaaactaggaaatcctaaccagtgtttcctaatcatcagatttctgaggggtagggtctgagtatctgtactttttaggccctctatg

SEQ ID NO: 675153 - DNA, 630 bp, Homo sapiens
ttttttattatctttttaatgtctatgggatctgtagtgatgtccctctttcattttcgatattagtaatttatatcttctctctctttttcttagttagcttgggtagaagtttatccattgcttttggttctgttgattttcactactgacttatttttaattcattggtttttgctctagtttttatggtttattttttctgcttacttaaaatttaatttgctcttcttttactagtttcctaaggtggaagcttagattattgattttagagctttctccttttctaatatatacattcaatgctataaatttctctctaagcattgatttcactgcacccacaaaatttgatggtgtccaagtctccaggggcttacagagtgtaaatgtgtatgaacaggtgagtcatgggcccctggatttccagggagcctacatttcctgctttctgtagcatgtggtccagagtcctactgagaaacctgctgcagacacacccttcccagtaaccagctaactaaccaacsaaaacccaagaaactaggaaatcctaaccagtgtttcctaatcatcagatttctgaggggtagggtctgagtatctgtactttttaggccctctatg

SEQ ID NO: 675154 - DNA, 404 bp, Homo sapiens
aaaatacaaagagcatgtagcctgcatgcgaggaagacatttacgaggcagatgaaagtattgttctgaatatcactcaatgcaccaattaaataaggaaacrggaaaccttgacaatttaaaaaatatatactaagcatatcagtatcataacttaacatattttacaaatgttagagacctaatgaatttgactaaagcagtttaattaaggtatagtctgctgtgttgcaacccccttccagacaaaatagctcggtgaaaaggtagtacgtccccagtgaactgtgaatatcaaagtcggagaaaattcttcattttaatgagctgcgttttctgagcccagacctctcccctgacagggtggctgcaggaggcaaaagtgaaagtagttgttttccttt

SEQ ID NO: 675155 - DNA, 1469 bp, Homo sapiens
ctgtgagccattggaataaactagctggtttacacatatcttctcattgactcttacaaccagtgagacagggacggtccctatacaacagatgtgaaaatagggcttgaagaggtgagtggttggccccccagttcatgggataaacagcagagcttgccgctgatcaagtactgcatttacaagatgcaggaaaacagcatggtaaggataagacaggggcatccaaatgttgagtcccatctctccccttagtcatctttctatccacttttatacaatggtgtccttgaaaaaaactactgtaaaataccatacaaagtgtttattttctaagccctacrtatttatttttcttatacattgtaagtcagatattgggtttaaaggtgtatattttaggagttttatttggaatctcaggtgaccagccagatgaggagggctcagatctgtaattacgcttaactaattagaagttaatagggcaagaaagtgctggtcttttgtttacaaatcattaacagtgtgttggtaacagatcaattaattatcttttaaaacatgtgcattaaagtttacaacaactttaataaagttatttgcattatagaaacaatttgaatctggatgacatttataggttacttactatttggtaattaataatgtctttaagataaaattatacaatataagactgagaatttagtcttagatacaatttaaagcccattccctaaccatgttgtagatatggtctattctccgttacaggtaaattaccagaaattgtttttaatgattctgactgtggaaacttgtactttatacaatgacaaatcctatactcctgatgttctgagtaaaggggaaaggttgattgagagcaattaattcagagttcactgtctaaccatgaacattttacctcaatggcaactacaggtaattaattccacatctgagtggaaaattataaaagaaaactctatcgaagtgaagagatgataaattacaaagaacaacaactggggtagtgctttgattttcatacttcattttgtaaaagtgtagagaaggcatttctttcatatcatgtttgttctcattaaatcgaagctcttaaaatgattaacaatttagatcacatataattaatgatatagatttattgtggcagtaaacactttagggagcacttctttgataatttaagctgagaagttcataaaaatgtgtataatagtatatacatatataaacatgtttgtgtacctatatatatttatatatatatatgtatagatataatgtatgtatacttctaaatatatgtaagttgtgtcttatttccaagagcttacttctcctgtaaggctctttcttgatggactccatcagctctgcttcacctaactcctctttacccatccttcagatttcagtccaagcaacatttttattaa

SEQ ID NO: 675156 - DNA, 727 bp, Homo sapiens
cctcctcagcctactcaacacgaagacaatgacaatgaagacctttatgattattcacttccactaaatgaatagtaaaatacgttctgttccttgtaattttcttaataacattttcctttttctaccttgttttactgtatgaatacagtacataatacatrtatcacacaaaattgtgtgttaactctttatggtactggtaaggcttcaagtcaacagtaggcaattggtagttaagtttggtgggtgtcaatttatacatggatttgcaactgctcgaggtgtcagtgcccctattctccatgctattcaaaagtcaattataatttggtgaccaatttttataaagtgaactttgtgtttttatatcttaagtaaatagagttaagtaaatcttgcttcttattttattatacattactattgatccatgtaaggccttttcttatttccttcttagctatacccaccattttaataggtgatcattctgttgtgtttagtgaatccttttttatgtgttcttgtaaaatgtgctctgattagtggaaagctattattaattaaataagtaatactgtgtgatatatttcattatgttcctttctttttcacaggcatctttttaatatccattcattgttgtgtttctaattcattgtttctaattgctacatggtaagttaccatgatgtacaatcatcacactttatccattgtttta

SEQ ID NO: 675157 - DNA, 727 bp, Homo sapiens
cctcctcagcctactcaacacgaagacaatgacaatgaagacctttatgattattcacttccactaaatgaatagtaaaatacgttctgttccttgtaattttcttaataacattttcctttttctaccttgttttactgtatgaatacagtacataatacatgtatcacacaaaattgtgtgttaactctttatggtactggtaaggcttcaagtcaacagtaggcaattggtagttaagtttggtgggtgtcaatttatacatggatttgcaactgctygaggtgtcagtgcccctattctccatgctattcaaaagtcaattataatttggtgaccaatttttataaagtgaactttgtgtttttatatcttaagtaaatagagttaagtaaatcttgcttcttattttattatacattactattgatccatgtaaggccttttcttatttccttcttagctatacccaccattttaataggtgatcattctgttgtgtttagtgaatccttttttatgtgttcttgtaaaatgtgctctgattagtggaaagctattattaattaaataagtaatactgtgtgatatatttcattatgttcctttctttttcacaggcatctttttaatatccattcattgttgtgtttctaattcattgtttctaattgctacatggtaagttaccatgatgtacaatcatcacactttatccattgtttta

SEQ ID NO: 675158 - DNA, 727 bp, Homo sapiens
cctcctcagcctactcaacacgaagacaatgacaatgaagacctttatgattattcacttccactaaatgaatagtaaaatacgttctgttccttgtaattttcttaataacattttcctttttctaccttgttttactgtatgaatacagtacataatacatgtatcacacaaaattgtgtgttaactctttatggtactggtaaggcttcaagtcaacagtaggcaattggtagttaagtttggtgggtgtcaatttatacatggatttgcaactgctcgaggtgtcagtgcccctattctccatgytattcaaaagtcaattataatttggtgaccaatttttataaagtgaactttgtgtttttatatcttaagtaaatagagttaagtaaatcttgcttcttattttattatacattactattgatccatgtaaggccttttcttatttccttcttagctatacccaccattttaataggtgatcattctgttgtgtttagtgaatccttttttatgtgttcttgtaaaatgtgctctgattagtggaaagctattattaattaaataagtaatactgtgtgatatatttcattatgttcctttctttttcacaggcatctttttaatatccattcattgttgtgtttctaattcattgtttctaattgctacatggtaagttaccatgatgtacaatcatcacactttatccattgtttta

SEQ ID NO: 675159 - DNA, 1508 bp, Homo sapiens
tgcattctttagtgaagtgactgtataaatattttgcctatttgtatttaactttttgagtcgtacttttttgtgtattctgtatacaaatamtttttttaggcctgcattgtgaatattttctcacagcctgtggcttgcttagtttcttaactgcatctcttgatgagttttatagttttttttaaataaatagcccgttttcttttagtttgtttcaagtagcagattcctcttgacttgcctgaggaaaattttccaagtgaatagactaaagtaaagatgtctatacaaggcttggagcatccatgcttcctgtacttagaattgttcattgtagttgaaaggctctctctctacctcctgaaaaataaaagagaagcattgttgatggtttttcttgggtctgtgcttcacgttttccatttcattgcatatctgggtctctatcaagagctagtctgactaatggaaagtgctctgggtattgtttgaaaaattcttggttttcacaggacacgactgcttttggaagaattgctttatgtctgggaaagtaagaattatggcatcttattgaaaaataatgtgtttttgaaaatttcctgtcagaaaattgttaaacttttgcaaaaaatggaagttggttgcagcaatcacattccaaggatctgagaatcctggtaggtgggaacgttgcaaatcacagcaaaacgcagttgctagcatatccttctcactttacgttactgataatgtgtggctccagcctttgcaggtagtcagtgaggaaaccttttgtctgttcttgatcagttccttttgaattttcccaattgccattctaaatcttcatctcttgcctcatcccaacctaaaacacaactcctaacctcataaaaagatgctcagttcagtttagccaatgataattaagtgcttactaaatgcccgaaacttagcaaaaagcacgatacttgtccatgagaaattgacaatccaggcaaaactttgaaatctcctatataaaaatgtatttaaatatgtatccaaacttctctactcttatgtttggaaagagttgtctttcattttggggaaagttggttcttcaacctgcattgttcttgctcccttagtctctttgggaagcttttctccatcaattgtcccatttcttacctataacagcaggaacctgtggtccattttcttcccttcctcatacaaatttagcatagagcttaacgttgagctgccttatagacttttcttaattcttgtgtttggataaaaaaaatgtaagcaaatgtaagtatttatcacaatctctcaagaaaatgccaaagaggtaaggttgtcagataaaatacagaccacccagttaaatttgaatttcagataaacaatgaatacttttttcatgtaaatatgccccatatgtagtataaatctgtcccatacaatatttggtatatacttataaaaatattcatcatttgtctgaa

SEQ ID NO: 675160 - DNA, 1508 bp, Homo sapiens
tgcattctttagtgaagtgactgtataaatattttgcctatttgtatttaactttttgagtcgtacttttttgtgtattctgtatacaaatactttttttaggcctgcattgtgaatattttctcacagcctgtggcttgcttagtttcttaactgcatctcttgatgagttttatagttttttttaaataaatagcccgttttcttttagtttgtttcaagtagcagattcctcttgacttgcctgaggaaaattttccaagtgaatagactaaagtaaagatgtctatacaaggcttggagcatccatgcttcctgtacttagaattgttcattgtagttgaaaggctctctctctacctcctgaaaaataaaagagaagcattgttgatggtttttcttgggtctgtgcttcacgttttccatttcattgcatatctgggtctctatcaagagctagtctgactaatggaaagtgctctgggtattgtttgaaaaattcttggttttcacaggacacgactgcttttggaagaattgctttatgtctgggaaagtaagaattatggcatcttattgaaaaataatgtgtttttgaaaatttcctgtcagaaaattgttaaacttttgcaaaaaatggaagttggttgcagcaatcacattccaaggatctgagaatcctggtaggtgggaacgttgcaaatcacagcaaaacgcagttgctagcatatccttctcactttacgttactgataatgtgtggctccagcctttgcaggtagtcagtgaggaaaccttttgtctgttcttgatcagttccttttgaattttcccaattgccattctaaatcttcatctcttgcctcatcccaacctaaaacacaactcctaacctcataaaaagatgctcagttcagtttagccaatgataattaagtgcttactaaatgcccgaaacttagcaaaaagcacgatacttgtccatgagaaattgacaatccaggcaaaactttgaaatctcctatataaaaatgtatttaaatatgtatccaaacttctctactcttatgtttggaaagagttgtctttcattttggggaaagttggttcttcaacctgcattgttcttgctcccttagtctctttgggaagcttttctccatcaattgtcccatttcttacctataacagcaggaacctgtggtccattttcttcccttcctcatacaaatttagcatagagcttaacgttgagctgccttatagacttttcttaattcttgtgtttggataaaaaaaatgtaagcaaaygtaagtatttatcacaatctctcaagaaaatgccaaagaggtaaggttgtcagataaaatacagaccacccagttaaatttgaatttcagataaacaatgaatacttttttcatgtaaatatgccccatatgtagtataaatctgtcccatacaatatttggtatatacttataaaaatattcatcatttgtctgaa

SEQ ID NO: 675161 - DNA, 1508 bp, Homo sapiens
tgcattctttagtgaagtgactgtataaatattttgcctatttgtatttaactttttgagtcgtacttttttgtgtattctgtatacaaatactttttttaggcctgcattgtgaatattttctcacagcctgtggcttgcttagtttcttaactgcatctcttgatgagttttatagttttttttaaataaatagcccgttttcttttagtttgtttcaagtagcagattcctcttgacttgcctgaggaaaattttccaagtgaatagactaaagtaaagatgtctatacaaggcttggagcatccatgcttcctgtacttagaattgttcattgtagttgaaaggctctctctctacctcctgaaaaataaaagagaagcattgttgatggtttttcttgggtctgtgcttcacgttttccatttcattgcatatctgggtctctatcaagagctagtctgactaatggaaagtgctctgggtattgtttgaaaaattcttggttttcacaggacacgactgcttttggaagaattgctttatgtctgggaaagtaagaattatggcatcttattgaaaaataatgtgtttttgaaaatttcctgtcagaaaattgttaaacttttgcaaaaaatggaagttggttgcagcaatcacattccaaggatctgagaatcctggtaggtgggaacgttgcaaatcacagcaaaacgcagttgctagcatatccttctcactttacgttactgataatgtgtggctccagcctttgcaggtagtcagtgaggaaaccttttgtctgttcttgatcagttccttttgaattttcccaattgccattctaaatcttcatctcttgcctcatcccaacctaaaacacaactcctaacctcataaaaagatgctcagttcagtttagccaatgataattaagtgcttactaaatgcccgaaacttagcaaaaagcacgatacttgtccatgagaaattgacaatccaggcaaaactttgaaatctcctatataaaaatgtatttaaatatgtatccaaacttctctactcttatgtttggaaagagttgtctttcattttggggaaagttggttcttcaacctgcattgttcttgctcccttagtctctttgggaagcttttctccatcaattgtcccatttcttacctataacagcaggaacctgtggtccattttcttcccttcctcatacaaatttagcatagagcttaacgttgagctgccttatagacttttcttaattcttgtgtttggataaaaaaaatgtaagcaaatrtaagtatttatcacaatctctcaagaaaatgccaaagaggtaaggttgtcagataaaatacagaccacccagttaaatttgaatttcagataaacaatgaatacttttttcatgtaaatatgccccatatgtagtataaatctgtcccatacaatatttggtatatacttataaaaatattcatcatttgtctgaa

SEQ ID NO: 675162 - DNA, 1508 bp, Homo sapiens
tgcattctttagtgaagtgactgtataaatattttgcctatttgtatttaactttttgagtcgtacttttttgtgtattctgtatacaaatactttttttaggcctgcattgtgaatattttctcacagcctgtggcttgcttagtttcttaactgcatctcttgatgagttttatagttttttttaaataaatagcccgttttcttttagtttgtttcaagtagcagattcctcttgacttgcctgaggaaaattttccaagtgaatagactaaagtaaagatgtctatacaaggcttggagcatccatgcttcctgtacttagaattgttcattgtagttgaaaggctctctctctacctcctgaaaaataaaagagaagcattgttgatggtttttcttgggtctgtgcttcacgttttccatttcattgcatatctgggtctctatcaagagctagtctgactaatggaaagtgctctgggtattgtttgaaaaattcttggttttcacaggacacgactgcttttggaagaattgctttatgtctgggaaagtaagaattatggcatcttattgaaaaataatgtgtttttgaaaatttcctgtcagaaaattgttaaacttttgcaaaaaatggaagttggttgcagcaatcacattccaaggatctgagaatcctggtaggtgggaacgttgcaaatcacagcaaaacgcagttgctagcatatccttctcactttacgttactgataatgtgtggctccagcctttgcaggtagtcagtgaggaaaccttttgtctgttcttgatcagttccttttgaattttcccaattgccattctaaatcttcatctcttgcctcatcccaacctaaaacacaactcctaacctcataaaaagatgctcagttcagtttagccaatgataattaagtgcttactaaatgcccgaaacttagcaaaaagcacgatacttgtccatgagaaattgacaatccaggcaaaactttgaaatctcctatataaaaatgtatttaaatatgtatccaaacttctctactcttatgtttggaaagagttgtctttcattttggggaaagttggttcttcaacctgcattgttcttgctcccttagtctctttgggaagcttttctccatcaattgtcccatttcttacctataacagcaggaacctgtggtccattttcttcccttcctcatacaaatttagcatagagcttaacgttgagctgccttatagacttttcttaattcttgtgtttggataaaaaaaatgtaagcaaatgtaagtatttatcacaatctctcaagaaaatgccaaagaggtaaggttgtcagataaaatacagaccacccagttaaatttgaatttcagataaacaatgaatacttttttcatgtaaatatgccccatatgtagtataaatctrtcccatacaatatttggtatatacttataaaaatattcatcatttgtctgaa

SEQ ID NO: 675163 - DNA, 665 bp, Homo sapiens
ttaatgttacatgaaataaatattggctgacttggctccttattgacttaagtttttgatagtaaattctctgtctgcaaaaatgtgctacaaaaatgtgtgtgtatttcagaacataatatagtttagaaaaatgaaagctgaactggaacctaatttcattttttttactactttaaatttgttttaattaggtaaattgaaattgtgaaactcaaagaaaaatgtgtaawgctaacctaagacaaaacgtactgtctgtaagaaatgaaataattttactactaaacctgcaattatttttttaaatactaaattattgctattttttaggaaggaaaagaaaaatgttctgtgttcttacagtcacaaatatttttcttttctgtatgaagaatactgagtacagtaggtatcccttatgttttaagttttataaaatgagtattactcagaactttaaatcacagcataatggtaattttgtcattaaaatatttacctctaagagaaacttgaattaaaatgttacttaggctttcaatttcgcttataatcaagggtagtttaaattatcactttatcaaagttctcttatattatttagataaatttatataccataaatatattgtaaatcctatgcatttgtgatcatttgtcta

SEQ ID NO: 675164 - DNA, 651 bp, Homo sapiens
taaggcaggcagatcatttgtggccaggagtttgggatcagcctggctaacatggtgaaatttcgtccatatttaaaaaaaaaaaatacaaaaattagctggctgtggtggcgcatgcttgtaggcccaactactcaggaggctgaggcacgagaatcgcttgaacttgggaagtggaggttgcagtgagccaagatcgcaccactgcactccagcctgggcaacagagccagaccctgtctcaaaaaaaaaaaaaaaaaaaaaagcttcatgacaggtgctaggaaaacgaagcaataaacaaagcaggcccaatcttctttcatccactatagcctagtgtgttagtctgctcacattgccataacaaaataccacagactgcaggcttaaacaacagaaatttattttctcacagttttggagtctaraagttcaaggtcaacatgttgtcaaagttggtttcttgtgaggcctctgtccttggttggttggcggctgtcttctctctgtgtcttcacatggtcttccctctgtgcatgtctgtgtcctaatctcttcttaatattatttttttatgttgcccagtgatatggttttgctgtgtccccacccaaatctcaacttgaattgtgtctcccagaattccca

SEQ ID NO: 675165 - DNA, 588 bp, Homo sapiens
tacctccaagaacagcatggtgagggcactaagctgagagcctgcrgagatgagatctgtcctgcatccaaatcactgtgtgcacatgagaaagtcactggtcctttctgattcccagcttccattcagtaaatggccagtttagacaaatcaaatggcagatacatagcatgcaagctgcactgcaacagaaactgcacgttggtcacagcgtatcttcccaatgtgcctggatatggcctcagaatcatttccaacacagagctccagtccaccactaatcaatgaaacctactagctatccctgaattagacattttctagggttcccaccaagcttctttgcagcaaaagtcagagaaaccaggagaaggtcccaaagagatccactatctgatttcagaaaggactaagactaaaggctttatagaaaacccataagcttttacagagctccgttgggagtcccatgtttctttatggcataatgggtgagaacacagacttggaagccaaaccacctgaatttgaaccccagttccatttaccaactgtcaaaagcttaggctttgattctgagcctgtttc

SEQ ID NO: 675166 - DNA, 1355 bp, Homo sapiens
cttgaaacttggtatgggtgaggaggagatgaataaaaagaaagaaaaagaatccctatttgcattatagttaggttgaagattgggtttcctcagcctggctccctccccagccccattaaacatctctatcatcatctgggcaaactgctgagtcatcacagccttggagtatgtggtggagagacaaactgaggacacccttccggacaagtagaggattgctttgttcagataaggtgaaggttgctcttgtgcttaccctgacggtatcgccaaggtgctcttaacagtcaaatgagggcaaagatatccaaacctcatttcagtggaagacaggctaagggaaagaaagcaagacatgttgattgtatagaagcttctgcatggcaccatttgtctaatctgcctcccctgctggtgccgttctcatcagtggttcctgtgacactttagttttatcttctggaaggcaaccagggttttggccaaccagtgatgagcttcttggtacagttatgtgtctggctttattttggtgtgatcatkctaagtggtgatgtgattcttgcctacagccctgaagattgaagaatatactgaaaagctacaaaagcatctgccgtcagcgggtacagtaaaaaacaaacaaatacagaaaggcaggcatctagctccagccttgctatgggagagaggggtatgggttgggcctcataccttcaggactcagccagtatcttcattagggttagttttgacgcttgagacaaggaattacagcatgtaaatggaatgacaatgaaattagtccttaaaagtaaaattagacacaacttgctaaaaatcaggattggcttagattctcaagaactgtgagctttatagcagtcatttgatgtggaatgtctggccttctctgttacagaaaatctggaaaatatagaaagggttaaagacaaaaaaaggtctgatctggtcccatagctctttgaactctctctgctctagtgcgcatcttactgcattgtagttacctgtttaaatgtctgtcactcctcccactgggctgtaggccacttgagaccagaggcatgtcccattggttttttatatttgtcccaggtttggtattgttgctggatataggggtcccattctggatcccaaaagagggttcttgagtcttgcacaaaaaagaatcctgggtgagtccacagaataaaatgaaggcaagtttattagagaagtggagaaacaaaagaatagcaaccccgtaggcagagcagccctgagggctgctagttagctattttcatggttatttcttgaccatatgctaaactggggtagat

SEQ ID NO: 675167 - DNA, 1340 bp, Homo sapiens
  misc_feature 427, 428, 429, 430, 431, 432, 433, 434, 435, 436, 437, 438,439, 440, 441, 442, 443, 444, 445, 446, 447, 448, 449, 450,451, 452, 453, 454, 455, 456, 457, 458, 459, 460, 461, 462,463, 464, 465, 466, 467, 468, 469, 470, 471, 472, 473: n = A,T,C or G
  misc_feature 474, 475, 476, 477, 478, 479, 480, 481, 482, 483, 484, 485,486, 487, 488, 489, 490, 491, 492, 493, 494, 495, 496, 497,498, 499, 500, 501, 502, 503, 504, 505, 506, 507, 508, 509,510, 511, 512, 513, 514, 515, 516, 517, 518, 519, 520: n = A,T,C or G
  misc_feature 521, 522, 523, 524, 525, 526: n = A,T,C or G
gattctagataagtccgatgcagttgcacaggccaagccctccaggtcagatccttcttcaaaagccaggaatccagtgttgcaagcacagtctctggggccayggcctggtgtgtggggagcccacagaacaggaaagaacgctggagtggacactgccacttgcctgcctggccccaacacatgctgctggcggtggacggtcccacccagcttgctgagattgtttcctggcttgtgtcacccacctgtatgaaatgagaggcagctgcagaagtacctttccctaaaatccagatttactgaacccataaagtagggggttaagtttccctagcaagggtccagtaggggttaagtttccctagtggtggcctgtgccataaatgctactggaccctcactaggggcagctgccaggcagatnnnnnnnnnnnnnnnnnnnnnnnnnnnnnnnnnnnnnnnnnnnnnnnnnnnnnnnnnnnnnnnnnnnnnnnnnnnnnnnnnnnnnnnnnnnnnnnnnnnnatcaggtctaagaatcaaaactgtaacgctaaaacttgtgtttgcacttaacccctcctcgagattttccaaatgcaaggaggttcctccctaacccctggcctttcccattgagagtcattgatccagtcctcactcaacttataaaaagaccgcctgcacgatattatgaatttctcaacctgttaccttaaccccatccgactccttgcaaagtagtaactattatgaaagggaaactagttgtggttctcaaacttgaacatgcatcagaatcacttggagggcttgttaattcccagaaccatggagctcacctctatagtttctaattttgtagatcagaggacagggcaggagaatctgcatttctatcaggttctcaggtggtactgatgtggttagtctgagcccagtcgcaagtctatactttgagaagcctaggcacagaggaaggtcagtgggcagagaactatctcaagggactatccacaacccaacctggctggttcagagcctctgtccagcagccagagctgccaggcttgaacgactcactcattctaacacaattcacaaaagatttttttttttttgaaacagggtcttgctctgtcactcaggctggagtacagtagcatgatcatggctcagtgcagcctcgacctcccagactcaggcgatcctcccaccccagcttcccaagtagctgggactataggagtgtgccaccatgcccggctaacgttaacttttttttttttttccttttttttagaaatggagtctctctacgttgcccaggctgctggtc

SEQ ID NO: 675168 - DNA, 895 bp, Homo sapiens
taatttaacaaaatctcttgcctttaagcaaatggaaccaaagaatggcrtatttaattgaaacccacaagctcccaaacctcatttcaggcaccagtttacataaccgtttttaccttactttgactagagtccctattgataagagttccatgttaaaactcctctgcctttccacactatgaactttatttctcttaacaagtatttgttgagcacctagaagatgcatagctaaaagctcaatgttgctgtaaaaatacaaatataagagacagcaacatccaggaaacatcctatagagagaaaaatcacaaggcaataagtcagtttcccacaacatgctcctaggaaaacacactacttgatttaatagtttttatatgaaaaaacaattcaaccattaaatagttttgagaactgcaagcttgaacaaagttaaataattttcttttttgtcagctctctcagaaccttgactgggctaatgtgaattgtaaatctctaagacagggatgcacgatgcagtccttcctgtattacttgattgtgaaacacctttttatgtgcatcatcttccaccaatcacacttggagaaacactaagttaagtgatatcgtctgttctattcacttaagaagtttcgaggacagagacagagtggaatgtttgagaaagacttccagagaagactgaatttaaactgaattctgggctagattctcagataaaaataaaatttggatagacccggggaaaaaaaaaagagagagagagagatttcttatgagagaagacatgaatgcaccaaaatttagagttaggaataagcatggcacatttagaagtcagtcagcaaagagaacggtcttattagagagaagagttcatgtg

SEQ ID NO: 675169 - DNA, 463 bp, Homo sapiens
agtgtcaggacctgggatttgaccctcctggggttttggcctggggccacaactgactgctttctgctatttgtctggagggtctgtgatttcagatggaggctcaccccagagtccttggggcacccccacctttcctggcactgggaggataccccaaggcctgggcaggttctccaccagctggctatggcccaaaggagaggcttcggaggactttcccttataaggacaacagctcagctgtgatgaaacttctcagcctcctagctggggaggcgggagaggggaaatgayggtggctccaagggttacagctgagtttgagcctcctcaggaacttgcccacaagcctccactctctgttgtcataattttatgggaggaggggccaggcagggcttgggaccagagggggtggcccacagaagggaagatgcctacattgaggcctagggaggag

SEQ ID NO: 675170 - DNA, 640 bp, Homo sapiens
tggcttgttaactaaatgtgcatgcctgtgtcttaagtttttatatatgtatataaatgttgtagcatatgaaatatatgcctacstatgtgtttatgtaatagcattaaaatttgcatgtatggcctgtgaacatacttgcatatgtgtgtgtttcacattacctggaaagtaactgttattttctgctgcctcagaatttcagacttctaaatgcttgacttttaggtgctaaattattgttagtgctaaaggaattgttcattacttttaatggcaaaaactgcaattcctattgcaccaacctaacatcttattacggcatgttaacaaattccaaaagcagttttgcagcatgtagcttgtctaatcacattttaggtaattctagattcatagaagtgggtcaggaaagaggagaaattacataaaaagcgttatcagagagctgaggtatttcctccctcttcaacaaatcaagagacttcagagaataatctgaaaagtgtaagagtccccaggatttgggaatcctgggaatatatctgaatctcacctgtgaaagtatgagagaaaggtgtggctagtgcagcagctggtggcagactagagagatattacgaaagtatgcttttttccc

SEQ ID NO: 675171 - DNA, 589 bp, Homo sapiens
catagtccggctcctctccttgttttacagggagatcaaagttcacaacaattgtgacctgcttcacatcaatccctagaagaggaaaaacactgtagggtcctgcaatgctttcctcagtacacgggccattcaagtaccacgtctgccaagggaattcctatttatagagaaaatttagaaatccaaccagggcttatgtaattgagacaggtactttggttaggaagtttgcttgcatgctgtgatgtctatgatgctagatgagcgtgtccatagagaatgctacagaaatgtaaatatacacaaggcgtgtgtgtgtgtgtgtgtgtgtgtgtgtgtgtgtatgtgtgtgtgtggtggagaggtgccctcaccaagcccacagagccaccctctcctctctgctcctgctgtgccaagtccccagcaggccccrtagtctcacacccgcttgcccgtcatggggctctggctatgctccgtttcatggctactgtcctggtcaggtcttttgagcccttgcctcagtggttacaacaacttccagactggtttctcaccactctcttcccctactcctctcatc

SEQ ID NO: 675172 - DNA, 1168 bp, Homo sapiens
aaaggatcaatacttggggtacagcaatagttgagtggcagaaaagaggtgggaggagagccaggacagggtactctcagagttccacgaatgagagtttcaggagaaggcagtgaacacacttggtatcacacaggctgccttctttcattctgcactttctccctggaagactttattcttaccctttacttaaactacatccacctatatgcaaatgagtcatacatccatatctccaggccatatgtttcatctaagctccatgctcagtcctcattcttttttacttcttaaaagtaggctaagtaacttgtccttatcacaaaccagggagtagaggaggcagaatttgtgcctagataatatgataccataatatgagcttatattctacctacttttatctccacctggaagtccccagggtatctcaaattctacatgcccaaaatctaactctgcctctcaaaacagttttcttcctgtattccctatctcagaaaacagaatccagctgcacaaacaggaatcctatgaataatccatgacctgcctctctttcacatcccaaccccagtcaatccatttcaagtcatcatgagttctagcaactaactatctctatccccttcttgaaatctctggctattatcctcctagcctaaaccaccacagtcttccacctggaataatccaactatctcccacttggacttcacatacaatcttctcctcttcaaatccattctcctcagtgctgccaacagataatttcaaatgcaaaactgaatatgtagcccttatctgactaattagccatgccccaaccctgcttaaaacacttcagtttstatagctcttatcaaatctcttgccttggcctacaggacctgcatgatttgacccctgcctatctctcagtctcatctctaccattattttctttgctggtctttctgtttcttgactcttccattcttatagacctttgagtatgcttttcccactacctagcaaactcctttcaccctcttcacttccctccacgtcctttcacctacttatccttcaattcttggttcagtgacactatgccaaatctccctattattaaatgttctcattgaaccatttgcctttccttagcattgaacacaactgtaat

SEQ ID NO: 675173 - DNA, 710 bp, Homo sapiens
tcacactctcagcttcacttatataaaaataagaatatttgaagtaaatattctccatcaattatatttttcattttctacaattttctatgtctaaatataagctcatagcacttactgaaaaaagcagattccatcatcatgcccctgacacctacaaggaaacaaatcacaaaatctgtaatatatttcacaaaataaacatgctgaccttgtctacatatcccttcacattattccctatacctctcaagacatggtctggctctgtgtccccacccaaatctcatcttgaattgtaatccccacatgtcaagggaggaaccaggtgggaggtgactggatgatgggggtggtttcccccaagctgttcttgtgatagtgagttctcacgagatctgatggttatatatgtgtttgacagttcccccttaacacgctcttgtctccctcctgtcgccttgtgaggaaggcgcctacttccccttcgccttctgtcatgactrtaagtttcccgtggcctcctagccatgctttctgttaagcctgtggaaccgtgagtcactaaatccctttcttttataattacccagtctcaagtagtattctttatagcagtgtgagaacggactaacatacctcattacaccccaaaatgttcggcaatccagtatctaatggaaatacactagaacttacaagaagctttt

SEQ ID NO: 675174 - DNA, 710 bp, Homo sapiens
tcacactctcagcttcacttatataaaaataagaatatttgaagtaaatattctccatcaattatatttttcattttctacaattttctatgtctaaatataagctcatagcacttactgaaaaaagcagattccatcatcatgcccctgacacctacaaggaaacaaatcacaaaatctgtaatatatttcacaaaataaacatgctgaccttgtctacatatcccttcacattattccctatacctctcaagacatggtctggctctgtgtccccacccaaatctcatcttgaattgtaatccccacatgtcaagggaggaaccaggtgggaggtgactggatgatgggggtggtttcccccaagctgttcttgtgatagtgagttctcacgagatctgatggttatatatgtgtttgacagttcccccttaacacgctcttgtctccctcctgtcgccttgtgaggaaggcgcctacttccccttcgccttctgtcatgactgtaagtttyccgtggcctcctagccatgctttctgttaagcctgtggaaccgtgagtcactaaatccctttcttttataattacccagtctcaagtagtattctttatagcagtgtgagaacggactaacatacctcattacaccccaaaatgttcggcaatccagtatctaatggaaatacactagaacttacaagaagctttt

SEQ ID NO: 675175 - DNA, 710 bp, Homo sapiens
tcacactctcagcttcacttatataaaaataagaatatttgaagtaaatattctccatcaattatatttttcattttctacaattttctatgtctaaatataagctcatagcacttactgaaaaaagcagattccatcatcatgcccctgacacctacaaggaaacaaatcacaaaatctgtaatatatttcacaaaataaacatgctgaccttgtctacatatcccttcacattattccctatacctctcaagacatggtctggctctgtgtccccacccaaatctcatcttgaattgtaatccccacatgtcaagggaggaaccaggtgggaggtgactggatgatgggggtggtttcccccaagctgttcttgtgatagtgagttctcacgagatctgatggttatatatgtgtttgacagttcccccttaacacgctcttgtctccctcctgtcgccttgtgaggaaggcgcctacttccccttcgccttctgtcatgactgtaagtttcccgtggcctcctagccatgctttctgttaagcctgtggaacygtgagtcactaaatccctttcttttataattacccagtctcaagtagtattctttatagcagtgtgagaacggactaacatacctcattacaccccaaaatgttcggcaatccagtatctaatggaaatacactagaacttacaagaagctttt

SEQ ID NO: 675176 - DNA, 649 bp, Homo sapiens
caatggtaggacaggcagagggtaactgccatgtgaccttcttgctcaaaagtggaaaaaatgagaggaacaacatagttattggtgcacataattctgaaatcaaggtggcaatgttagaagttcctagagtggaacttaggacctgggaataatttttcataactcgtggctctggcctgagatcttggttctaatttctaatttccttctattttcattgaaaggtaggmcaaatttgcatctgcatagtgttttcaacttgcttcctgccagtggaattttggggatccaaagggcccctcttcaatcaaaggtggtatttctgccaatataatgctttgaaaaactttgtgaatcttgtagaggtccactccattagataaaaagcacactcataaatgagaaaaactcttctcaaccttaaacttctgctaagtgacatacatttacacttcgtataggacctactacttcaatcgaaagtttctctgaggttcatcttaaatcctcctgaggtcttaacaaaggaatttacactcacatccttagacaatgcttttctaagaaggccctggatttgatctttgcttagaagccatttcttaatcttagccatttgacatactgagaaactgagaattctcaa

SEQ ID NO: 675177 - DNA, 649 bp, Homo sapiens
caatggtaggacaggcagagggtaactgccatgtgaccttcttgctcaaaagtggaaaaaatgagaggaacaacatagttattggtgcacataattctgaaatcaaggtggcaatgttagaagttcctagagtggaacttaggacctgggaataatttttcataactcgtggctctggcctgagatcttggttctaatttctaatttccttctattttcattgaaaggtaggccaartttgcatctgcatagtgttttcaacttgcttcctgccagtggaattttggggatccaaagggcccctcttcaatcaaaggtggtatttctgccaatataatgctttgaaaaactttgtgaatcttgtagaggtccactccattagataaaaagcacactcataaatgagaaaaactcttctcaaccttaaacttctgctaagtgacatacatttacacttcgtataggacctactacttcaatcgaaagtttctctgaggttcatcttaaatcctcctgaggtcttaacaaaggaatttacactcacatccttagacaatgcttttctaagaaggccctggatttgatctttgcttagaagccatttcttaatcttagccatttgacatactgagaaactgagaattctcaa

SEQ ID NO: 675178 - DNA, 649 bp, Homo sapiens
caatggtaggacaggcagagggtaactgccatgtgaccttcttgctcaaaagtggaaaaaatgagaggaacaacatagttattggtgcacataattctgaaatcaaggtggcaatgttagaagttcctagagtggaacttaggacctgggaataatttttcataactcgtggctctggcctgagatcttggttctaatttctaatttccttctattttcattgaaaggtaggccaaatttgcatctgcatagtgttttcaacttgcttcctgccagtggaattttggggatccaaagggcccctcttcaatcaaaggtggtatttctgccaatataatgctttgaaaaactttgtgaatcttgtagaggtccactccattagataaaaagcacactcataaatgagaaaaactcttctcaaccttaaacttctgctaagtgacatacatttacacttcgtataggacctactacttcratcgaaagtttctctgaggttcatcttaaatcctcctgaggtcttaacaaaggaatttacactcacatccttagacaatgcttttctaagaaggccctggatttgatctttgcttagaagccatttcttaatcttagccatttgacatactgagaaactgagaattctcaa

SEQ ID NO: 675179 - DNA, 649 bp, Homo sapiens
caatggtaggacaggcagagggtaactgccatgtgaccttcttgctcaaaagtggaaaaaatgagaggaacaacatagttattggtgcacataattctgaaatcaaggtggcaatgttagaagttcctagagtggaacttaggacctgggaataatttttcataactcgtggctctggcctgagatcttggttctaatttctaatttccttctattttcattgaaaggtaggccaaatttgcatctgcatagtgttttcaacttgcttcctgccagtggaattttggggatccaaagggcccctcttcaatcaaaggtggtatttctgccaatataatgctttgaaaaactttgtgaatcttgtagaggtccactccattagataaaaagcacactcataaatgagaaaaactcttctcaaccttaaacttctgctaagtgacatacatttacacttcgtataggacctactacttcaatcgaaagtttctctgaggttcatcttaaatcctcctgaggtcttaacaaaggaatttacactcacatccttagacaatgcttttctaagaaggccctggatttgatctttgcttagaagccatttcttaatcttagccatttgacatactgagaaactgagaattytcaa

SEQ ID NO: 675180 - DNA, 2351 bp, Homo sapiens
aagaagttggaattcagacccaaacagaatagctctagaggccatgtcataatcccaaagctaagagctgtctgccaaatgttgttcacttctctctcttgcagttattcagcactttttgtactttctacctgatgactacattcttcaaccaccccatcataaccgccatyactattttgggagaagagttcagttctttttccccatcaatcaaaagaagacctttaaatttacagttctttcagccaaagaaggtaggccaaataaattcccagggcctgcgatgaggaatactggtatatcataacatccctgtgttacattcaccgtgttttctttccctgctcaactgtatgaatcagtgacttagttcaggatatgcatacttccactctctcctatgttgagatgagttcttctgcccgccactcaatatgtgggaaaacattttgtacttaaaactgttaaactgagtatctccagattcaaatgtctcacaggatgcctggaagtttataagcaagtatgactcctggtgggttccttttaatatctcaaaatctctagcgaaaatatgcagattgcttttagcctttattgttgcaattattttgctcaaagtaaaactggctttcaattttttccttcttgtaccaatatcttaatttttctttaattttttataaaatttcataataaatttggataacatacataaactacagataatttttaatcactaaaattaggtagtttgccagtttgttgagaggattaaaatgagttatataagtaaagcacttaaaacagtatctagcacataataggtaccagctatgataaacattaataataatgattagtgaaaaataaagctatagggagcctgggagacttacctggagccttgtacaatctgtgtctaccttgagtaattcaaactgtatttgctatggtatgagagttgctggaagaaaagctcccagatgatctagaagtttttttgttctctctctactcacttttaagactttaggacaagaatagtagggcccacaatgccgaattaatcaagtttcaatttcgttaactttctgtctcaatagcaaatctgtaactctacctaaacttcacttccaccttggaaaatgaagtaattttatcttttctcatgcaattctcctgtctttacagtctccgttgtgcctttctctatcaatttttttctctgtcctgaatcttttaatttctccactttcttcatcttatgaccatattcatttcttgaccctgcacccctctaactccatctatttgttaaggaaggcttttgtagtcaagcttctagagaagtggctagcaaacatcatctttgtttcctctccagtcatgcacacctcttaatcccactgaaactgtggtacggttatcaattacctttatagagatgaatttgaattttattggggcatttatgtcgtaaaatattaactactccatcatttcctttccttactccatcactgtcctccctgggcttctgagacatccttttctgggttctcctaatgtgaccgctctttcttaactcactgtctcaatatgtagtgattccctaccgctaatagttttaaaatagaacatatatagtcttccaaaataattctaactgtcctcatagtttcaattttcattctctgataatgatttccaaaatttatctccagtctttaactctccctgagcttcaaacaatatttaaagagctactggttgaaaatttctaaatctgttcaaagacatcaagtcacagattccagaagctttatacaaccaaaacaaaatacataacctaatacataggtatagcataataaaacatctgaaaacaataaagatattatttcttaataggaagggtagaaacttcttctcaatggtattacatcttttaaattgatgaaagaaaataaattataacagaattcaatgaaaagcaaaacatccttcaaaaatgaaggaaataaaagatttttttcagataaatgaaaactgaggttcagcaagcaccaataaacagcaaatgatcctagatggaagtataatacataaggtattgaagaatgtcaaaagtcataaaaaggtgaataaacctaaatgaatgctaactgtttaaaatagtatttttgcaaggttttaaattttataaagtttgtaatgacagttacataaaaggtaaaagggaggtaaactgagttaagatactgtagatatgtgcattaccctgaaaatgtaaaacattaatacaggatagattttaaggatgcaagatacatttgtaatctcta

SEQ ID NO: 675181 - DNA, 2351 bp, Homo sapiens
aagaagttggaattcagacccaaacagaatagctctagaggccatgtcataatcccaaagctaagagctgtctgccaaatgttgttcacttctctctcttgcagttattcagcactttttgtactttctacctgatgactacattcttcaaccaccccatcataaccgccatcactattttgggagaagagttcagttctttttccccatcaatcaaaagaagacctttaaatttacagttctttcagccaaagaaggtaggccaaataaattcccagggcctgcgatgaggaatactggtatatcataacatccctgtgttacattcaccgtgttttctttccctgctcaactgtatgaatcagtgacttagttcaggatatgcatacttccactctctcctatgttgagatgagttcttctgcccgccactcaatatgtgggaaaacattttgtacttaaaactgttaaactgagtatctccagattcaaatgtctcacaggatgcctggaagtttataagcaagtatgactcctggtgggttccttttaatatctcaaaatctctagcgaaaatatgcagattgcttttagcctttattgttgcaattattttgctcaaagtaaaactggctttcaattttttccttcttgtaccaatatcttaatttttctttaattttttataaaatttcataataaatttggataacatacataaactacagataatttttaatcactaaaattaggtagtttgccagtttgttgagaggattaaaatgagttatataagtaaagcacttaaaacagtatctagcacataataggtaccagctatgataaacattaataataatgattagtgaaaaataaagctatagggagcctgggagacttacctggagccttgtacaatctgtgtctaccttgagtaattcaaactgtatttgctatggtatgagagttgctggaagaaaagctcccagatgatctagaagtttttttgttctctctctactcacttttaagactttaggacaagaatagtagggcccacaatgccgaattaatcaagtttcaatttcgttaactttctgtctcaatagcaaatctgtaactcyacctaaacttcacttccaccttggaaaatgaagtaattttatcttttctcatgcaattctcctgtctttacagtctccgttgtgcctttctctatcaatttttttctctgtcctgaatcttttaatttctccactttcttcatcttatgaccatattcatttcttgaccctgcacccctctaactccatctatttgttaaggaaggcttttgtagtcaagcttctagagaagtggctagcaaacatcatctttgtttcctctccagtcatgcacacctcttaatcccactgaaactgtggtacggttatcaattacctttatagagatgaatttgaattttattggggcatttatgtcgtaaaatattaactactccatcatttcctttccttactccatcactgtcctccctgggcttctgagacatccttttctgggttctcctaatgtgaccgctctttcttaactcactgtctcaatatgtagtgattccctaccgctaatagttttaaaatagaacatatatagtcttccaaaataattctaactgtcctcatagtttcaattttcattctctgataatgatttccaaaatttatctccagtctttaactctccctgagcttcaaacaatatttaaagagctactggttgaaaatttctaaatctgttcaaagacatcaagtcacagattccagaagctttatacaaccaaaacaaaatacataacctaatacataggtatagcataataaaacatctgaaaacaataaagatattatttcttaataggaagggtagaaacttcttctcaatggtattacatcttttaaattgatgaaagaaaataaattataacagaattcaatgaaaagcaaaacatccttcaaaaatgaaggaaataaaagatttttttcagataaatgaaaactgaggttcagcaagcaccaataaacagcaaatgatcctagatggaagtataatacataaggtattgaagaatgtcaaaagtcataaaaaggtgaataaacctaaatgaatgctaactgtttaaaatagtatttttgcaaggttttaaattttataaagtttgtaatgacagttacataaaaggtaaaagggaggtaaactgagttaagatactgtagatatgtgcattaccctgaaaatgtaaaacattaatacaggatagattttaaggatgcaagatacatttgtaatctcta

SEQ ID NO: 675182 - DNA, 2351 bp, Homo sapiens
aagaagttggaattcagacccaaacagaatagctctagaggccatgtcataatcccaaagctaagagctgtctgccaaatgttgttcacttctctctcttgcagttattcagcactttttgtactttctacctgatgactacattcttcaaccaccccatcataaccgccatcactattttgggagaagagttcagttctttttccccatcaatcaaaagaagacctttaaatttacagttctttcagccaaagaaggtaggccaaataaattcccagggcctgcgatgaggaatactggtatatcataacatccctgtgttacattcaccgtgttttctttccctgctcaactgtatgaatcagtgacttagttcaggatatgcatacttccactctctcctatgttgagatgagttcttctgcccgccactcaatatgtgggaaaacattttgtacttaaaactgttaaactgagtatctccagattcaaatgtctcacaggatgcctggaagtttataagcaagtatgactcctggtgggttccttttaatatctcaaaatctctagcgaaaatatgcagattgcttttagcctttattgttgcaattattttgctcaaagtaaaactggctttcaattttttccttcttgtaccaatatcttaatttttctttaattttttataaaatttcataataaatttggataacatacataaactacagataatttttaatcactaaaattaggtagtttgccagtttgttgagaggattaaaatgagttatataagtaaagcacttaaaacagtatctagcacataataggtaccagctatgataaacattaataataatgattagtgaaaaataaagctatagggagcctgggagacttacctggagccttgtacaatctgtgtctaccttgagtaattcaaactgtatttgctatggtatgagagttgctggaagaaaagctcccagatgatctagaagtttttttgttctctctctactcacttttaagactttaggacaagaatagtagggcccacaatgccgaattaatcaagtttcaatttcgttaactttctgtctcaatagcaaatctgtaactctacctaaacttcacttccaccttggaaaatgaagtaattttatcttttctcatgcaattctcctgtctttacagtctccgttgtgcctttctctatcaatttttttctctgtcctgaatcttttaatttctccactttcttcatcttatgaccatattcatttcttgaccctgcacccctctaactccatctatttgttaaggaaggctwttgtagtcaagcttctagagaagtggctagcaaacatcatctttgtttcctctccagtcatgcacacctcttaatcccactgaaactgtggtacggttatcaattacctttatagagatgaatttgaattttattggggcatttatgtcgtaaaatattaactactccatcatttcctttccttactccatcactgtcctccctgggcttctgagacatccttttctgggttctcctaatgtgaccgctctttcttaactcactgtctcaatatgtagtgattccctaccgctaatagttttaaaatagaacatatatagtcttccaaaataattctaactgtcctcatagtttcaattttcattctctgataatgatttccaaaatttatctccagtctttaactctccctgagcttcaaacaatatttaaagagctactggttgaaaatttctaaatctgttcaaagacatcaagtcacagattccagaagctttatacaaccaaaacaaaatacataacctaatacataggtatagcataataaaacatctgaaaacaataaagatattatttcttaataggaagggtagaaacttcttctcaatggtattacatcttttaaattgatgaaagaaaataaattataacagaattcaatgaaaagcaaaacatccttcaaaaatgaaggaaataaaagatttttttcagataaatgaaaactgaggttcagcaagcaccaataaacagcaaatgatcctagatggaagtataatacataaggtattgaagaatgtcaaaagtcataaaaaggtgaataaacctaaatgaatgctaactgtttaaaatagtatttttgcaaggttttaaattttataaagtttgtaatgacagttacataaaaggtaaaagggaggtaaactgagttaagatactgtagatatgtgcattaccctgaaaatgtaaaacattaatacaggatagattttaaggatgcaagatacatttgtaatctcta

SEQ ID NO: 675183 - DNA, 1304 bp, Homo sapiens
ccatccacagccctcatctgtagctcccttgtttgttctgaagataatatattgattgtgtctctttcgatggcattccttccatgcttctcacatgaggaagagttactgctgttttccccaggagacctaaaatgactgcatttttacacatgttatttactgtatacgttctaatatcaaaatggtcaattcatttataatcttttwaacatgccttagagaataaagggtctgttattatgttttgtttatacgaggagcttttttctttttttgcatttaagttttactttacaacacataattgatcttgtgcccatgaatagttaacattaattatgcacaattagcatatgataatgaatgacacacgtttcgagcaaatattagacagcataattatactattattgcgttcagctatgcagattcacaaaatatgatggtgtgttcatctctattgaatccatttacctggactaaagtgatgacttaaaaatgaacacagtagaaaataaatgcaggtaagtcaaatactgttaagcactaaagaatatttccaagcggcaagagctgaaggtcggtagaccagttcttttgcttttagctagcaggatattttagatgcacattgtaggattttggagctcagtttaaaaatccttcagaattcaagggttgttttatgtaaagtgttctgacaggcaaaatgattcctttttaaacataattcacctctgctctgcaggcctcttgtggagaacaaaaacatctattcagagtaacaactgtttttggtatgcacagaatttaaggtgcttaagaagatgggaagccctacaacattatgccgttggtctaaaagcaccagatgaaatcaggtgagagaaataaggcttggagaaatcctctcactggctagaattatcaacaatagcttgactgtcttttcaagtgttctttcattatggcacttaattttttttcaagtaaaacaagataaacaagtaggctgtgattgaactttgactttctagttaagaattcgctatttgaagagtctattcgcctcacaaaaatgagacttcctttacaaagaaccacaaaagcccaaagtaaagataaccttatatttcccagattgtgagcatagaaaattattccgagtcgtcacacaaaccaattttcgcacctggacttgatccaggtacacggctgatagagacacactctgccctcctcctcctctcttttttgtgtactcatattaactttgaggaacccatcttgagagctcttgg

SEQ ID NO: 675184 - DNA, 1304 bp, Homo sapiens
ccatccacagccctcatctgtagctcccttgtttgttctgaagataatatattgattgtgtctctttcgatggcattccttccatgcttctcacatgaggaagagttactgctgttttccccaggagacctaaaatgactgcatttttacacatgttatttactgtatacgttctaatatcaaaatggtcaattcatttataatctttttaacatgccttagagaataaagggtctgttattatgttttgtttatacgaggagcttttttctttttttgcatttaagttttactttacaacacataattgatcttgtgcccatgaatagttaacattaattatgcacaattagcmtatgataatgaatgacacacgtttcgagcaaatattagacagcataattatactattattgcgttcagctatgcagattcacaaaatatgatggtgtgttcatctctattgaatccatttacctggactaaagtgatgacttaaaaatgaacacagtagaaaataaatgcaggtaagtcaaatactgttaagcactaaagaatatttccaagcggcaagagctgaaggtcggtagaccagttcttttgcttttagctagcaggatattttagatgcacattgtaggattttggagctcagtttaaaaatccttcagaattcaagggttgttttatgtaaagtgttctgacaggcaaaatgattcctttttaaacataattcacctctgctctgcaggcctcttgtggagaacaaaaacatctattcagagtaacaactgtttttggtatgcacagaatttaaggtgcttaagaagatgggaagccctacaacattatgccgttggtctaaaagcaccagatgaaatcaggtgagagaaataaggcttggagaaatcctctcactggctagaattatcaacaatagcttgactgtcttttcaagtgttctttcattatggcacttaattttttttcaagtaaaacaagataaacaagtaggctgtgattgaactttgactttctagttaagaattcgctatttgaagagtctattcgcctcacaaaaatgagacttcctttacaaagaaccacaaaagcccaaagtaaagataaccttatatttcccagattgtgagcatagaaaattattccgagtcgtcacacaaaccaattttcgcacctggacttgatccaggtacacggctgatagagacacactctgccctcctcctcctctcttttttgtgtactcatattaactttgaggaacccatcttgagagctcttgg

SEQ ID NO: 675185 - DNA, 2691 bp, Homo sapiens
  misc_feature 2482, 2553, 2581, 2591, 2592, 2593, 2594, 2595, 2596, 2597,2598, 2599, 2600, 2601, 2602, 2603, 2604, 2605, 2606, 2607,2608, 2609, 2610, 2611, 2612, 2613, 2614, 2615, 2616, 2617,2618, 2619, 2620, 2621, 2622, 2623, 2624, 2625, 2626: n = A,T,C or G
  misc_feature 2627, 2628, 2629, 2630, 2631, 2632, 2633, 2634, 2635, 2636,2637, 2638, 2639, 2640, 2641, 2642, 2643, 2644, 2645, 2646,2647, 2648, 2649, 2650, 2651, 2652, 2653, 2654, 2655, 2656,2657, 2658, 2659, 2660, 2661, 2662, 2663, 2664, 2665: n = A,T,C or G
  misc_feature 2666, 2667, 2668, 2669, 2670, 2671, 2672, 2673, 2674, 2675,2676, 2677, 2678, 2679, 2680, 2681, 2682, 2683, 2684, 2685,2686, 2687, 2688, 2689, 2690: n = A,T,C or G
gagagtagctattaaagtaagcaagtctttctcccctccctccagaatccttccttccctccccacccccgctttttttttgtggcaccaaaaatatgaccattgccaaaacaaaatatgattgggattgggtgattccagcatgagaataacagatggcaatgtctggcctatgtaaccgggactttccaaaaaactctcaactcagaatattaccacaataaagtatgcaaataagaatacaaatcacattaatgggcctgtgcatgcacacaagtttagaatagaagggcagtagtgtttgacatgtggtgccactgaaatggaatgcttaattacccataggtcaggattagagagaatattattgaaataaataacaatttgaaatcattgtttaaattttttactaactatttaatagagtttagtaagtaagaataggcaattttgctgaataattaccaaataatactgaagattaaatgtgaaaaaagcttgcaacactctcaggggggtcatatttgtataggggaaataactttattattcattctataattttcttttctttcaaaaagtgaagtaattttctttaatttttctgcaaattgtattgcccgatagtatgaagaaaagtaatttaaagatgtaaaccttttagttaagactgtaaacatagctttaactacaattaatatgattccacatattttaactgtcccatattatcttttttatattttaaaaggtatctatgattttcaatcaattaagcatcccattatatttgattaatgcagtagtaggaatcactgcaataaatctgactattgattcatttatttttgataatcggagttttccaactgttggataagttctccagagtcactgggaagttctcacccaaatcataattcacgatgggtcccttgaagacatagtcatgctgtagcaaaacagtttatgcaatatacttgtggtcactttgaataaaatgtccattgaaggtcagacttgaggcaggattggaggcgatagatgtgcttttccttgtcgatgctgacctgactctgaatccctaatgtgctaccagtgaaaccaagcttgtgcctttttgtggtaccagaacttccaggtaacagttagttccctggtggaggtgttgttaaattgacttctttcaccacagagcgggcaccatgaattgtcctcacaaaatagaaattgattctagatctgggtttgcttttttttttttttatcatttatcttctagcactatcatatgagagaaactttctgggtgacaatggaatctcaaattacatacagtcctacaaatcgatttaatttatagtgaaggaagctagagaatgaatgggtgcctatgagattcacagatcttaaccttttatctctcagaagcagctggtcttagacagtggtggaagagcttattaaagacatggttacagcaccgctgcaagacaagacccaggagtttgtagtgttgcctttagcatgtggcccaatatctgatcatgctatcaatacacactgctattttccccatacgggttcaggcataaaaacacaggaattgagtgaaattcctcacacaaaacacacctacaacagcaaaacatttgcttcccatttcagtgactttaggctttagagcccagtggaggaattctatcattggtgaacacatccattctccaatgaaataggattctgctcttcaatttaagtttgcttgtgcaactcgatgaaagggcaaggaaagagttccattatgggttgtgtagatccgtcagactaaagaagagaaaatagtgtttgtttattcatccaatgaagggtggggaaaaaacaaaaaagcatgaattgcactaagtgatcaccagcaacacttatcattgttacatgcacaagtagaagtccttgggatctgaatgcaacttcaaacgagaaccctggccataagtccaaggttctgattccttcagtaataaaagtttgcgcctctccactgggtagagaaaccaggttatccgagatgctaactgaagcatagtaaagaaggaatatcacagatgtcatccacttcaattgccttggggacagctgcagaattgagggctgtaatcacacggtggactgaaaagcacaggggaagtgacagcatgtggcaggtgtcggcgggctctcgaggtcagctgtgtggattgcacactgacttactaactctgtgggcttttaacctctctgtgcctcagttctgttcctctgaaaatgtggataacaatggcatctaccttctaaaattrctagtagtacaacatgatgtaacatagaaacaagtacaaaattaagtgcataagaaatactacttactaactagaaaagctattgttaacattatttattgctattgtatctcctccatgcagtaccatatatgtatgtagtnttataaagctctctctccctttttcctcttcatttatcttactattgaaaagaggacttgttggtcatatntaactttcatatgcagtcaagattgctngatattgatnnnnnnnnnnnnnnnnnnnnnnnnnnnnnnnnnnnnnnnnnnnnnnnnnnnnnnnnnnnnnnnnnnnnnnnnnnnnnnnnnnnnnnnnnnnnnnnnnnnng

SEQ ID NO: 675186 - DNA, 657 bp, Homo sapiens
ttctgcagggagactcccgtttataaaaccatcagatctcatgagacccattcactaccaccagaacagcacggggaagccctgccctcatgattcagtcatctcccaccaggtccctcctacaacatgtgggaattatgggagctacacgatgagatttgggtggggacacagagccaaaccgcatcacattgtatgtacatatcacactttctttatccattcatccattgatggacgtttaggctgtttccatctcttggttattgtgaataatgctgcttccaatgaacataggcatgcagatagcactttgcaatcctgttttcagtttttctggataaatacccagaagtgggacttctggatcatatgatagttctatttttaattttttgagtaacctcaatactatttcccataatagcagctacaccattttacctccccaccaatagtgcacaagggttctagtgtctccacattctcaccagcatttgttgttttctgttgttttatacatgttgtttctatacatatatatatacacattctcaccagcatttgttgtttctgttgttttatacatgtttttatacacacatatatacacacacacaatgrctattctaacaggtgtgaagtgatatcccattg

SEQ ID NO: 675187 - DNA, 248 bp, Homo sapiens
aaatgacttattcccttctctcaattacaactttcatagataatatacttgtgtcatcttcccttaggacataatctcaaatagctctatttttcaggcagctaacrtaaaggaatgaaagaagtcaagtaggaactttaaacaaaagcaaagctcctgcctatctaaagggaacaatagatgattgctgcgtgggaatattgactctatattgtgacattgttcaatcttccatgaaaagccaaaca

SEQ ID NO: 675188 - DNA, 579 bp, Homo sapiens
gagaataatttaagagaataatttttgttcatatttctttttttacctrtatagaaaaaggttttctataggtggtgtgtgtgaattatctgtttatgcaagtgaaggtatttagtcacaaaatattattttatagaatgactgtgtagcatttagaggaggctagaaaagggagacaaatggatctgcatgggcaaaggggcataattttaaaaagtatttatcataagtttaagtagttgtaaagaatgtaatttcagtgatagtataaacttctacattttaaaataaaacattcattttcctcttttaaatgtttccaatggaatctaaatactgtattgatttgattcctatatcatttattttaaaattacataaattagttcaaaatatattaacgattgtaaagtttacatcattactttttctcctttagctcatttttccattctacttttcctagggtattttatcttaatatgatttaattcttaaaaactaaattggtaatctaattatattactttggtaaagtatgtgtgtatatatatatatttagatatatgttatatctaa

SEQ ID NO: 675189 - DNA, 579 bp, Homo sapiens
gagaataatttaagagaataatttttgttcatatttctttttttacctgtatagaaaaaggttttctataggtggtgtgtgtgaattatctgtttatgcaagtgaaggtatttagtcacaaaatattattttatagaatgactgtgtagcatttagaggaggctagaaaagggagacaaatggatctgcatgggcaaaggggcataattttaaaaagtatttatcataagtttaagtagttgtaaagaatgyaatttcagtgatagtataaacttctacattttaaaataaaacattcattttcctcttttaaatgtttccaatggaatctaaatactgtattgatttgattcctatatcatttattttaaaattacataaattagttcaaaatatattaacgattgtaaagtttacatcattactttttctcctttagctcatttttccattctacttttcctagggtattttatcttaatatgatttaattcttaaaaactaaattggtaatctaattatattactttggtaaagtatgtgtgtatatatatatatttagatatatgttatatctaa

SEQ ID NO: 675190 - DNA, 579 bp, Homo sapiens
gagaataatttaagagaataatttttgttcatatttctttttttacctgtatagaaaaaggttttctataggtggtgtgtgtgaattatctgtttatgcaagtgaaggtatttagtcacaaaatattattttatagaatgactgtgtagcatttagaggaggctagaaaagggagacaaatggatctgcatgggcaaaggggcataattttaaaaagtatttatcataagtttaagtagttgtaaagaatgtaatttcagtgatagtataaacttctacattttaaaataaaacattcattttcctcttttaaatgtttccaatggaatctaaatactgtattgatttgattcctatatcatttattttaaaattacataaattagttcaaaatatattaacgattgtaaagtttacatcattactttttctcctttagctcatttttccattctacttttcctagggtattttatcttaatatgatttaattcttaaaaactaaattggtaatctaattatattactttggtaaagtatgtgtgtrtatatatatatttagatatatgttatatctaa

SEQ ID NO: 675191 - DNA, 595 bp, Homo sapiens
tttttttaaatttgtgtaacttaaatgttaggagacaaaagattatcttctctatacatctttctgctgaacactagaaacatacatctgagctaagaaatatactaacttggccgggcacagtggctcacagctgtaatcccaacactttgggaggccaaggtgggtggatcacctcrggtcagaagttcaaggccagcctggccaacatggcaaaaccctgtgtctactaaaaatacaacagttagctgggcgtggtggtgcatgcctgtagtcccagctacttgggaggctgagataggagaattgcttgaacctgggaggtggaggttgcactgagctgagatcatgccactgtactccagccggggtgacagaaccagactctgtttcaaaataaataaataaataaataaataccttgttttaagaaaaatgataacattatccagtgctactcttgacgatctttaatattttaatatagaaatatgggagccgaagcaggaaatcttttttgaaattacaggctttaaggttcttcaaagcttatatgaaacggtgaacattgtgattatcattttggaagccatta

SEQ ID NO: 675192 - DNA, 1222 bp, Homo sapiens
aactcaaatttaaagcatttcactgaagtagattcatatttaaatttaaacatgctaaattttgtattatgcctttgttcatccaacaaatatttattgaaatatgattatgtagcaggtatagtgttagtaactgctgaagctaagctaaattcaaggagacagggatcatagccgctcatagcttactaagggaaatattacactgtaatgtgaaaaaggaaaaaccaatgtattcatctacacacacacatacacacacacacacacacacacatttcatgtagcttcaggtttctctgataaacattctgaaattgctccttgaattttcagtacctaattaaaggtatggtagtttctctttaatactgtgatgccttgtttgtgagtttggataactcagtggcctttataactccagtcattcattaaagatgctattttgaaagcattgtctgggagtttatattgacttttcttgcaaatggacatccccaacctcctcacagtgagaactaatgaatataattttcacccatttcttctccacccgtttcttcttaacctacaatgcagttaaatccagtggttaaagaatctgttgagcatttcgtgtatgtaattccctaatagtggctctagatgtaatggtttgcattaatctrtttaacttagttttatgtaatgaattaaactaaaactcactctctctgtctgtctctctctctctctctctgtgtacatgtctttatttatttatttatttatttatttatttatttatttattttagacggagtctcgctctgtcgcccaggctggaatgcagtggcacaatcttggctcactgcaacctccgcctcccgggttcaagtgattctcctgcctcagcctcctgagtagctgggactacaggggcacatcactatgcccagctatgttttatattcttaatagagatggggtttcactcttctggccgggctggtcttgaactcccgaccttgcgatccacccaccttggcctcccaaagtcctgggattacagacatgagccaccacacctggctgtttctttttataaaaaatacaagcatatatatttagggttatgtggaataatatgcctttgccagtttagtgcttttgaacatacatcagtcatggcatttaggcatgatttgaattttacattttgagtcaaatgaaatctgggaag

SEQ ID NO: 675193 - DNA, 1222 bp, Homo sapiens
aactcaaatttaaagcatttcactgaagtagattcatatttaaatttaaacatgctaaattttgtattatgcctttgttcatccaacaaatatttattgaaatatgattatgtagcaggtatagtgttagtaactgctgaagctaagctaaattcaaggagacagggatcatagccgctcatagcttactaagggaaatattacactgtaatgtgaaaaaggaaaaaccaatgtattcatctacacacacacatacacacacacacacacacacacatttcatgtagcttcaggtttctctgataaacattctgaaattgctccttgaattttcagtacctaattaaaggtatggtagtttctctttaatactgtgatgccttgtttgtgagtttggataactcagtggcctttataactccagtcattcattaaagatgctattttgaaagcattgtctgggagtttatattgacttttcttgcaaatggacatccccaacctcctcacagtgagaactaatgaatataattttcacccatttcttctccacccgtttcttcttaacctacaatgcagttaaatccagtggttaaagaatctgttgagcatttcgtgtatgtaattccctaatagtggctctagatgtaatggtttgcattaatctatttaacttagttttatgtaatgaattaaactaaaactcactctctctgtctgtctctctctctctctctctgtgtacatgtctttatttatttatttatttatttatttatttatttatttattttagacggagtctcgctctgtcgcccaggctggaatgcagtggcacaatcttggctcactgcaacctccgcctcccgggttcaagtgattctcctgcctcagcctcctgagtagctgggactacaggggcacatcactatgcccagctatgttttatattcttaatagagatggggtttcactcttctggccgggctggtcttgaactccygaccttgcgatccacccaccttggcctcccaaagtcctgggattacagacatgagccaccacacctggctgtttctttttataaaaaatacaagcatatatatttagggttatgtggaataatatgcctttgccagtttagtgcttttgaacatacatcagtcatggcatttaggcatgatttgaattttacattttgagtcaaatgaaatctgggaag

SEQ ID NO: 675194 - DNA, 627 bp, Homo sapiens
caaccaagtgatttcacttagactggataaaatacacacagaaatacacacacatacacacacacacacacacacacrtgagagagagagagagagagagagagacagagagaacaagagacagtggttggttattataaaagttcagtactagaacccacttaaagatattagctactgcaccaaattgggaaggttatttaaatagctgcaatgaggaatacacatttttattgtgaaatattagagcttatgttgtcatctaaagtctagtaagaacaagtttcattaccagcatagagagaaaatgtttagttttatatttattactaaataagtaatagcattcttgtcttcttatcatatttatctcctctactacccttgtctccttgcacttggttttatgttaggtgggcagtttcctgtagttttccagttttcaaaaacttgccattttcactatgggccctgaagaggtaggttatatatgaataccagtcatatttgtttcttttctaggttagttgacaacaatgttgcttatcttcaagatccttaggagtgaatccttgttatttattttttgaatacaggatttattttttgaatacaggatttagggca

SEQ ID NO: 675195 - DNA, 627 bp, Homo sapiens
caaccaagtgatttcacttagactggataaaatacacacagaaatacacacacatacacacacacacacacacacacawgagagagagagagagagagagagagacagagagaacaagagacagtggttggttattataaaagttcagtactagaacccacttaaagatattagctactgcaccaaattgggaaggttatttaaatagctgcaatgaggaatacacatttttattgtgaaatattagagcttatgttgtcatctaaagtctagtaagaacaagtttcattaccagcatagagagaaaatgtttagttttatatttattactaaataagtaatagcattcttgtcttcttatcatatttatctcctctactacccttgtctccttgcacttggttttatgttaggtgggcagtttcctgtagttttccagttttcaaaaacttgccattttcactatgggccctgaagaggtaggttatatatgaataccagtcatatttgtttcttttctaggttagttgacaacaatgttgcttatcttcaagatccttaggagtgaatccttgttatttattttttgaatacaggatttattttttgaatacaggatttagggca

SEQ ID NO: 675196 - DNA, 627 bp, Homo sapiens
caaccaagtgatttcacttagactggataaaatacacacagaaatacacacacatacacacacacacacacacacacatgagagagagagagagagagagagagacagagagaacaagagacagtggttggttattataaaagttcagtactagaacccacttaaagatattagctactgcaccaaattgggaaggttatttaaatagytgcaatgaggaatacacatttttattgtgaaatattagagcttatgttgtcatctaaagtctagtaagaacaagtttcattaccagcatagagagaaaatgtttagttttatatttattactaaataagtaatagcattcttgtcttcttatcatatttatctcctctactacccttgtctccttgcacttggttttatgttaggtgggcagtttcctgtagttttccagttttcaaaaacttgccattttcactatgggccctgaagaggtaggttatatatgaataccagtcatatttgtttcttttctaggttagttgacaacaatgttgcttatcttcaagatccttaggagtgaatccttgttatttattttttgaatacaggatttattttttgaatacaggatttagggca

SEQ ID NO: 675197 - DNA, 627 bp, Homo sapiens
caaccaagtgatttcacttagactggataaaatacacacagaaatacacacacatacacacacacacacacacacacatgagagagagagagagagagagagagacagagagaacaagagacagtggttggttattataaaagttcagtactagaacccacttaaagatattagctactgcaccaaattgggaaggttatttaaatagctgcaatgaggaatacacatttttattgtgaaatattagagcttatgttgtcatctaaagtctagtaagaacaagtttcattaccagcatagagagaaaatgtttagttttatatttattactaaataagtaatagcattcttgtcttcttatcatatttatctcctctactayccttgtctccttgcacttggttttatgttaggtgggcagtttcctgtagttttccagttttcaaaaacttgccattttcactatgggccctgaagaggtaggttatatatgaataccagtcatatttgtttcttttctaggttagttgacaacaatgttgcttatcttcaagatccttaggagtgaatccttgttatttattttttgaatacaggatttattttttgaatacaggatttagggca

SEQ ID NO: 675198 - DNA, 888 bp, Homo sapiens
aagtactaatttttctgtgttagtccattcttgcactgttataaaggaatacatgagaatggatcatttataaagaaaagaggtttaattggctcacagttctgtaggctgtacaggaagcatggcagcatctgcttctgaggaggcctcagggagcttttactcatgatggaaggcaaagcaggagcaggcatcttccacagcaggagcaggaccaagagaggggggaggtgccacacactttgaaacaaccagatctcatgagaactctatcattatcatgagaacagcatcaaaaggatgatgctaaaccatttgtgcaggattcatccccataatctgatcacctcccatgaggccccacctccaacattgggattgcaagtgaacatgaaatttgggtaggaatacagatacaaataatatcacaattttatagttagtagagaaattcaagaaatgtcaactatgttaatgttacttaaatatcatctatttaccatcaaataattactatgtagtaaaaaaaaagtcagtccatttttcagtgtgtttttttgaagttatatatgaggccactttcttaaatatgatgccatgaaaaaaatttgtataaaccaagttattagaaaggcttgcccccaaattcttagcagctttataagcatttggtcactatagaaaagtcagtgttcaacaaagctttttactgtgctattacaaagtgaaattggtaaaatccgaacatattgatatggaacatagtgccctagattcttgcctatattatcttaggccatatctgaatactytatacaaaagttttattgtctacttttctgttagttttacatagcgtggttcctttcagtaaaagctcctgctacg

SEQ ID NO: 675199 - DNA, 888 bp, Homo sapiens
aagtactaatttttctgtgttagtccattcttgcactgttataaaggaatacatgagaatggatcatttataaagaaaagaggtttaattggctcacagttctgtaggctgtacaggaagcatggcagcatctgcttctgaggaggcctcagggagcttttactcatgatggaaggcaaagcaggagcaggcatcttccacagcaggagcaggaccaagagaggggggaggtgccacacactttgaaacaaccagatctcatgagaactctatcattatcatgagaacagcatcaaaaggatgatgctaaaccatttgtgcaggattcatccccataatctgatcacctcccatgaggccccacctccaacattgggattgcaagtgaacatgaaatttgggtaggaatacagatacaaataatatcacaattttatagttagtagagaaattcaagaaatgtcaactatgttaatgttacttaaatatcatctatttaccatcaaataattactatgtagtaaaaaaaaagtcagtccatttttcagtgtgtttttttgaagttatatatgaggccactttcttaaatatgatgccatgaaaaaaatttgtataaaccaagttattagaaaggcttgcccccaaattcttagcagctttataagcatttggtcactatagaaaagtcagtgttcaacaaagctttttactgtgctattacaaagtgaaattggtaaaatccgaacatattgatatggaacatagtgccctagattcttgcctatattatcttaggccatatctgaatactttatacaaaagttttattgtctacttttctgttagttttacatagcgtggttcctttyagtaaaagctcctgctacg

SEQ ID NO: 675200 - DNA, 755 bp, Homo sapiens
tttgtacctcagaaccagaactggacactcactgtagggaagaccagctcctcaccctccgccccgcctcccccgcctggcccgaggttcctgttgagcaggcatggcctagcctcagacttgcatgcatatttttctgctgttgattttctcaaattctttcacaagggaacagtagtttacatcctttaaagctttcttgaggctgggcacgctggctcacgcctgtaatcccagcactttgggaggckgaggtgggtggatcaccctgaagcaggagttcgagaccagcctagccaacatgacgaaaccccgtctctactaaaactacaaaaattagccatgcgtggtggtgagcacctgtaatcccagctacttgggaggctgaggcatgagactgcactccagcctgggtggcagagtgagaccacgtctaaaaaaaaaaaaagctttcttgggataccagtgtggtcttctggtgacagaaccttgcccacaggttagaggaaataatactttcagcaacacccccagcttgggggatctcagaaagaagggcatgttgccaacttttgaggatttgtctgagaaacagcaacctggcatccccctaactccctgctttttttccctctagaatcaaatagaatctcttttcctggcaaagatttcctagataaaaagaggtactacttagtcatttttgtaggtacgaaatagtttctaaaagtttttaaaagtacataataagaaaa

SEQ ID NO: 675201 - DNA, 599 bp, Homo sapiens
acagttctgtatcccatgaacaccagcaccatgaccagcctgctttggaaatgttcaccaacttgcacttaattaattcagatcattctgattctgaatttatgatggggccaattttcaattttcatttgtatcattcataaaaaaatttgcgaagcaaatgaacagactaagtaaaaagataattttggttactaagtagaatatttctcaagaacttcagaagcaatatctatacccgattaatgccttcattartaaaccacatcacccaagaatgtgaccagctcagatttggttcagtatgtggatctgcaaagagtgccacttctctcttatttactctcatctccctgaaattagaccaaattggtgatgtttgactatattttatgatctctatcgagtaaccacttatagcctcctctaactttccattttcttttgtttgtatcatcagcctgtgaaaccagagagcgctgccaaacataaagcagggaagtgtgagatatgcttaaaatatgagtcacagtatatttggggatttgggggttttttttttttccctcaagctatcagcagatcaaatccttcttccc

SEQ ID NO: 675202 - DNA, 646 bp, Homo sapiens
ttgggtttcatcaagcgatttcctttctggatgatttcagggggccaaggctcagcttagcactcttcaactgcatgctctaaccctgggggrctgcaaccaggctcagggctttgggctttgttgtctggctcctctatgttaagcacctacttaactgaaatgtccccagtctgctggcaacaacaccctggagatgctggcaaaagtgcttctttgtgacagaggcagcagggtctgttctcacatgtgcacactggtggcggttgggtggcagcacagtggggtatgtatgtacatgctggtggcagcaggacaatggcagtgcagtggaatctgtgtgcatgtgcatttgccagtgaaatggtgtggggaggaggccacaggggggaatgtcagcacaaggtgtctgatagctacatggggtcttgagtgaaagagctatggcagtggcctctggaaaacactactgttgggcatctgaggctgcactgcaagcagatgtagccaggcagggaccccaggagaagctggcagacagggggttctcatatccaactgtccctgtcccatgggcaagatagccttgttctgtccagatctgatattcaacaaacaccaaagccacctagaggaacatggcaag

SEQ ID NO: 675203 - DNA, 639 bp, Homo sapiens
tcaaaatgggcactgagtcacccgatgtaccattgtaaatgcacaagggtgctgtgaaatatttaaaatttttatgggaaacacagcaacacctactggatattacatgaactactttcagtttatgtgtgttttttgttttgttttgtttttttcaactggctactaagttaatagggcattaatacttgtggaattgtttagacctactcatttaataarcagaactgatacagatttcttttggcctagaatattgtgaaaaatattactaaggatactattaacagagaatatttaggactctctggcccaaggaaagatgtttgatatttttatcagagcaattaaagaacccttaaacaaaactgaactaggaaaatcttgtaggtaccaagggttcaggagatcaaaatgggactgtgaaactggttatgaaagtgatattcagttgggtgcacataaatacttatgtattttactcacaaagatattcaaataaatctcattttgatgaacttgagttattttgaatccaaattatgaaagatttttaggaaataggtcaaaacactttgagtgagctaattacatgatttggcttatgtttaaataataaaaacataataggctatcaat

SEQ ID NO: 675204 - DNA, 1712 bp, Homo sapiens
tgcattgatgagtatacagcatcctcaaaccaagattttcaagtgctttttaacaattaaattctgaggaacaatttaaagcttgcatagttttctgtcaaatactttctaaagacagctggtgctcattggggttcattggcttcattatgagttcatttctttgtcttcaacgttggatattgtattagctagttcttgcactgctatacagaaatacctgagactgggtaatttattaaagaaaagaggtttaattggctcatggttccacaggctatacaggaagtatgatgkcttctagggagaccttaggaaaccttcaatcatggtggaaggtgaaggggaagcaggcacatcttacatggccagagcaggaagaagggagggtggtgtattacatacttttaaataaccagatattgtgagaactctatcacgagaacagcactagtgggatggtgctaaactaatagacccaatcacctcccaccaggtcccacctccagcattggggattacatttcaacatgagatttgggtggagacatagatccaaaccatatcagatgtattggctgaaataaaaaggagggaaagggaagcacatgttaaacagattgagaaaggagcagaggcctcatcagattgttaaataataggttttgccttcagccttgaccatgctaggctttattcttctaagtgaaattatgggcatatgatagcatttaaatcatgactaaggttctaacatcagttcaatcaatgcagggcatccaacgagtttatcatgtatataatgcctccttttctctctctgtaaaatgggttttctaaattgctatcccaatgaaactgagtaagaaatatcttcagattttccacatgctgaacggcacatggatcatactaaaagtttaatccaagcggggatttggcttgcccaagttagaatttaataaaattaagcctggagcttcttgtatttctatccactcagatccctgaggccttgccattgtgttactgctgctcagaactaactctccaccttcgtcttgaactccttataataaatcctttcaatcctgaaccattcaggcacaccctcttcctccacctctatgaagtgtttcctgtcagattctttcttcccagtccttattagtcattagtcggcattacttatcactgttgattatagcaatgcttattgctgactatagaagaaaattgtgtgtcttcaagatgacagcatctaaccttaaagagggatcactggtgaaaattcttgtctgtaaggtgtggacaatagcgaaggtaccaggtgattagacttgacattttgggggatagggagaaaggttacaatttatttctagaaaacattttggtgttcttcccagtgattagaaaatgcttaaaatcatatttgatttgaataaaagacactgcatacttagagaaacacaaaggattaaatatctcacagtttacttttcagaggacatctcattaattatctaatttgattcttactaacagagtacctcataaattagccaggactaatcattaagcataattttcaaagtgaggaaactgcatcataaaggaaaaaaagaaaagaaaaaggaggtaccatttttattatctctctgccattgctttattggggactggcactgtgagagttaaagccttaaata

SEQ ID NO: 675205 - DNA, 1712 bp, Homo sapiens
tgcattgatgagtatacagcatcctcaaaccaagattttcaagtgctttttaacaattaaattctgaggaacaatttaaagcttgcatagttttctgtcaaatactttctaaagacagctggtgctcattggggttcattggcttcattatgagttcatttctttgtcttcaacgttggatattgtattagctagttcttgcactgctatacagaaatacctgagactgggtaatttattaaagaaaagaggtttaattggctcatggttccacaggctatacaggaagtatgatggcttctagggagaccttaggaaaccttcaatcatggtggaaggtgaaggggaagcaggcacatcttacatggccagagcaggaagaagggagggwggtgtattacatacttttaaataaccagatattgtgagaactctatcacgagaacagcactagtgggatggtgctaaactaatagacccaatcacctcccaccaggtcccacctccagcattggggattacatttcaacatgagatttgggtggagacatagatccaaaccatatcagatgtattggctgaaataaaaaggagggaaagggaagcacatgttaaacagattgagaaaggagcagaggcctcatcagattgttaaataataggttttgccttcagccttgaccatgctaggctttattcttctaagtgaaattatgggcatatgatagcatttaaatcatgactaaggttctaacatcagttcaatcaatgcagggcatccaacgagtttatcatgtatataatgcctccttttctctctctgtaaaatgggttttctaaattgctatcccaatgaaactgagtaagaaatatcttcagattttccacatgctgaacggcacatggatcatactaaaagtttaatccaagcggggatttggcttgcccaagttagaatttaataaaattaagcctggagcttcttgtatttctatccactcagatccctgaggccttgccattgtgttactgctgctcagaactaactctccaccttcgtcttgaactccttataataaatcctttcaatcctgaaccattcaggcacaccctcttcctccacctctatgaagtgtttcctgtcagattctttcttcccagtccttattagtcattagtcggcattacttatcactgttgattatagcaatgcttattgctgactatagaagaaaattgtgtgtcttcaagatgacagcatctaaccttaaagagggatcactggtgaaaattcttgtctgtaaggtgtggacaatagcgaaggtaccaggtgattagacttgacattttgggggatagggagaaaggttacaatttatttctagaaaacattttggtgttcttcccagtgattagaaaatgcttaaaatcatatttgatttgaataaaagacactgcatacttagagaaacacaaaggattaaatatctcacagtttacttttcagaggacatctcattaattatctaatttgattcttactaacagagtacctcataaattagccaggactaatcattaagcataattttcaaagtgaggaaactgcatcataaaggaaaaaaagaaaagaaaaaggaggtaccatttttattatctctctgccattgctttattggggactggcactgtgagagttaaagccttaaata

SEQ ID NO: 675206 - DNA, 1712 bp, Homo sapiens
tgcattgatgagtatacagcatcctcaaaccaagattttcaagtgctttttaacaattaaattctgaggaacaatttaaagcttgcatagttttctgtcaaatactttctaaagacagctggtgctcattggggttcattggcttcattatgagttcatttctttgtcttcaacgttggatattgtattagctagttcttgcactgctatacagaaatacctgagactgggtaatttattaaagaaaagaggtttaattggctcatggttccacaggctatacaggaagtatgatggcttctagggagaccttaggaaaccttcaatcatggtggaaggtgaaggggaagcaggcacatcttacatggccagagcaggaagaagggagggtggtgtattacatacttttaaataaccaratattgtgagaactctatcacgagaacagcactagtgggatggtgctaaactaatagacccaatcacctcccaccaggtcccacctccagcattggggattacatttcaacatgagatttgggtggagacatagatccaaaccatatcagatgtattggctgaaataaaaaggagggaaagggaagcacatgttaaacagattgagaaaggagcagaggcctcatcagattgttaaataataggttttgccttcagccttgaccatgctaggctttattcttctaagtgaaattatgggcatatgatagcatttaaatcatgactaaggttctaacatcagttcaatcaatgcagggcatccaacgagtttatcatgtatataatgcctccttttctctctctgtaaaatgggttttctaaattgctatcccaatgaaactgagtaagaaatatcttcagattttccacatgctgaacggcacatggatcatactaaaagtttaatccaagcggggatttggcttgcccaagttagaatttaataaaattaagcctggagcttcttgtatttctatccactcagatccctgaggccttgccattgtgttactgctgctcagaactaactctccaccttcgtcttgaactccttataataaatcctttcaatcctgaaccattcaggcacaccctcttcctccacctctatgaagtgtttcctgtcagattctttcttcccagtccttattagtcattagtcggcattacttatcactgttgattatagcaatgcttattgctgactatagaagaaaattgtgtgtcttcaagatgacagcatctaaccttaaagagggatcactggtgaaaattcttgtctgtaaggtgtggacaatagcgaaggtaccaggtgattagacttgacattttgggggatagggagaaaggttacaatttatttctagaaaacattttggtgttcttcccagtgattagaaaatgcttaaaatcatatttgatttgaataaaagacactgcatacttagagaaacacaaaggattaaatatctcacagtttacttttcagaggacatctcattaattatctaatttgattcttactaacagagtacctcataaattagccaggactaatcattaagcataattttcaaagtgaggaaactgcatcataaaggaaaaaaagaaaagaaaaaggaggtaccatttttattatctctctgccattgctttattggggactggcactgtgagagttaaagccttaaata

SEQ ID NO: 675207 - DNA, 1712 bp, Homo sapiens
tgcattgatgagtatacagcatcctcaaaccaagattttcaagtgctttttaacaattaaattctgaggaacaatttaaagcttgcatagttttctgtcaaatactttctaaagacagctggtgctcattggggttcattggcttcattatgagttcatttctttgtcttcaacgttggatattgtattagctagttcttgcactgctatacagaaatacctgagactgggtaatttattaaagaaaagaggtttaattggctcatggttccacaggctatacaggaagtatgatggcttctagggagaccttaggaaaccttcaatcatggtggaaggtgaaggggaagcaggcacatcttacatggccagagcaggaagaagggagggtggtgtattacatacttttaaataaccagatattgtgagaactctatcacgagaacagcactagtgggatggtgctaaactaatagacccaatcacctcccaccaggtcccacctccagcattggggattacatttcaacatgagatttgggtggagacatagatccaaaccatatcagatgtattggctgaaataaaaaggagggaaagggaagcacatgttaaacagattgagaaaggagcagaggcctcatcagattgttaaataataggttttgccttcagccttgaccatgctaggctttattcttctaagtgaaattatgggcatatgatagcatttaaatcatgactaaggttctaasatcagttcaatcaatgcagggcatccaacgagtttatcatgtatataatgcctccttttctctctctgtaaaatgggttttctaaattgctatcccaatgaaactgagtaagaaatatcttcagattttccacatgctgaacggcacatggatcatactaaaagtttaatccaagcggggatttggcttgcccaagttagaatttaataaaattaagcctggagcttcttgtatttctatccactcagatccctgaggccttgccattgtgttactgctgctcagaactaactctccaccttcgtcttgaactccttataataaatcctttcaatcctgaaccattcaggcacaccctcttcctccacctctatgaagtgtttcctgtcagattctttcttcccagtccttattagtcattagtcggcattacttatcactgttgattatagcaatgcttattgctgactatagaagaaaattgtgtgtcttcaagatgacagcatctaaccttaaagagggatcactggtgaaaattcttgtctgtaaggtgtggacaatagcgaaggtaccaggtgattagacttgacattttgggggatagggagaaaggttacaatttatttctagaaaacattttggtgttcttcccagtgattagaaaatgcttaaaatcatatttgatttgaataaaagacactgcatacttagagaaacacaaaggattaaatatctcacagtttacttttcagaggacatctcattaattatctaatttgattcttactaacagagtacctcataaattagccaggactaatcattaagcataattttcaaagtgaggaaactgcatcataaaggaaaaaaagaaaagaaaaaggaggtaccatttttattatctctctgccattgctttattggggactggcactgtgagagttaaagccttaaata

SEQ ID NO: 675208 - DNA, 655 bp, Homo sapiens
tgccaccacacccaactaatttttatatttttagtagagacggggtttcaacatgttggccaggctggtctcgaactcctgacctcaagtaatctccctgcctcagcatcccaaagtgctgggattacaggcataagccgccatgcccagccaggactgacatattatattcagtgtgtagcggcaggagggctattcatcgattaatttgctatgagaacaacttcctcaagctattcttgctagctggaaaggggcctactctaggaaatgagaaatctagattctagtcttcttggacaacctgaacaagtcattaattccttaaattcactgttcttgtcattaaaaagataatatttaacttacctcctttatggaawtgctgtgtggtttggatataaaagttaaataaatgtaaaagttaaataaaatatgaaacactggactaatattaagtcatcctagtagtctataaacataaagaattgagtatgttaataggtttatagctaggctagtattcatgtccatcattcattggtatttccaaatacctctttcagttataccttgccttcaatgcaagagatccatagactccatttcagggaccatgcagacaggcttatgaatatgtcccccatcatgtcat

SEQ ID NO: 675209 - DNA, 2018 bp, Homo sapiens
gttgaactgtgtcccccccaaaattcacacgttgcagtcctaacccgtaggtcctcaggatgtgaccttattggggtagactcttaacagacataatcacgttaaaatgagttcattagagtaggccttaatccaatggtggtctggtgtccttgtaaaaaagggaaatgttgacagagacacgtgcacagagggaagatggagtgaagaggtgcaaggagagggtgccatctacaagccaaggggagaggctggggacagatccttcccacagggaccttggaaggaatcaaccttgtctacactttgatctcagacttgcagcctccagagctgtgggaagatgatgtctgttgttgaagctacccagttcgtggtacttygttatggcagctgcagccaagtaacaaaataagtgtgcactcggtgacagcatccactcactgatttacagagggcctgctctgccccagtgctgctctctagcataaaatgctcatcatactgatacttcccaccctatcgcatgcacatagtcaaatggctcatagggttgaagcatctcctgtacgaagcggcacagacataatgtgatgtgctccgtgtgttgtctccttccatccacacgcagctgtctgatgtgactcttccggtcactcctgctctaagaggtggcattgcacattttaaggaaggaccactctggggcactctgcctggccagatgccagctctgcctcctgccagctctgtgacttggagtaaattatacgctaagtctcaattattggtcttttgttttaatttgtgaacaggaacagttttaccacctgaaccgtaaagcagagcttctcatacagtgagagtcacagtttgctactgatctttccagcctgtgggagggcaaggggtggagggagctagggttggtcccatcttcccatctgtttaccccaatgagtcatgcagttgtcatcatcccctgtgtgtgccatagcatgataaatcagggagctctgggcacaggctgaaggctgaatagagccatccaatggctgcaaactgcttggcacagccatactcactaacatttgttaaggatttgacctcccatacatcaacctccagagcctgagctctcaccactgtctgcattgttgaatgcatgatggcatccttgctgtcacttgtaaaacagggctttttcaaccaaaatttaatattaagagtgaatgttaatagtagtgatgttacagttgctaccccctcatcttcctggaaagaaatgctgtcacatcaagatggtcccacagggggatgtaggtctggttgtgtgacccagaaggaccagaaaagacccacataaaggattgagggatacagaaggaaggacagagacaatgtaagccttcaggacaaggatcagtgaccttctgctcactgagaagatagtaaatatcttctaagaagaaatatcactgagaagatagtaaagagccaggtagtaaatattgtaggcctcaccagccacatttgttctctgctgcatattcttctattgtttgcacccctttaaaaatgtgataggcctattcttcactcctaggctacacaaaaacaggctgcaggctgcaggctgcagttttctgacctccaacccagaaggcagatctgagagagagcatgaacccagtcgttatgcacctcaatgggtgggtagtccacacctgggaaccaaaaatcctacaggcagcttgacagggagtttgtatgctttttccaggaataaggaggagtataagggatgccatctggaaggcaaaatattgtaattttatgacctgctgatagtggtccttcctaactggggaaatgaatgtccttttgcaaaataatgagaagaatagattctagtttttttttttaattattcttatttgataggatgaaagggtggcaaccacataccttcccccaatcaaaaagcagaatgccagcccgcctgtcctctctgcacc

SEQ ID NO: 675210 - DNA, 2018 bp, Homo sapiens
gttgaactgtgtcccccccaaaattcacacgttgcagtcctaacccgtaggtcctcaggatgtgaccttattggggtagactcttaacagacataatcacgttaaaatgagttcattagagtaggccttaatccaatggtggtctggtgtccttgtaaaaaagggaaatgttgacagagacacgtgcacagagggaagatggagtgaagaggtgcaaggagagggtgccatctacaagccaaggggagaggctggggacagatccttcccacagggaccttggaaggaatcaaccttgtctacactttgatctcagacttgcagcctccagagctgtgggaagatgatgtctgttgttgaagctacccagttcgtggtactttgttatggcagctgcagccaagtaacaaaataagtgtgcactcggtgacagcatccactcactgatttacagagggcctgctctgccccagtgctgctctctagcataaaatgctcatcatactgatacttyccaccctatcgcatgcacatagtcaaatggctcatagggttgaagcatctcctgtacgaagcggcacagacataatgtgatgtgctccgtgtgttgtctccttccatccacacgcagctgtctgatgtgactcttccggtcactcctgctctaagaggtggcattgcacattttaaggaaggaccactctggggcactctgcctggccagatgccagctctgcctcctgccagctctgtgacttggagtaaattatacgctaagtctcaattattggtcttttgttttaatttgtgaacaggaacagttttaccacctgaaccgtaaagcagagcttctcatacagtgagagtcacagtttgctactgatctttccagcctgtgggagggcaaggggtggagggagctagggttggtcccatcttcccatctgtttaccccaatgagtcatgcagttgtcatcatcccctgtgtgtgccatagcatgataaatcagggagctctgggcacaggctgaaggctgaatagagccatccaatggctgcaaactgcttggcacagccatactcactaacatttgttaaggatttgacctcccatacatcaacctccagagcctgagctctcaccactgtctgcattgttgaatgcatgatggcatccttgctgtcacttgtaaaacagggctttttcaaccaaaatttaatattaagagtgaatgttaatagtagtgatgttacagttgctaccccctcatcttcctggaaagaaatgctgtcacatcaagatggtcccacagggggatgtaggtctggttgtgtgacccagaaggaccagaaaagacccacataaaggattgagggatacagaaggaaggacagagacaatgtaagccttcaggacaaggatcagtgaccttctgctcactgagaagatagtaaatatcttctaagaagaaatatcactgagaagatagtaaagagccaggtagtaaatattgtaggcctcaccagccacatttgttctctgctgcatattcttctattgtttgcacccctttaaaaatgtgataggcctattcttcactcctaggctacacaaaaacaggctgcaggctgcaggctgcagttttctgacctccaacccagaaggcagatctgagagagagcatgaacccagtcgttatgcacctcaatgggtgggtagtccacacctgggaaccaaaaatcctacaggcagcttgacagggagtttgtatgctttttccaggaataaggaggagtataagggatgccatctggaaggcaaaatattgtaattttatgacctgctgatagtggtccttcctaactggggaaatgaatgtccttttgcaaaataatgagaagaatagattctagtttttttttttaattattcttatttgataggatgaaagggtggcaaccacataccttcccccaatcaaaaagcagaatgccagcccgcctgtcctctctgcacc

SEQ ID NO: 675211 - DNA, 683 bp, Homo sapiens
  misc_feature 582, 583, 584, 585, 586, 587, 588, 589, 590, 591, 592, 593,594, 595, 596, 597, 598, 599, 600, 601, 602, 603, 604, 605,606, 607, 608, 609, 610, 611, 612, 613, 614, 615, 616, 617,618, 619, 620, 621, 622, 623, 624, 625, 626, 627, 628: n = A,T,C or G
  misc_feature 629, 630, 631, 632, 633, 634, 635, 636, 637, 638, 639, 640,641, 642, 643, 644, 645, 646, 647, 648, 649, 650, 651, 652,653, 654, 655, 656, 657, 658, 659, 660, 661, 662, 663, 664,665, 666, 667, 668, 669, 670, 671, 672, 673, 674, 675: n = A,T,C or G
  misc_feature 676, 677, 678, 679, 680, 681: n = A,T,C or G
tgataactatatttgcgcttatgacattctaggtttataactcatagaaaagtttccaaaatttttctcaataacatcagtaagtgaattggtgcaagaaggaacaggaaacaaaaattacagctaaaaaatattgtgattacttaaaagaaaggatggaagatgccatcctattagtaggaatcagtaccaaaaaaaaaaaatgaatataatatgacttgcaggagaaaaaaacactgagaaagcatcaggaagcatatattccttatttttttctagtattatattcaaatgtcttactcttatggagttcagtctgtgtcttttatattttactagaaattttaaagaataaatttacctgacctcttacagataaatctgtagtttatcttacagatttcktatagattttcattttatagtagttcataaaatatgcctttataattttactgacttccatattcatggctgtgtcttctttttcattcctaatatttgggattttttattttcttttctcatattttcttcacatatttgccggaaatattaaaaaaaaccactgaacctttacannnnnnnnnnnnnnnnnnnnnnnnnnnnnnnnnnnnnnnnnnnnnnnnnnnnnnnnnnnnnnnnnnnnnnnnnnnnnnnnnnnnnnnnnnnnnnnnnnnntt

SEQ ID NO: 675212 - DNA, 1008 bp, Homo sapiens
catcacatattttttcacttccccatagcccccagtcccctttagttactttattttacttccttatagcccttttttgttctctctrttttctcctagttaattttgtcttagttggaagtgagcatagtttttaatggagtgtctctttcctactgcagaaggctgaataaatcagccttgccacttttaataagcgtctagtgctattaagtatttctctttgacatccttcagagcagttgtgaattgaggcaagaaggccaagcctttatacaattccatttattggccactggatgtgggctgcccttacgatcaggcatgatcttatgtaaggcagttttcttcaaccgtagcaatcctaaccctcccagaattctttgaattctgctctctaacattaatttatgccagtaccatgacacatattcctgagtattcatttgttatctcagttttttagaaggtcaagaaatatacagttctgtctcccccaaacgaaataaagaaaccatgtccataaagttatttcatactgacgtaagttgttaacacaagctatgaagtatcttgaaattcaggtgacccatatataatcttgaaaatagcaaactgaactaacttaattccccaaattcctttaaacctggagtctattaaaaaagactgagaaagaaaataaaactcacatatttcctctttgtgcatgttttacatttgcaaatttaaatggatgctagaccatatgttatatagactttgtcataagtgtttagaattttgttcacaaaaagcactttgtgaaatctattgtagtttcatcaacctcacacagctgtagtctttgcttcaggtaatgcacttaatgcctatcccactttgcatacataaagaacatcaaacttgtaagtaatccacgatacaaagaaaaacacaaatgatatctgcacagagaaatacaattttattttataacaaaagcagttcattagctcctgagttcaa

SEQ ID NO: 675213 - DNA, 598 bp, Homo sapiens
tctaagagctcagacccctaagagccttcatatggaagtcaatggtgccattgctatgtttctatactttatataccgccttgtgcttctcattctgagatcctgtaacttcattagctctgcccacatygtaactgaattaaacttggccttctttactattttgcataagagttgcaatcccactcagcagtgtttgactttagcaatcttagtcttgactggaagtatgtaacacggaatcacagagttccctgaaaagtctcagccatatcagtaccatcaaccctgatactctcttgcctttcacagcccacacactccctcctagttacccacctgctgcatggagcactctggatggtatatctttgttcgttgctctactgcactttcttatgggacccactggagtccccattctctagtgcccaggcatttctgcctgactaaacctgtctgaaatgctgacaaaagcagttttttccattctagttaataaaattaactagtttatagtatgatacatgctggaaaacagccatgaacagagttgtatgacagcacaaaagaaatagcaattcttaaacaggagtgg

SEQ ID NO: 675214 - DNA, 1409 bp, Homo sapiens
tagtcagtcgtcagtccaacacatcatctattacaagcaagaatagagcaataaagtgagcagagaaggccgggcatggtggctcacacctgtaatcccagcactttgggaggccaaggtgggtggaccacctgaggtcaggaattcaagaccagcctgaccaatatggtgaaaccccatctctactaaaaacacaaaaattagccaggtgtggtggcatgcacctgtagtcccagctactcaggaggctgagataggagaattgcttgaacccaggaagcggaggttgcattgagctgagatygtgccactgcactccagcctgggtgacagagcaagactctgtctcaaaaaataaaaaataaacaaataagcagagaaatatggggtcaactgatgccccaacaacatttactactggcaataattaagcatgacagagagtgaagactaccaatgaattgaggttttaaaaaagttctttatagttatctgagtcatcttcatgctatacctttgcctggagaaccaagatcatttccacggttacaaagactcacttttataaaagcaactaagggtatatgaaccatcttaggatttaataatggcccacaccaagcttttgtctttgtgtatgtgtagacactaaatgtgtgaaacacacctcaataattactattattcttataaagtattttgctctatgactatttagtgcttctccacaatcttttttgtgttgaaatgtcagtcacactgccaaataaattatttaaaaattacatctaagttaagattttaaaacaccaagataacagttgattagttaattttacacattcataaactagttttccctactgtaatgagttgagtggctgagtttttgtgtctaaacctgtctggggagaatctattacccgaaagaggtatgttagtctaaaagccaaaggcactccctttttaatgtgccatcagaaatttttctgggaggactatttttccctaactttatgtgtgcatgtatgtgtgtgtatgtgtctgtggttttgtgtgtgtgtctgtgtgtctgtgtgtctgtgtgtgtgtttgtgtatagtaggaggtacacagggaagaaaggaattgtgagtctatatctaacctagatatagaatacagtaagaacagtaatagttcttaccattttaagaactgcatgaagtacaatggaaactgcatccagataatggacttatggattaaaaaagtatcttatttttgttgtttgtaccatttatagttttaatactcgaaaagtttgtggtaaagggggctttggtgaataaatgtggttaagctcataatttcagtagaacactatcattacaaaaagccttcattggaaccacagtggaagaaatggt

SEQ ID NO: 675215 - DNA, 986 bp, Homo sapiens
catctatactgtacctgatttaatgacaatggctagactttgagctctgtcatgatggaataaggcttttgggattttagggaatggtgaggatattttgcatattgtagaaacattaactgttgaagccaggggacaaattctggtagctaatctccaaagatagccttcaatattttttttcttcttgggtgcttaggccatttcctaaattatttccttttcttgaatctgtgctaaactggtgcctggttttgaccaacagaatacagcagaaatgacattcctatgcttccaagcccaggccttaagaacactgacagtttccactttgaaccttttagaatttagctcccttgctacaggaatcctaaaacatatagagaggccatgcagaggaaccaagacaccctaacgcctcagctgagttcccagcaagagccagcaccaactgccagctatgtgagtgagcygacttgtactgtagcatagccagtatcctgatgaccacagtcttagccaacagcacatggaacagaaaaaccactttgctgcatacattcaaacacccagctgagcccacttaaccaacaaaatcacacagataataaaattgtagtttgaggctgttaagattttaagtgatttattatgtagcaataggtaaataaaacaggaatttttattctgatattggatcttcagtatagaatagatttgtaaaattcaaagatacttcctgaaatatgtatttattttttcttatgaaaaacctatgcaaagtaaagtcttaattagaaaaattggtatacaaagaaaaatacaataaacttgtgaactgcatctctttaacttgttttctaatcaaaatatataaaagctttctttaagtcagcttataaatgatttattacatttcagttatctggtgtttgcactgtgatagaaataacattttattctcccgaggaaattttatttttaga

SEQ ID NO: 675216 - DNA, 986 bp, Homo sapiens
catctatactgtacctgatttaatgacaatggctagactttgagctctgtcatgatggaataaggcttttgggattttagggaatggtgaggatattttgcatattgtagaaacattaactgttgaagccaggggacaaattctggtagctaatctccaaagatagccttcaatattttttttcttcttgggtgcttaggccatttcctaaattatttccttttcttgaatctgtgctaaactggtgcctggttttgaccaacagaatacagcagaaatgacattcctatgcttccaagcccaggccttaagaacactgacagtttccactttgaaccttttagaatttagctcccttgctacaggaatcctaaaacatatagagaggccatgcagaggaaccaagacaccctaacgcctcagctgagttcccagcaagagccagcaccaactgccagctatgtgagtgagccgacttgtactgtagcatagccagtatcctgatgaccacagtcttagccaacagcacatggaacagaaaaaccactttgctgcatacattcaaacacccagctgagcccacttaaccaacaaaatcacacagataataaaattgtagtttgaggctgttaagattttaagtgatttattatgtagcaataggtaaataaaacaggaatttttattctgatattggatcttcagtatagaatagatttgtaaaattcaaagatacttcctgaaatatgtatttattttttcttatgaaaaacctatgcaaagtaaagtcttaattagaaaaattggtatacaaagaaaaatacaataaacttgtgaactgcatctctttaacttgttttctaatcaaaatatataaaagctttctttaagtcagcttataaatgatttattacatttcagttatctggtgtttgcactgtgatagaaataacattttattctcccraggaaattttatttttaga

SEQ ID NO: 675217 - DNA, 613 bp, Homo sapiens
ttttcatgcatttttaaattatgtagatttttatctagactttatgcttctttggggcgggcaaatgtttcataatgctttgtctgttacatttccctccctaccatagagccttacactaatagagatttaataggcatttttttttttaattaactgattgtcttcagtcactttggggcagaataagatatttaggatttggaaaatagagagatggtgtaaaccatatttcactttctcagagaattataccctacattttaaaactttttattttaaaatacttacagactcacaagaagttgcacacagaaaaatacgtgcagagaggtttcacgtacccttcatcttgtttctccagtgctagcatcttgcctatagtacaaccgagaaactgayattgctacaacccatagagcttattcagatttcaccagttttacatgccctcgtgtgtgtatctttatacgtttttaatagtgatactttcataaaataaaaagtgtatatgttaattcacattgcttatattttcttagttttgtttgacaatacgttttccttctttttaactttagtaacaaatccaagattttggaaaagcgcctac

SEQ ID NO: 675218 - DNA, 652 bp, Homo sapiens
tacctcatgttctctcttatgagtgggatctaaacattgattacacatgttcaaatatttcgatccttgtaagtgggatctaaacattgagggtgtagrgtagtgggagggagagcatcaaaatactacctaccagttactatgcttattaccagggtgatgtaataatctgtacaccatgcctctgtgatacataatttacctatgtaacaaacctggacatgtatccttgaactgaaaataaaccctaaaaataataataaatgataaaaataatattgaaacaaatatttatctgtatacagtagtcatcagataaataatatgaaaatttcaagttaaaaaaacattttaaaggaaaactatataaatttagatttccaccaagacttatcagaatgtatatttatcaatctacttcctttttgtttaccatccatcaagtatttcatttttttatttcaattttttatttttgtacttcaataggtttttggggaacagatggtgtttggttacatgaacaagttctttagtggtaatttctcagattttggtgcacccatcactcgagcattgtgcattgtaccctatgtgtagtctttgatccctcaccaccctccaccttttcctccaagttctgaaagtccaa

SEQ ID NO: 675219 - DNA, 848 bp, Homo sapiens
  misc_feature 784, 814: n = A,T,C or G
tacacacatttatatcatcagctttcctataaagtcagcaggtataagtgactgtatcattctgatgtgtagtttttaatatttctaccatctgacatgcatcaataaataaatgtaaaaagcatgaggttaaaaaacaaattaaatacagattctagatttggatttaaaattagaactatgtgtagaatgtggctatttctgcaagctcaattttcaattaaaaaatatgaaaaataaaccagtagaygactgttacagttcacattatttaactacaatgtcctctcaagtgtatctttccaagggaagtaactttagaaaaaaatctggacaaacttattcacagtggtgagatgtatccctgacctgtccccttcctctgggctcatcagcctttgacctcagcagctagctcagcctgctcaacaccccttccatctcctcccaggtcactagtttgaaactgtgctaagatttgcaaagaactttggtcaggcaaacaaagagccacctgtagagcatgtgtgcctgagtcttgcttgctgcttcccctctggcagcctcctgtacaagcctctacatcactagcactaactgagagcaaaacaaaaccttaacaaatctactaagaatcttccctgtagagttccaaactttattgacctccctgggttacgaatgatacacatttctttgtctgccacacctgccaccaacatgccaaaggcaagtctataaatacccgaagatatggattaattttacaagtgacatttaagtnccccgttgagttaatacctgctaagcttcnccaaccaattgcaagctgtgcactataccagagt

SEQ ID NO: 675220 - DNA, 1166 bp, Homo sapiens
agggacctggtggaaggtaattgaatcatgggggcggttcccccaatactgttctcatggcagtgaataagtctcatgagatctgatggttttgtaaggggaaacccctttcgcttggttctcattctctctcttgcctgacaccatgtaagacatgccgtttgccttccaccatgtttgtgaggcctccccagccacatggaactgtgagtccattgaacctttttttctttgtaatttacccagtctcaggtatgtctttatcagcaatgtgaacatggactaatacagtagttaaaagcactacaatcaggaagaaaaagataaccatgtcaattaaastgcatttgatcccaacctgagttctgaactacattttaatctctaggaggtcagggccctggcaattgagatttttgccttccttctctcccatgcctgcttcagaagtgcccccgtttaaggtaacctggagcctgtgcttacaatctaagagagtgatgctccagctttcaagtacatacagatcacccaggagcttatgaaaatgcaaattcccattcagtaggtctgtggtgggtctgagcttcagcatctcacaagctcccaggtgagctgatgctatgggtctgcagtccacacttgcagtagtagcagggaaatccaactaaccagacagaaaattggcagtacacaaacagactggcatggagaagatgatcttgtcaataaaaacaactttatggtgctaggaaataaaataaataatcaaagagatatgtgaaatgactcacattataaattgttgtttaaagtcaatatacaggccgggcacagtgcctcacacctgtaatcccagcacttagggaagctgaaacaggaggatcatttgaggccaggagttcgagacaagtctgggcaatacagtgagatgccatctctacaaaaaaataaaaaattagccaagtgtggtgacatgtgcctgtagtcccagctacttgggaggctgaggcaggaagaacacttgagcccaggaggtcaaggctacagtgagccatgattgtcccactgcactgcagcctgggcaagagaatgacaccttgtctcaatcaaatgaaaataaataaataaatttgtataatgatggccagggatggtggctcaca

SEQ ID NO: 675221 - DNA, 606 bp, Homo sapiens
caacataagcattcattgaataagtcagtacatgagtaactccctctctttttttttttctttctcacccccgtgattgcctggagagagtagctccctctcaatgattctcacagaatcctctctaggatggaggcgggtgctcaccttggcctggaactttgatctcatggacagcagaggtcctggtgcaactttaccatgccacaagcagttgtagcagtgcaattgtaaatctcaccagaaggtgacagttgccaaggtgacagcttctcatggtacgtgataaggaacygggtggagaggagacctagccttggaaagggagcaccataggagttggtgggagcaggtgaaaggcttggttccttgctccctgcctggtgcctggtcactgcagacactgagtcagggaccaaggggaggagggaggcagtcatcgtcatgacaggagcatcagtgaaactgctggcctggtgtcgcctcctgggcctggactccatgtcctttgtctgtccttggtaccccagatgagtcagcaagatccagcctctgaggttcattgcagcacttcccctggaggcagattagaggatgttgcaggac

SEQ ID NO: 675222 - DNA, 621 bp, Homo sapiens
gagattgagaggctattgaaagggtgaggctctgagaagggggcagggagggacccagggaacaagtaggacttgcactgtgactaggagagggacctcaccaggtcctactcgacttacaatgaacttagaggtgacatcaattccctcatccttttcacaagcggtgtggttattccctgagtccattttccagtaacagaccaacagcacaaatctgaatatccctctgaccgtttcactastagatagaaccaacattggttttgtttctgtcatctagtatattagtcacacctctcatctttgaatcatctaccaagtgccatcgatatacaaattaatatttattcttcttatctttattctaagagtgttggtgtgagaaggtggagattattatagggaaaggatgggccaaaaggagagagtagaagttgaggcccagggaggtgaagctcaaggacacacagagctgggcacagttggagctgggatcatggttgggtctcttgcatcttggcttagggctccgccacaattagatagcccagtgagaaatgcggagcctcataaatcccgctttgtcctttattccatgtttagtatgttatctgtaga

SEQ ID NO: 675223 - DNA, 552 bp, Homo sapiens
ttttttttttttttttttttccactctgcactgacctggagaatgtaacaccttaacaagtagtctattccctaaaaatatcactcccagagtcatagattttattgaaatgtcaaggaatacacggaaaatttatttcccttgtacactatatgacaacacattatagaygatagttgtttagatagatatatggacagatggataaataatctgttttctcttctcaagagatattctctggtcaccagctctatcactacatcaccttttacattttcctttccctgtccacaaatagcatctagagttgttcttcataactaaataattcaatgctatctttcagcttgcatatgccacagagcaaaacaaaagctgcataggtactggcataacctaggattctcggaaagctcacaccaatcaattgattatcccttgtattccaagtgtttcaaggataggatcatctccaacacatctttttactgagctaatagagtggaagagtaattggaaattttgatgctaagaaaaacaagatttttt

SEQ ID NO: 675224 - DNA, 691 bp, Homo sapiens
ctctcaggtgcatggtgacctctacaagcctttgtccctggaacagactagcaccaatgccatagtcccaacagaggctgcagttgttttgcctgggatcagtaagatcgctccggcccctgtcaccaaaaaaggttcaacaccagcatcccacctggcagccccacttytgtttgaattctggcagtgagtgcagcctcctgttcccacaggaaacacgcagactgtagagcaggttgttccacccacccccactgctcatagccagacaggcacacctgctagagcttctatctcagtggtcctgcttctgtctgaactatgccaggattccagccttctgttgtcctgggacacacctgaaacaacagggtgggtaacccccaacctggattgtaggaaggtcagtggaatcaaggagaaagttgaaacccaatcaaagaaacccagtatgacaatccaggatctgaaaaatagaagagccattttaagaaagaaccaaactgaacttctgaaactgaaaaatttacttcaagaattttacaatacaattgcaggcatcaagagcagaatagatcaagctgaagaaaggatgtcagcacttgaagaacagccttttgaaccaactcagtcaaacaaaactaaagaaaaaaagcattttaaaaaatgaacaaaacttttgagaaagata

SEQ ID NO: 675225 - DNA, 1439 bp, Homo sapiens
caagagtttctattctcacaacagataaaacagattttaaatcaataatcaggaagaataaacaaaggcagtacataatgacaaagggttcaattcaacaagaagacttaactattctaaatatatagatacccagcataggagcacccagattcataatacaagttcttcatgacctatgaaaagacacaggcagccacataataatagtagatgactttaacacccactcacagcattacagagatcataaaggcagaaaatcaacaaagaaattgtggacttagagtcaacatttgaccaattrgacccaataaacatctacagagtatttcacccaacaaccacagaatatacattcttctcatccatacacagaactattctaagatcaaccatgggctcaaccataaagcgagtcacgatatattaaaaaataattgaaattacaccaagtacactgtcagaccacagtgcaataacaagagaaattgatacaaagaagatcattcaaaactacacaaaaacatggaaattaagcaacaatatattacatacttatattttctccccacgtctatcctccaactgatcataatttctcatttatcttgaattacttcacttttgttcgggtctactttaaatcacatatacagtcccttaactgtaatactcttttgcctattatcaactgaagagaatcactcttatctttgaggacctacaaatagtataatttaagtccatgctatctcgtctataaaatgtgaataatcattctcagtcttagaatttatgtatggcttagatataatacatactcagcttcaacccaaaactcatatgtcatggagggcttaaaaataaatagcattcattgtgctaggtttcacattttcattttttaaattttcttttttattccatacctagacaataaactctttatgagcagcaattgtacatttcacatttttgtatcctcagcacctaaaacactgctccctgggaggtattcaataacatgtaactaagaagatgtaggaaattaacacattcatctattttcctgcgtgtaaaaagcttgaaagtcatcactgcgcctaacaacaagttaaaagctaaggagactgataaacgcctcttggctccaagcgagaggtgaggacacagagaaaatcactgccccgaagactggagagatagacaggtgaatacaagtattcacagcttaccaaagcagataccccaaatcagaaaccaccaagaacaagtgtctacataggaatacctgaaatgtaattgatgaattcctgcggccttagtgctgataagtgtgagagttaaatcctcctggaagacccaatcacaagggggtctccacactccgtgagttttacctccaggagctccatgaggttctcacagtaaatatc

SEQ ID NO: 675226 - DNA, 1313 bp, Homo sapiens
atatatacattatatayacaggtatacatatatacattatatatacaggtatacatatatacattatatatacaggtatacatatatacattatatacaggtatacatatatacattatatatataaaaatatgcttcattttttagaaattgcctcctgtgttccccattacttctaattatcctcatattatttcataatgtgtatgtatgtgtgtgtgtgtgtattccttgatgcatttgtaaaatcctccagagaagagaccagtaaattcaagacacttcttgtgggaaacttctttccatggggacctgcacataatgtaaggggagaaacaagtcatctgcaaataccaagagtgtgcattgtcaaccctaaaataattctttttcatcttttgtgcttgttctggtgtatgtgtgttctgggttttttcattgaactgagtggtaggcactcaagatgcttagagctctaagaggtagataagtaatggggtcaatcttcaagggacttcacataaagcagagaagactgataattaacaatagtatgtggccttcataaggttctgaggcagacagagtaaggagtactgtccttcaaaaggtcagagagtacagcaacaggaaaggcttcccagcaggagttatgttttaactgagactaacaacctaattgtaaaacaaaacaaaaacattttttaagtaaagtcctgaatttccccttgatcacctaagtaatgtgcccatgttgaaaatatttcagacaataggaaaaagtattttttaaagaaagtaaaatcaccacttagagaaaccattgttaacattcatcagatacttttttgagcatgtattatgtcctaaggttatgccaactggctacagcttctcagaagggagcattttaattggcagatagtgtgaatagcactaattcaaaccttaactcatttcagctgtcttcagatttggcttacagaccaaatgggccccaaccctaataaggtagataaaacaacacaaatggagtattctcttgaacaaacaccatagcacctgctatatcccccacctagagtagatagatacgagagtcagattccttgggttccaatcctgacttgtacctcttttctatctgtgtgatctttaccaaattattggatttctatatctcaatgtgcttttctgttaaattggatttacggtacttacctcatgtaatattttgagaaattaataagataatacatgtaaagtgctaatcacagtacctggcacatagtagagttcaataaatgctatct

SEQ ID NO: 675227 - DNA, 1313 bp, Homo sapiens
atatatacattatatatacakgtatacatatatacattatatatacaggtatacatatatacattatatatacaggtatacatatatacattatatacaggtatacatatatacattatatatataaaaatatgcttcattttttagaaattgcctcctgtgttccccattacttctaattatcctcatattatttcataatgtgtatgtatgtgtgtgtgtgtgtattccttgatgcatttgtaaaatcctccagagaagagaccagtaaattcaagacacttcttgtgggaaacttctttccatggggacctgcacataatgtaaggggagaaacaagtcatctgcaaataccaagagtgtgcattgtcaaccctaaaataattctttttcatcttttgtgcttgttctggtgtatgtgtgttctgggttttttcattgaactgagtggtaggcactcaagatgcttagagctctaagaggtagataagtaatggggtcaatcttcaagggacttcacataaagcagagaagactgataattaacaatagtatgtggccttcataaggttctgaggcagacagagtaaggagtactgtccttcaaaaggtcagagagtacagcaacaggaaaggcttcccagcaggagttatgttttaactgagactaacaacctaattgtaaaacaaaacaaaaacattttttaagtaaagtcctgaatttccccttgatcacctaagtaatgtgcccatgttgaaaatatttcagacaataggaaaaagtattttttaaagaaagtaaaatcaccacttagagaaaccattgttaacattcatcagatacttttttgagcatgtattatgtcctaaggttatgccaactggctacagcttctcagaagggagcattttaattggcagatagtgtgaatagcactaattcaaaccttaactcatttcagctgtcttcagatttggcttacagaccaaatgggccccaaccctaataaggtagataaaacaacacaaatggagtattctcttgaacaaacaccatagcacctgctatatcccccacctagagtagatagatacgagagtcagattccttgggttccaatcctgacttgtacctcttttctatctgtgtgatctttaccaaattattggatttctatatctcaatgtgcttttctgttaaattggatttacggtacttacctcatgtaatattttgagaaattaataagataatacatgtaaagtgctaatcacagtacctggcacatagtagagttcaataaatgctatct

SEQ ID NO: 675228 - DNA, 681 bp, Homo sapiens
tccaaattttagtagaattgtgacaaatttgctggtgagatttgaggctgaattttttagaatgaattatatagattctcaactttagcctagaacagcagtctcaaagagatccaggcacccttagaggatcctgaaacacttttagggagtattacaaattaaaacatttttgcgataatattagaatgctgtttcacttttatttttttatgagattagaacagttttccagagtcaacataatttgcaatattgcagcaaattaaattcagaagccagtatgagcatccagctgctttcttttaagccagacataaaagagatttgcraaaatgtataacaacatcactcttctcacaattttttattttataaaaagataattacttttcggccaggcacggtggctcatgcctgtaatcccagcattctgggaggccaaggcaggtgcatcacatgaggtcaggagttacaaatcagcttgaccgacatggtgaaaccctgtctttactaaaaatacaaaaaattagccggtcgcggtatgcccctgtaattccagtcactcaggaggctgaggcaggagaatcgcttgaatccgggaggcagagtttgcagtgagctgaaatcgcaccaccacactccagcctgggcaacagaatgagacttgatctcaaaaaa

SEQ ID NO: 675229 - DNA, 650 bp, Homo sapiens
caggtcaaaaagacatgaatccaaaacagccagtgaaaaagccaataaacatgtaagaagatggtcagtgtcattggtcatctgggaaatattttgaaaccttcaagagacaccctttcwccccaacctgggcaggactaggtgttcccaggcaggtcccaagggtggaaaccacactttctccccactcccttcccctcccagttcaggagcctgtgcgtggggctttcatgtactttctttattggctcaagaaacctcctttcttgtgtgtcggtattgtgatgtgaaacccttggtggagggcactggtcttggtgggtacctgtttgctcaaggtccagcttcagacaagccgctggtttaattgagacagaactggattccggctggtgctcactccgtgatcctaggaaactgcacagcccttgaggccatttccccaagtgtgaagtggggggcctgggccctccgggtgaaagtgaggttcctttggctccagaaggccgggtttctggttagacatacctacccgtctgatgcaaggtggattctgaaaagcaaaagcactgtctgtcttagtcctgttcctcccatgggcggactccgagtctcaaacaatgctcagttcaggctgggtcctgtcggcg

SEQ ID NO: 675230 - DNA, 650 bp, Homo sapiens
caggtcaaaaagacatgaatccaaaacagccagtgaaaaagccaataaacatgtaagaagatggtcagtgtcattggtcatctgggaaatattttgaaaccttcaagagacaccctttcaccccaacctgggcaggactaggtgttcccaggcaggtcccaagggtggaaaccacactttctccccactcccttcccctcccagttcaggagcctgtgcgtggggctttcatgtactttctttattggctcaagaaacctcctttcttgtgtgtcrgtattgtgatgtgaaacccttggtggagggcactggtcttggtgggtacctgtttgctcaaggtccagcttcagacaagccgctggtttaattgagacagaactggattccggctggtgctcactccgtgatcctaggaaactgcacagcccttgaggccatttccccaagtgtgaagtggggggcctgggccctccgggtgaaagtgaggttcctttggctccagaaggccgggtttctggttagacatacctacccgtctgatgcaaggtggattctgaaaagcaaaagcactgtctgtcttagtcctgttcctcccatgggcggactccgagtctcaaacaatgctcagttcaggctgggtcctgtcggcg

SEQ ID NO: 675231 - DNA, 586 bp, Homo sapiens
tggaaaagatgtctatgcttatcgccttcaaagctgcatagatctaagtctgttgtgatatgaaggaagaccatttcagttaaaagaaagtgtctcatttcagagaagcccatttaaaaatcgcaatttcaccacttactagctttgttactttaggacatttactttttctctaaaagtttccgttttctacattataatgtaggttgttatgaccaatatcatagaaaaagcacgcaggttatgtcactttaaagtgctttaagtggagaagaagcaggctgtgtcattcataggtgaatttagtaaacatgtttgagaatggtttgtgcatcgagggaagagactaaaggacacatgttgttttactgggcccttaaaagctgcctcrttagatacagtagaaactaaattgttcctttttgtggtagcagcaataagtctcacaaagcgtgccatttgcttccttttatttaaatggcatcttgcagttaggtagagatgtgactatttccagccaatgtggtgtaaatggtggtgacctatgtgacttcagaactggagcagtgtaagtctgtaaaagatt

SEQ ID NO: 675232 - DNA, 586 bp, Homo sapiens
tggaaaagatgtctatgcttatcgccttcaaagctgcatagatctaagtctgttgtgatatgaaggaagaccatttcagttaaaagaaagtgtctcatttcagagaagcccatttaaaaatcgcaatttcaccacttactagctttgttactttaggacatttactttttctctaaaagtttccgttttctacattataatgtaggttgttatgaccaatatcatagaaaaagcacgcaggttatgtcactttaaagtgctttaagtggagaagaagcaggctgtgtcattcataggtgaatttagtaaacatgtttgagaatggtttgtgcatcgagggaagagactaaaggacacatgttgttttactgggcccttaaaagctgcctcgttagatacagtagaaactaaattrttcctttttgtggtagcagcaataagtctcacaaagcgtgccatttgcttccttttatttaaatggcatcttgcagttaggtagagatgtgactatttccagccaatgtggtgtaaatggtggtgacctatgtgacttcagaactggagcagtgtaagtctgtaaaagatt

SEQ ID NO: 675233 - DNA, 627 bp, Homo sapiens
caagaagccgggaacagcacggggcactgggagctgcaaacgcccacgatactgtgagagacggagaaaggtatgacaggaggagcagaccaagaagacgggaacagcacggcgcactgggagctgcaaatgcccacgataccgtgagagatggagaaaggtatggccatggcggtcacaaaatgttmctcaacatttattaaaggcctaaatggagaacataacgctatcaaacccttagctaaaaacacaggggaaaattcgtatggcctggggttaggcgaaaagttcttagacatgacaccaaaagcatgattcataagattgacaaattaaatttagtcataaatttaaaattataattctataaagcaatataaaaatccaaagagaatgaaacatgaactatggtctagaaataaacatttgtgaatcacacgtctcacaacctactggcacgcaggatatatgaagaaccatcaaaacttaaccataagaaagtaaaaaccccagtattaaagagagggccaatattggaacggaggcctcatcaaagaaggtataaggagggcatattgcccgagaaagaggctcaacatcatagagatgctggagaaatgccagtca

SEQ ID NO: 675234 - DNA, 627 bp, Homo sapiens
caagaagccgggaacagcacggggcactgggagctgcaaacgcccacgatactgtgagagacggagaaaggtatgacaggaggagcagaccaagaagacgggaacagcacggcgcactgggagctgcaaatgcccacgataccgtgagagatggagaaaggtatggccatggcggtcacaaaatgttcctcaacatttattaaaggcctaaatggagaacataacgctatcaaacccttagctaaaaacacaggggaaaattcgtatggcctggggttaggcgaaaagttcttrgacatgacaccaaaagcatgattcataagattgacaaattaaatttagtcataaatttaaaattataattctataaagcaatataaaaatccaaagagaatgaaacatgaactatggtctagaaataaacatttgtgaatcacacgtctcacaacctactggcacgcaggatatatgaagaaccatcaaaacttaaccataagaaagtaaaaaccccagtattaaagagagggccaatattggaacggaggcctcatcaaagaaggtataaggagggcatattgcccgagaaagaggctcaacatcatagagatgctggagaaatgccagtca

SEQ ID NO: 675235 - DNA, 627 bp, Homo sapiens
caagaagccgggaacagcacggggcactgggagctgcaaacgcccacgatactgtgagagacggagaaaggtatgacaggaggagcagaccaagaagacgggaacagcacggcgcactgggagctgcaaatgcccacgataccgtgagagatggagaaaggtatggccatggcggtcacaaaatgttcctcaacatttattaaaggcctaaatggagaacataacgctatcaaacccttagctaaaaacacaggggaaaattcgtatggcctggggttaggcgaaaagttcttagacatgacaccaaaagcatgattcataagattgacaaattaaatttagtcataaatttaaaattataattctataaagcaatataaaaatccaaagagaatgaaacaygaactatggtctagaaataaacatttgtgaatcacacgtctcacaacctactggcacgcaggatatatgaagaaccatcaaaacttaaccataagaaagtaaaaaccccagtattaaagagagggccaatattggaacggaggcctcatcaaagaaggtataaggagggcatattgcccgagaaagaggctcaacatcatagagatgctggagaaatgccagtca

SEQ ID NO: 675236 - DNA, 758 bp, Homo sapiens
taagttgattgtgtcatcagttcacaaaataaatcatcacgctgtacaccttaaatatatacagtattgttttttgtttaattcatcaatcatacctcagtaaatctgggggaaaaaaacaaaatccataaaaattttaaaattttcattataaaagtagtatatgcttactggggaaaccttttgaacagcacaaatctaaaatacaaatagggccagacgcatagtggctcatgcctgtaatcccagcactttgggaggccgaagtgggtggatcacctgaggtcaggagttcaagaccagcgtggccaacgtggcgaaacccagtctctactaaaaatacaaaaatcaattggatgtggtggtgcacacctgtawtcccaggtacttgggaggctgaggcagaagaatcacttgaacttgggagccagaggttgccgtgagccgagattgtgccaccgtactccagcctgggcgacaagagttagaccctatctcaaaataaataaataaataaataaaatataaatggaagtctcttctctgatcccaggcttctatcctacctgcgcagggtagcagcaccactggcgtggcccccagtgatgtgtgtggggtgtgcgtgagtagggggttgtgtgcacacagcactgagaagatggtgcccgggggctgccctgtccgttctgtgatctcattagacaggaggtccggacgtgggccactgtgtgcagtcactgctctctgttgtttccata

SEQ ID NO: 675237 - DNA, 550 bp, Homo sapiens
cattcacacacacacacacacacacacacacacacacacacacacacacaccaggggtttgggagaatttccacgtaaaataattttgggaaattctgggttaaatgaaggtaagcagggcttttcttaattaggatgtcttggaatcttaaataacataatgtgattttataatctctgagacaggtataatatgtggycctgcttagaattcactgacctccaaactgttttccccttaaagcatttaatgcaactagcattccacaaacagaaaactgttggagatgcatttataaatttgggaatttgagatggtcttcaaaataaatatcaagaatctacttttacctcatatcactaattttcttagcctgccagtaattattcaatactccacacaacataatcaaatctccaaagatcattaattttggaattagtaccacagattatcatatataattaaaaaatagattttcagttacactaaacatcaaatcaaaacaaaacctgagataatcaacatattcatcatgtgaaagtataa

SEQ ID NO: 675238 - DNA, 2189 bp, Homo sapiens
tgagtttcacacttgctaactgtatgatctggaataaatttacctaaaccctttcatctcagtttgcaatgtacaagataaagatcagatctgcctgatgggactgttaacaaagattaaatgagctaatgtatgtaaagcacacagcttgccacatactaaacagtcattaaatagtaaccagttttattatacttatcatggcaccaagccctttgctgaactattaatgtatttcccctctttcttactcacaatgaagatgcctttaaaaattacacatactttaacactttttacggcagagactgccttgataacttctgtataccctggtggagtatctcgtataagggtggtgctctgtaaatatttgataaactactcatgtcaatatggtaagtgataacttgtacataaataaacaagccttcaagaaatcaatttggtcagttatctcaattaaagattactattcttctgtattcacaagcagagaatggtgatttaacaactcacttccccccatgtaatacaaattaacctgttaagatttatctagagaagaaaaagatctagcagttatctcctaaaatgataaaaataaaattacactttaacaaactgtcttacagttgtaaacttaagacacctgattctgctacttgtgttactttaagaaaagtatttaaacttaactataaaatgagtacgaaatactggcagggatataaaagaatgaatgctagcaactagcacacttcccaatatggagcatacatacaaataatatgagtaaaaattataaaagcctatgatctaaaaaatcaattcatgaaactactgaacgaatttcagatttcctcccaaaatttcaaaaactatataaatgtattactttataggagcaaaactgaacaagaacaaaaatggaatatccttatataacttaccaataatattctctatcagaaaaagattagcagataatctttaattttagggtaaattatatacgactagtggcaggtgaagtaaaagtcacactgctggactgacaggctcaatgtacatcatttatttcaacattctgtacctcgacatcctgaacactggataaaaaagttgattaaatccagaagtgcgatgtccctgtcttgtttatatgattcaatccagtcatccaccacggactgtggaaaaaaaatataaaaatgaaaacttcaaaaaaatttgatattatagcaaataaattttcaaaaaagtttgtgtgtttgtgtgtgtttctatctgaacgagaaaattacttacctgaaattatttctctgtagcctaataaaagtagagactcccttatttttaaaggccaataaaaagtgacttactaggtttcaaagatttgtttacaatagaatccaaaacaaatcggaccttaccaatcccattaagtccaataattattaagcaagtatagataatattcaaaccatattaagaaaatgataaaaattaacttcacttttacacagatacaaactttctgagttatcagaaagcataatccaccagtagtgcataaaaagaatgcaaataataagaggcattttttcaagagtacaagaatggcttaatattaagaaatcaaataactgaatttatcaacaaagtgaaaaagaaaaataaaacaattatatatcaaatcagatctcaaaaacgtatctgataaaattctgtagccaatccaaaaaaaaaaaaaaactttctaggaaaattagggttcaataaaatctacttaaaggataaaaagactaaaatatatttgttgttgaaatacttaagatatttcaactaattaaagaacaaggcaaggatgcccctctaaccattcaacccaaggttgaagtctttagttaatgcaaaagttagcaaaatttagtaaagacaattctcctttcctacagttgataagaaaacccaggagtctctattaaagtgattcaagagattaataatrggaaaatttgacaaggtagctgacaagataaatatacaaaataacttaatagtgcaataactagaaaatataaatggattagtagcttgttcacaacgaaaaatacctaagaataaatctaagagaatttttaataaggaaaattattaaaacttacaggatataaaaaaaagac

SEQ ID NO: 675239 - DNA, 653 bp, Homo sapiens
attgaactcatgtcttccagctcttccttggttctgggcgggactgataactaggcagtcattgtcagcccttccctctccttcacccagtatccaagccaagccctcctacacacccagcctccacaccgtccatcctatccatccccctgcatccctgctgttactgccccaattcaggccctatcatctctccctgtgctatcaaaatagttgttagactggttttcttgccaacagcttaaaaaaaaaaatctttgctcctactactagactgaccttgctgaatgaaatcactcctatcctctaagctctccatgggctctgtaccactcacagaacccagcrcagagacagaacccagccccaagtcctgagtagagatttagcatgcataacctgatcctagacctcgtttccacctaaactccacccattccctcctgtcaggtcctctgaccccagctgcccagcactgccccttttccctgcacaaaaattggcactcccaacttggtgccttgggttcatgctactaggatcctcacccaacttcttatggctgctgactttagtttagttgcctgagcctcagtttccttcactgtaaaagcagataaagatatccaactcttgcacagggttgtttagag

SEQ ID NO: 675240 - DNA, 635 bp, Homo sapiens
tcagatttcaacatttctttaatttttttttttttgagacagagttttgctctttttgcccaggctggagtgcaatggtgccatctcggctcactgcaacctctgcctccccagttcaaacaatcatcctgcctcagcctcctgagtagctgggactaccaccaccacgcccagctaatttttttgtatttttagtagaygcagggcttcaccatgttggccagactggtcttgaactcctgacctcgtgatccgcccaccctcacctcccaaagtgctaggattacaggtgtgagccactgcgcctggcccatttctttaattttaatcaatatttaccttatggtatcaatggccatgtgggaaagtgagagtggtctcaagccttagtgagatctgagaactaagtgaggagccctgtccttcactgacttctcactcatcaacaaatatctgttgctagatgtcagcttattgctgtaccgaaaaaattacatggaataaaaagtaatgaaaaataaacaatattttaaattggtgatctattgctatgccaatataaatcttttttcactatcttctctagcatccaaaaatttgaatacttagcagacaggtctgagaccagagtgtga

SEQ ID NO: 675241 - DNA, 658 bp, Homo sapiens
tgctgtgtccatcccaggctttactggagctgactcctgtctcttgctgctataagtacagtatttacaaggcctttaaaaaatgtctcttcctgcccgggcatggcagctcacacctgtaatcccagcactctttttgggaggccaaggtgggtagatcacttgagcctaggagtttgagaccagcctgggcaacatagtgagaccctgttgtctctattaaaaatataaaaattagccaggcatggtggcacacacctgtcagctactcaagaggctgacatgggatgattgctccagcccaggagttcaaggctgcagtgagctatgattgcagcactgcactccagcctgggcaacaagcaggcaagaccccatctcaaaaaaaaaaagaaagaaaaaagaaaaaactcccttccaaaattctcacgctcaccccttgactacctctctgtgcctgccctctacaacttattctctaggatttctcagttgtgacgttgatattttgagcatcctayattgtaggatgttagttacctatgagatgccagtagcatcttcccagttgtgacaaccaaaaatgtttccagacactttcaaatgtctcctgagggcaaaatcaccacccttattgacaacaaccactgctctatct

SEQ ID NO: 675242 - DNA, 1315 bp, Homo sapiens
tggtgctattttaaaattgtatgacagcgttaatacttgctctttcctttcaattgacttccttggggatttaatctgtaggtttcctctttcttttactcaaaaggaagaacatttttttttgtagtgtctatgccactaaattgtccatgtttttcactactttttcacagcagaatgatattttgtcctggtttttaagttttatgtttttaatttaaggcttatatacttagacattgtcatttcatataaaaacatactgacactttcaaaactcataattaaattggatgaatagccaatttataaaattgctaaggttgtacaatttaccttttcctacatctatttaattgagcaatcttccattaaaagtttagcggtgaagtatttttcaaacccccaccatttttttcctctataaacaaaataaatatgtttatttttagacaatcttatattaaatcaaaggggtatatcaaaccctctagtggaaaagggtgccaagagagatgtctgccactgatcttgtcttgggataaatgtgttctctttcatttaacctactccaagcctgtctctgagtcgaaacttgtgttggccacttcaaatgacaaagatacaacttgtctactgaaaggtgctctaaaagattactgaaaaatcataagaaatttcagctgcctatgaatgtttctggtagattgaagagattgaccttgagaccaaccttaagcaatcttggtatttgtctctcatatatttccctgatgggtatgagtatcacttgcattaaaaatgatggatgttggcaattkcatattaattgccacaggaaaaaaatcttaacaccttctgatgggctctgaccagagagagaaagagagggagactctattgccgctaaatatgtttcctggcaatttttgtgtaaacaagtttgaattggggccttggaatagctgagaaaaacgtgtcattggcaattgtcctagaattacaaacagtgcaagaaaatgatgaagtcacctattcaagtaatctccaggctcaaaaagagaaaataggacatttattctgtctcacacttttcttggatctgctggagaggaactgaatctcagcaagttctaaaaacaactagatttgtgcttattcttacttattcctagtagaatttctctcatcacagacagaatcatttatcactttataatgtgcatttcccccttacagtctccatgttttaaattaattaaatgaactttaaaatattttaagaactcagtactgagtacttcttcagcgtgtt

SEQ ID NO: 675243 - DNA, 1315 bp, Homo sapiens
tggtgctattttaaaattgtatgacagcgttaatacttgctctttcctttcaattgacttccttggggatttaatctgtaggtttcctctttcttttactcaaaaggaagaacatttttttttgtagtgtctatgccactaaattgtccatgtttttcactactttttcacagcagaatgatattttgtcctggtttttaagttttatgtttttaatttaaggcttatatacttagacattgtcatttcatataaaaacatactgacactttcaaaactcataattaaattggatgaatagccaatttataaaattgctaaggttgtacaatttaccttttcctacatctatttaattgagcaatcttccattaaaagtttagcggtgaagtatttttcaaacccccaccatttttttcctctataaacaaaataaatatgtttatttttagacaatcttatattaaatcaaaggggtatatcaaaccctctagtggaaaagggtgccaagagagatgtctgccactgatcttgtcttgggataaatgtgttctctttcatttaacctactccaagcctgtctctgagtcgaaacttgtgttggccacttcaaatgacaaagatacaacttgtctactgaaaggtgctctaaaagattactgaaaaatcataagaaatttcagctgcctatgaatgtttctggtagattgaagagattgaccttgagaccaaccttaagcaatcttggtatttgtctctcatatatttccctgatgggtatgagtatcacttgcattaaaaatgatggatgttggcaattgcatattaattgscacaggaaaaaaatcttaacaccttctgatgggctctgaccagagagagaaagagagggagactctattgccgctaaatatgtttcctggcaatttttgtgtaaacaagtttgaattggggccttggaatagctgagaaaaacgtgtcattggcaattgtcctagaattacaaacagtgcaagaaaatgatgaagtcacctattcaagtaatctccaggctcaaaaagagaaaataggacatttattctgtctcacacttttcttggatctgctggagaggaactgaatctcagcaagttctaaaaacaactagatttgtgcttattcttacttattcctagtagaatttctctcatcacagacagaatcatttatcactttataatgtgcatttcccccttacagtctccatgttttaaattaattaaatgaactttaaaatattttaagaactcagtactgagtacttcttcagcgtgtt

SEQ ID NO: 675244 - DNA, 596 bp, Homo sapiens
ccgataaaagatagttatgaggatgtctaatggacatgatccaattagcacataaatcacgtattctccatgtggtattggaatttggtcatataatttataaaacacaatctctaaacgctggtttatccaaaagtccacatgaaaagagtgctcactgtggcaactgcacagctcaactgacatgaaagcattcagctgatatattcataattaaccacttacagcagtaaacattatagtgacagactctgataaacaggcaacgtrgatgatggacacataaaatgtttagacatctctcttactcttaccttaatctccctagggtgtacattctaatctttctatggagtgaataataaatgatatccacttggagtagtttatccagtcagatgtttggatttgcagtaatttattctcactctccaaacccttccattcctcatcctgtgccctttgacacagtatcaagatggatcatcagtactcaggatatgatccccattcttgaattcctagcattatgttctaggaattaaccagccttatcacagggacatgggttgtggacactgcaaatatttaacatt

SEQ ID NO: 675245 - DNA, 609 bp, Homo sapiens
tctaaggtaggtgggcttcagtccaaactacagttccttgatagaaataatcagaggacagcctgcaagatcctccacgtacatgcagcctccacaattctttggttgaaaaaattagcaccacgtgctgtaaacattgaaatctgtattgcaaaactgccattcgggagagttgtccagtcaactccrgtacctctgctcagggaacacaccacacttctacaaagctgatttcagtgctaccacaaaggggctaggaaataaaaaatgctacagaaaagagtaaacatatgataccaagtaggtaaaaggaaaggaagtgcaggagtgggttctgaagacatgaatgttgaaaggccaaaggagtttgctgaactcttgctaggtttccccaggagagccctgatctccaggaaatagacctgtttgcccatgtgcccacccttgctgaggccctccaccttgcaacagtatccagcccttcagagccaagccctgagattttctttccgtctgtcatctaagcaaatttctcacaagtgcttgtaagtatatttctggattgctttattcagcttgctcattgacaagggatttgtagtaatttct

SEQ ID NO: 675246 - DNA, 644 bp, Homo sapiens
tgtgtgcaaacagtggttcacattttctgccatttttcccattagagatttggctcacctgtgctgggagtctgtgccgtttcttcccagttgatgctgatcttttcaaatttacacattttgtgaaaatatcttcacctattttttaccaacaatcactttataaattgacatgacttcatagacactagagttatggtgaacaaagactggtaaaagggccaaatcattaatatgtgtgtttttataaccatggtctcccctcagttcttaagtctgtcttttttaacccattaaaacacactggtaagcagtgtagctcagtgagggcaccctttctggttgcgtggtctcttttgatgcaaatagagatgtggtcctatatacagtgaagcttctcacccacttcattttttctattcaagctccaacttctggaacatttctgaaacagactcaaaactttagsagaacttttcattctttttcttttttttttttattatactttaagttctagggtacatgtgcacagcatgcaggtttgttacatatgtatacatgtgccatgttggtgtgctgcacccattaactcgtcatttacattaggtatttctcctaatgttatccccctccaccccacc

SEQ ID NO: 675247 - DNA, 676 bp, Homo sapiens
atgtgtatgtgtattaggtggggcttgtgctgaacaaaaatccaacgtagaaggccaatggaggggcactttatctatgaattcacacaagaaacattcactgcacccctactacatgccaggatcacaggagtacagagagcttgctatttattcattcattctgccagtggatcaactaaccaaccaaccaaccaaacaacacttcctgagtgactattatgtcccatattctgaactgggcactaaataagtaaaaaaaaaaaacccacaaaaaaaamccccaaaaccagacagttccagcccttccttcaaagtctctcagtcctgtggttgagacagaaatataaacgtaattgtaagtggctataaaacagctttattaagccataacagggtgcctggggaggggtgccatggagtaaattgtaattgaagtaggtcttaatgggttgcagaggagttttctgggggcacagggggagaagggagctctaggcagacgtgtaaagacaagggcatttggggagctgcatactggtggacaaagtgagaagggtctcagagcaatgatgcagctggagggtgaggttgggaacatggtctggggctgactgtgtagggtttggtaagcagctgtgctaaagtgtttggactttatctggaggacaagtga

SEQ ID NO: 675248 - DNA, 607 bp, Homo sapiens
gattaagtaaaatatacttaatacagtacaaattaattgttaataatatggttagtttggaaagtaataatatgactacataggattctattttaagttaaaagccaaagtaacagagtagactatgcataaaactctggaatccaaagccatttttactgacaccaaataataaaatgctttttgtgcatttttttatatttcagagtataatacagcaaatcckactcgttgtaatatcttcaaaactttgtcaaagttatataaaacacttcctattttttctgtttgaagcgaaacaattttaaagctggcactcttgggtaagctccaagtaagaggagcaagaaagggaaatcaggattctgtaagaaagtcatcttttccatgaatgtggacaatccttttaatacttttggctatgaataagaggaaagagataaagtagtagctagttacagggccagaactagagtgaggcaatgaaggtgttcatctgaggtttttaatttagggagcaacacaaatctcagtattaaaggtaagtgatacctgaatgtgttgcattgttttttaaaaaaattaaaattaatgcaaaaatttttat

SEQ ID NO: 675249 - DNA, 621 bp, Homo sapiens
ttatgctatgaaatagatacatgtgtatatgtatgtaattttaatctcaaacttcatagaaagaaatgtctaaattatcttgtgagctgataatgctagtttactggatagctatttaagagaagatataaataagaatttatttatttatttatttatttwtttattttgagatggagtttcacacttgtcgcccaggctggagtgcagtggcatgctcttggctcactgcaatctccacctcccgaattcaagcgattctcttgcctcagcctccctctcaagtagctgggattacaggagcataccgccatgcctagctaatttttgtatttttagtagagatggagttttgccatattggccaggctggtctcgaactcctgacctcaggtgatctgcccgccttggcctcccaaagtgctgggattgcaggcgtgagccaccgcacctggcctaaataaggatatctgagaaaacaatggcaaagtaagtcagaaaacaaatagcctttgtctacttaaaatgttatcatgatgattcatcaagaaaggtgccctcacaccactgcaaaactttctttttctgccattttaaaagtaattggtactctgtaataaa

SEQ ID NO: 675250 - DNA, 621 bp, Homo sapiens
ttatgctatgaaatagatacatgtgtatatgtatgtaattttaatctcaaacttcatagaaagaaatgtctaaattatcttgtgagctgataatgctagtttactggatagctatttaagagaagatataaataagaatttatttatttatttatttatttatttwttttgagatggagtttcacacttgtcgcccaggctggagtgcagtggcatgctcttggctcactgcaatctccacctcccgaattcaagcgattctcttgcctcagcctccctctcaagtagctgggattacaggagcataccgccatgcctagctaatttttgtatttttagtagagatggagttttgccatattggccaggctggtctcgaactcctgacctcaggtgatctgcccgccttggcctcccaaagtgctgggattgcaggcgtgagccaccgcacctggcctaaataaggatatctgagaaaacaatggcaaagtaagtcagaaaacaaatagcctttgtctacttaaaatgttatcatgatgattcatcaagaaaggtgccctcacaccactgcaaaactttctttttctgccattttaaaagtaattggtactctgtaataaa

SEQ ID NO: 675251 - DNA, 1181 bp, Homo sapiens
aggtgaatttcttgatatattacatacatgcagaaaagtgtaaaacagctcaatraattttcagagggtgaacacacctattactcaatccctagatcaagaaataatatattattggaaccccagaagccccttccttaacctctaaccaccaaaagttagctactgtcctaacttctaataccacaatgtgttttttaaaaatatttttgaacacaaattgaattatatattgtactgtcttttgtatctagtttcttttgctcagtttttttgggtgaaattcattcatgttgtgtaaactcatagtttgtccattctcatcactgtaagtcaaatgcataaatataccaaaatgtatttgttcatcatgctactgataagcatttgtggctttataaattctgttatgaacacacttatttgtgtcttttgggaaacatacctaagaatggaattgtttggacataatacatttataatacatatagctagatataaacacacatacacaatacataaataggtattacatgtaccacatatacatgataacatatatgtacatttcatttcaacatatacatatacccactttagtaggtactgctgaggttatccaaagttatatcaatttacactcctaccaacagtgtaaaaaagttctagttgttctatatccttgctgtcacttggtattgtccttttcatttgggttattttggtgggatcacattttcttttataatgtatatatttatctccattctactttacacttccttcattgccaataactatttcccctcccaatttgcactaatgattgcaacttttacatagttagtaattaatatatatctagtcactaacaaaatgaaacaggaaatctaaaagtaaagtgtcagtggttcatttttttttttctatgaggaaagtagtcttttaatggattgagaaagtattattattggctttggtaaaatttaggaacatggaaatgaatctgatggccattgaaattaagaacatttccaaattacacttcttaaaatttgcccaatgtaaacttaattagaaagagtacaagcacaacccttcaattacttccatgagttactaagtctgattcttaccaggaacttggctttcttttgaagatttcaaagttaccagcaatc

SEQ ID NO: 675252 - DNA, 1181 bp, Homo sapiens
aggtgaatttcttgatatattacatacatgcagaaaagtgtaaaacagctcaatgaattttcagagggtgaacacacctattactcaatccctagatcaagaaataatatattattggaaccccagaagccccttccttaacctctaaccaccaaaagttagctactgtcctaacttctaataccacaatgtgttttttaaaaatatttttgaayacaaattgaattatatattgtactgtcttttgtatctagtttcttttgctcagtttttttgggtgaaattcattcatgttgtgtaaactcatagtttgtccattctcatcactgtaagtcaaatgcataaatataccaaaatgtatttgttcatcatgctactgataagcatttgtggctttataaattctgttatgaacacacttatttgtgtcttttgggaaacatacctaagaatggaattgtttggacataatacatttataatacatatagctagatataaacacacatacacaatacataaataggtattacatgtaccacatatacatgataacatatatgtacatttcatttcaacatatacatatacccactttagtaggtactgctgaggttatccaaagttatatcaatttacactcctaccaacagtgtaaaaaagttctagttgttctatatccttgctgtcacttggtattgtccttttcatttgggttattttggtgggatcacattttcttttataatgtatatatttatctccattctactttacacttccttcattgccaataactatttcccctcccaatttgcactaatgattgcaacttttacatagttagtaattaatatatatctagtcactaacaaaatgaaacaggaaatctaaaagtaaagtgtcagtggttcatttttttttttctatgaggaaagtagtcttttaatggattgagaaagtattattattggctttggtaaaatttaggaacatggaaatgaatctgatggccattgaaattaagaacatttccaaattacacttcttaaaatttgcccaatgtaaacttaattagaaagagtacaagcacaacccttcaattacttccatgagttactaagtctgattcttaccaggaacttggctttcttttgaagatttcaaagttaccagcaatc

SEQ ID NO: 675253 - DNA, 1181 bp, Homo sapiens
aggtgaatttcttgatatattacatacatgcagaaaagtgtaaaacagctcaatgaattttcagagggtgaacacacctattactcaatccctagatcaagaaataatatattattggaaccccagaagccccttccttaacctctaaccaccaaaagttagctactgtcctaacttctaataccacaatgtgttttttaaaaatatttttgaacacaaattgaattatatattgtactgtcttttgtatctagtttcttttgctcagtttttttgggtgaaattcattcatgttgtgtaaactcatagtttgtccattctcatcactgtaagtcaaatgcataaatataccaaaatgtatttgttcatcatgctactgataagcatttgtggctttataaattctgttatgaacacacttatttgtgtcttttgggaaacatacctaagaatggaattgyttggacataatacatttataatacatatagctagatataaacacacatacacaatacataaataggtattacatgtaccacatatacatgataacatatatgtacatttcatttcaacatatacatatacccactttagtaggtactgctgaggttatccaaagttatatcaatttacactcctaccaacagtgtaaaaaagttctagttgttctatatccttgctgtcacttggtattgtccttttcatttgggttattttggtgggatcacattttcttttataatgtatatatttatctccattctactttacacttccttcattgccaataactatttcccctcccaatttgcactaatgattgcaacttttacatagttagtaattaatatatatctagtcactaacaaaatgaaacaggaaatctaaaagtaaagtgtcagtggttcatttttttttttctatgaggaaagtagtcttttaatggattgagaaagtattattattggctttggtaaaatttaggaacatggaaatgaatctgatggccattgaaattaagaacatttccaaattacacttcttaaaatttgcccaatgtaaacttaattagaaagagtacaagcacaacccttcaattacttccatgagttactaagtctgattcttaccaggaacttggctttcttttgaagatttcaaagttaccagcaatc

SEQ ID NO: 675254 - DNA, 1181 bp, Homo sapiens
aggtgaatttcttgatatattacatacatgcagaaaagtgtaaaacagctcaatgaattttcagagggtgaacacacctattactcaatccctagatcaagaaataatatattattggaaccccagaagccccttccttaacctctaaccaccaaaagttagctactgtcctaacttctaataccacaatgtgttttttaaaaatatttttgaacacaaattgaattatatattgtactgtcttttgtatctagtttcttttgctcagtttttttgggtgaaattcattcatgttgtgtaaactcatagtttgtccattctcatcactgtaagtcaaatgcataaatataccaaaatgtatttgttcatcatgctactgataagcatttgtggctttataaattctgttatgaacacacttatttgtgtcttttgggaaacatacctaagaatggaattgtttggacataatacatttataatacatatagctagatataaacacacatacacaatacataaataggtattacatgtaccacatatacatgataacatatatgtacatttcatttcaacatatacatatacccactttagtaggtactgctgaggttatccaaagttatatcaatttacactcctaccaacagtgtaaaaaagttctagttgttctatatccttgctgtcacttggtattgtccttttcatttgggttattttggtgggatcacattttcttttataatgtatatatttatctccattctactttacacttccttcattgccaataactatttcccctcccaatttgcactaatgattgcaacttttacatagttagtaattaatatatatctagtcactaacaaaatgaaacaggaaatctaaaagtaaagtgtcrgtggttcatttttttttttctatgaggaaagtagtcttttaatggattgagaaagtattattattggctttggtaaaatttaggaacatggaaatgaatctgatggccattgaaattaagaacatttccaaattacacttcttaaaatttgcccaatgtaaacttaattagaaagagtacaagcacaacccttcaattacttccatgagttactaagtctgattcttaccaggaacttggctttcttttgaagatttcaaagttaccagcaatc

SEQ ID NO: 675255 - DNA, 645 bp, Homo sapiens
aaatgccaaaaagcaactgcaatggcagaataaaatacactaatgtgttttgacacaataatcgtgcctgtttctctttaatgagccaggctggggatttccaacttatagaggcagagaaaggctgtcaaaccagcagatgtgccccatacttgcaaggggcatttacttaatgggccatctgaatacttgtctacatgtcagcgatgatgcaaacatgacatctctcagcttgagagttgctcttgtgtgcagacaactttgtgaagtcatgggatagcacttggaaaggaattttaaactgggaatacatttcatrgctcagctgcaagactgaagactgcaggaaggaattcactttcagcaactatgtgaattcatggagtaggtccatgctatttcagttctgcacagctggccgactgtgaagctttatttttctcttcttagagctgagtgacgtctctttaatggttttggaatgactgttgccaactctttttgataatttttgttttgtttctctcaactgggatatttcttctcacctgggtgatttcccatcttaagaatttttcggctaatgtatgagggtttttttttttttttttcttgattgcctggaacagacatcaacttgtgtta

SEQ ID NO: 675256 - DNA, 683 bp, Homo sapiens
tcgtgtattcatttcttcattctataagcatttattgggtacttgtcacgtgccaaactttattctaggcactttgaatataagggaagtaaaatgaagtgtataaccttgagattccatcagtctaaacagaatgagggaaacaataatagaaagatgattgtactacacttctggaaaatgtaatgataaagatcagcacagaatattatagaagtagaatggtcaaatagctaatccaaacttggaggttatggctaccaagagaaatttgtagaagataattcttgaaaattttaaataagagaaaccccctttgggtcctctccccttgtacgggagctctgttttcactctatttcactctattaaatcttgcaactgcactcttatgatccatgtttgttacggcttgagctgagctttcgctcgctgtccaccactgctgttttgccaccatggcagacccaccactgacctccatccctccgcatccagcagggtgtccgctgtgctcctgatccagtgaggcgcccgttgccactcccgattgggctaagggcttgccaatgttmctgcatggctaagtgcctgggttcgtcctaatcgagctgaacactagtcactgggttccatggttctcttccatgacccacaacttctaatagagctataacaagcac

SEQ ID NO: 675257 - DNA, 1433 bp, Homo sapiens
tcaattactgagaacaagaaaaactcttatcttgaagtctagacccaaaaacaaactggcttttctctaaagactattgtcggccgggcgcagtggctcaagcctgtaatcccagcactttgggaggcggaaacgtgtggatcaggaggtcaggagatcgagaccatcctggctaacacggggaaaccccgtatctactaaaaacacaaaaaaattaccaggcgtggtggtgggcwcctgtagttccagctactcgggaggctgaggcaggagaatggcgtgaacccgggaggcggagcttgcagtgagccgagatcagcgccactgcactccagcctgggtgacagagcatgactccatctcgagaaaaaaagaaagaaaaaaaagaaaagaaaaaaaaagaccattgtcaaagagattgaatcacatccttatcatgaagagaaagtgctcagaacttggctaagtccacatctttctagtttggggatgttccacaaaaatatagtaagagaatgaaaaattataaagaaaatacataaattggtcttactctggttactagcagcaatgaattctattaacatataaaatcatatttcatgtcacatgaatgattcaaaaattgttaattgaaaatactaaaagaaataaaactttcaaggggatgcagactgatatctaagcaatagcatatttatgaggataaatttgtattttatggttagatgtgggtgaaaacataccattttctgtgaggagaaaaatcatagcatctcacagaaagtattttttaatacaataaatcatccctatataatctgtacagcaaaccaccatggcacacatttacctatgtaacaaacctgcacatctggcacatgtacccctgaacttaaaataaaataaaataaatcacccatctttaaaaatccatctttcagctaaaacaactctttgtcatcagggtttgtgtatttatttcttctctgcctcctcagcataaagcacagtgtctaacactgtatatactgtatgtatactatatactgtatagattcatattgacattctcaaataataaagtctggagtatttaaataactattaatcacttactaacatcacattcacctatcttaagcatacagcagcccttgtatttaaaggcaaatgaaagcaatatgctacattcgtaggtaaaactaaaaatgagtttttaatatataagagcttcagacaggactgtgatgcttaattttgatgaaggtaatatttccgaacatgaactaactgcttaattgcttaaaagatctgaaattttgccctgactttaaattgctctgtggtaattgtcaggcctctgagcccaagccaagccatcgcatcccctgtgacttgcacgtattcgcccagatggcctgaagtaactg

SEQ ID NO: 675258 - DNA, 1780 bp, Homo sapiens
tgaaacctgtcagtggaatgagaaataaacatttcgctttttaaaaaggtataaagaagagaagtgttctaaccacaaaaccaccatttccctgcttatatttcagtagagagcaagattcaattgaaagcaagatttttaaagccccacactcttttatttttatttatttgtttatttatttatttattttgagacagagtcttgctctgttgcccagactggagtgcaatggcgcaatcttggctcactgcaagctctacctcccaggttcaagcgattctactgcctcagcctcccaggtagctgggattacaggcrtgtgccaccatgcccggctaatttttgtatttttaggagagatggggtttctccatgttgctcaggctggtcttgaactcccaacctcaggtgatccgcctgccttggcctcccaaagtgctgggattacaggcatgagccaccacgtctggacttatttttatttttatttttattgtttttttttttttgagatggaggctcattctgttgcccaggctggagagcaatggtgtgatgtctgctcattgcaacctctgcctccaggtttcaaacaattctcctgccccagcctcctgagtagctgggattataggctcctgccagcatgcctggctaatttttatatttttagtagagatgagatttcaccatgttggccaggctggtctcaaactcctaacctcaggtgatccacccccctcagcctccccaagtgctgggattacaggcgtgagcctgcatgcccggccaagacccacactctttaaaagtgagggtttgttctatttgaaatatggcacactcagacccacactttttagggaagagagtctgtgctatttgaaatatatatgcacatacttataatttgtaatacaattcaagatatatatcatgctagattccatgcaggagcagaaaataagactacagctcaaccttatgttcaatactgtaagaacaaccttttgcaaatcaggtctctctgggcttcagattcttcatcagtcaaacagaaatatataccctgtgtaacaatccttgaggatgttttgaagatccaaaaagatacaaaatgtcaaaatattttataagatttacatcaatatgcaaattgtgttgtatgaaattaaaaagatgtactcttcagcaacactgatactagggagagccattctctccttgaaaatgaaatagttgtttgcattttacatggagaatgtgtttgtttcacattcaaatatgcaaaacttccattaaaatattgcaaaggaaaacatgcacttgtataaaagaaacgtaaggctctgtgcatataccaacacatccttgagcagagaacaattacatgtaggcaataaaaagaccacagatttgatcacccttaaagtacagcagaaactgatatccatataaagattgtttgctaaaattgtattcagttgctctggagaccaaaattctaattttcatcactttctgaacatgatttttgctttttcaaagaagcaaatactgaatgctttttattattctttcttaaatcccttaccaacaacactttatatccaattacaatgaaaagagggactattttatttaaatcttcgtcattttacattgtgtgagagaagatgattcaagataagtgatgagaactgaattccaatgatgtgctaaatactgagccagtcaaggtgctgaaatgtattgctcatttaatctgtcactgagt

SEQ ID NO: 675259 - DNA, 2859 bp, Homo sapiens
agtgggacacggatgagccagcagtgccagagccggaacgtaaatattcatgaggatgtgggtggctacccagaataggtcgcactccagggaaagccatcccacatcttcttgtcacaagatgcgctatgcagtcacagagaatataacaccctccgaaggggaaaaccctgggtcctcttagaacagtctttgggagcttctactcaggaatagtagcaaagtctgggagagatggtctgatggaatctgcaaagaaatttcctttgcagaaagctggagagatgatggaattagtgtttcacacgggctttatgcctatgatgctcatcatttgctttgcctctaaatctgctacggctcttgcaaaacagcttcagtaatagagccaatgttcatgacagtttctcaaccataacagtagaaaatacattctgtgattattgtgatcttattattttaaaaaagaaattacgtctctaaaataatgcacttgggtccaaataacaatatttatgatttcatgagaaaaaaacataattattttataggaactcagagaattccaattttctcaaataaggttgagtgagcttaaataaacacatattctaagacatgcgagtaaggaagaagattacaaaataatcctgtaatatactattaatagctgtccaaaggcatattaaatgtcttacatttgtttttacatttgctgtgtacaacaaacagttttaaaatcatttaaatctaaacgaaagaaagagaaagagaaaaggccatagagagaaaaaaagagagggagagagaaataggcagagggaagggaagggagagaagaaaatacaatttttttcaccaaacaatactactattattatgtgtaatgcatgctgatattttctattctattccattttgttctatttgattctatttcctaaaatatgattcatgacaccttaaattgaccacatgacccaccattcagtacctttacatctcagtaaagagatgtgaaaaactctctcatctaaaatgattaaattgctgaatcacatattaaacatatgtgtatatttctttatgtgatatatattcctggaaaagtagcaagtgccaaagtttgcctccactttaaatacctctgtgtaactatggagaattgagattttatttatgcaacttttcggtgtgtggatatcaggaaataaagctatgtgccagaaaagggtatcatgtaataggaaatgcccattagataagaccccaagaagttataagcaaaatatagtggtgactgagaactaagcaatggagctcagtaaagcaaagccagacatattcatcagttactagaacaaagaaatcttccttgaaaagtcagaatcatagacaatgctcaatcagtattccagtctgaatttgggtactaacatagatacataagcctctaaaagatgatttaaagtgttttaggtttttaattgctctctcctcacaagcaaccggcaaatgcaactgtaattcttaacttcaatctatgactcaaatcatttccacagaaaaaattcctaggtaaataaacagctcaagagtcaagaattacaaaatataatacaaagaaacaagccactataggtgaaaacagaaaaacaaacaaataatacacagttgaaataaactcaaaagatcctaaaatactgacttttttttctcacataacgtgggagacagaattagctaactaaaagttatatccaaagagatgggatccagcatgcggccagagartaaaaaaattgcatagaaatcatgataaattaagagctatggaggttagagtaagggaatctaatgaatataatcagaatttcagaaaaaaagatgaatgaaagaatgggaaagaggcaaagttgaaagaattaatggctgattattttccactgatgaaaaacactgatagatccaagaaccccaagaaagatatataaaatgaaacccacacctaaacacagcaaagtaaaattatacatacataaaaatatatacatacacataatggcaataattggttatataattggttgtataaaattatagttatattgtttaattttgaggaaaagcaggctaaaaccaaaattcttagtaatggcagaatgtaaattggaaaagggtaatcggacttgcagtttccttgggcatttaatatttacaaggactggctttatatttgctaaatctaatagatacatggaaaggactgaaataatttttaagataataagcaggaagtgaaatttctaaaaatagacaaggattcaagcatttcaagcaagaaagaaggtagaaaaagaattaaaagtaagacatgtaagaatagtatgtggaaatttggtataaattaatccagatatatgagaagttattatacatttaaaccggtttgtggtggattaactattgctgcaaattctttattactctccttttgaaaggtagcatttatttcctttcttattaaatctgggctggctctgaggctgcttaattaatagaatacagtggaaatgacactgggaaatttccaagcttagcctttaagaggactgtcagctttcaccttctcctccttggactattcacaattggaatgctcccaggcatagcccagcaactgcatggagaggccccatataggcacagtggttgagaggctcaaaaaactcctgcctgacaatcatgttacaaagccattttggatattacagcccagtggtgtccccaagtgatcgtgtaaaatcaatgccatgtggagcagaagagctgcctagctgagcccagtaaacctaggga

SEQ ID NO: 675260 - DNA, 2859 bp, Homo sapiens
agtgggacacggatgagccagcagtgccagagccggaacgtaaatattcatgaggatgtgggtggctacccagaataggtcgcactccagggaaagccatcccacatcttcttgtcacaagatgcgctatgcagtcacagagaatataacaccctccgaaggggaaaaccctgggtcctcttagaacagtctttgggagcttctactcaggaatagtagcaaagtctgggagagatggtctgatggaatctgcaaagaaatttcctttgcagaaagctggagagatgatggaattagtgtttcacacgggctttatgcctatgatgctcatcatttgctttgcctctaaatctgctacggctcttgcaaaacagcttcagtaatagagccaatgttcatgacagtttctcaaccataacagtagaaaatacattctgtgattattgtgatcttattattttaaaaaagaaattacgtctctaaaataatgcacttgggtccaaataacaatatttatgatttcatgagaaaaaaacataattattttataggaactcagagaattccaattttctcaaataaggttgagtgagcttaaataaacacatattctaagacatgcgagtaaggaagaagattacaaaataatcctgtaatatactattaatagctgtccaaaggcatattaaatgtcttacatttgtttttacatttgctgtgtacaacaaacagttttaaaatcatttaaatctaaacgaaagaaagagaaagagaaaaggccatagagagaaaaaaagagagggagagagaaataggcagagggaagggaagggagagaagaaaatacaatttttttcaccaaacaatactactattattatgtgtaatgcatgctgatattttctattctattccattttgttctatttgattctatttcctaaaatatgattcatgacaccttaaattgaccacatgacccaccattcagtacctttacatctcagtaaagagatgtgaaaaactctctcatctaaaatgattaaattgctgaatcacatattaaacatatgtgtatatttctttatgtgatatatattcctggaaaagtagcaagtgccaaagtttgcctccactttaaatacctctgtgtaactatggagaattgagattttatttatgcaacttttcggtgtgtggatatcaggaaataaagctatgtgccagaaaagggtatcatgtaataggaaatgcccattagataagaccccaagaagttataagcaaaatatagtggtgactgagaactaagcaatggagctcagtaaagcaaagccagacatattcatcagttactagaacaaagaaatcttccttgaaaagtcagaatcatagacaatgctcaatcagtattccagtctgaatttgggtactaacatagatacataagcctctaaaagatgatttaaagtgttttaggtttttaattgctctctcctcacaagcaaccggcaaatgcaactgtaattcttaacttcaatctatgactcaaatcatttccacagaaaaaattcctaggtaaataaacagctcaagagtcaagaattacaaaatataatacaaagaaacaagccactataggtgaaaacagaaaaacaaacaaataatacacagttgaaataaactcaaaagatcctaaaatactgacttttttttctcacataacgtgggagacagaattagctaactaaaagttatatccaaagagatgggatccagcatgcggccagagagtaaaaaaattgcatagaaatcatgataaattaagagctatggaggttagagtaagggaatctaatgaatataatcagaatttcagaaaaaaagatgaatgaaagaatgggaaagaggcaaagttgaaagaattaatggctgattattttccactgatgaaaaacacygatagatccaagaaccccaagaaagatatataaaatgaaacccacacctaaacacagcaaagtaaaattatacatacataaaaatatatacatacacataatggcaataattggttatataattggttgtataaaattatagttatattgtttaattttgaggaaaagcaggctaaaaccaaaattcttagtaatggcagaatgtaaattggaaaagggtaatcggacttgcagtttccttgggcatttaatatttacaaggactggctttatatttgctaaatctaatagatacatggaaaggactgaaataatttttaagataataagcaggaagtgaaatttctaaaaatagacaaggattcaagcatttcaagcaagaaagaaggtagaaaaagaattaaaagtaagacatgtaagaatagtatgtggaaatttggtataaattaatccagatatatgagaagttattatacatttaaaccggtttgtggtggattaactattgctgcaaattctttattactctccttttgaaaggtagcatttatttcctttcttattaaatctgggctggctctgaggctgcttaattaatagaatacagtggaaatgacactgggaaatttccaagcttagcctttaagaggactgtcagctttcaccttctcctccttggactattcacaattggaatgctcccaggcatagcccagcaactgcatggagaggccccatataggcacagtggttgagaggctcaaaaaactcctgcctgacaatcatgttacaaagccattttggatattacagcccagtggtgtccccaagtgatcgtgtaaaatcaatgccatgtggagcagaagagctgcctagctgagcccagtaaacctaggga

SEQ ID NO: 675261 - DNA, 2859 bp, Homo sapiens
agtgggacacggatgagccagcagtgccagagccggaacgtaaatattcatgaggatgtgggtggctacccagaataggtcgcactccagggaaagccatcccacatcttcttgtcacaagatgcgctatgcagtcacagagaatataacaccctccgaaggggaaaaccctgggtcctcttagaacagtctttgggagcttctactcaggaatagtagcaaagtctgggagagatggtctgatggaatctgcaaagaaatttcctttgcagaaagctggagagatgatggaattagtgtttcacacgggctttatgcctatgatgctcatcatttgctttgcctctaaatctgctacggctcttgcaaaacagcttcagtaatagagccaatgttcatgacagtttctcaaccataacagtagaaaatacattctgtgattattgtgatcttattattttaaaaaagaaattacgtctctaaaataatgcacttgggtccaaataacaatatttatgatttcatgagaaaaaaacataattattttataggaactcagagaattccaattttctcaaataaggttgagtgagcttaaataaacacatattctaagacatgcgagtaaggaagaagattacaaaataatcctgtaatatactattaatagctgtccaaaggcatattaaatgtcttacatttgtttttacatttgctgtgtacaacaaacagttttaaaatcatttaaatctaaacgaaagaaagagaaagagaaaaggccatagagagaaaaaaagagagggagagagaaataggcagagggaagggaagggagagaagaaaatacaatttttttcaccaaacaatactactattattatgtgtaatgcatgctgatattttctattctattccattttgttctatttgattctatttcctaaaatatgattcatgacaccttaaattgaccacatgacccaccattcagtacctttacatctcagtaaagagatgtgaaaaactctctcatctaaaatgattaaattgctgaatcacatattaaacatatgtgtatatttctttatgtgatatatattcctggaaaagtagcaagtgccaaagtttgcctccactttaaatacctctgtgtaactatggagaattgagattttatttatgcaacttttcggtgtgtggatatcaggaaataaagctatgtgccagaaaagggtatcatgtaataggaaatgcccattagataagaccccaagaagttataagcaaaatatagtggtgactgagaactaagcaatggagctcagtaaagcaaagccagacatattcatcagttactagaacaaagaaatcttccttgaaaagtcagaatcatagacaatgctcaatcagtattccagtctgaatttgggtactaacatagatacataagcctctaaaagatgatttaaagtgttttaggtttttaattgctctctcctcacaagcaaccggcaaatgcaactgtaattcttaacttcaatctatgactcaaatcatttccacagaaaaaattcctaggtaaataaacagctcaagagtcaagaattacaaaatataatacaaagaaacaagccactataggtgaaaacagaaaaacaaacaaataatacacagttgaaataaactcaaaagatcctaaaatactgacttttttttctcacataacgtgggagacagaattagctaactaaaagttatatccaaagagatgggatccagcatgcggccagagagtaaaaaaattgcatagaaatcatgataaattaagagctatggaggttagagtaagggaatctaatgaatataatcagaatttcagaaaaaaagatgaatgaaagaatgggaaagaggcaaagttgaaagaattaatggctgattattttccactgatgaaaaacactgatagatccaagaaccccaagaaagatatataaaatgaaacccacacctaaacacagcaaagtaaaattatacatacataaaaatatatacatacacataatggcaataattggttatataattggttgtataaaattatagttatattgtttaattttgaggaaaagcaggctaaaaccaaaattcttagtaatggcagaatgtaaattggaaaagggtaatcggacttgcagtttccttgggcatttaatatttacaaggactggctttatatttgctaaatctaatagatacatggaaaggactgaaataatttttaagataataagcaggaagtgaaatttctaaaaatagacaaggattcaagcatttcaagcaagaaagaaggtagaaaaagaattaaaagtaagacatgtaagartagtatgtggaaatttggtataaattaatccagatatatgagaagttattatacatttaaaccggtttgtggtggattaactattgctgcaaattctttattactctccttttgaaaggtagcatttatttcctttcttattaaatctgggctggctctgaggctgcttaattaatagaatacagtggaaatgacactgggaaatttccaagcttagcctttaagaggactgtcagctttcaccttctcctccttggactattcacaattggaatgctcccaggcatagcccagcaactgcatggagaggccccatataggcacagtggttgagaggctcaaaaaactcctgcctgacaatcatgttacaaagccattttggatattacagcccagtggtgtccccaagtgatcgtgtaaaatcaatgccatgtggagcagaagagctgcctagctgagcccagtaaacctaggga

SEQ ID NO: 675262 - DNA, 2859 bp, Homo sapiens
agtgggacacggatgagccagcagtgccagagccggaacgtaaatattcatgaggatgtgggtggctacccagaataggtcgcactccagggaaagccatcccacatcttcttgtcacaagatgcgctatgcagtcacagagaatataacaccctccgaaggggaaaaccctgggtcctcttagaacagtctttgggagcttctactcaggaatagtagcaaagtctgggagagatggtctgatggaatctgcaaagaaatttcctttgcagaaagctggagagatgatggaattagtgtttcacacgggctttatgcctatgatgctcatcatttgctttgcctctaaatctgctacggctcttgcaaaacagcttcagtaatagagccaatgttcatgacagtttctcaaccataacagtagaaaatacattctgtgattattgtgatcttattattttaaaaaagaaattacgtctctaaaataatgcacttgggtccaaataacaatatttatgatttcatgagaaaaaaacataattattttataggaactcagagaattccaattttctcaaataaggttgagtgagcttaaataaacacatattctaagacatgcgagtaaggaagaagattacaaaataatcctgtaatatactattaatagctgtccaaaggcatattaaatgtcttacatttgtttttacatttgctgtgtacaacaaacagttttaaaatcatttaaatctaaacgaaagaaagagaaagagaaaaggccatagagagaaaaaaagagagggagagagaaataggcagagggaagggaagggagagaagaaaatacaatttttttcaccaaacaatactactattattatgtgtaatgcatgctgatattttctattctattccattttgttctatttgattctatttcctaaaatatgattcatgacaccttaaattgaccacatgacccaccattcagtacctttacatctcagtaaagagatgtgaaaaactctctcatctaaaatgattaaattgctgaatcacatattaaacatatgtgtatatttctttatgtgatatatattcctggaaaagtagcaagtgccaaagtttgcctccactttaaatacctctgtgtaactatggagaattgagattttatttatgcaacttttcggtgtgtggatatcaggaaataaagctatgtgccagaaaagggtatcatgtaataggaaatgcccattagataagaccccaagaagttataagcaaaatatagtggtgactgagaactaagcaatggagctcagtaaagcaaagccagacatattcatcagttactagaacaaagaaatcttccttgaaaagtcagaatcatagacaatgctcaatcagtattccagtctgaatttgggtactaacatagatacataagcctctaaaagatgatttaaagtgttttaggtttttaattgctctctcctcacaagcaaccggcaaatgcaactgtaattcttaacttcaatctatgactcaaatcatttccacagaaaaaattcctaggtaaataaacagctcaagagtcaagaattacaaaatataatacaaagaaacaagccactataggtgaaaacagaaaaacaaacaaataatacacagttgaaataaactcaaaagatcctaaaatactgacttttttttctcacataacgtgggagacagaattagctaactaaaagttatatccaaagagatgggatccagcatgcggccagagagtaaaaaaattgcatagaaatcatgataaattaagagctatggaggttagagtaagggaatctaatgaatataatcagaatttcagaaaaaaagatgaatgaaagaatgggaaagaggcaaagttgaaagaattaatggctgattattttccactgatgaaaaacactgatagatccaagaaccccaagaaagatatataaaatgaaacccacacctaaacacagcaaagtaaaattatacatacataaaaatatatacatacacataatggcaataattggttatataattggttgtataaaattatagttatattgtttaattttgaggaaaagcaggctaaaaccaaaattcttagtaatggcagaatgtaaattggaaaagggtaatcggacttgcagtttccttgggcatttaatatttacaaggactggctttatatttgctaaatctaatagatacatggaaaggactgaaataatttttaagataataagcaggaagtgaaatttctaaaaatagacaaggattcaagcatttcaagcaagaaagaaggtagaaaaagaattaaaagtaagacatgtaagaatagtatgtggaaatttggtataaattaatccagatatatgagaagttattatacatttaaaccggtttgtggtggattaactattgctgcaaattctttattactctccttttgaaaggtagcatttatttcctttcttattaaatctgggctggctctgaggctgcttaattaatagaatacagtggaaatgacactgggaaatttccaagcttagcctttaagaggactgtcagctttcaccttctcctccttggactattcacaattggaatgctcccaggcatagcccagcaactgcatggagaggccccatataggcacagtggttgagaggcycaaaaaactcctgcctgacaatcatgttacaaagccattttggatattacagcccagtggtgtccccaagtgatcgtgtaaaatcaatgccatgtggagcagaagagctgcctagctgagcccagtaaacctaggga

SEQ ID NO: 675263 - DNA, 459 bp, Homo sapiens
tgggcgtactgcgtaatgctggagttgggtgtctagcgaacccagcacctgaatagcatcactcaccactttcgaagtggcaagggctaagaaacaagggctgtgctggcctttttagctggaggactgcataagcagtacgaaataagcwtatttaaaaaatacaagcataaactgccgatgtcagcatgtacacaggtttgcagggagagctgacgcatcctgtggcgggtgctctagagagcgcgttattaaaatgttcgggcggatggtgggagggctgcggaacaaataccgacttccacagtcctctccacgcatcgtccaacggcaacgctggaataaatgacctgctgactttgtcatgcaaaaagatgtggccccatccagccatcccgcaccgtccccatcgaggcagaagatagtaaccaagaaggaagccaaggagtggcggaagaa

SEQ ID NO: 675264 - DNA, 778 bp, Homo sapiens
ggtgcatgttctttagatatatttcaatagcaaaatgaagcagtaatgtattatttctatcaccagaaaagagttaactatacattatatatacaaacaccttcgcacaaatacataagacatgcacatccctgtatatgaccatatctacaggatcttacatggtctcttacctgtattcgagcttaataagtgtttcctattgaaagagggtataaattagaagtgtataagcatcattaaatcatccttacaggtttctttctagttcataaaggtctataaaactcataaacatgggtttataatctgctttcttttcattcttgttgtatcttcccacctcagacattttcattgtaggctgcgtagtggctttgatttcatatattttggaaggataaaaatattccttcaacaacaatgctttattgataaataaagtttcttttcaagtatcttggatctgtaatttctttggggaagtttttaaaggtttggtgattttaattttttttagaagagcttttatacttagatatttttcaaggaaaaaaagtgatttcattgaggctactttgccaaaatagccatagaatgytggaataggaagacataagagatactttggggtttatttagcccaacttctttcttttatttttatttttatttcttcttatactttaagttttagggtacatgtgcacaatgcgcaggttagttacatatgtatacatgtgacatgttggtgtgctgcacccattaactcgtcatt

SEQ ID NO: 675265 - DNA, 1492 bp, Homo sapiens
tgataaagtgagaccttgccttaaaaaaaatcaaatttgtttccctaacaattctatatgataagctctagcgtggttattcctaaaagattactgtacataggggaccagcaggtcagaagggtgtcacatgagcttggtaaaccgccctcaaggaatctttaactcacatatctcaaggaatctctgccataacgtgcagtctagttctgtaatacaaaaaggaatgaccaagttccacagtcttttctaaattactacctcggttttctgaatcaaaacacctttcaaatgccaaaaatgtaaacgatttttttgttggggatagtttactaaactaagtttccctgccttcataaactttattgaccactctcttaatgatgaccatcaagataggcaggtttaatgtatactactgcttscctctttgttaaatggcattagaatgtttagcatgttatatattttttacttctttccttctctttttcttctttattttcccctttaactgctatccccttacaggctctgtgactttgagaagttaatttaacctgtcagtcttagtttcttcatctgtaaaatgaagatactactactaatttatagggttgctttgagggttaaatgatacttaaagtgtttaacttagtacttggtaatatattgtttcaggtttatgactatatttcagattgcaggtgctatcaaaaatctgacctttagagatttaaataatggggcatttatttatgaaaatactttgcaatttgctttgaaaattacaaaatgctacagatacaaggaacaacaaggataatgataagttactgtgatcacatcagacattttggtttagaaaggtttgttaactatccaggtaaatgtatattttaaagcaagtaaaagatgatttagcaaacctacaaggcaaatagttaaacggttgaaaaatcaacttaaagagatgtgagctcaaaaactccttatccttttaacagaattccttttatcccactagacacattagttatgttgtaattcctttggttgagatggataattaaaaattcattttaaaatgctactttgtttgggataatctgattaaccgacttttccaattcactcattcatacaatgaaaaagcctaggaaaaggtgcatgagaaagaggaactgccttattttttgagatgggtctcactctgtcacccagtctggagtgcagtggtgtgatcacagctcactgcagcctccaactcctgggctcaagtgatcctcccaccttagcttcctgagtagctgggaccacaggaacatgccaccacgtgtggctaattttttgatttgtagagtcaaggtctcgctaggttgcccaggctggtctcgaactcctgggctcatgcaattcttccacctcagcctcccaaaatgctgggattacaagcataagccactgtgcccagctcctttatttttaaata

SEQ ID NO: 675266 - DNA, 1128 bp, Homo sapiens
atcattatatttaatcatttgcgctataattactatacacataatagtcataattgttaaatctttaaaaaataaaaacaagtctattaagataagtttcagatatgtttggagttctttttttattttgtccaaaggatatgtagtcaaacaactgcatttcaacatcaattggattagtgttttttattttattttatttttctattttagtgatgggttattttgaaattagatatataattggttcttttttttgtttttgcattgtttatttttgaatatgtacagtattaatatgatttaaaactgtagtaaatgttatactcactgaaatgttactttctgtattwtttttttacccttttctcaactcacacttgtagataaactaatatcattattctttttatattcttgctgtattccttactgtaaaattagcaaatattttaatgttttcttattttcccttgtgacttacatggaaatagcatactatatacactcttcggctatttgctttttttttttttaatttagcgatatattctagaaatttctccatatcaatttatatattcttgtattattttaaacagccgcatagtctttcattgtgtgtatatacaatagttaattccaccaatttgctatgttggttatttacatagttcccaacattttgcaattacaaataacgctacaatgaacaaccgtgtatgtgtattttttgtattattaaaatactttcatggtaaattcacagatataagatgactgtgtcaaaggacaaatgcataggcatttctgctaaatattgccaaattcccttccaaagaggttgtgctattttgtgtcccctccccacaaattacagtttctccacagcctcattagtgaagtgtattgtcaagtttctaagtttttgccatttgtatatgagaaatggtatgtaaacacagttttaatttatgtaattctttttatacatgaagttaaatatatcttaatgcatttatggctatctttatttttgtgacttgtttgcttatttttccccatttttcaaaaaattttaggaaattctaaaatttgaaaaagttctatttgtatttaggatatgac

SEQ ID NO: 675267 - DNA, 1128 bp, Homo sapiens
atcattatatttaatcatttgcgctataattactatacacataatagtcataattgttaaatctttaaaaaataaaaacaagtctattaagataagtttcagatatgtttggagttctttttttattttgtccaaaggatatgtagtcaaacaactgcatttcaacatcaattggattagtgttttttattttattttatttttctattttagtgatgggttattttgaaattagatatataattggttcttttttttgtttttgcattgtttatttttgaatatgtacagtattaatatgatttaaaactgtagtaaatgttatactcactgaaatgttactttctgtattatttttttacccttttctcaactcacacttgtagataaactaatatcattattctttttatattcttgctgtattccttactgtaaaattagcaaatattttaatgttttcttattttcccttgtgacttacatggaaatagcatactatatacactcttcggctatttgctttttttttttttaatttagcgatatattctagaaatttctccatatcaatttatatattcttgtattattttaaacagccgcatagtctttcattgtgtgtatatacaatagttaattccaccaatttgctatgttggttatttacatagttcccaacattttgcaattacaaataacgctacaatgaacaaccgtgtatgtgtattttttgtattattaaaatactttcatggtaaattcacagatataagatgactgtgtcaaaggacaaatgcataggcatttctgctaaatattgccaaattcccttccaaagaggttgtgctattttgtgtcccctccccacaaattacagtttctccacagcctcattagtraagtgtattgtcaagtttctaagtttttgccatttgtatatgagaaatggtatgtaaacacagttttaatttatgtaattctttttatacatgaagttaaatatatcttaatgcatttatggctatctttatttttgtgacttgtttgcttatttttccccatttttcaaaaaattttaggaaattctaaaatttgaaaaagttctatttgtatttaggatatgac

SEQ ID NO: 675268 - DNA, 1128 bp, Homo sapiens
atcattatatttaatcatttgcgctataattactatacacataatagtcataattgttaaatctttaaaaaataaaaacaagtctattaagataagtttcagatatgtttggagttctttttttattttgtccaaaggatatgtagtcaaacaactgcatttcaacatcaattggattagtgttttttattttattttatttttctattttagtgatgggttattttgaaattagatatataattggttcttttttttgtttttgcattgtttatttttgaatatgtacagtattaatatgatttaaaactgtagtaaatgttatactcactgaaatgttactttctgtattatttttttacccttttctcaactcacacttgtagataaactaatatcattattctttttatattcttgctgtattccttactgtaaaattagcaaatattttaatgttttcttattttcccttgtgacttacatggaaatagcatactatatacactcttcggctatttgctttttttttttttaatttagcgatatattctagaaatttctccatatcaatttatatattcttgtattattttaaacagccgcatagtctttcattgtgtgtatatacaatagttaattccaccaatttgctatgttggttatttacatagttcccaacattttgcaattacaaataacgctacaatgaacaaccgtgtatgtgtattttttgtattattaaaatactttcatggtaaattcacagatataagatgactgtgtcaaaggacaaatgcataggcatttctgctaaatattgccaaattcccttccaaagaggttgtgctattttgtgtcccctccccacaaattacagtttctccacagcctcattagtgaagtgtattgtcaagtttctaagtttttgccatttgtatatgagaaatggtatgtaaacacagttttaatttatgtaattctktttatacatgaagttaaatatatcttaatgcatttatggctatctttatttttgtgacttgtttgcttatttttccccatttttcaaaaaattttaggaaattctaaaatttgaaaaagttctatttgtatttaggatatgac

SEQ ID NO: 675269 - DNA, 635 bp, Homo sapiens
atgtggagactcatgacctactaccaggaactaggctgggtcgacatttacttctaattagcttctgaaaaggaaatagctgatgctgtgaataaaaaaaccactttatctgcctttgtaacactcttctmttacgtctgttcaacttgtaatttttggtaacataaagtgatctttgagacctaaatgatccttaagttctgagaacttcattgtaatcaaatgtctcatttgcttagaaagaaagatgcaaggagacaagtagaaggaaagaaaaaataaaagctattcaccctaatggttctcacttacaaatttagtgtttccatgtaacatttctgtcttgttttgattttggagaggaactgttgaagaacagagctgttgggaaaagacaattcttcagttaaaaataactacagtcatgtgacacataatgacattttggtcaatgacagaatagtatacatgacagtatttccataagattataatggagctgaagagctcctattgcctggtgatgtcatagccatcctaatgttgtactgtaacacattactcacctgtttgtggtgatgctgatgtaaacaaacctactgcactgccagtcacataaaagtctagcacatgca

SEQ ID NO: 675270 - DNA, 671 bp, Homo sapiens
  misc_feature 10, 35: n = A,T,C or G
caaaactganggggaatttaacctagtttcatttngggggttattaaagctaaacacatatattcctggaacaactccaagaagaccattattagaaaataccgtgaaaactttaggaatttcatattccccccaccaaaaaaaaaaaaaaaaataggcatagtggaagattcagtattatctgcctaaaaagacattaggttgcataaaatagattattaaaattatttaatcmaattttttcctgcttcctacactacctttgttcctttcttagaaccaaagacttgataatatgaggaatcacaggaaagcctcatttattcaggaatacctaagttcacacaaggtaattttctaaaaaaaaaataacattttaaatactaagttttatgaacttttaaaatgcttttatgacagaaatctgaaatatattagacatcactctgtcttctttgcaaagaaaatacattgcatgtaattttacatgtttgtgtgtaatttagatgtcaaggcccttcatcgtcttttccagctctcctcttagttaatacatggacagccccaccttgcccattatgcatcccatgcccctccttaagcttctccaggaggctttctttttccctctatcttacatctaagtctccttaagcttctcaaggagcctt

SEQ ID NO: 675271 - DNA, 1477 bp, Homo sapiens
tggatcaaaataatactaatactagtaataaaacttaaaaagatgatttataagatgtgtttcaaaataaaatgtttgaagtatttatttgctgattaaacatttaaaattaacatatagccacttkagccctagttttttcaatgcattatgggtgtgtacaaaatatttataattttgaaaaaaaccagtaagagccatacctgtaaactagttaaaaccatcaataaaaagaaaacatggccatatgctaaaaatacataacagtttgtaaatattttgcagaagataaatacccagttctaatcaagttgactaggatgtaaccagagaaagacaatacataaatgtaactgtttacttaatgaattgaaatgttgcttttggtacatccataaaaagaaagtatttagcactgtttattcatcattgaccataaagactaacaatatatggaaaacaaaatattttggtcaaaaaagccattctaggaatagactagagctgatttcctataagaaaagtaaactatccatccattcacacaatctagcaatcctttttgctgcgactatatatttagcaaaatcttctagtaataatttcaagtcccaggcactttctatgaaagcgtggcctagtgtcacctttcagaaatcaacaaaatactgctttcacttctgtgctttggtcttatgagtttagtttaaatgagtctattaatcacagcctgatcatctctttgttgactaatacgcttcagtttcaatacttagaaagaaggctccatctatcccaccaagacacagctcccgtagggagtccttcacaaggcagcagttcacatttctgtctgacatctttttacctgtaagtcatcttgtatatgtgtatagtaataactagacaggacgttccttaagagctgagactgtgtctgtctgattggtatccttaatacatatttattgattgaataagtatttaaattatttatatttaaaattaagagtagccgaattatatatgaatataaatgttttataataaaaattaatatttatattccaagtaactcccactaagattcattctagtttatgctttagcattaaattgaaaacactaacaattaatcttaaacatacagtatatggatgacaacagcacttataatcatatgggggaaatatggtatacattaataggctttctccttctcattctatgtaagttttttaaaaaattaaaattcctctctaataatacattctcaggaaaaggtgtcacttcttaacaccaaaattatttacttgaagtaaggtcatttgtttttatttttttgatgtgattaaaatattgtaaatatagttgatatttaaaatactgtaatactttgggatctacaaggcctggttaccgttctcatttccttatccttaaaatggcaataataatgccgttatcctagtaatac

SEQ ID NO: 675272 - DNA, 653 bp, Homo sapiens
gtccttcaatcaacactactggcatactttggtgtgtaacatattaacatttttccatgacaggatcagaaatacagccttgggtatcactgagaaaygagtctgatggaggaaatctctctgcaaagtacccggaccttaaaagtatcaggacaagtttgatccactcagaagatggcttatagtatatttatctctgctagtctcctggagttataatgattactgtcagcagggatgccctttcctctgacagagctgacactgctgagtacaaattaaagcaaaatcagattttttagtctctgaaagggtagtggaaatgggggaggggcagaatctttccttccttatctgtctcctcactgtttcaagtttgtcaaggaaatccagcaccagaaaatttaaatagagatgatacaggctgaatggggaaggttttattgttgagtgaaggtggaatgagacaatactgctgagaaattgccagtggtccttgagatttctctaaccatttcaaaaacaaagaactcctctagtccttctaagcttacgtttgttctccaagcttaatctgttagaactaaaaatgtgacgttctgttacaaattttcaagactaaaaagcagatttctaaaaaaaaaaaaaaaaat

SEQ ID NO: 675273 - DNA, 653 bp, Homo sapiens
gtccttcaatcaacactactggcatactttggtgtgtaacatattaacatttttccatgacaggatcagaaatacagccttgggtatcactgagaaacgagtctgatggaggaaatctctctgcaaagtacccggaccttaaaagtatcaggacaagtttgatccactcagaagatggcttatagtatatttatctctgctagtctcctggagttataatgattactgtcagcagggatgccctttcctctgacagagctgacactgctgagtacaaattaaagcaaaatcagattttttagtctctgaaagggtagtggaaatgggggaggggcagaatctttccttccttatctgtctcctcactgtttcaagtttgtcaaggaaatccagcaccagaaaatttaaatagagatgatacaggctgaatggggaaggttttattgttgagtgaaggtggaatragacaatactgctgagaaattgccagtggtccttgagatttctctaaccatttcaaaaacaaagaactcctctagtccttctaagcttacgtttgttctccaagcttaatctgttagaactaaaaatgtgacgttctgttacaaattttcaagactaaaaagcagatttctaaaaaaaaaaaaaaaaat

SEQ ID NO: 675274 - DNA, 612 bp, Homo sapiens
tgcaagtctgatgacttctctgtttaaaacatgcccgtgtccttagggtgaaacccaatctctacagcattgcataccaggcggttcatgttcagcctcgtcttcagctactcctcttctttccaccaaaggttcaaaccatcctgrgccttttgcagtttccccaattcccatatgctctgttgcttccaatctttgcataaatcacttactgtagggagaatgccccttgccccctcctttgccaccctaactccactaatcctttgaaagttacctctaccttccctgagagtccatatggcttacaatatgacaggtgtccttcaccacagtccctactgagtgacactttatcttctgctgaactgtaggcccttgtgtgttttattaactttattaattaatgtctggcattgaataaatgttcaatgaatgcgtaataaatgaataacttcgtgtatggtaaagggtctaagtggagggcaatactagttcaaggtgcctgggacagttcaggtacacatctgttgtgccagtctgattgttaatagcacctttcactctccaaagtgtccagatgtaggcaataaattattttgtcactctctg

SEQ ID NO: 675275 - DNA, 1167 bp, Homo sapiens
ttttatgaaatttaatcgtgctcagaaaataactgttagatgttggtgtttctacagtgagtgttttaagttacattccatcctttctcttttaattggagaactccatttaagccactttttctttcgtgattcttctttttgtaatggacatagtcaagtttattgagccaatttgtttatgtaaacaatagaaggcttcatacattatgaggttgttttggcacataaatgaacacacacagggcagtgctcgctgtgtaatagaagttccataattagcagtaaacatgcagaggcccagggactgtcatctttgttcactgagttatgccaaacatctagaaaactgactttacacattgtgctgaaaatgtatgtattgaataaacaaacctcaacaataatctcctcagatatctgagttgggttgggactcctcttcagcaccctgggaagtttgttcattctgtgtcaaggacaaaatccagctagaaggaatcccaaatatggcttaccaatgcaaaaatagctttgctttctaggtgcatcttccaaattttgagggacacaggccaatgagacagagaacttcttgggcaaaaagacagaaaaaagatatataagcaaccagagcatcctaagcagcttttgtacagagacaggcactcggcatctgcttgctgcatcttacgccatttagtccctacaagaactctatgaagttcatcttcccacttttctgaggcatagacaggctcagagagctgcagtgatatccttagcacccacctggtagcttgcagagtcaccactgtgtcttggaggagagagacacctactaaataactggcccaggaactgtggattggtggtgaagtcctggtaggagctcaggaaggtggtaaaggagaaggtggttctacctggagtacaatgttgagtagtaccagagcctccttcagcttcttccttgtacctgtctgggagtatctgcgtaattcttatctgaaggtttagggtagacttatttttatatggtgggaaacaagaaaagacatatggtcagtgacagcasagtgaaccactggcagattgggggctgagccttataccaggaagctcccattcttcagagactcgtgcatgtcaaggacacaggtgtcc

SEQ ID NO: 675276 - DNA, 1167 bp, Homo sapiens
ttttatgaaatttaatcgtgctcagaaaataactgttagatgttggtgtttctacagtgagtgttttaagttacattccatcctttctcttttaattggagaactccatttaagccactttttctttcgtgattcttctttttgtaatggacatagtcaagtttattgagccaatttgtttatgtaaacaatagaaggcttcatacattatgaggttgttttggcacataaatgaacacacacagggcagtgctcgctgtgtaatagaagttccataattagcagtaaacatgcagaggcccagggactgtcatctttgttcactgagttatgccaaacatctagaaaactgactttacacattgtgctgaaaatgtatgtattgaataaacaaacctcaacaataatctcctcagatatctgagttgggttgggactcctcttcagcaccctgggaagtttgttcattctgtgtcaaggacaaaatccagctagaaggaatcccaaatatggcttaccaatgcaaaaatagctttgctttctaggtgcatcttccaaattttgagggacacaggccaatgagacagagaacttcttgggcaaaaagacagaaaaaagatatataagcaaccagagcatcctaagcagcttttgtacagagacaggcactcggcatctgcttgctgcatcttacgccatttagtccctacaagaactctatgaagttcatcttcccacttttctgaggcatagacaggctcagagagctgcagtgatatccttagcacccacctggtagcttgcagagtcaccactgtgtcttggaggagagagacacctactaaataactggcccaggaactgtggattggtggtgaagtcctggtaggagctcaggaaggtggtaaaggagaaggtggttctacctggagtacaatgttgagtagtaccagagcctccttcagcttcttccttgtacctgtctgggagtatctgcgtaattcttatctgaaggtttagggtagacttatttttatatggtgggaaacaagaaaagacatatggtcagtgacagcagagtgaaccactggcagattgggggctgagccttataccaggaagctccyattcttcagagactcgtgcatgtcaaggacacaggtgtcc

SEQ ID NO: 675277 - DNA, 605 bp, Homo sapiens
tggatgccttaactgaaatttcctattctcagtttcttgagcaaaacaatatctcaaaggatccttatgttcagcagtggatcgaataaaaatcatttgttgggacacagagtctattcattgcatgttttaacaggatgctactctattaacwtgaagtagtatattaataattctctgattttctctggatagttgctttattacctatcagatctcatcttaattttgtatatcatagttcataaatcttttttcaacaaatctttaccaaagttcagggatgatacaaagaaagcataacctaataacttagaaataccattggatgtggcctcagatcccttgaagtgagtctctttttatagccctagaatgcctccttgtccagcagcaggttatgaggtcacctactttttctagtgggaatttcctaaaacacaccttctctctgcagaatccaggcccagttaatctgattttttaaatctttcccaagtaattataaaattagagccatttaaaatgcattaaaccttaattttctttaaatctcttaataggaaccaaggttacattctgtgagaagcttttctcagcctttg

SEQ ID NO: 675278 - DNA, 630 bp, Homo sapiens
gggctttactctggaatgtatagcgtcaggaaatggtagtaattctatgattggatgtgttaacttttatctaaaaggaaagaaaaatggatcgaggctaaaactatagctgataaagaaggagcagtcactcatatcagccagaatggagggttgtttggttattcttgtggtttggrcaatgcctttgtttttgtcagcattcaaacatgattatggagtggtcttgtttttaatcttgatccatcagagtcacagggtgactttgtctgatgttggtgttctgttaacaagagaacaccacagcctagctgtgagtgccaggccaactcctaacaacaccagggtgtagttgattgtgtcaggctgggactgttttctctttctcaaacatgttcatgagtttaatattccccttaataattaagtaataggtttgataataatataagcattttaagtaatatatttaatatttaaaatctctatagtggagtagattctgtgtttcctagttctgttgccttaaaaagctcttagctctaattataatttttataatattaaaagtaaagcctagaatactatattttgcctaaatgactcttctttttgaaaaatatatgtttt

SEQ ID NO: 675279 - DNA, 1450 bp, Homo sapiens
gtaaaaggacttgatgctccataccaagattcaatattttattcagccaggttttcaaggaaaatgatgattttaaaatccctaagttcctaacatcactatgctttaatgatatttcttttcagaaggaaatactgactctcaaaacaggcaatgtgcttttaaattaaatatctgtagctcagtttgaagacatcttgaatgatcattattcctactgcagttctttagctgagtagcacgttttcccatcaggcattgaaagagaaaataaattcatgacacctctattttctaaggcacactgggcaccatgtaatggttgtagcagtcacagtccaacttagtcaaatcgtaattctcattgcatcttcgccataattaaaaaaacaaaagaaccttgatttgttataccctgtgctaaagccatgatactcatcagagtctcaatagtggaatgcaatattcttactccttaataaacacagactgtcataggactggaatatcacttaagctttataaacctgaattgtcttctgatgagccattccttcaactttctcatatagttaacgttttgtagaaatgagacccatttgtgacattaggcagtattacatatgcgaagttagaatctgtgaatggtatcaaaaactaagtagttgttctgagaacatgattgctaattttctgtgtaaaagttcatttcaacatagaaccctctccgccttattttatgaataaatagtgaataggaatgtaaaccaacagcaagaaacatctaaactctataaatttggagcatcataactgtggggacacagcagggcaaacgtatagaggatgaaacacatcagtctaacagtgggaaatatctcaataaatgcaccaattatgaaagaaaatagcagtcctattaattataaaaaatatagagatgataatgtaataactaagtctgtaaaactgaagtgaaattatgtcaacatttattgggttcttgttatggcacaaccaattgtttcttacttacaagtttgtgcagactgaacaagctaatctgtaattctttrcatataatatttctgcctttttcccctttttgattagccctattagggatcataagtagcattatcatatgttctgtaatttaagataggcctgaaaaatgcaagattgtctgaaaagttcagtaagtgtaagggttataatatgtgtaggagtagctgcagtctttcctatgaattccttcccacaggaagactattaactatgaggggcctgtatagtggacctgggagtgcagggatggagagagcacatatttgttagaacacctactgtatgctggggctttatgcttttctccaggcatgtattatcacattgattctacacaaaaccaagggaggtaaataggattgtcccattttgcagattaagg

SEQ ID NO: 675280 - DNA, 1450 bp, Homo sapiens
gtaaaaggacttgatgctccataccaagattcaatattttattcagccaggttttcaaggaaaatgatgattttaaaatccctaagttcctaacatcactatgctttaatgatatttcttttcagaaggaaatactgactctcaaaacaggcaatgtgcttttaaattaaatatctgtagctcagtttgaagacatcttgaatgatcattattcctactgcagttctttagctgagtagcacgttttcccatcaggcattgaaagagaaaataaattcatgacacctctattttctaaggcacactgggcaccatgtaatggttgtagcagtcacagtccaacttagtcaaatcgtaattctcattgcatcttcgccataattaaaaaaacaaaagaaccttgatttgttataccctgtgctaaagccatgatactcatcagagtctcaatagtggaatgcaatattcttactccttaataaacacagactgtcataggactggaatatcacttaagctttataaacctgaattgtcttctgatgagccattccttcaactttctcatatagttaacgttttgtagaaatgagacccatttgtgacattaggcagtattacatatgcgaagttagaatctgtgaatggtatcaaaaactaagtagttgttctgagaacatgattgctaattttctgtgtaaaagttcatttcaacatagaaccctctccgccttattttatgaataaatagtgaataggaatgtaaaccaacagcaagaaacatctaaactctataaatttggagcatcataactgtggggacacagcagggcaaacgtatagaggatgaaacacatcagtctaacagtgggaaatatctcaataaatgcaccaattatgaaagaaaatagcagtcctattaattataaaaaatatagagatgataatgtaataactaagtctgtaaaactgaagtgaaattatgtcaacatttattgggttcttgttatggcacaaccaattgtttcttacttacaagtttgtgcagactgaacaagctaatctgtaattctttgcatataatatttctgcctttttcccctttttgattagccctattagggatcataagtagcattatcatatgttctgtaatttaagataggcctgaaaaatgcaagattgtctgaaaagttcagtaagtgtaagggttataatatgtgtaggagtagctgcagtctttcctatgaattccttcccacaggaagactatyaactatgaggggcctgtatagtggacctgggagtgcagggatggagagagcacatatttgttagaacacctactgtatgctggggctttatgcttttctccaggcatgtattatcacattgattctacacaaaaccaagggaggtaaataggattgtcccattttgcagattaagg

SEQ ID NO: 675281 - DNA, 1442 bp, Homo sapiens
tcaaataattagttccaggcttgagtcttttacaccaattttaaagcattgagggaatgatttaccctttctaagcttccaataactcatctaaaattagtggtttggatttgaggactcccaaattccctgtccactgcactttctataagttacactagtatgtgagtgagcttcaggatctttcagatttaatacacttctcctttccagaaacaaaccagatcaaaacaaaagagtcaaatttcaaaggtaaaatagaatggatgcctgttctcggtttgtttctgtagtctcttttattttccaagtcgataggtattatcattctgtaataatctttacttttaaaactccaaattgtagactgtgttgttacaatgggtttaactgtaccattttaaatcctttggtatttgaaaggaaaactttagtggatcctttccttattgaaagatttgggacttggattcatttttccaccatcccaactatgaatgggtttagatgtccaaatgaaataggtgccaaccagtaccataaaatgggtaaatatacttaagaagggaaatgaaataggtaccaactagcaccataaaatgggtgaatatacttaagaggagaagatagatttaatttgatacagtaggcaagaaagtgccgagattaaataattggatctgaatctctttctaaagcacaataagccttcatcttttacttcaatctttactgttaagaaaaacaaaacaaaacaaaagcaactcagataaataactactcaggaaatatttcagctttaaatgtttatatctgtttgctaaatattaattttgattacatttatatctcatgtaaacttggcttatctttagcagataaaataaataatattgttcttcaggcatataaaaattaactaatagtcgtggagtttgataaatcttctaccaagtaatacaatggtaagagaatgagttaatgtccttttcagggacatggatgaagctggaagccatcattctcagcaaaccaacacaggaacagaaaactaaactccgcatgttctcactcgtaagtggaagttgaaaaatgagaacacatggttacagggcaggggaacatcaggcactggggctgcatgcgggggtggggcggcaaaggcgagggagagcattagagcagatacctgctgcatgcggggctaaaaacctacatgacaggttgataggtgcagcaaaccaccatggtacatgtatacctatgtaacaaacctacacgttctacacatgtatctgagaacttgaagtaaataaacagattttttttaaagacagttatagggggattagttgcattcagttttcacttaggattgataatacatttttatcagacttcacatattatatrttgaagtggtgaattctggtaattagaaa

SEQ ID NO: 675282 - DNA, 655 bp, Homo sapiens
ttagctcacttggaaaaaaacaaaaacaaaaacagagccacaagcatgatgagttcttaacacattgtggaacttagtagcgtttaaatgagaatcagagacctgtattctcttttatatgtgaaggcacctgatgtgtgcttgtcttggtttaaaggtgaaatggaaattggcactaactatgatcctgtggaagtcacttaacttttctgagacttatttgccttcgtataaaataaggaaattgaactaacatcatccttaagataatgaggtttagaagttttagcccaagtgggtagtcaaggaaaatgtaatttatttttctttttccttttttttttttttttttgktttttttaagaatcagagtctcactctgttgcccaggctggaatgcagtggcacattatggctcactgcagcctcaaactcctggggttaagcaatgctcctgcctcagcctcccaagtagctaggactacaggtgcacaccaccatgcctagctaagttttttaaaactttctgtagagatgggggtctcactatgttgcccaggctggtctcgaactgttggactcaagccatcctcccacctcgacctcccaaactgttgggattacaggcatgagcctccacactgggcttgttttt

SEQ ID NO: 675283 - DNA, 1440 bp, Homo sapiens
ggtgttttataacacacttctgagccatgattcagaaagtgagggaaattctctgtctttctctctctctctcaagttgagttatataaaaattacaattgtaaggtgaagctctaacagaaggccacaggagttgctatatgtactgttctcactgacccatcactgcaacttaagtcagttcatgtggactttctttgagggaacgccatttctttaggcattaaatctaaacttctttcctttgggttttgttttgcttcatttttgccagactctacaatccgccctagaaagcctgagtattacatcttcattctgtcattttcaaccctgttttctctcttgacaaggatagacatgttattttgctgatatcactgttgagttgtatgaggccttctccctttatgcaggggccaccagagtaatcagttttatgtagctgccacttcatactactgtatcctaacagcagacatgctagcaattctcttcagtttaattcaataaattggccacatgggtctatttattagctgatattggcctccaacatctaatataacaaatattaccgaaaagaaatagggttgaaactatacctaagattacagagggaaatagtcaagcatctgaggaaaagatcttgtttttccctgctattaaaaaacttaactgtaaaaaacactgtatgtagttctatagacggcatgcatcatcaggctgtgagtacagacacggagatggttcctttaaataaacacaggtgtcaggacgcttaagcatgtaaatggaggtcacaccttattttttctgtaagcttaaagtcttaaaaagtcgtggtctggatcaacaggagcaggggctgtatcaaggcatggtccattccctgctccgcatttggctgggaaagacttggtccttggctggatctaaaaagtgccctaaaaaaaaaagccctactttatagcagtgaatagtaaactggagatagcatgttggaatacaagtcttgagagaaggtggaatcctctatgaaaaagagagagcctcagagaggggagacaagaacccaagaatcacaaatgttttgtttctctgcaagaaagaatgccaaggtgcaagactatcccgttctcttattccaagctgccctcatgtaatgaatgctctcagccactcactcgaatacgtttcttttgaaattagaagtaaaacctaacacttatgttgccaacttaaagaggkttggttgtatttaagagcacacggatattagcctccaacagttttaaagaagctaagaactgacatttatccaggacccactatgtgccagggctacctaccatgtttcctcatttgaattccataacgacccatggtggtgtgcattattatgtttactttataaatgtgaaagttggagcccaaaga

SEQ ID NO: 675284 - DNA, 582 bp, Homo sapiens
gtcttacaactatatttttctgagataggctttggttgggttgtctgcaatgtagctgtagaaaactcccgagattctgaaagcaccaatctattatgcagcgaagagggtctgaagtcttagcaaagtttgttacagccttacatctattccctgatatcatgtttcatggctctggatttcatctttcacctgagactatttcttcttttgataactctttgctggctagaaagactgttctgaatacattgtatttctccaaatttaacttgaaaacttaacagttccttctttagtacatatatcagaggccaccagaactaagttggctctttacaaattctgcatagaawtcatcttagatcattaagccactaggtgttatttcccatcgttcatattactataggtaacagcattgctaaaccttccaccactgtataacaaggataacctttaatctggccatcaaataccctttcctcactgtccctcagggccccatctacttctaagctttcactgtcagtctacttgaggtcctccaagcatctacctactgcctggtccacacgcttt

SEQ ID NO: 675285 - DNA, 1197 bp, Homo sapiens
cgtttagtcagaattcaacccttattcgacatcaggtgatccatagtggagaaaaacgccataaatgccttgagtgtggaaaagcctttggccggcattcaacccttctatgtcatcaacagattcacagtaaaccgaacacccataaatgcagtgaatgtggacagtcctttggtaggaatgtggatctcattcagcatcaaagaatccatacaaaggaggaattctttcaatgtggagaatgtgggaaaacgtttagttttaagaggaatctttttcgacatcaggtcattcacactggaagccaaccctaccaatgtgtcatatgtggaaaatctttcaagtggcacacaagctttattaagcaccagggcactcacaaaggacagatatccacatgatgttaattggaaagcagtcattggagaactagaacttataaacctctacttcaagtgtgtatcacgtaattgtttccatgaaaagcaataaatgtaacaaagggtttttctatgggagccatctttgtgtagccaatctgtagtgaagaaacgcttaaaaggaaatgttagcttgggcaacacagtgagatcccatctctacaaaaaataacaaagccaggtgtggtggctcacacctccagtcccagctactaagaaggctgggtgacagagtgaggctgtctcaaaaaaaaaaaagaaagggctgggcgcggtggctcacgcctgtaatcccagcactttgggaggccgaggtgggcggatcacgaggtcaggagatcaagaccatcctggctaacacagtgaaaccccgtttccactaaaaaatcaaaaaattagccgggtgtggtggcaggcgcctgtagtcccagctatgcgggaggctgaggcaggagaatggcgtgaacccaggaggcggagcttgcagtgagctgagatcgtgccactgcactccagcctgggcgacagagcgagactccgtctcaaaaaaaaaaaaaaaaaaaaaacagagaaaaggttattaggctgttgtgtccactctcttgcaccctctatgccctcattccctccagcctagttaaggcagaagggagccatagaagctgtgccgtgtggttgccaggctggggaccattgcatgggttgtgaatgattgaaggtttgaagacrgccagtatggtgtcgcatgtctgtaatc

SEQ ID NO: 675286 - DNA, 1536 bp, Homo sapiens
tgctctagtgattctaacttgtagccagggccaagaaccactggttagaaagcaatcccaatgggttaaaattatgtaaagaagggggcactgtaattggctacataaatttccattagaaggcaaggtaccttaaattcccatcttaataatcagatataacatgttaccttaaagatcccagattttttccatcaagtttagagagactcaattgtatgggctgaaatatatctatttgcccataatacctcaaaatttacagcagattgaaggagttctagcttgggccatatgcctaccacttggaattgtttctatagccagttggaggggtactgtgagtggccaggtgtggagcaaatgcccaccctgggagaggagagattcacccagaggaagtgggccagggctgccacattcttagcatcagaggccaccattcataccagagtatatgtgactggtgcctgctggagttgtgctgtgcaaagcttgcagggctgtacacacagaaaggccctggttaacgagagctgctgataccttcagaagagggatgtgacactagggatacagcaaaacaggtagccactgtagtttgaaatcccatttgctgggttctgccagcctggtggataaaaacaaggccaagaagcttcagaaaaatctacagctgaggccctctcttggctcctctgagcagggataaagcttcctctaaactaaggcttcctctagcctcttgaacttccacaaggcaacaggccaaggtttccctggcctagaggtgttagctgtgtttggcttcctgttgcagatggaacagctgggtccaactcctgtgggttgaggactgctggaactatatgcaagggccctggtgaggccagaagtgtttgcatttccaacaagctgccaggtgatatatatgttgctggtccatgggctacacttgaaataaaaagatttcagatttttgtggcttctactaagttgccattctgttttaatgtaatgagtagtattgtttagaattygtgtatatatatatatatatatatatggccagttgtttttctttgcagttttatttctctttgtaaaatggacataatagtacccacttcgtagattgttatgaattaaatgggatgatctatataaaatatcagcactgccctcatggagtctagtgaaggggacagataacacataggcaaacacctgtaataataatatgtcaagtacaagaaggaagattataagatactgtgatagaaagagggatgagtaacctattgagataaaatggccagacagaaagagctgagaattaagcagagacctaagtaaaggatgagagggagctggccatatgaagagctggtattaatagaatggggtcccaggcagaaggaatagcctataccaaggccttaaggtgggaaagagcttaacaccatcaaagggagaaaagaaggcccctgtggctgaaccatagagagggaaagggagactgacatcagatgaaat

SEQ ID NO: 675287 - DNA, 658 bp, Homo sapiens
agaagaagtgcatttgatgtgctaacatctaagccagtggtgggcttatccagaaacagaacagttatagctctcatcacctccattgcaatgctgggcttctttctctgtcctccagacacaccccaaatgacctggttttctacattggagtctgctaattttgctgaaggccacctcttgaatggttttgttaatgtgtgtttgtttttttgtttttgtttttttgtttgtttcttgcctgactgtttatacttgttgacagccraaggctgcgtgaaaattttttccttaaccatcgctcccatcgctataccatctgagactacataatctgagataccttttttgttgttgttgttgttgagatagcgtctcaatctgtcgcccaggctggagtgcagtggtgtgatcttggctcactgcaacttccacctcttgggtgcaagtgatcttgtcagcctccccagtagctgggactacaagcacacaccaccacccctggctaatttttgcatttttagtagagacggggtttcactgtattgcccacgctggtttcgaactcccagcctcaagcaatcccctggcctcagcctctcaaagtgttaggattacaggcataagccattgcgcccagtcttgagatacttttgaa

SEQ ID NO: 675288 - DNA, 935 bp, Homo sapiens
tctggtttgaataacagcagtctcctccagtaatccatagcttttcaattatcctttccactggctctaaacttatcttcccatttcattgcttttatcttagtttccatgtttaaatcaaggacatcataaactatatcaccttcctagtccagattttgtttctcatacaggataaaataattattttctgaataaaattcaagtaagaattagatgaagttaatttgagttttaaattatcagctaaaataactacattcttctcctttgtaattaaaaaataatgataattctcaagagtaataggatactgaattcctttagtcaaagcttgggtatagcatggataggtgaaagggtctgtgaaatccctgtgtacctccaacaagtaaattagtttcattaaactagaaatagaccagtgtggttgaaaaaagtgcaagtcaagggactaattgtagcttgttgaaaagctgccgttctttaattccatatatattttagaaaaaaattagctttttaataaatagttacaaaggagaaaatagaatttgcaagttagatatcatttacagtatatatcaagggcaataaaatatcagtaagataaattaaaaatgatttctgccctttcacagaaatattcttcaaaagattcatcgatatgctttggcatcagtgctgaccatccactcactcctgatcttctggcaactttgatttctctctcctgttactctaatgaagtytctctgttgtcactagtgaacaaatggtcacatttaatttttttctctttagtccatatctgcctggacatttctgaaatataacactgttgaacatgtttaccttcctttgctccacaacctcagctcctctgtggtgatctttttgaaaacacacacacacacacacacacacacacacac

SEQ ID NO: 675289 - DNA, 2106 bp, Homo sapiens
  misc_feature 775, 776, 777, 778, 779, 780, 781, 782, 783, 784, 785, 786,787, 788, 789, 790, 791, 792, 793, 794, 795, 796, 797, 798,799, 800, 801, 802, 803, 804, 805, 806, 807, 808, 809, 810,811, 812, 813, 814, 815, 816, 817, 818, 819, 820, 821: n = A,T,C or G
  misc_feature 822, 823, 824, 825, 826, 827, 828, 829, 830, 831, 832, 833,834, 835, 836, 837, 838, 839, 840, 841, 842, 843, 844, 845,846, 847, 848, 849, 850, 851, 852, 853, 854, 855, 856, 857,858, 859, 860, 861, 862, 863, 864, 865, 866, 867, 868: n = A,T,C or G
  misc_feature 869, 870, 871, 872, 873, 874: n = A,T,C or G
ctcaattacttacatactaattggacatggagtagtaagttgtgaaaaagcaactagattgtggagatacttataaggtaagagttatttttcacaaagtctattcaaaattctgtttcaatttattgtccttgaggataagtatgttgtatctttctagtataggagggcatctttcatatgggaatttcatcttctgcttttaagaaacagcataaaggtcagattgattcttttgcatttgatttttttaagtgcctttaacctaaatacttaatatggtagagtgatatattttaaactctttcaatggcaaacttgttaaatcacctgtcacagcaattggcactgtcaatttcaattagatggcaaacttctcgaagtctaggactctgatatataattctttatgtcctacacacctattactgtaccaataaataatggctcctcaataaatatttatagaatgaatgaacatgttaggtgacaaaaataagatggtaagtgacaaatcatggtgttgtttttcttttaaaaggtaacctatctgatgatagatacatattttaagcatgattacatttagtataagggagcttcatgggggaaactgctaaatgtgcacctatatatgtttcccttttttttttttttaagaaataaagttatagttaggcatttgccaacagctggagactgtttccaagctctctctttcctgcaatatgggtatgtgactaagttattttcagtggaacaggagcagaaaaannnnnnnnnnnnnnnnnnnnnnnnnnnnnnnnnnnnnnnnnnnnnnnnnnnnnnnnnnnnnnnnnnnnnnnnnnnnnnnnnnnnnnnnnnnnnnnnnnnntattgttatttgaatgttactgagtcattgaaatttctgtttctgaaagtatacacaaacacacacacgctgttttaattgtaggaaggaatttccataatattaagaaaatgcagcagacttttaataagggaaggcttatttgtttcttttcttgaggatattgatcagaccaggaatgtatacatctctaccatccaagaacttaagagtcctgtgtggcgataagatgcagacacacaacagaaattacagacagcatgcatatatctgtactgcagacaggattgcagtaatcaaagaaattgatacatgtgtgtttttaagtaaaggaagaaaactgcatattgatatttagcatataagtttaatgtttacaaatgaatttggatagggtaaagttgaaagagagtaaacaatagttatgccaaatatactcaaggagtagaattaaaggacagaaagctaatgcaattttaaacatgtaattatgtaatagcctccattaggaaatattggatcctcttcagggaggtggtcatctcctttacaaaactctgagtttctaggctttgtattataattcagttcatcctcagaaaataaagtgaaatataaatgtacttgaaaattttttgaaaaaattatttaaaagttttgtacatgtwgtttcataattatatgttctggaatacatggtgtcttttttcaacgtagggtttaatatggtctttttatgactataaactatatctgaaaaagatttatctgagcctgtcttagaggtggtttctaaaatgaccacttagccatggtgacctttgaaagtgagaaacttccactccttgtaagactgacattggaaaattggtttcttatgattaggaaaagcccatcttgtaattttgcacaggcaaacagcattatgcctcatctactataacatttatcttcttttattatggagaaagggtacacatatcctttgagcttattcacctgactggggatggaagagcccactacagactgctttcatttccagaaagcagccctagaaaagaatcttatttgcgacatgtcgataatctctaggtggctgaactatgttgtcctgaaagcgtcacagtcagaagtagtccctagggagttaatctccagcttgaaagattcaagatgagttgaaaacaataaaagcataacccttaaatcttctaataaaaatagtttta

SEQ ID NO: 675290 - DNA, 2106 bp, Homo sapiens
  misc_feature 775, 776, 777, 778, 779, 780, 781, 782, 783, 784, 785, 786,787, 788, 789, 790, 791, 792, 793, 794, 795, 796, 797, 798,799, 800, 801, 802, 803, 804, 805, 806, 807, 808, 809, 810,811, 812, 813, 814, 815, 816, 817, 818, 819, 820, 821: n = A,T,C or G
  misc_feature 822, 823, 824, 825, 826, 827, 828, 829, 830, 831, 832, 833,834, 835, 836, 837, 838, 839, 840, 841, 842, 843, 844, 845,846, 847, 848, 849, 850, 851, 852, 853, 854, 855, 856, 857,858, 859, 860, 861, 862, 863, 864, 865, 866, 867, 868: n = A,T,C or G
  misc_feature 869, 870, 871, 872, 873, 874: n = A,T,C or G
ctcaattacttacatactaattggacatggagtagtaagttgtgaaaaagcaactagattgtggagatacttataaggtaagagttatttttcacaaagtctattcaaaattctgtttcaatttattgtccttgaggataagtatgttgtatctttctagtataggagggcatctttcatatgggaatttcatcttctgcttttaagaaacagcataaaggtcagattgattcttttgcatttgatttttttaagtgcctttaacctaaatacttaatatggtagagtgatatattttaaactctttcaatggcaaacttgttaaatcacctgtcacagcaattggcactgtcaatttcaattagatggcaaacttctcgaagtctaggactctgatatataattctttatgtcctacacacctattactgtaccaataaataatggctcctcaataaatatttatagaatgaatgaacatgttaggtgacaaaaataagatggtaagtgacaaatcatggtgttgtttttcttttaaaaggtaacctatctgatgatagatacatattttaagcatgattacatttagtataagggagcttcatgggggaaactgctaaatgtgcacctatatatgtttcccttttttttttttttaagaaataaagttatagttaggcatttgccaacagctggagactgtttccaagctctctctttcctgcaatatgggtatgtgactaagttattttcagtggaacaggagcagaaaaannnnnnnnnnnnnnnnnnnnnnnnnnnnnnnnnnnnnnnnnnnnnnnnnnnnnnnnnnnnnnnnnnnnnnnnnnnnnnnnnnnnnnnnnnnnnnnnnnnntattgttatttgaatgttactgagtcattgaaatttctgtttctgaaagtatacacaaacacacacacgctgttttaattgtaggaaggaatttccataatattaagaaaatgcagcagacttttaataagggaaggcttatttgtttcttttcttgaggatattgatcagaccaggaatgtatacatctctaccatccaagaacttaagagtcctgtgtggcgataagatgcagacacacaacagaaattacagacagcatgcatatatctgtactgcagacaggattgcagtaatcaaagaaattgatacatgtgtgtttttaagtaaaggaagaaaactgcatattgatatttagcatataagtttaatgtttacaaatgaatttggatagggtaaagttgaaagagagtaaacaatagttatgccaaatatactcaaggagtagaattaaaggacagaaagctaatgcaattttaaacatgtaattatgtaatagcctccattaggaaatattggatcctcttcagggaggtggtcatctcctttacaaaactctgagtttctaggctttgtattataattcagttcatcctcagaaaataaagtgaaatataaatgtacttgaaaattttttgaaaaaattatttaaaagttttgtacatgttgtttcataattatatgttctggaatacatggtgtcttttttcaacgtagggtttaatatggtctttttatgactataaactatatctgaaaaagatttatctgagcctgtcttagagrtggtttctaaaatgaccacttagccatggtgacctttgaaagtgagaaacttccactccttgtaagactgacattggaaaattggtttcttatgattaggaaaagcccatcttgtaattttgcacaggcaaacagcattatgcctcatctactataacatttatcttcttttattatggagaaagggtacacatatcctttgagcttattcacctgactggggatggaagagcccactacagactgctttcatttccagaaagcagccctagaaaagaatcttatttgcgacatgtcgataatctctaggtggctgaactatgttgtcctgaaagcgtcacagtcagaagtagtccctagggagttaatctccagcttgaaagattcaagatgagttgaaaacaataaaagcataacccttaaatcttctaataaaaatagtttta

SEQ ID NO: 675291 - DNA, 1525 bp, Homo sapiens
aaatgttgatctttagggatagggagagaacagaggagacaggataatgatggaggttagacctttattaaagtgctttgttttatggtttgggtttaggaactatatattaagtaattaaaaaataatgttaattagaaaaacaacaaagcaatctgtaaaatacaaaacaaactaatgaacctaagtctagatcacagagaactatacaaagaagaataatttcaagtgatttttaaaatgaagtattttgactttacatcactagtgagatctattgtcaagacaaagggaagcacagagaaatattgaatggtattcaatgatattgaggttagtaatgatgacattgctttataaaaactattattagtagatacataaataagtaggtgataaagataaaacacctttgattgtaacactttttagataaagataagacaaataagtgggaacaagcaaatgtcaggagccgtaatattcagagaaaagaaaaaatataaaatcaaggaagttaagaaaaaatcctgtaattattaattcaaattagagatgcataaatttacatatttttctctatctgaaaatatgttttctagatttgtctactgaaaagtgctagaagcaatgaccacacactcaaaatggctactctagaactcacgtaaaggcttttaaatgccatttcctaccaaaaggaacaagcctctttagagaaatggctgattgcaggttggggcagggattggacaagatgagcctgggacatcttgacagaacagataaagagaaagctatccaagcatatgactatcattttaaacttacacaagagccagcctgaaggctcacactggccgaaggagggcaagagaataatgactgcagtgaatgcagtgaaacacttcatgacatccaaaacaaaagcaaataaatataaaagttaaaacacaaaacctattgaacacctttggaggtagctaggacatcaactcatttatttgaaagctcataaaagaaaagattcagacatttattctgtcttttctgtatggatagaatttcaaggtacctaataatttrtgagataattttttgtttatagaaaaattgctatcaaatgcagagagaatgctaaatattaccattttgcaagtgctaataaaataatgaattgaggcaacaatcacaaatggctgctagaatcattacataaaagggtgatggggaaattgataatgggtcacccttaatctcatcataagtgtggaaattgaggcatgtgacttcctgaagtaaaaaaaaatgagcactttcatccatgaagtattcttgccaaaagagaaaaattaattagtgtaataaacctcaatcaatatggcttttatttctaactccaacttgtaggaaatagagaagaaagaggaacatattaaacaccattattaggattcaattagctatatacagaatagaaaaacatctatagatgaatgacccagtttcttcaacaaagagcttt

SEQ ID NO: 675292 - DNA, 626 bp, Homo sapiens
ggtattcatgtgtaaaatgatatgctttcttgaatttgctttaaaatatcttagcaataaaaggcaaaggaataaattagaacagtagaatgttaataattgttggaaatggttggctgatatatacatgagttaataagacaatttccctactttttttaatgtttgaaattttccataatgaaaagttaagatacgtaacactcagcattatcaatgtgcatactgtataaaaagatcagaaatctgttttagaccaaaaggaataggccatttagcaatataatatcttctattgtctattttgaccctaatgtcatagcaaaaactttttttaattgaaaaactaaaatatttcaattgaggaattattattacacaattattttattaactatgagaaaaggaaatgaattgagtatttaaaaaaattgtttagttacttttttgagatgaggtctctctgtcgcccaggctagagtgcagtggcaccatcattataaacaatgtcttgtttataattttgggcaaattatttctctattagccaggacacacttgagaaatatttttttctggtagtaatttgaagtgctccrttatcccattcttgtctcttttgcata

SEQ ID NO: 675293 - DNA, 630 bp, Homo sapiens
tctaagaatcaaaggagccaactgagctttctcattgaaataagaagaaaaatattgtactttgggcccactaaggcagccagaagatctaggtttgccaagaccacggacagagaaaaagcacagagaagtaagcccaaactcgtgggttttcctctcgtggcactgaccaattcttaaattacacaaggataagaagctgagcaaaaagctgcaggaaatctcartagaggtcttccactgtctcatagtgctgatgattagagttcaggctaatgattggaatgctaaaattagagttcgggacctgccaagtcctgaaggccctggtaactatcctaggttctcctgagggttcttttgagtgctgtcttctgagatgggaaaaaaacctgagatctagacttcaaaagtcacaaacatagcctagagtcaccttgatcctacctagattaaggagcctgcccctcccctaagtgcctgacagaggataaggtgaatcgtctctggaggaagataacatcctacagagcctctacaatttttcatatacgatgtcagcattcaattaaaaagaatttctaggcatacaaagaaaaagaaccaggagaaaggcagaaagaaaaatac

SEQ ID NO: 675294 - DNA, 1765 bp, Homo sapiens
aggtataaagagtttcagtttgtgagatgaaaaacttctagaaatcagttgtacaacaatgtgaatacagctaacactattgaactatgcacttaaaatggttaagacggtaaattttatattatgatgtggtgtgtgattttttggccacattaaaacaaaacaaaacaccctggcccagagccatcttacaaaagttcattaacattaacatcattcctgtctgactctctccccgacctctccttctcctccattctcacccctccagctccaacttcaattgggatcaaccatcactgtcagagagtgggcaaggatgctattagaaagacagaagaaacagacagcatccttttatccaggagcaagttgtccatatgtaaaggacctggctaagagaaaggggatggctttcctctgagaggagaatgaagtgctgatcaacataaaagactaggcattcgaatttctrgtataggactatagtttacaacttagagtaaactaggaatgaacagaagagtcaatagacacacccagttttaatctgttggccaaaaaaaaaaaaaaaaaaaaaatcctacttagcttgtttaaggagacaataggaaacaaaaataaagatgttttaaaattatagcctgcatattttacctgttcaatatactggtttaaaatattaatgcatacaatgttaatacagacagaaagttggaaagactgtacctagatggttaacagttaacagtaatcatctttggggagggactggaaaagggtgtgtttgaaaggagattttcactctacactcaccacatatttatgcaagcagtatgtattcctatgtcacttatgtaagtgatgtggtatttttaaagtcaaaagttgaaattaacatattgtgcaggtttatttcatataggtaatgggtctaagtactgtctaactttgttataatcagatattagtgaacccctgtgaaacacaaactttttttgaaactgttagaacccagcattgataatagagccagatgagaaaactgtttttctagatttttcttttttctgtagctaaaagaggaagaaagaaaagaggaaggaaagaaggaaggaaggtccaatttccttttccctaaaattttaaacaggctaatttttaaaacaaacaaacaaaaagtacctcaataactctatcagtttctgattataggaagtgagttcaccacaaatgaatattgattattatattgttgtccgtttgtattatttttccttttcaaaaaagcaacttttatggatagcataattttacggagaaacttttatatcaatatcttgctggcaaaagttaagaattactagcaatggtttcatttgaattcttttttaaacacagaatcagcatcaggtttcacatgcttacaaaaagactaagaaaacccccaataactccaaaaggcaatgtggataacttcctttgaaaataattaatgataattgtaaacattgctttcctggatattctgccattatgttggcccttcctcacacgttaccactagaatctttaggagcatcttcttgccaacataaactgtgtgaaaactttacaaacacagctgggaagaatagaccaatgacctctgtatgacttcttggcagctttgcaagtcagaggcctaatttgaagtgtggaattggtggtttgaccagttttggctaacactgggtccacatgtcagagagatgcagcagctccc

SEQ ID NO: 675295 - DNA, 989 bp, Homo sapiens
ggagctaagtgacgagaacttatgaacacaaagaagggaataatagaaactggggtctacttaagggtggagattgggaggagggagaagagcagaaaagataactattgggtactgggcttcatacctggatgatttagtaatctgtacagcaaactctcgtgacataagtttacctaggtaacaaaccttcacatgtacctctgaacctaaaataaaagttaaataaaaatagacactcagttgagcacattaaatgttcatatttgcaaacaaagcackatgaggaggattcggtctatacaacagatgaaagaattaataattcaaaactcaaaaaatacaggaattgaaataaaacattgatggataaattaaatagtagatgagaacagataaagaaaattgatacactgaaatgatggtcaatagatattgtgtctgcaattttttcacatttctccatttagctctttcttctgatacgataattaatttatgccttcaccgctctcaccaagtttcttaaccatcacagctctgtgctcattctttagttcatagaaaatgagatgactacattaaatgctcttcacaatgaagaaaaacacattgaaaattaaaatgtaaataaagctggaaaaagatttgtaatatttatattgagcaatgggctatttttaatgtaaagaaaatggttggctgggcacgctggttcatgcctgtaatcccagcaatttgagaggccgaggtgggtggatcacctgaggtcactggttcgagaccagcctggccaacatggtgaaaccccgtctctaccaaaaatacaaaaattagctgggtgtggtggcgcatgcttgtagtcccagctactcgggaggctgaggcaggagaattgcttgaacctgggaggcagaggttgcagtgagccaagatcatgccattgtactctagcctgggcaacacagcaaaactccatctcaaaaaaa

SEQ ID NO: 675296 - DNA, 989 bp, Homo sapiens
ggagctaagtgacgagaacttatgaacacaaagaagggaataatagaaactggggtctacttaagggtggagattgggaggagggagaagagcagaaaagataactattgggtactgggcttcatacctggatgatttagtaatctgtacagcaaactctcgtgacataagtttacctaggtaacaaaccttcacatgtacctctgaacctaaaataaaagttaaataaaaatagacactcagttgagcacattaaatgttcatatttgcaaacaaagcactatgaggaggattcggtctatacaacagatgaaagaattaataattcaaaactcaaaaaatacaggaattgaaataaaacattgatggataaattaaatagtagatgagaacagataaagaaaattgatacactgaaatgatggtcaatagatattgtgtctgcaattttttcacatttctccatttagctctttcttctgatacgataattaatttatgccttcaccgctctcaccaagtttcttaaccatcacagctctgtgctcattctttagttcatagaaaatgagatgactacattaaatgctcttcacaatgaagaaaaacacattgaaaattaaaatgtaaataaagctggaaaaagatttgtaatatttatattgagcaatgggctatttttaatgtaaagaaaatggttrgctgggcacgctggttcatgcctgtaatcccagcaatttgagaggccgaggtgggtggatcacctgaggtcactggttcgagaccagcctggccaacatggtgaaaccccgtctctaccaaaaatacaaaaattagctgggtgtggtggcgcatgcttgtagtcccagctactcgggaggctgaggcaggagaattgcttgaacctgggaggcagaggttgcagtgagccaagatcatgccattgtactctagcctgggcaacacagcaaaactccatctcaaaaaaa

SEQ ID NO: 675297 - DNA, 600 bp, Homo sapiens
gttgaggataaatgaaataagccagtcaagacagaaaagagatgttcaggcaggtagatggaaactagaaagtgcaatgtcgaggaaatcagagagaaaagtgaaatttcaacaggaaatcaaccgttagtatcaacttttatagagaatcagataacgtgattttcaagcggatgaaattggctgacccttttagaacctaatattggaatactgtctaaaacttgtttaacacttaatatcatttttggaaattgtaaaatgcacctggtgctcaccaatggtttaaaccttgatgaggaatacatacacacatttgcttttgtcttctaaaaatctcattttcaaatcaaaccaaatgcaagatggatctaaaatctgaatctcaggctcttagacaaggcaatactgctttgttattttgcttagatagcccatcaaaatacaaaccattcaagaagtcagctgctgctataaaggtcatctggaaagcccrgggaaggaccatgtgctgctgctgggaaaggaaaattgtcctctgggctcgtgagctggtgtgtttgtctgctgagtggcttcagtggttttatctgttgctga

SEQ ID NO: 675298 - DNA, 639 bp, Homo sapiens
cagatggaacaaatctgggatggctggctcactgtgagtgtctcccatgtccctacgtcacagacaccctgaatgtccaccagttagtgttttctttgtggccacgctcactggttttggatcaggctaatctttcctcagtgtcctcctctcccctaatttgtgagtctgagctgaaatcccactgacatgaaggcaatagaacagcagagtctgtgtctgcaaggtgcaaattagcatcggctctggctctgatggggtgggaggaagaaaatgcttagcattaacacagtagaattgggctccaaacctacattgaatctttttctctctmaggtctttgtgttcatttagatgttccttgagctgtcagataaataaccttatgcactgcagtggggcgggaaaatctattcttgggttccatacaccctttcccctccttcggtaggtggcctgctgtgcactggtgaccaccctagtggccttggcaaacctggccggcacggcgctgaccgtcaccatccagagggactggatcgtgagctgacgggtgacaacagaggccagctggttggtgagtggtaccgccctgggtactgatcctctaatcagctgagaagtagagagctgacaagg

SEQ ID NO: 675299 - DNA, 639 bp, Homo sapiens
cagatggaacaaatctgggatggctggctcactgtgagtgtctcccatgtccctacgtcacagacaccctgaatgtccaccagttagtgttttctttgtggccacgctcactggttttggatcaggctaatctttcctcagtgtcctcctctcccctaatttgtgagtctgagctgaaatcccactgacatgaaggcaatagaacagcagagtctgtgtctgcaaggtgcaaattagcatcggctctggctctgatggggtgggaggaagaaaatgcttagcattaacacagtagaattgggctccaaacctacattgaatctttttctctctcaggtctttgtgttcatttagatgttccttgagctgtcagataaataaccktatgcactgcagtggggcgggaaaatctattcttgggttccatacaccctttcccctccttcggtaggtggcctgctgtgcactggtgaccaccctagtggccttggcaaacctggccggcacggcgctgaccgtcaccatccagagggactggatcgtgagctgacgggtgacaacagaggccagctggttggtgagtggtaccgccctgggtactgatcctctaatcagctgagaagtagagagctgacaagg

SEQ ID NO: 675300 - DNA, 639 bp, Homo sapiens
cagatggaacaaatctgggatggctggctcactgtgagtgtctcccatgtccctacgtcacagacaccctgaatgtccaccagttagtgttttctttgtggccacgctcactggttttggatcaggctaatctttcctcagtgtcctcctctcccctaatttgtgagtctgagctgaaatcccactgacatgaaggcaatagaacagcagagtctgtgtctgcaaggtgcaaattagcatcggctctggctctgatggggtgggaggaagaaaatgcttagcattaacacagtagaattgggctccaaacctacattgaatctttttctctctcaggtctttgtgttcatttagatgttccttgagctgtcagataaataaccttatgcactgcagtggggcgggaaaatctattcttgggttccatacaccctttcccctccttcggtaggtggcctgctgtgcactggtgaccaccctagtggccttggcaaacctggccggcacggcgctgaccgtcaccatccagagggactggatcgtgagctgaygggtgacaacagaggccagctggttggtgagtggtaccgccctgggtactgatcctctaatcagctgagaagtagagagctgacaagg

SEQ ID NO: 675301 - DNA, 1877 bp, Homo sapiens
tataaaagccattctttgttttatatgtatgatgaaagtaacaaaagttaatttacatgttaaatatatgattatggcttctctgtataggataaaataagagaactggttagcagtatggagattaaaaagacaacaaaatttaagtgaagatayccagctacagttacagctacaacttgcaagactctgtaatttcacatatgtcaatagagatgtatatgtgggaatacttaccatataattatattaaaatgcataagattatttttaaaaagcatccagaataattgtggagcatgttcagtaataagaagtgaagttcttcaacattttaaaggcaagaaacatatttaagtggagtttccaaagtggtaggaaagaaaccttgattatatggagaaatatttccaagtagaaggcaaggctaactgtgtcaaaagctctgtggtgaaaaacatgtcgaagattgaaaagcagccattaaatcactctctgcggataaccttccctctcaggttcatattcattcacctattcaacgattatttcctgagctcctgtcctgtgtagaaccctgttctaggcacttaggctatatcactgaataaagtatcttgttataaaagataactatataagtaaaagaaagaagtacaactacatgaataaaagaaagaaagagtaatataaatcagaagtataagtaaagagtaatatccctagtgtgattagttataaccttcaatgaaagagtaacatgtgagtaaagacttgaaagagatgaagaagttattcatgacaatataaaatctaagtgtgttccaggaatatttctagtgcatgcatcataaagtgaaagtgtgcctagagtattgcaggaggagtaaggataccaatgtgctcagaacagagtgacaggggaaattaccaagataggtctcagagaagacaattacaagatctggtatttactctgcatgacacgaaaaaacattgcaacattttgagcggaatgacagtatcacatttatttttcaaagactatctgcaatagaatcaatttttctggcgtaagaatcaaacaagagcattaattaattggcagcttattacagtaatccaagtaataactcatggtgggttgttccaggattatagcagtggaagagataaagaagggtcatattttgtttatattcttaaaaacagactcaatacaatttcctgatggactgaacatggattgcaaagggcagtcaagaatgactccattgttcttaatctatacaactgtaaaggcagttttagtaaactgaagtgggggctgtggatggagcaggtttgggggtgatggtcaaaaagtcagcttttgatttattaatatttaggtaataaaacagccattcaaatagcaaagttaataatgtagttgaatataacagtctagattttggtagagagatttgagttttagaaaatagcatgaataagcaggaataatataattccatgttgtcatcatttactggcagtaacatccatccttttcttttcttctgtaatgaatggcatgacccttccctgaatatagcctattctttccccagcatttcctctacctcctgggttcgagcgattctcctgcctcagcctaccaagtagctgggattgcaggcataagcaaccacgcccggctaatttttgtatttttagtagagatggagtttctccatattggtcagggtagcctcgaactcccgacctcaggtgatccacctatgtttcttgagtttaaaatgttgaagaacttcacttcttattactgaacatgctccacaattattctggatgctttttaaaaataatcttatgca

SEQ ID NO: 675302 - DNA, 1193 bp, Homo sapiens
tgatccatctgcctcagcctcccaaagtgctgggattacaggtgtgagcaccgtgcccagcctgctccacattcttgtagtgtgcaaggtggagtcgttagccagagatctatactcaggaaacgggtgagtgactggttgctggtgaatctagcaacttgatgtcacatggcaggtcatttatctgtggtcatcgtgctctggtggacagctggttagggacaatacagggtagaacagagaggcagcccaccgtccactcctttctgtgtgagactcacagaaagacactgtttctggggtaacaagatttcagtctagttggggaaatggaaaccactccaagagcaattagcaagaaaaacaaatgtcattacatgctgaacatgaagtgctgagctgatgacactggaagacatggcccgatgacaagaacaaaacttgaccctgtgttgcagacaaaaggtgcggggacctgaagcctgtctctctggccctgcccaggctgtcgggaacaatcagattaacatcagctgctgctcagattccattatctgatatcaagccgctgtcctgctggtcattgagctgcagttagcaattttctaaaatttaaagtaaagacctttggttgcctatgtgacccctgggctggggtttgagggagaactggagcctcaaggatgtgctcaggcccacagggccctgcagaaggatctcagttctacagctcctgagggcagctttctgggccaggccaagggaatccatggggccaatgaggctgtccagacaggcggtctcctgtgtgttaggggaggcaggtgactagcatctgggattgtattagttaccyactgctgtgtaacatacaaccccaatacttagaagcttaacaccacactgattatctcccagtgtctgagggccaggaatctggctgaggcttgattgcgtggctctggcccaggctctcttgggagtttgcagtcaggctctcagcagggactgcagccatctcagggctctgcaagacaggctgctcaggggcctctgcttgagtggcagctgggtttccccagagttagtgatgagacagagagagacattcaggcagacatagacacacagagagaggagagacagagactgggagaaagaaaaggaaaggagagatggagagaaagagagga

SEQ ID NO: 675303 - DNA, 1193 bp, Homo sapiens
tgatccatctgcctcagcctcccaaagtgctgggattacaggtgtgagcaccgtgcccagcctgctccacattcttgtagtgtgcaaggtggagtcgttagccagagatctatactcaggaaacgggtgagtgactggttgctggtgaatctagcaacttgatgtcacatggcaggtcatttatctgtggtcatcgtgctctggtggacagctggttagggacaatacagggtagaacagagaggcagcccaccgtccactcctttctgtgtgagactcacagaaagacactgtttctggggtaacaagatttcagtctagttggggaaatggaaaccactccaagagcaattagcaagaaaaacaaatgtcattacatgctgaacatgaagtgctgagctgatgacactggaagacatggcccgatgacaagaacaaaacttgaccctgtgttgcagacaaaaggtgcggggacctgaagcctgtctctctggccctgcccaggctgtcgggaacaatcagattaacatcagctgctgctcagattccattatctgatatcaagccgctgtcctgctggtcattgagctgcagttagcaattttctaaaatttaaagtaaagacctttggttgcctatgtgacccctgggctggggtttgagggagaactggagcctcaaggatgtgctcaggcccacagggccctgcagaaggatctcagttctacagctcctgagggcagctttctgggccaggccaagggaatccatggggccaatgaggctgtccagacaggcggtctcctgtgtgttaggggaggcaggtgactagcatctgggattgtattagttacctactgctgtgtaacatacaaccccaatacttagaagcttaacaccacactgattatctcccagtgtctgagggccaggaatctggctgaggcttgattgcgtggctctggcccaggctctcttgggagtttgcagtcaggmtctcagcagggactgcagccatctcagggctctgcaagacaggctgctcaggggcctctgcttgagtggcagctgggtttccccagagttagtgatgagacagagagagacattcaggcagacatagacacacagagagaggagagacagagactgggagaaagaaaaggaaaggagagatggagagaaagagagga

SEQ ID NO: 675304 - DNA, 1193 bp, Homo sapiens
tgatccatctgcctcagcctcccaaagtgctgggattacaggtgtgagcaccgtgcccagcctgctccacattcttgtagtgtgcaaggtggagtcgttagccagagatctatactcaggaaacgggtgagtgactggttgctggtgaatctagcaacttgatgtcacatggcaggtcatttatctgtggtcatcgtgctctggtggacagctggttagggacaatacagggtagaacagagaggcagcccaccgtccactcctttctgtgtgagactcacagaaagacactgtttctggggtaacaagatttcagtctagttggggaaatggaaaccactccaagagcaattagcaagaaaaacaaatgtcattacatgctgaacatgaagtgctgagctgatgacactggaagacatggcccgatgacaagaacaaaacttgaccctgtgttgcagacaaaaggtgcggggacctgaagcctgtctctctggccctgcccaggctgtcgggaacaatcagattaacatcagctgctgctcagattccattatctgatatcaagccgctgtcctgctggtcattgagctgcagttagcaattttctaaaatttaaagtaaagacctttggttgcctatgtgacccctgggctggggtttgagggagaactggagcctcaaggatgtgctcaggcccacagggccctgcagaaggatctcagttctacagctcctgagggcagctttctgggccaggccaagggaatccatggggccaatgaggctgtccagacaggcggtctcctgtgtgttaggggaggcaggtgactagcatctgggattgtattagttacctactgctgtgtaacatacaaccccaatacttagaagcttaacaccacactgattatctcccagtgtctgagggccaggaatctggctgaggcttgattgcgtggctctggcccaggctctcttgggagtttgcagtcaggctctcagcagggrctgcagccatctcagggctctgcaagacaggctgctcaggggcctctgcttgagtggcagctgggtttccccagagttagtgatgagacagagagagacattcaggcagacatagacacacagagagaggagagacagagactgggagaaagaaaaggaaaggagagatggagagaaagagagga

SEQ ID NO: 675305 - DNA, 494 bp, Homo sapiens
ccccactctcttttcactccccttctcagagaacaggaggctgcagtatctgaagtcaagcttgttctgatactacactgtatttcttcctttttgtccatttatgaggaaggcagacacattgccccactgggagttttatatcacccaagctgcaagcatctctgaaacataaaaacaacaaaatattactctgtytatcacacatgcacatcgcgaggcctcaaaaacatcttgctttactcccacaactgatcccagacagtttgcttagatgtcaaacacaaatacgattcatagaccttatttgatctacttgtcactaagcttaaaaaccacacagcacagtcttgatttttgcatatatcgtaatacgtctcttaaaatgtgtgataaatttttgtgtaacacattctgttaatgaatgcttatttttcagttaaccatttagctctcaaaaattagagaaaaatttattttaacaaaaaaagcaa

SEQ ID NO: 675306 - DNA, 586 bp, Homo sapiens
ataagaatcttttcactttctctttttaagtcagaagtaattttggttttatattttgcattttgatagacaaatgtatgttcttcctgtagattacagtcatttttaagtatatttagctatgattatttacagctcatgtatcatatgtatgattaattttaaataattaactagaaggcattcttagctaaaatatagatttttttatatattaatttgccatatagtttattcagctctaatttcttatgtcttaagatatattttttaaacagctatttagctctaaaagtacttcagataagtgtgcttattggaattttttatagaaaaataatttttttcagtgtgcaatataatataaataatgatcaacctgatacagaytttataccttgaatattatatataggaaagtattaaatatagaaatgagcagttttccctatagctatttatgggctattattgaataaaaacaaaagtactttaaataataacaaaagataagtaagctcagatgtaaacttttctactcaagatttggcttctttaaatgcaattctgtataatgagcaaaaaa

SEQ ID NO: 675307 - DNA, 1928 bp, Homo sapiens
tttctgcttcctaacttctgtcgttgtcaatcctaactccctctaatatccactcaaccccataacttctgtttacttatgacttccactaccttgtggctcctgcccactgctttctctgctctcaacttctggcaaccttatcctaggggtctttttctgcatgtctcatatgcaaagcatcaccagactccgaatcttgtaagttggctgaatactctccagtttagcacatcctgtaggcagagctgttacagcaagctggccatctacttggtcactaggcaaacaaagagagctgcctctgcgtcaggtgcaaaacacaaccaacccactgtgttcccaagactcctgcatgacagtatttgcttgaagagctgcttggttagctccttagaagtgactgtgggcactacagacccctacactctcatgtccaaaacactagcaccagacctaggtctcttccttcccaaggggttgttctcattatacccctaggacttgaatcgtatctaaaagcatccactccacccttactcaaaaagcatttctcccactagtctgttactaagactgaaaacccactatcagaggttcactgccttgtaacgaggccttactgtttctaagaacctaattttaaatgtacccactcaaaagacaaacaaaaaagccaccagatcttcaaagagctcaatccctaacatgtctgagataaaaaccctataaagcagaatgagaaccctggttacctaaatcaacagggacacaaaagcaggaaattctgaagcccctgagacaaattttgctgccttaatttttccactgagggcctacaccatcatcattccatgttgtcaagttcatcttccatctatcacctattggtcccctcccatgtgctgaacaccaagtcttgggaatgattgctgaggggagctgtgctgcttggaaaagttttgtgaggcaccagcagcagccacttagaagataagcagaattgtttaattcccattgactcttttctcctaacacttaatgtgtttggaattttcttgggcattgcctcaagtctagtaaaaccaaagagttcaggaccttgttgacaaagcctgagcttttcacacagttcagcttgcaaggctgagtgttcgcttgctttgaacagatgaatcattagagaacatgcattctgcattagagaatgcattagagaacatgcattagagaacatgcattctgcttcctaggtagatgatggctaatgccacacagaagctcttaataagtaaccaggctgtgcttcatgaaaacctctcctgcagggcttaatcaatcaaagactgaggcatctgaagccctgaataatttcccctggggtagagcacaaaagctgatgtaactgcatgtgctggctgtcgcataaagcaagtggttatttcacttctgctaagtagagagaagtggaggaagagagagggtggggaggaagagagagggtagggaaaaggagttggaagaggggagagagagagaaatgctaataaatgtatggtaggtgcaaggagttatacttaaccttgaaaagaataatgaggcgcacatgagaaaaaatacagactcgcttttctgaattcagatcttagtgagagtaattgaaatggagaattaaggggaaagcaagatggagaaaagattcctcagagcctataatgataatattgttgaggggaggtttcattctctgaataaaatgtataaaatatggccgggcgcagtggctcatgcctgtaatcccagcactttgaggggccgaggtgggcggatcacgaggtcagaagatcgasaccatcctggctaacacggtgaaaccccggtctcttagccgggcgtggtagcgggcgcctgtagtcccagcgactcgg

SEQ ID NO: 675308 - DNA, 634 bp, Homo sapiens
gatttaaattcttcttttgaagatcaaaaagacttcaaaggatacttgatagatgaagtaaaacagaaatcttaagaacatgcttatatcaggatagacatgccagtaatatttttggaaccaaaataccaacatactgacctaatacttaagtcagaaactttatacttcatatctctaaaacttgaaaaaaatacactgtaagtagcagtcctgtgtcctcaatttattccattcccaataaaacccaccaatccatttatcagtttgcaataatacagctttactgtataactaaaataacctcataccaaattctagagaaaggaagtactgagtgtacaaagaacgtttccttttcaacctacgaaagcaaaccttagtttcaagagaagtattcaaaccaaagagagcatcttgcatggataaaycaaaagagaagatactacaaattaaattacattataagaataaaatggaggccaggcacagtggcacacgcccgtaatcccagcactctgggaggccgaggcaggcagatcacctgaggtcgggagttcaagaccagcctggccaacatggtgaaaccccatctctactaaaaataaaaattagccgggcgtggtggtgggtg

SEQ ID NO: 675309 - DNA, 634 bp, Homo sapiens
gatttaaattcttcttttgaagatcaaaaagacttcaaaggatacttgatagatgaagtaaaacagaaatcttaagaacatgcttatatcaggatagacatgccagtaatatttttggaaccaaaataccaacatactgacctaatacttaagtcagaaactttatacttcatatctctaaaacttgaaaaaaatacactgtaagtagcagtcctgtgtcctcaatttattccattcccaataaaacccaccaatccatttatcagtttgcaataatacagctttactgtataactaaaataacctcataccaaattctagagaaaggaagtactgagtgtacaaagaacgtttccttttcaacctacgaaagcaaaccttagtttcaagagaagtattcaaaccaaagagagcatcttgcatggataaaccaaaagagaagatactacaaattaaattacattataakaataaaatggaggccaggcacagtggcacacgcccgtaatcccagcactctgggaggccgaggcaggcagatcacctgaggtcgggagttcaagaccagcctggccaacatggtgaaaccccatctctactaaaaataaaaattagccgggcgtggtggtgggtg

SEQ ID NO: 675310 - DNA, 633 bp, Homo sapiens
atagccaaaatgtctcatttaatttaccttactccaaaggaataatggctatgttgctctcgaatcatagaaacaagttagctgattgttcaaaagtacataaacaattttcaggaatgcttcattgcatagtaacattagaaatctattttaagattatgataatttttcataatctctcaagtttgatttcaaaggactttaaaataaaatacccagccaggcacagtggcttacacctgtaatcccagcacttgaggagactgaggtgggaagattgcttaaggccaggagtttgacctgacaggaaacagagggagaaygcatctagaccaaaaaataaaaattaaaaaaaaaaaaaaaaattacaaccctagctattcaggaggccgacgtcagaagatctcttgaggccaggagttcaaggttacagtgagctatgatcataccactacactccagcctgggtgacagagtgagactgtctctaaaaacaaacaaacaaacaaacacttaaacatttttaagaaatctgtatttctgaaaagaaatttaagcacaaatttaccaaacaacacatatgccagtaaacaactagagttttgatttcaaagtcagtgattatcctatctc

SEQ ID NO: 675311 - DNA, 633 bp, Homo sapiens
atagccaaaatgtctcatttaatttaccttactccaaaggaataatggctatgttgctctcgaatcatagaaacaagttagctgattgttcaaaagtacataaacaattttcaggaatgcttcattgcatagtaacattagaaatctattttaagattatgataatttttcataatctctcaagtttgatttcaaaggactttaaaataaaatacccagccaggcacagtggcttacacctgtaatcccagcacttgaggagactgaggtgggaagattgcttaaggccaggagtttgacctgacaggaaacagagggagaatgcatctagaccaaaaaataaaaattaaaaaaaaaaaaawaaattacaaccctagctattcaggaggccgacgtcagaagatctcttgaggccaggagttcaaggttacagtgagctatgatcataccactacactccagcctgggtgacagagtgagactgtctctaaaaacaaacaaacaaacaaacacttaaacatttttaagaaatctgtatttctgaaaagaaatttaagcacaaatttaccaaacaacacatatgccagtaaacaactagagttttgatttcaaagtcagtgattatcctatctc

SEQ ID NO: 675312 - DNA, 1496 bp, Homo sapiens
ggttagagttattttaagaataaaaagaaaaaaacaaaatggaaacaaataaaatcaagttatcatcaaataatcaaagtactttaaaatgatggttattaagtaaagattaatatgaatttataccaagattttaaattatatatattcatgaatttaaattaygcattatgccttgcctaatcttcacaattacattttttcacaattaactggatttttcttacatatatttattagttatagaatgtagaacactaaccttttactttctattaaatttttcagaaatacttgactatccaacaataaagattgggaaagtaactctatcagatcaacacaaagacataaattagttaaataaagaattacatggacttttgagttatttaatgtctagcaaccacttacataccatagtggtcaacatggcgaaaccccatctctactaagattacaaaaaattagccaggcctagtggtgcacctgtagtcccggctactcaggaagctgaggtgggatcacctgatcctgggaagtcaaggctgcagtgaaccatggtcacaccatggcactccagcctgggtaatgggagtgagaccctgtctcaaaaaacaaagaaaagaaaagaagagagaaaaagaagagaaaagagaaaagaaaaggtatatactctacattcatttcaagcatgttatctgaaaaacaagttattttataattacttattttctaagtttgcaatattatactaggtcatatgtatcattcatcacagttttaaatacacaataagctccctagaaatagttatttttattattttattttttattcatgtaactccatttgtaacttgggaatgccttattacttgtgcattaggtttaataagatatagatttccagttaaaacaaatacagtttgtaaaactaacatactaattaaagataattcttatgtcagtaagaaaataaatggaagcattactgttttaagtccctttatgttttaaattatttaattataacaactatattaagatactgaatgggtgtagaagtgaggagtcatgttgaagtaggattataattaagtgtttataaatcaatggctcatagttcttaagtacatgacagtaaagtttccattgatctcaaatctttagttcttaatccacagaaggattttagaacaacttctatcttgtgaacataaacggaagatcttaaatgatttcagcaaaacactattggtggacatatgagcacttttgtaaaacatattctcactttcagaaataccagacatcctttaattatatcatgcttcttctaatttttcctttctatgagattattttcattagcatacaagcatatcctaatttaacccatcttaaaaacgaaatcctataatcgagccccttattgaccccctaattccttccagctatgtctacatttctgttatccctttatagctaaaatgc

SEQ ID NO: 675313 - DNA, 1121 bp, Homo sapiens
tgcattactaaaactttgtaccttctgaccaacatctcttcatttcccccactcccccaccacctggcaaacaacattctactctctgcttctgaatttaacttttttagattctacattgaagtgagagaaagcggctccggtgtgtggcgctagagcgcactcgagagtatttggctctatatttggtctgtgcccgttctatatctctttgcgtgagagacgccgcggcgagtcatgtgggtggaaacacagagatttgtcttctctgcgaggacaaacagagataagatatatattcagagagagtgtgtgagagagtagtgtgtgtgtatatatatatatatatatatatatacacacacacaaacacactcacagacacacacacataaaatacattttatttctgattattcacggccataaaacaaaaaagttgtctttttacctaacattagcactctgactgcaatctctaaaaaactatacttaacaagacttatagttaataagattgaagaaatatcatttggatgtaattcatgtagctacctgaaatctgtgaagattcttggcctgtactttgtgtacatttttttttttttacatattatgatacctctaatctcattagcccataataattaaaatactatcatttatgacttctgttactggccatgaggaaatagctgtatcacatcaaccatttcacttagaacaattttgaaactatataacgttttttaaaattgagtattggaaaacaacaaagacattcagaacttgaggggacactatcctaggaagattaatgaagtacacagaagtaaggacaaccatttctataatttttccaataagataaatccctgatttccaatttcagatatagaggccaggcagaaaatgaggatttgaagcttttaacagcctcgttgtgaattcstaaactggactggcttctgagaccaagaaaacaaacagaaagtgactgttaacagggcaaaaacaagcaaacaaaaacactaaacagagcttcctaaatttaaataaagggaaactgtaattcaggaactagtaagaagaaggaggttcggtaaaagcacaaggctttc

SEQ ID NO: 675314 - DNA, 1140 bp, Homo sapiens
tcggctcaatatttatatctataaacttcaaaatttttactagaattaaatgaggctttgtaaactgagaattattattttattactgtgttctccacatctaatacatgcaatgcatatattatgtgctcaaatgcctaggtttggataacataaaatttaggttctgattattttagaatttaagtcttttggctcaaactttcttacttataatttatgtatttaaaaagatatcaaattttaaggtgataccaatktaatgagttaagaggtttatttttcttgcttaaagtagacaccatcagatacagaaataaagctgctagccccataggatctgggatcatgtctgcctcattccaaactcaacctcagtgtttggtgtggcccctttcatgcaggcagggcaagataaatattcactgaatgatatttgaataaataatagcaagttatagttataaaaaagatactgtcaatctattattagtcaaatccttgaaaaagcagactgaacctctgaagccttttgaaatcactctgagtcagtgtctccagctatttcagacctaacctctgtgaaccaaatagttatagaaactgaaatgacctatttcatgaaggaagagaaaaattctaataagaattgtatgtgaatctgtgggtgtacacacacacgcatatatataatatacacacacactcacattcacacacatatatttgcagagtttctttttcattctaatttaatttgtcttgcacagtactaggctcctaaacaacatggattactatttgttgaattagaatgataactgcataaacccagccgaaattcttgctgcaagctgcaatttgcctactctataatgtcaacgaagcatctggttcttactttgtcactttctccctagggcttcaaactgaaagctacagaggagaaagtggggtcattatatatacggctaaaacaagacgtatactgtgtaggctctgaaacatatttctgcaatttcataaatggcctgtaattcaataatagccatcaaaactgtatgagtttcatttcagtttggctataaatgagtttgtttcctactaaatcattcatatccacatttcccactattttag

SEQ ID NO: 675315 - DNA, 669 bp, Homo sapiens
ttccaagtgctgtcttttaacttgtgattctaaaaagccaggtgctcaataattaataattattttgtacatattaatccataaggtactaggctaacctacatacaaccacaccattaaatgtcacctaaagacaaggttttccaacacttcattctgcaatacagctccaaaatttcccgtgacaagacattggctgggaaagtccctgacaggagtagttctgagaggggaaatgaatgtgggtggataccagtagcagaacgtgctatgctaagacaaagaaataaatgagagaaaagaatgatgtraaaattacgaaggaggaaaaccaaacaagatctgaggtgtagagacttttaaataaaaaaaggggaaaaagcaatagaaagaaaagaaacagtgatacttccagttcattttatatttaggttcatctaaagattcatgaaccattagtgcttttctccattttggaagtgatttgtgacactgtaattttatgtaacagtatgggaacacagatatggatgtgatgaagagatgtggctgatgtgggacagtgggccatgggggtccctactgttaatccaacaagggcttggccaaggctgtctcaaggggtgtcaacatagcaaacatatcaactacctgtcaggtacaagctga

SEQ ID NO: 675316 - DNA, 1092 bp, Homo sapiens
cccagtaaagaaactgaggcacagggagtccagtggctcacccaggaaccccaggtcagggccttggaccagggcttggtagctctgcctctgctgaccctggaggcagtgacttcaggaggtgaggaagccctgggtgctgcccagcccgaggcaggcctcctgggtcagacgttcctgctgcctgaggtccgttcatcccagccaccctccccagctgccggctccccttgccttgcaattcacatgccagcctcggggctgccagccgagctcatccttgtgtcctccagcacccaccacgtcctccctgcccgctgcgggccttggcacctttgccagggctgcccccacccccagccccagctgtctcggaggtgtcagagcctgagagtcacccccaagagcagccctctctgacccaccaggcaggccatgcgactgcctatgtgctcctacagaggcctgtgccccacccyggtccacagctgacctgtgtgctgcacactcacctccttgcttatctgtgtgactccggttggagggctttctcctcactaggctgtcaattctgagggcatgaaccgagcctatcttgtttctgcatcactgtggggccagcagggcccagcacccaacaaatgtgtgttgaattgggccccctgagccgagggtgtggattaaacgacccccacagagcccttctagccaaaaggtctgccatctcaggggtgtgtgtgttgacagagagagggagggaaatcaatttaaagtgagagagagaaaaaaaaatgctgcatctacagttcttatttatttttccattccaattttatgtaattcacaataaaaagatgctcaatgtcattactcattaggaaaatgcaaatcaaaaccacagtaagatagcacctcacacccactaggatgctataatcaaaaactgggaaagaagtgtcggtgaggacatggagaatggaggtcctcacacagtgcagcaggaatgcagagtggtacagctgctatggagaatagcttgttccccacaagttaagcatggaattactgattggtggtatcgttggatattca

SEQ ID NO: 675317 - DNA, 1394 bp, Homo sapiens
caatagcaccaatcctcccatctgtccctgagcgtggggacgatcgggcaggagaaccgtgagactcatcattgagtatttcattgaaccttctcagcctcagttccccatctgcagcacaaggcgatgtaacagtgatgtggatgcctcctttcagcagtaacaatgtgtggtttctaagcatgggttcgaatcactagtccctgctctccctccaataattctcaagagtctaggtcagaacacagaacttcagaccctctaagtacagtcacaggagtaactcgtgcctgagctggaaggagaatcccaggaaaggtggggcctgaggtctgaagaccggcgtctcatcctccccacctgcgccccygtgctcatcccaaaccaggctgccctggcagtgtgaagacggcgctgcgctgacggggcagctgctcccgaaactctcgtaactagcgtccagtagcaagtgtctgtgggaaggcactggaggcgagggctccggtctgcagctgtgaaaaacacgtctttccacatgagaccggctgctacctgcaggcctccaacccacatcccaatttcatgagaaccacattctagccacggtttcaagaaactcaaattacctgggcatcttggattttacctggcaaccttaattcttgccaacttagcatctgacctggtcaaacctgctgtccccgcccttccttgtattaccctccccaagtcaccgtcgacctctctgaagctctggaaagggaggagaataaacgtttgtggccctactgcgggcaacgtgaccgacactctgctctttgaggaagaaaggcttgctacggagaggtcacacatccgggccctcctgaaggttggttctaggccattccttccaaacacaccacccagcacctcctaagtccagctccgtgccaggcactgagggtgactgaagaatgaagaggccgggtggggctgcggggatcctgtctttgtgggaggcaccaagcgataagtaaataccccttgcctcccgcctgcctcgtccccactgactcagcttgtagcaacctggcccgtgggtccccagtgttcagtttcttcaataaggctgtattgttctcacggggaaatgcttctcttggggagcttcaggcagtgcgtgcaggaagccagctgaggtctgcattgcaccacgtgagcaggggtcagccgccctggccgctgactgcccagtagctgcgcctagggaatggcggcctctggacacctggtctctaagcacaaccaggttggatgtgtgcatgtctgcatttacaaactcactacaagatcaacagaagcagggcactcaccccttttatcagctcatgcacactggctctgaatttgcc

SEQ ID NO: 675318 - DNA, 1394 bp, Homo sapiens
caatagcaccaatcctcccatctgtccctgagcgtggggacgatcgggcaggagaaccgtgagactcatcattgagtatttcattgaaccttctcagcctcagttccccatctgcagcacaaggcgatgtaacagtgatgtggatgcctcctttcagcagtaacaatgtgtggtttctaagcatgggttcgaatcactagtccctgctctccctccaataattctcaagagtctaggtcagaacacagaacttcagaccctctaagtacagtcacaggagtaactcgtgcctgagctggaaggagaatcccaggaaaggtggggcctgaggtctgaagaccggcgtctcatcctccccacctgcgcccccgtgctcatcccaaaccaggctgccctggcagtgtgaagacggcgctgcgctgacggggcagctgctcccgaaactctcgtaactagcgtccagtagcaagtgtctgtgggaaggcactggaggcgagggctccggtctgcagctgtgaaaaacacgtctttccacatgagaccggctgctacctgcaggcctccaacccacatcccaatttcatgagaaccacattctagccacggtttcaagaaactcaaattacctgggcatcttggattttacctggcaaccttaattcttgccaacttagcatctgacctggtcaaacctgctgtccccgcccttccttgtattaccctccccaagtcaccgtcgacctctctgaagctctggaaagggaggagaataaacgtttgtggccctactgcgggcaacgtgaccgacactctgctctttgaggaagaaaggcttgctacggagaggtcacacatccgggccctcctgaaggttggttctaggccattccttccaaacacaccacccagcacctcctaagtccagctccgtgccaggcactgagggtgactgaagaatgaagaggccgggtggggctgcggggatcctgtctttgtgggaggcaccaagcgataagtaaataccccttgcctcccgcctgcctcgtccccactgactcagcttgtagcaacctggcccstgggtccccagtgttcagtttcttcaataaggctgtattgttctcacggggaaatgcttctcttggggagcttcaggcagtgcgtgcaggaagccagctgaggtctgcattgcaccacgtgagcaggggtcagccgccctggccgctgactgcccagtagctgcgcctagggaatggcggcctctggacacctggtctctaagcacaaccaggttggatgtgtgcatgtctgcatttacaaactcactacaagatcaacagaagcagggcactcaccccttttatcagctcatgcacactggctctgaatttgcc

SEQ ID NO: 675319 - DNA, 1840 bp, Homo sapiens
caccatgcctggctattttttttcttctttttttgtatggagcagagtttcccaggctggtctccaactcccagtctccagggatcctcccacctcggcctcccaaagtgctagaattctcaagcgtgagccaccacacccgggcctacattttcttgatattttgagtttattcgaatatcaaatctcacttttccttttttatctcccccacatcatgagactcccacagagaggtcatattacccatttcctgtacacaattaaaataaatgccatcttctgtgactctcactgatgtcattactgaatcactagaaattaatagggtaacagtagcttgaaagggcttgagatatgtaaaacactatataaatattattattaacttgcttaatgtaaagttcaagttctgtgctcagacttatactaatttctttgctttcctcctgggagatatgaaccatgggcgttttatttatattgagtttcattattaatattgctcttataacagaagtttgccatccaatattttaaacgacaactatgtccctggtgctaggccatgtagggtatagacatgggttgggttttttttttccagttgtattcatcatacaaagcaaaatatttttctacaccctcttttgtgacacgtctccacagttatacagttggtgttgaatgaagatttgttttcatgaaatataattagattttcttttgtcacaagcactgtcagattgtatattgttttttttcctgagtaagtgtggtttgcaagattttgaaagcttgttccggccaggcgcggtggctcatgcctgtaatcccagcactttgggaggccgaggcgggtggatcacctgaggtcaggagttccagaccagcctgggcaacatggtgaaaccccgtctctattaaaaatacaaaaattagctgggcatggtggtgggcgcctgcctgtagtcccagctactcgggaggctgagacaggagagtcgcttgaacccaggaagtgaaggttgcagtgaactgagatcacaccacagcacttcagtgacaagagcaaaactctgacttaaaaaaaaaaaaaagagagaagagaaaggttgttccagtggaaaataggaaatagaaaagctcgtatttctagcaggagtagaaaactttttcactccctcaagctccatgcacgtgaaatatttgatgtagtgtcagtttttgagagtctgtattataatatctttagaggtttaagaagctagctttaactagggtagaatctaaggggatgtcaacattttatttttgtgagagagaggtgaatggcagaaggaagaagtaaggaaagtaggcatcgactctggcacttacttttcttattaaaatattcacccacagacacaggcacacacacttgtataatttgaaaagcctgtgtgggcctggcatggtggctcacgcttataatctcagcactttgggaggccgatgtcggcagatcacctcaggccaggacttcaagaccagcatggccaacatggtgaaaccccgcctctactaaaaatacaaacattagcccggtgcaatggcaggtgcctataatcccagctacttgggaggctgaggcaggagaatcgcttgaaccctggaggcggaggttgcagtgagctgagatcgcgccactgcactccagcctgggcaacagtkaaagactgtctcaaaaaaaaaaaaaaaagaaagaaggaatgctagggaataaaaaggctaactcctaagagtgggtgtctctggataatgaatttacaagtgacttattttccttaatatattt

SEQ ID NO: 675320 - DNA, 600 bp, Homo sapiens
gatcacaccattgcactccagcctgggcaacaagagctaaactccatctcaggaaaaaaaaaaaaaattcagatgatgcagcctgggcagcatggtgagactccatctctactaaaaatacaaaaaaattagccaggcatggaggtacttacctgtagtcccagctgctcagcaggctgaggcgggaggattgcttgagccagggaggtcaaggctgcagtgagctatgatcgtgccactgcactccagcctgagtgacagaggaacaccttgtctcaaaccaaaccaaacaaaacaaacccaaaaaacaaccatcagatgaagatattttagagaagagattaaggctcagagaggttaagtgctttgtgcaatgtcacacagcatgtgaatgacaaggctgggctcttgggtctgctgaccctaggacttagcttgagctatgtgtgctgttttcaggagaagctatggccgtatacagggcacagggatggggaggggggctgtccccagtgttccccccacccccgagcagacagagaaatccatctggggcctccaccyctgggagccgggccaggaattttccccacagcctag

SEQ ID NO: 675321 - DNA, 633 bp, Homo sapiens
gaatgtgctcataaaggctttagtgtaatcatgcctgtaatcccagccctttgggaggcagaggcaggtggatcacctgaggtcaggagttcgagaccagcctggccaacatggtgaaaccccgcctctaagaatacaaaaattagccaggtgtggtggagcgccttcaatcccagctactcaggaggctgaggcaggagaatcgcctcaaccaacttagttgggttaaaactaattccatgaaggcatacatatccactatttttttaataagatttattttttagagcaatttcaaagcaaaattgagcaaaactgaggtacacagatttttccatccacttcctgcccctgcacatgcatagcttcccccactgccaacactccccaccagagtggcacatttgttacaactgaggaacctactttgacatgtcattatcacccagaggccacrgtttacatcaggactcattcctggtgttgtatattctatggctttgggaaaatacataatgacatgtatctagcatatatagtatcacacaaagtagttctactgccctaaatatcctctgtgctctgcctatttatcctcaacaccctaaccctggcagcaactgacctttttac

SEQ ID NO: 675322 - DNA, 586 bp, Homo sapiens
atgtagaacccaatcaattcagctatgtaaggaataattctgtgtttctaaactccggccattccctagaactgagaggtttgtttgtttgtttaaagacagtgtcccactctgtcatccaggctggagtgcagtgatgaaatcagcacactgcagcttcaacctgcaggactcatgtgatactcccacctcagcttcctgggactataggcatatgccaccattcccagctactttgtattattattaattatttttttttttttgcagaagcagggtctttgtatattgctcaggctagtctcatactcctgtcctcaagcaatcctcccactttggcctcccaaagtgccaaaattacaggtgtgagccactgtgccaggctgcagaggttttctagggccctgaaatatggagatgtaaagagccaccattatatataacaagaaaatcatatttatggaatagcccaacatttgggtagcctggcaagggaatctatgactctccagcatttaatcagcatagagggctaaataactggttggtatagcatgaggccaamgagcagcctgagatggagaaa

SEQ ID NO: 675323 - DNA, 556 bp, Homo sapiens
ctagtaattttcactcaccctacctacttcacaaacatacctaccttgagtctatctttttagcagagatatctcatattattccatttttaaacacacatatgccaatatatagccatgtataaggacttcaaatacttctgtcttagaaaaatgagattttaataacagtttggcaatttttgtctttggagtatcatttayatcccatcacatcaatagtgagagatacaattcacttttgatgttgggttatactacacggtgttaatattttataaccaattcaaacattacctactctattggcatatatatatctactcccaaatcttttgctaccattaaaaaagtccctgtagacatacatgtttctactcatgtttattgagtttttctcttgaagagagatctcctccacttcacacacataacaaaataggattgttaagtcagagtatgtataattttaactcacagttgttatagaatatgtgagactacatttctccacaaaatgttccagtatacatatttccccatttaatactggata

SEQ ID NO: 675324 - DNA, 614 bp, Homo sapiens
gcagaaaaaccttggttgattaacataattcttacaaactctcttaagagagagcatttggttttgttttcattgtgtttaatcaaaaagttttacacattttatttttacgatcatggcataggctctgaaaagtctccttacctagaaaagaccctaagtaggcactataaataacaagagactcacagrataacacagttggtccgagtgttgtgggttattgttaagttgatttaacattgtctccccccacaaccgcgcttgactagcttgctgttttgcactaataacagtagtagacaacgtttacataaatcaataaaaacgcatataaaagtaacctttagttgacggtttgaacgaaagagtagcttttagttgatttgaaaaactttcaaggaagcctattggttataagcttcttttagtaagattaacttcccagcagcgttgaagtattaaccttcaaaatgcctgagaagaaaatttacacgaaaggaataattttgttttaattacctttgaatgtattaaatattgtattcggtttttaataaaccttataatcaaggttacttttctatatatgtgaaaatatatatatatatata
